United States Patent Application Publication US 2015/0240253 A1 - sequence listing, part 40

SEQ ID NO: 187480 - DNA, 689 bp, Zea Mays
ggaagtagtggcaacagattctggaaggaatgtccgtcgacgaacagaagaggaggatgaagaaggtggcatcggcagttctgatgtatgtcttcttctaggactaataatttgttgtatattaaagtatggaattatggtttgtcaactactttactactatctccactctaaataggtacttctaggtttgttttgggtaaaaaaccccgatatgttaacttttaaccaagtttgtacaaaaataattaacatatatgacaccaaattgaaggacagacctggtagagtggcgagaagcctttccactgagccgtcctgggttcgacgcaccctctctacaaaatacagggggtaaggcttgtctcggttatttttgccctggaccccactcatgtgggagccaccataactgggtctgtcctttttatatatgacaccaaatcagtacattccgaacatatatttcataattgatcaaataataccagtttagtgcttaaatgttgctattttgttctaaaaatttggtcaaatctaacatagttcgaattaggacaaacctcgaagtatctatatggagggagtattatttattgttgaatctggtttatttgatgccttgtaggaagagaaagaaatgattagagatcagcaggaaaaggctcagctagaaagaaacatgagag

SEQ ID NO: 187481 - DNA, 1970 bp, Zea Mays
gggtgcagtggcggtcgtcggagaaggtgctggagcagtagtagggggcgggcgtcgagagtagacccgtccgcagaaacgatcagcaggagctgtcgttctatggacgtcaggcacggcagatgacccaggcggcagtattgttggtgacgatgcgcctgggagaccagccatccggtcaggagactggagcatcggaacatatggcggtaccggccctagcggagggcgggtggggccagctggcgtggcaggtggctgaaatgccacctctgaaggagcgagtggcacaaccggcgaagaagccaccggtgggggtggtggtggcatacgagtacctgaaaaagaaaacacgggcgacagtccaaaaggagctgcaaccgggttagagtaatcatcaagaaagtcgaaggccgctggtgggggtggattggaagcctcagaaaagggaaacgaggtttcatcaaaaaccacatgacgggagataatggtacgattggattggcgatcaaagcataggtaacctttgtggtggggggaatagccaaggaagacacaaagggttgagcgaggggataatttatgtggagtggtggcagaaaggttggggtagcatttgcagccaaaaacgcgaaggtgctcataggatgggttgtggccgaagagagcaaagtgtggtgtagagagtgcgagtgttttggtgggtagtatgttgaggagatatgttgcggtcccaagagccgcagcccaaaaactggggggaacactggattgaaagaggagggtgtggatgatattgttgatggaacggatgacacgttcagccttaccattttgagctgaagtgtaggggcaagacatgcgcagatggactccatgggaggagaaaaaagtgcgggcttgaaggttgtcaaattcgcgaccattgtcgcactggatgctctggatagggacaccaaactgcgtacgaacgtaggcaaagaaattggttagggtggaaagggtgtcagatttgagacgtaaaggaaaagtccataaatagtgagagcagtcatccaagataacaaggtaatatttgtggccagacacactagtgatgggtgaggtccagagatcacagtgaattaactgaaaattacaggtggcgcgtgaggaagaagtaggaaatggtagacggacatgtcgtccgagttgacaagcatgacaaggatgagtactagtatttttattacaagaaattgcggatgactgcgctaaatgtgataaaacggcgtgaccgggatgtccaagtcgttggaccatagggtagatgcaagaagagcagaggccgggaaccgcagggggtatagtggaccagagctgttacatctgaagatctcgcgccgagtgggtagatccttcacagagcagccaaaaggatcaaattcaacagagcaattattatcagtggtaaattgacggacagaaatcagatccttaatgagggagggggaaactaaaacattgtgaagagaaagattatagggaagacgggtggtgccagtggagataacagggattagatgaccgttgccaacgacaatatgagtaggaagatgctgggaagaggggggatgagatattataccagcgtcagatgtcatgtgactggaggcaccagtatcaaagtgccactcttgttgaggcggctgctgaagagtgacagtttggaagttggcagcgagggtgtgttgatcccagacgggtgcaggcgtagaaggatcggcgtaggcagggggcggcccatatgctgcagcgggaactgcccactgaccaggagtgtcggcgacgaaggcatgcggtggtgggggcgaggcagcaggcggacgaggagtcgaaggtggacgttggccaggccacatgtagatggcccccgtccaagggttgtagtagttgtagttggaagatggtgcagggccaatgatgccgct

SEQ ID NO: 187482 - DNA, 348 bp, Zea Mays
cgagtttatttcagatgtgggtgacagtgaatgggtgaagttttattcagacgcatcgccacagatgggcgcaggaagcaaagtggtcatcgtgagcaggttccaagagatagcgaggtttggaactgtaaagccagttgtcctcagaagcctgtcacaagcagagttctcctacctcttcaaggcactcgcattcggagggacagatccagagaaccacccacagctatcgtcgatagctatggagctagccatgaacgtgaacgggttgctccttgtagcgaatacgctcgccgacttgctgaggaagaaccaaagcgtcaggttctggttccatatgctgaagag

SEQ ID NO: 187483 - DNA, 665 bp, Zea Mays
gtggaggccgttaacaaatatgctgcatttcttgaggaaaatttctgaccagcaaaattatagcctgttcaacacgctggaacattctcctgagtttgatggtaactcgttgtgctctgtatctagacaggttgaagaattgttgaatcaagaacaaactaattcgctggatgatgtagcaaccgcattcttattttcaatcatatgtgcacctccaaaagatgttatcagtgcctttccagatcttcttgatttggtgaaagcacattttccatctcatgttgctttcttgtcatcggttctttttctacaacatgattatctggctaaagttgctagttgttggccagatatattcttcagcagcatcagactgttcaaggatgatatcaatgctgaccatgcaaacacagttgaggacgaatgccagaacctctctgtttcaacagaatcagctccgctaagtacatttttaagtgtcagtcccttctgtgcgcttttaccttcagtattgagccttgcatgttcttcgccagatgaaatcatggaagcacataaggatgcacttctaagactccttgaagttaaattgtctgactgcacattcagtgagcttaccttgtatctgagagtcatcttgttctggactcatcacctactgtcat

SEQ ID NO: 187484 - DNA, 384 bp, Zea Mays
tagacatatgccttgcttgcttgaacatgcaagtcaatgaaatgctgcttcaagtatgatatgtactgatttagtaggggcagtcaacatcgtataaccatacgaggaaaaatgttggggcagccttgcaaggtgaagaggcagggtaacatgcagagcaactacacattgacgtcttgtagatcattttagaggacgcagaacaatagcaggccctctagaaacttctgcgtgctttgcagtgccttaccagccacattgcggaagcatgccatgcatagaataggttgcttgtacgaaatcattatgttgcttgtacaaaatctttgagtttgatatttaacagaataacatagacagggacattggacaataggttatcgg

SEQ ID NO: 187485 - DNA, 500 bp, Zea Mays
acctttcattaacccaagtgtttatgccttatagctaaatcctaacaacctggtaacgaactcttgcgaaacctgagaataatctaacaaactaatcctaatcgcttctagaagccgaaggttgctggtcacagcgtggtgatcgctcgctgcacctatatcagacaacgtcattgcggcggcttagccatgattcttcttgcgctgatagacttggcccaccataacatctctcgtccctcgacaaacagcttgtcctcaagctggaatgatggatgagttgctcagaacgcttgactcccaagtggcttcttccagcagctgcccatcccattgtaccagcacgtgccacacacccatgtggagctgtgtgcacgacatgtatagtgacctggaaggcatgtccatgctacatcggacggaacatcggtggaacagctggaggtgtcccatggaacggcttgaacacccctccatggaagacatcgtggatgtgcgcc

SEQ ID NO: 187486 - DNA, 326 bp, Zea Mays
tgcaaatattgcctccacctgtccactgcaatgattagagccaaaaactctttttcataaatggagagcatcttattcttagcacccaatgctttacttagatatgccactggtctatcacattgcatcaaaacagcacatatcccatcatcacaagcatcagtctccacaacaaataactcatcaaacctaggtagggccaacacaggagtagtaagcatagccttcttcaacgcttgaaaagcctgatcagcctcaggactccactgaaaagccttatgcttcaacagattagtaaggggttttgcaataatcccataatgtct

SEQ ID NO: 187487 - DNA, 290 bp, Zea Mays
gacgtcgcaagcagtctgcctggacctcacccttctagacaccaattgggataagcacgacgtgatatctaacatgtagttgttgttcatccatttgtctttccagaataaggtgttcctgacattacccaccattgtatacatggacaaactgaagaaagcctgtacatggggtttgatttggattgatagcttgctccattctcgctcttgatcgatcttttgtagccataggataggtatgttccaagataggatgaatacgttatccattagaacctacaaccttg

SEQ ID NO: 187488 - DNA, 444 bp, Zea Mays
cgctcccctttgggcgttacatctggttcttgcctcgattttgcgttgggattacgggtacgggtgcctaccgaaggggttggggttggtgaggaaatgactcgttcgatcaggctaacgcgtctttatgcggtattgtataaatttccttctgtttcttgcgcactagaccgcactagtggagattgattgtgcgtgcatggggcctttgatgatcaagtaaagcagttgaaacagcgtccccttggtgttggaatcatgcgaaagatcatggttcgcccctccaactggcaccttccggcttccgggccttgtactgttcctcagcttaacaagtaggattgctcgaatcatgctgttcatgtgttgttcagcggcttggaattcggggggcgtgcttctgtactgttcttgactcttgtggtgttgattgtggaagcggcg

SEQ ID NO: 187489 - DNA, 299 bp, Zea Mays
gtatgtttcctgaagattatgtgatcaagagggattatttggtaagaaggtgggtagcagaaggatttgttagtgcacatggtagaagaaatctggacgatgaaggcgaatgctattttaatgaacttatcaacagaagcttaatacaaccggtagattttcagtatgatggtagagtatatgcatgccgggttcatgatatgattcttgatctgattacatgcaaggctgttgaagaaaatttcataactgttgttactaatagaaaacaaatgttgccctcacatggcaaggtccac

SEQ ID NO: 187490 - DNA, 499 bp, Zea Mays
tctccctgcagaggtcaggaacggcctcgagaccctgaagcggaggaggctcgagagagtgcgtttgagtgctcagaacgaagctggcgacaatcctgctgtggctgcgagaagtggcggtgatgccttgcggagccccgctaactgtggagtcagattgcattccaacaacagtacaggtttacctggaaatgtccatgacaagagtccttttgcaaagcgcaaggtggagaagtttgatatgtccaaccttgagtggatagacaagattccagagtgccctgtgtattgtcccaccaaggaggaatttgaggatcccattgcatatatacagaagatttcacctgaggctgctaaatatggtacagttgctttatttagcaaaatatgtatatgatcatttttcactcattggtccaatggtcttgctagacattttgaataactatgactgttacttatatttcaggtatttgtaaaatcgtctctcctgtatgtg

SEQ ID NO: 187491 - DNA, 580 bp, Zea Mays
accaaaacttctggatccattggtgagcacccaccaaccgcagacatagggggcggcgaaggaagagggagctccgtagctatggcatcaggtcctctcctccacacctcatctcttgcccgcagctttgaaacattcgtatcgtggaatccaggtgagtgcttcctcttcttgcttgctggcaacgcacctccatccctgcagaccccaagacccccatcctccctcagcactcgtgggcgcccaccagactccgagccgctatcgcttgagacctcgctaggctccttatcgtccttcctttttgaaggtcggctcatcagtggcgcatacggcgagcggtggcggatgtactagttgtccacttcacggcccctgctgccatcacggtggcgatccgcaagcaagaatcccacagaacggaaagcaaagtggagcagaacgccgggatccgcagagcacgtacctgggaaccgcagacgagcagaacagctctcgctagaggacggcgaagatggtcgaaaccctagccgccgctcccttcagcgataggaagggatcacgagacagaggacgcgcg

SEQ ID NO: 187492 - DNA, 620 bp, Zea Mays
cagggcggcgcgaggcgatggtgtcgcttgacacgtcggtagacggcgcggtgaggtttggcgacggatcactcgttgctatcgaaggtatgggatctgtcatactccaaacgaagaatgggcacaaggtattgactgaagtctatttcattcctaaattgaaaagtaatatagtcagtttaggccaattggaagagggtggatgcaaagtagtgctacaagatggtaactgtaatgtgtttgatgtggaacgcacactgcttgctcgggcacctcgtgctgggaaccgtctttatttgctgaaattgcatctatctgctcctgtttgtttggctgcaaaaacaactgacaaggcatggttgtggcatggccggtatggtcatctcaatttccgagcactacgtgagcttggagttaaaggaatggtggaaggattgccactgctagatcgtgtggaagagttttgtgatggctgtgcacttggcaagcaacatcgacaaccattcccacaagtagcaagctacagggcagaaagtcaattggacatgtttcatgctgatctttgtggccagatcaagccaaagacaccagggggtaagaattatttcctacttttagtt

SEQ ID NO: 187493 - DNA, 423 bp, Zea Mays
accgtatgggcaaggaatggccgatagtcgagagaggacgtcgtggtcgaggtggccaagacaacggtgccaagtggaggtaggggtagtggaggcaagggcgtagggttggacaaaatgggcagaggaaggtggggtagggaagcgaatagggtataggggactggaactgtcgtagcgagcaaccacaacacgagtggtatgatcccgtatggtgagtccccaaggatcgaactccatagagcaacagttgttagtggtgaagtgacagatcgagaggaggttctggatgatgttgggggcaacaaggatgttgttgaggtacaacggaccaagaaggaccatgtcacctactgaggtgacaggcagagtcgacctattgtcgatagtgatggaggaaggggaggtggggttatggggatg

SEQ ID NO: 187494 - DNA, 494 bp, Zea Mays
ttcaaatgcggcgggaggtcaaatccggtggaatcgacgagctttgatcaagatcgattagggattttggggctgggtcatcagagtggccccaacggcttggacttgatctgagattgggtggaggcgagagaaaaattaagcgattcaggtgagggagttagcacctaggggcagcgcgacagagcatccttgtgcgcacggaggggttcaagaggaggtagcagcgcttgcgccgcacatcgacagtgcaggccgcagagaaggaaacaacacggagcacaggggcaatacgtagctacatgtgtggtagtgtatgcctctgtattagtctatcttcctcgtgcatctattaaaagaatatttagataaagaacaaaatgtagacacacttatagaaaatggtacatctcactcacaatattcaacaattaaccctaaaccccttggtacataaatgatatgaaataaagtaaaatgatgacttaggtctg

SEQ ID NO: 187495 - DNA, 398 bp, Zea Mays
ggaaaaattcaactggcataccccacatccttgaacatagtgttctctgcggatcaagaaaatatcctttaaaagaaccgtttgtggagctcctaaagggtagtttgcatacattcctgaatgcgttcacatatcccgatcggacatgttatccggttgcatcaacaaacactaaggtaagacctaatggccacaaatgtgcttgcatcatttgttcagaaactctttgtttaacattatcattgtatacttggttgctttccaggatttctacaacttggtagatgtatatcttgatgccgtctttttccctaaatgtgttgacgacttccaaacatttcaacaagaaggttggcactatgagcttgacaaccctgaagaagagataacatacaaag

SEQ ID NO: 187496 - DNA, 333 bp, Zea Mays
gaactgaatgtaaaaccaattaagctatagcaccacaatgataaaattagatggtggtcattgctccattaccaagtaatactcatacatcagttgaagtcccttgaatttggaatatcactagagggaagcaaagcatgatttaggagagaatttgacctggttcaaacatggtttaggtgttcttgagtctaattcagtcttgggctaggctaagcaccagttactcatcggtcaagatattcttaaggaaggtttgggataggttgagtcccatgttgggattgtaccatgttgcagtattaggctaatccacaactgggcttgcaaaat

SEQ ID NO: 187497 - DNA, 315 bp, Zea Mays
ttaagtcagatttgttggcagccattaattcactccatcagggaaatactcacaagttggggatgctgaattcagcttatttagctcttctccctaagaaagttgatgccttgtctgcaagagattttagaccaattagcttaattcatagttttgctaagttggtcaccaaaatgcttgctaatagattgggaccttacctacaggagttggtggcaactaatcagagtgcctttgtgagaggcagatcgattcatgacaacttcatgttggtgcagcattcaattaaatctctccacaagaagagagtctcta

SEQ ID NO: 187498 - DNA, 357 bp, Zea Mays
taatacctctgcttcgctcaagttgcctcctctacaaaaactagtaatagctacaccataggtgagtgaattaggctccaacccttgattcatcatgtgctcaagaaggtcatataccttaataacagtgccattcctgctatacccactggccaatatgttatatgttactacatctggttttacattttccttcagcatctgctcaaatacttgccaggcattttccatttctcctttcagacaataaccattgatcaggcatgtatagtggattttgtctgggaccaaacctcccgccatcatttcagttagtagcttaactgcctcattcatgttcccaagcttgcaataagc

SEQ ID NO: 187499 - DNA, 417 bp, Zea Mays
cagaggtaaggtcgccaatgacgaacggcctgaaccaagccaatgagctcgcgttcatatgcggtgagcttgatatgccatgctgcaaacgacctactgaagaaagccaccggacctgctccttgatgcaaaaccgccccaaagcctgatcctgaagcatcacaatcaaccatgaacagttgttcaaaatttggtaattgcagaactggtgctgtggacagagcttgtttgagttcctgaaatgctgtattagctgcagcccccacgtgaagccctccttcagtaatgtggtcaaaggtgctgcaattgtcccaaattttttaatgaattttcggtgactgcttctaccttgctgaaaatcctagaaatccgcgaagtccctgtggggatttagggattggccatgacgtgactgta

SEQ ID NO: 187500 - DNA, 444 bp, Zea Mays
tctgcttctagaattgagacgtcaatacccagagatggcagaatgatgcaggaaactaatacactacatatgtagcaacaatcaacacaaaaaatagattctaaacagattcctctagtgtatttacctttttctcatgccccggatgagaatactggccaattgtgtggttgtcatgattcatcactcatgccgtcaaatgagctctcacattaccgaaagtcaaaagtcttgcacaagaaataatattactggtcataacctaatcagtaaagacaggagagtgctgacatcaggagtccatccttacaactcaagatttgcagttttcttccaaaccagaatacctacaaaagatttcaacaccgaaacattcctgacaggatagagttgctggtcaagtttaaggcaaaggattcaacattgtatattccaagtttccaa

SEQ ID NO: 187501 - DNA, 659 bp, Zea Mays
ctctctcctctccagggagttttctgcgggggttttggttgggttttcttcagcgccagccgtggatgtgtttaacgcaacagtattagtttcttcatgatcagctgtgtgtcctcaaattgagtttcgtgccgtgtaccagtcgcgcatgttccccagatcgattaaagtttcttcgcgcgtatgtatgagctctattcgaatgttctttgctctgaaaagattccccctgttcatggttacagaagggcctggagttgaagcacgaatcatcgaagcgcagcaaaactgagacacacgtcttacttcttcacaagtactgtcctctctattcatcatttagatgtatcatcaaattgacatagtaacctatgattcgtgcagtgaaactttgtatcgagagtgcatgtcttgatctttattttatctcactcttaatgacgtggtagcattgaaaacgacgcgataaaactaactcttatgttggccaggttcttggacgatggacatcttcgggagcccattctgctccaagcaagccgtcgcctcatgcggcggatggacggacatactcgactcctccagctgcacgaaccatatcctggaaaccggcaccgccgctctgatcaccgtcgctctcgcgctgcacctcctcgtcg

SEQ ID NO: 187502 - DNA, 454 bp, Zea Mays
cctagctgcaagtactctctgtgtcatccatcttaaacgtggtgcgcgcctttgcttttgtgtagcttagagttcacaggcaacgcaggcagaatcgcgtcttttacttggctggtcatccatcctagcttctgctcagtcttcacatgcatccacctgaccttcattgcaatgtagtcaggcatcacatgcacgaaaacaaaggtgttgctataaataccgcgcttagctttgaagcctgcagagccctgtctccatatttgctcattgccaacaaggagaggacagcgggtaaactacaccacaccaatggcttccagcctcgtgaatctgctcctcatggaggtggcggccatcgtcagcattgttctgctcgcaatcctcgttgtgctcagctcttacggccgccgttctggccatccggcactccgcctcttcgtttggtccgcatcca

SEQ ID NO: 187503 - DNA, 295 bp, Zea Mays
ctcatactcaccacctctgacacttgccagcagtagagaattccaggcaatgtgaaagctctcctcatgctgccattgctcaaataacagatgcgcgtctccagatcggccacatttgatgcacatgtcaatcaacgcagcatcactccatggactagacacacatccacacttgatcacaaacgcatgaacctgctcgctcaccttcctatccgcagcaatagcacaagcattcagcacgcctgtcaccgtgacatctgagatctccagcccatcctccaccatttgcctaaac

SEQ ID NO: 187504 - DNA, 589 bp, Zea Mays
ggcagttggagctgctgaaacacgacatggagagtggtcagtaacaagattacgttctgctgcacatggcactgcttatattgagagcttaagtttgggtgttggaccaaggggtgggcttggagaacagggcgattctgtctcttgtctgcttgttcttacaagcacttcacttgttgaaagacgtccagagaactatgaggtagaaattttgtcctcaattttatatgaattgttaaaactcttctccctcgagctattggcaatccaagacatgatatcaattttgagtaccaacaccctacccccgcctaacacaaacacacacaaaagagagcatatgataggttcttacttgtttgcactgaatttctttccaggctgtcatagtacgaccactctcagcagtaagtgctcttgttcgatttgtagaagaaccacagatatttgcatttgaattcaatgatggctgcccaattcatgtaagtacatatcatacaggtctctatcccattacaggaaatgctatgtaattattctgtgtttttctcaggtatatgcaagcacttcccgtgataatctacttgca

SEQ ID NO: 187505 - DNA, 779 bp, Zea Mays
gtgggcgaccagtgtcctgcggcgcctcaagcgagcgaggtggacgagggtggcgccgcgggcaaggagcggtctgatggtggtctggcgaatggggcagttgagggcagcagcattgcgggggaagtgccagatgtggctcctgtggtatctgaagcacggatggacgaggacgggggttgctccacaggcaatgagtactctgaaatgaagatggaggtggatggcggctgcgtagcagaacgagagggcgatggtcaggaacaggaacaagagtgcactgcagctgctgtggaaagcgaggttaagacgggggaaggtgacggcggagtggtgaatcaagggactacggcacatgctgggggtcttcaggttaaagaggaggtgggggaaggcttggtgggccgctacattggacgtagcgctccagggcgcacgaggattcttattgggaaggttgtgtcctatgatagcacagctggggtctacagcctggtgtttgaggacggacacgctgaggagctggggcttcctcagctccaggagcttctcatgtcggatgataatggtgcattaggcatgaaggtgagctgccggaagaggaagctagacttgctggtttcatcagggagcgccttggaggtcaaagagccaccaagtactaggcagagggttgatggatgcgagatgtctgccaggcctgatgagctgcagcatagtgcgtctggctcggatatgtctgaggatgttgagtcttcgagcaattcatcagatttcac

SEQ ID NO: 187506 - DNA, 409 bp, Zea Mays
gtcagaatccttttaagtggggtagtattcttggcagacttaaccgtcttgccatccaaaggaattgatgtgatcttagggatggattggctaactaaacacaaaggcatcatcagttgcgcagacaagacagtccacctcaccgaccatcagggaaagtcagtctcttgtcaggcccagccacccgccaatgacccaatgatgttcagtctagcaacaggaagtataacagtggtagaggaattcatggatgtgtttccagaagaattaccaggaatgccaccggaaagagaagtggagttctacatagatctgatccctgggacggcacccatcgcaaagagaccataccggatggctcccaccgagttagcagaactgaagcttcaaatcgcagatcttcagcaaa

SEQ ID NO: 187507 - DNA, 1826 bp, Zea Mays
gctcaacctttgaacagttaaatatactgcttttccagatatttgtatctcgagacgggggtaataagaaatactcatcagttttggctcctggacatcatgaaggtctgaagtaagtcacccatcctgttatgtgtgcttaaagcttgccatcttatgagcagattatcatgttaaaatcatacacaaaaacatttgctcaaagttactgtttactttatgtcctgtgcctacccttttcaatttgcctgtttctcttttttccatatttacctcttgagatctatatatacggaacaacttttatctgtatcaatatattttgttatagttctgccaacttggcgattgaaggtcaatatggaatatacttcctctaggttctaaatgataatatatctattgcaattggtatttagttttggttctagtaaggtactatattggtgggagtggcatgctgatcagattaacaacttggtcaaattttgtgcttttcatgctatctattctgtagaagtaccttaattgatgttttatgcgattttcaggaaaaatagtgactctggaatttcttcatgggactggaatttaagtggtcaacactcgacctatcatgcattgttccctcgggcatggactgtttatgatggtatgccattgtagatctatggtaacatgcttaaatttgcaacctacgcaaggaatttgttgtattttttaagttcttaccaaagagactgttgttttttaatagggcactgtaatgctaatgcaataaggtggcagtgtgttgatagcacagtgatttcgacccctttaagattttcttaatttgttgcaggtgaacctgatccagaccttaaaatctcatgtcgtcaaatatcacctttcattcctcatgattacaaggatagcagtcttccaacatctgtatttgtgtatactgtaagtggctaatggaattccgtttatgctgagttgaaaattcttgcaggtctacattttgtactttcctgtttcctattccctagcaagacattttgaaaagcctactatgcatatttatgcaagatatttcctttaaaatggagttcacatatggccattcaattaggtgctgaaatatcatctttgtgtaaactctatttcaatattttgtaactagtggaatatgaaatcattgtcgccttacatgaaatttggaaatgccaattgttgacgaataataaatgaatagttcaatgacggtgtatctgccaattgagttttgctatttattgtagatgattttgatattaaaatacccttttgctccaataagttacctaacagcctttctatttggtggttcattgcagctagtaaacactgggagagatcgtgcaaaagtaagcctgttaatgacatgggcggtaagtacaaatctaaaagtttttaatttatgcagtgtattttttttaatttgtgcgctatctgatgcaaaatttgagctaagctatctcggttttattaccatgatgatatgcatagggtatatctgtttacccagtgtccaaatctcagctcatcgatgatcattagggattatcacccttttgatccgctctaaagtttaggtctattatcgcagttgctttatgctcaattcaggatacactatgttgcaaaaagatattagatactatctaggtttgaagtattgcagaagtcaaatgtcagtgtgcattaaattattattcactcgaagcgtcctttagtgatattttcttaatgacagaattctattggaggtttttcgcataattcaggaggccactacaatg

SEQ ID NO: 187508 - DNA, 347 bp, Zea Mays
ctggcatcggagaggatgttcccggggagggtaccgtcggtgctggagtacgtggtgacggagagctcgctggagccggagtcgtggctggattgcgtggtggcgaagagctcgttgtagccggagctggagagcgtggtgttggagtcggtggagacttgggggctggggtaggcctactcgaagaagggtcgcctactcccccggctccctcaaagtggacgtactcggtggtgaagtcgtcatacgtcggagtcgtgtcgtcgtccaccgccttgtcccaggcccatcctcgcccttcgttcgaacactacatcgcgcgtcgtgcgcacacacagtgttcatgg

SEQ ID NO: 187509 - DNA, 896 bp, Zea Mays
cgtactgataattcacatgcagaagatgatctacaaagtgtcatcagttatctgcgcagatcgaaagaaatagtaagcattggatttggaggctttgtctagtattcagtttgcactagatgtggttcttattcagcctattgactatttcaggccgaaacagagatatcattgcttaaacaggagaagtctcggcttcagatagaagtatgttatgctagcacctggcaacctgccctgcatttgtccttattcaaaatgcttttgaatttaaaaatataagattccatgaggaccatctattgctggttaaaaaactgcagcacattctgccagatgcaatatgccatgttgaccatataattaaaaagttgttcgatttctgtttgataaactgtgcattggttcagtgtcgtaggatctatgatttttttttgctgtgcgtcatgttgccttctagttggtgtcaaaacaccagctctactggcaattgtttgtttaaattgacgcctccctaataatagccaatttgctctggaaacggtgttatctgctatatgcgtacatgctctgaaattgatgaccctttttaattcatctgtcttcaaggaaagggggttttttatagactaaattcggaatgtttggttgggacttttgtgttagaagtagtatttgatggagcatgtgaacctccattgtagtttactttacaaacttttttggttgaatgtattgatgtctctaatttcatatgtttctttataatggtaatacagctggaaagttctttaaagtctgccaaggaggcacaggacttgttgcgaagtcaagctgatagtgccagggcattgatgttcaaggatgaagagttcaagtcactgcagattcaggtg

SEQ ID NO: 187510 - DNA, 284 bp, Zea Mays
cctcggcccacctaaatgctgtcgcgccagcccacctcatgcactgatagcacttccacatgggacccacaggttagcaccgtcttcatctctccccctgcatcggtcaggcatgcgttgtgctctctaacaggtggacccctttgctcagcctcacctaacacccactcacgtacacctctcctatttcgctggctggtggaccatctctgtcaggactgtccctgacctcgcggattcggtctcaacgaatctcgcgcacaccgcgaggctcaacatccgcg

SEQ ID NO: 187511 - DNA, 552 bp, Zea Mays
gatgagtcgtcggagagtgaggagggcggcatgtcttttgaggaggagtaagaaccacccctccacgttcgcttctccgacgacgacgacgacaacgatgacaatgtcggccacgggtctagcgacaccaacagctccagcggcgacgtcgacgacgaggagagcgatgataccggcggcagcggcgatgatcccgaagccgatgtgtctcctcccccgaatcgccacaaggtcgtgtagttagtaggatttcccttcggtagtagtagcatttctggaacaatggttcttttggtggtgttcgtccgtcctggccgataaatcgatcgtgtaaagaacaatcgtacttttaacctatttaattactatttgcttagctaatctccgttcgtgtgtgtgccctttttggattttgagagccgacggcagcacatcggcttctcccccctccgtcgccggtaggtatacaaacatgatagttcttgagaaggatggctcagaagagtggctcagacctatcaatctcaatggcaagccactggcatagccgat

SEQ ID NO: 187512 - DNA, 774 bp, Zea Mays
ttgttgcgctgattggcccacaatcctctgggataggccatgtcatctcccatgttgttaatgagctacatgtacctcttctatcatttgcggctacagatccaactctttctgcatcagagtatccgtacttcatcaggacaaccataagtgactacttccaaatgaatgctattgctagcattgttgattattatcaatggaaaagggtgactgctatattcgttgatgatgattatgggcgaggtggtgtagaagccctcggtgatgcgcttgcattaaagagggcaaagatttcatataaagcagctattcctccaaattcaaatacagacgtgatcaacgatgtactatttaaagcaaatatgatggaatcaagggtcatgattgtgcatgtcaatcctgacacagggatgaggattttttctgtagctaagaacctgcaaatgatggccagtggctatgtctggatagtaactgattggctagctgctgtccttgattcctcagcaaatagaggtcttaaagatatgagtcatattcagggactaattgttctgcgtcagcacattcctgaatctgaagccaaggataagttcatatctaaatggaataatgtggctcataacagaaatattacttctggcttgaactcgtatggtttttatgcttatgactcggtttgggctgttgctcgtgctgtcgataaatttctcagtaatgggcaacagatcaacttctcaacagatcccaggttagaagattcaaatggca

SEQ ID NO: 187513 - DNA, 333 bp, Zea Mays
tcaccatgcactccgtggactcaggcatgcacctgaccaactcaaaacgtgacagtaaagtaaattaacagagctgagcaacaagtttatcttctaacaactaggtctgacatacatggaccctgatttttggacaggttaacggaaaccacgaaactatgaatgtggaaggtgatttccggtactgtgatccgggaggctttgatgagtgcatgcgcttccttgactacttggatgaatgtgatggcaactgggataacgcatttctcaactgggtaaatgtctgtgaaagacggaagaaagagtatgtagctttgcctaatggtgactggg

SEQ ID NO: 187514 - DNA, 374 bp, Zea Mays
aggatattaaggaaattatccagcgccccatctggtctcgcttcggcctccgaaggccgaaggtggttattgaaagtgacgtcgaagcatgccagaaggcctttagcaatgtttgtgctttcattggcacaagagatataatccaagagcacatagcctatagggtgtggccacttgtggatagctgggaaatgccgaaggatactactgttgaatccagtgaaggtggcctagttcgattgaaatataccttcagatatagagagaagttcgacgaaccaaatgatgactggttgaaatgcattgaagctaccagcgatgagctacttgggacatattccaaggccgaagatgatgccttgtccgcagccttc

SEQ ID NO: 187515 - DNA, 709 bp, Zea Mays
gcctggagccgggggaaatggctgagactctgcacgtctcttggttctcatggcgatcttctcgggcgtggtcgcggtggcggtccctaggaggcgactgacgctgggcatcatgccgcctctcctaagccgatcggcctggtgctgggctgttcgtagaagctaccaccgactctgtcctggtcacgcggatgcgtgctagtgcaccatggtcttgatcgtactcttcccgctgcctcatctcactttcatgtcggcaatcgcgtgaaagcattgatgttgctctacgcgtctcgccgactgttgatgacgtagcgcatgtctagtgccggatgggcggggggaagaagatggttcatcgcctaggtgtgcatcagtcgataggcttctgcgcctaggtgtgcatcagtcggtatccttggcgatttgagcctgaactccgttgacttcactcaacgtgttcagggctcgagcgaagtcgggcagcagaaattggggaaggagtgggttttcgcgtcggagcttggcatcatgctccgcttgttcccactcgctcttctaggtgtggcaacgatcgcgatgtcatgaattgcggcgttcgtggagcgccctgtcgtcaggagtctctcctgcttcagacgcctcgttcagggaaacaggctaagcaggatcccattccccttcctcatggttacgccgcatgttacgg

SEQ ID NO: 187516 - DNA, 283 bp, Zea Mays
cgagacgttcctccgctgttttgttaatgcctgcccaaagaagtggtcctcttggcttccaacagcagaattctggtataataccagtttccattcggctttggggcgttctccttttgaagtactctacggtcgcaagccccgttctctaggcatttctgttgatgacgctgcccccgcttcattgtctgattggctccaggagcgttctcacatgcaggatctcatccatcagcacctggttcgctcgcagcaacggatgaaacgtcaggctgataaaaac

SEQ ID NO: 187517 - DNA, 439 bp, Zea Mays
ttgaggcttcttttgatttgtcatttgtcatgttcccttatcggtttgcgcccgcaaggtgtttgtactaaaatcctaagaagcagcagggaataaaagagatggtatgggtggtaactccaccaaatattagtgcaaggtgagcataaacacttttgcacagcctaccaaacaccagactctctcaagcccagctccatagatacatcaaaccaacaaggccagttgtaccaactgaacctgccttatcttggtctggcctttttcatccatatgggccacactcatccagtctagcagtcacgccattaatcacgccataaattcaacatagactttatgctaatgcttttcaactgttaaagctaccgcatgatgttcatgctgttaaaacaccatggttagtgtagcagaagtctcacggcaatacagatattac

SEQ ID NO: 187518 - DNA, 375 bp, Zea Mays
cgacgatgaagagcatggcgaagtttggcatggccagaaccgaggctgtggtgaccgcggtcttgagggccacgaacgccgcggctgcttcgttgtcccaagagtaaccttcttgaggagggcagtgaggggcgctgtaacagtgccgtagttgtggacgaacttgcggtagtagcctgctaagccgaggaagccacggacggctcgagccgaacgaggagtcgaccagtcgaggatggccttcacattagctggatccatggcgactccatccgcagatatcacatggccgaggtaggcgactgaagaggcgccaaaggagcacttggctcgtttgacgaagagatggtgatggcgtagctcgttgaggacggc

SEQ ID NO: 187519 - DNA, 770 bp, Zea Mays
ctcgaggttaaaacctgaagaacaaggagcggaggatggcttatttgcctcagtggaatatgttgagcaaacacatcccaattttactgaggagaaagtagatggttctattcctacaccagcaagttcggagcaacctgatcagttggaggtggttagaccatgggatgatgcgccgaatagtaccctaaggtcaaagcctccatcaaactactcacagccaatgcaaggatcagatctagatgttaggaatatggatgccttggatccatctaaggagtggttggactcaaggttattgtcaaatacggtagagccatcaagttcctcaaatggaggaggcacatctgttgagaaagacaacattgaaaaaacagaacgcttgtcaggcattgacaccgtcacccctggactggataatgtccagggatcaaatccctcagcagagccatcaagttcctcaactggagaaggaaactcagctgttgaaaaacacagtgctgaaatgacagaatgcttgttaggcatgggaattttgaaccctgcactgcataatgtccaggtattgagtccctcgacaccaaaagaatgcttggtttctagcgcagacaagtcagatgtagcaaataggtcagatgaaattaatcacagtctcgatgattttaaccaaagtaatcccaagccagtgctgaagggaagagtctccaaaatgatgtgcccaagacttgcgtttcaactgccaaaagtgttgcctgtatgcgaacatcaca

SEQ ID NO: 187520 - DNA, 332 bp, Zea Mays
gatgggacaaagtgatgcgggtcctggatcgcctcgacagtatgttggaggcgatggaggtgaagcagaagggtctgcacgatcatacgtgcaacgtggaagcagcagtgcggagcatcccagttttgcttggaggtatggcccctcctgtgttcgatgaaatgcccccctactacagtgaggaggtcattgcccttccaaggtgctttggaggttctggttattcagtgttcgatgaaacatctgctgagaaggtggtctgggatgaagaagtgttacttcgttccgattcacttgatttttggcagcgtctagctcatggaatggggaac

SEQ ID NO: 187521 - DNA, 625 bp, Zea Mays
gttgagagttatggtggaccagctgcctcaggttgatatggtggactcgtgtcactattcagacctgaatggcgtcgcaaagtggctgcaaagcaggcagctttgaggatggtggcagaaattcttgagaagaggattgctcacccacagtaatatcttgcaatcacggtacatttttttgagcttatacttccacccactcacatccattttgtttatgtccattcaaaaccaggttgacatactttacatatgttgaaaagttccttcctgaggatgatccagaagatgtgattgctttggagtacaacctaattggcagtaagcagatttatgaagcatgtgcagatggcgaaatgagaagcaatgaccaagtgtactactacaccatctgcatagctaatgaagacaagctcttcaggaccgaagctgccgattacagaattttccttcctaccaatctgtcagtaagtagtagcatttttgatttttatagtatgcaatatgcattagttttttatacctttttttctttctaaattcttcatttatcaatatcttttcagcaccagctactatgtacagtacaacagggcatgtcttgcccttctactcattgccctgc

SEQ ID NO: 187522 - DNA, 409 bp, Zea Mays
gccgcagatagtggtggaaaagatcgtgatctaaagaagaggatgaaatcggatccatattttacttatgctatcaaggaatgctatgcttctttcaaaaacatcatatatgaactagtgatcgattcacgagagagagggtacatttgacattattatgctttcattcatattactacacccttgactgttaagggcttgtttgcttagaaggggattcccctcaatcccctccaatccccttctaagcaaacaagccctaaagcttaagttttgttttgaacccaattgataaagttgatatactatgcgatattttcagttacatacaaaagatcttcgatgcggtggatgagcacatagcagaagagactttgataaaggagctgaacatgagtaaccttcctac

SEQ ID NO: 187523 - DNA, 541 bp, Zea Mays
ctctcacacagaattatttaagcagtcgcttacatgggcctcacgcccttacacatcatccggcccacacggcccaacaccttacagaatgttgaaaattcaaaaaccaatcgatgtcgcctcctgtcgctggaccggccatgacatcttccccgccgccatgaattgattgtccccaatcaagagcctctggaaaccgagtcttcaacacatcaatatcttcacaagtagtagcatcatctggtagctctgaccaggccacctgaacttgtaccacaggcttgtgacctcgccgaactaaacgacgatccagcaaccgaacaggatgaacatcccggccagacaggtcgaccaactgagagatgtcagaaaaaactggtgtatacttgggcgtaaatggtttaagctgagacacatgaaacaccggatgaaccaaagccgtagaaggtaaatccagcttataagcaactgatccaacatgttgtagcactttgaagggaccaaagaatttaaaagcaatcttgggatgagctcggttgac

SEQ ID NO: 187524 - DNA, 1199 bp, Zea Mays
cagttcaactctttgaggatttggcaactgtattttaagcattaagcttcaacgcagaatttgaaattggcggggctgttgttcaaagaattggagatggacaggaagaattgtcctccatcgccatcgccaagatcgaccgagaagtctggaagagaattgagatctggggaggccaatgtcagcacaaataccaatagcaacctcatcgcaaaaggtgacaaggagaaaggagtcaatgtgcaagtcattctaagatgcaggtggagagggctcagtagttaaagcttaaaagttctgtctaattttgtttttgttatcacaatgtgtgatttgatacattcaggccgttgagtgatgaagaaacaaagtcgaatactcctgtggttatttcgtgcaatgaccgtcgccgggaagttgccgccactcaaattattgccaataagcagattgatcgcacatttgccttcgacaaggtattatatcactttgtcgagcaatttcttgactgtttcgttcatacttagaatttacctagtcttgtttacttaatctctgtgtgttttgacctagatttagttaactatttcattttgagtaggtttttggcccatcgtccaagcagaaagatttgtttgaacaatccatctcgccgatagtaaatgaggtccttgaaggttacaattgcactattttcgcttatgggcaaactggtaccgggaagacttacacaatggagggaggtgggactagaaagaccaaggtaaatattttgttatgcatataatctgaaggtgtagcttggatctgcattttaaatgttataacgggttcttccaatgtccactagaatggtgaactcccaactgatgctggtgttatcccaagggctgtaaggcaaatctttgacattctcgagtctcagtgcgcagagtatagcatgaaagtcacctttcttgagctttacaatgaagaaatcactgatctgttggcacctgaagaaccaaaattccctgttcttgaagacaagacgaaaaaacctattgcccttatggaagatggaaagggatttgtttttgtgagaggtcttgaagaagaagttgtgtactcagctggcgaaatctacaagattcttgacaagggttctgcaaagaggcgtactgcagaaacattgctgaacaagcaaagtagtaggtcac

SEQ ID NO: 187525 - DNA, 920 bp, Zea Mays
gtccttcagctccatcgtcgatatcaccttgcagtgctccaagcccgggagactgcacagtttcgggcaccgtctgagcgccagcttgcgcagctgcagcaggtcgccgggttggaagtctgaccagcactccagaacttccatgccctcgacctccatctcctccacgttaggaaacgccgccgccgccgcctccgctggtggctgtggcatatcgattctttgcagcttggggaggttggccattctgagagacctcagcttctggagatgccagatcggcggcaacctctcccaggaccagcagttttccaggcttaggcgctgtaggttcggaaggtcagaggaacacagccattctggataggcagctccatggtagccgtcgatcttgagcgacaccaaacactgatgaggatgaagctgcgtcagcattgtttccagtgtcttcggatccaccgctgagctaacaggacaccatctgagctccaggtttctgagactgcctttctccttcagcatcttgtcgtctgcattctttcctgctacggtttttgtaatgtttatctgcaggtcacttagacggctcatgtgcttcagatcttccagaagtacggcatttgaagaagacacgctgtcgaccacaaagccatgaaggagagtaagatgcctcaggctgtgcaacgaccttgtggaattggcaacgccactgtctctgaagtcgaggtattccaacttcgctaacttgtgtatgcttctgggaagcgaagtgagatctccacacccccgcaaacccaagaaccgcagcctcctgaggcggccgacggactcatggactgctgttattttcgtacgagaaagatccaagtgcctaaggcgcgccagatttcccaaggacttcggaacagatcggatctctg

SEQ ID NO: 187526 - DNA, 778 bp, Zea Mays
agacatattggtaaggcggctgcgtgttctcagccctggtgaggcaatggaacaaaatattaggcaggcagagaagatgtctagaaatatagagcgtgcttctcgtgctagcaaggtattatttgcatgcttatacagttttgcccaacggattgcacatgtatacctttgaaaaatatgcttcctcaataagtatatatattttttctctcgaagaattgtagttcttttcttatgctacaggatgagtctacatcatgggagatgccttatggagatataaatcggaagaaacctgctgttcgatcaagtgatacttttactacgtctgatggcatagctaagagagcaagatttgacatgtctgccacttcaaacctgccagttctgggattgtctgattattctgatatgcaggctgacaatgatgccagtgtgggtcattcatccgatccagctatattgaataatgaagtgtctcctgtcgagaagatgattgaaatgattggcgctttgcttgctgaaggagaaagaggagctgaatccttgggtattcttgtctcaacagtagaggcagatgtcatggccgacattgtgatagaaacaatgaaacatctaccggaagcttcatttcatttagcaacaaataacggtgtccagcaactgaattttaaatattcctctggtctcgtaacacaaaaccttccagccaattcagactccacactattcactgcacaatctacacccacagcagatggagtcagcatctcaccat

SEQ ID NO: 187527 - DNA, 393 bp, Zea Mays
tatcattggtgctctgctggagtccgaaaggcaggcaggcagacagataaggccaatccccccgggtcttccggcgggcacacctcctgcaactgtacacccgttgggtcttggcctcttgggcggtggtggtttattgagcatatgcctgcctgtctctgccttgtattaaaccacggcctcgttccggcaggaattcccgggccggtgaacgcagtccccggccgcgacagcgacgacgactgcgttattattctttacgcaaccacacgccggccgggatgcctgaagccaattccgaaacttccttgctgctcattcctgtcaggaacgtgattcaggaggagtccaagagaatgttgggtctgtctgccgtggaaatagacgccaaac

SEQ ID NO: 187528 - DNA, 459 bp, Zea Mays
gttctgctatcgactaacttatcagagaatacgttctcgtacaggtagtatacggtgctgatttggagactggaacttttggtagcggcttcccaaagtcttctcccgaagtaaaatctgatgttgagcataagtacttagagtctggttggaacctaaacaacttgcctagactacaaggttcagtactatcttttgagggcggtgacatctctggtgttttggtcccttggctgtatgtcggaatgtgcttttcatcattctgctgggtaagatgcttgttggcatgtctacttctcttacaattaagattgttgtcattatccaaatttaacattcatgttctgagattttacactggcatgtctctgctgacagcatgttgaagaccatcatttgtactcactgaactacatgcattggggtgctccaaagatgtggtatggagttccaggaaag

SEQ ID NO: 187529 - DNA, 334 bp, Zea Mays
gcagagtgagttccttaatcagtcaaggaatagcctggaagagcatgaagcggcacttaggttacgcgaagagatagaagaacaagaattattgctggattttcttcagcagttgcagaaaagaaagcaagatatagccgacagtttgcagggcactattgctttcctctcttctgacatcaatgaggtaccccaccagcaatctacaattggccactgtgagaacttcttatccgatggggataaagaggtgtgctctggaactgttgaagagcagagtgattgtggatccaggaagcgttttagacctgagctgcaaggtgttgatatggag

SEQ ID NO: 187530 - DNA, 502 bp, Zea Mays
gttcagttctagccatgtgcagtttcaatgtgctgacgatcttctctcacttattttattatttacatcattacatgctcctattggtctgtaaactttataatttactattgtggcaacaggtttggaccagagagttggtgttactgttattgcagctacaaatcgccctgacaaaattgatcccgcacttctgaggccaggttattggttcaattgttatttactcagcgcttaaatttatttcttggatcacacatataatgctcgttctgctcctttgatctgactttgagatcgatacatgccctaggtcgtttcgatagggtgctggatgtgcaaccacctgatgaagctgaccgtgcagatattttccggatccatacacgcagcatgccatgcagtgccgacatgaatctaaatgaactcgctagactcacagaaggctacactggcgccgacataaagctcatctgcagggaagctgctgttgccgcacttg

SEQ ID NO: 187531 - DNA, 756 bp, Zea Mays
gctcctcaccaggcgctgctggcccaccagacccagcaatacgttcatggtgctcttcaaggacagggaggcgccccactgcagcacactctgcagaccggccctctgcagggaagcgctccctagtctccctacggcatgctggcacagccgaccactccatcttgggacgctcagtcccttacatccgctttcagtactgtgtccctgactccgcctcagcagactaactggtacttcgacaccggtgctacctcccacatgacctccaacgccgataccctatccaatacttcaactccctctcttactgcaccttcctccattattgtcggtgatggctcgcttcttcctatcatttccactggctccgctactttacatggttctttacatctcaacaatgttcttgtgtcacctaaacttattaagaacctaatttccgttcgccagtttactaccgataataactgttccattgaatttgatccctctggttgctctgtgaaggatctactatctcgaaacgtgatcgtcaggtgcaatagctccgggccactataccccctatgcctccctgttgcacacagcttcatcgccagctccactccgtcactttggcatcgccgtctcggtcaccctggccacgagtccctctccaagctcgcatcaatcgttctcgtgtgtaataaagatgctagctctcctttatgccatgcttgtcagttgagtcgtcatgttcgccttctgttccgt

SEQ ID NO: 187532 - DNA, 858 bp, Zea Mays
gcggccattaattgcagcgtgcagaataacttgttggatgctgtgcacgtctcgctactgcgggctctgaggcggcatcttgaatctagatctgcagaaggatctcgatcggcttcaaattgcctgaagtacgcactctatcaacacactcttaaccacagtaactatttcttaggtgctgtgtttctgtacttaagattctgacattattttctttcccctgaactgtgtataggtacctggattggacattactagacgcattgacttggccaaatttcttactagagtacctgtatgtgatgtgttgcattaaaaatctaggggggaagagctttggtagaagccttctagtcgccgaatactataaacttcctgttaccatgaagttgagggtgctgcaaatactctgtgatgatgtcattgaatcagaagaactcaaaactgaactggaaaatcgagtaggctacaatgaggagatggagtatgagatagaatctagtgcatttttggaggctggttcaagatcagtctcaactagagcagcaaaggcctcagcttgcaaaaacacgaatgatttccataatcttctcgaaagtgctccaaatgtaacaaatcccgaaactgctccagcagtcctgtctcaggatggcaatagtgatgattgccgaatatgtgggatggatggaactttggtatgctgtgatggctgcccgtgggcatatcattcaagatgtattggtcaaaacaaagctttccttcctcagggtgactggttctgtccagaatgtatggttaacaagcttggcccaacttcctcaagaattgagcgtggtgcaagaggagctcaaatgtttg

SEQ ID NO: 187533 - DNA, 590 bp, Zea Mays
cttgtagtcaaattggttcagcaactggcatgtcatttcagtttgtggagggtgcttttatttcagctttaaggaaaggccattggattttgcttgatgaggttaaccttgcacctccagagacacttcaaagaattggtgctgtactggatggagagaggggcacactttgcctagcagagaggggagacgtggattatgttgaacgtcatccttgcttcaggatatttgcctgcatgaatccagcaactgatgctgggaaaagggaactgccgtacacttttaggaaccgctttactgaatactttgttgatgatcttatggatgacgatgatctacgtctttttgtcaggaaatatctggatggtctgaatgctgcaaatggagttatagatagtattgtgcgattttataaagtggcaaaaaaggagtgtgaggagagactgcaggatggagctaatcagaagcctcaatttagtttgagatctctatctcgtgctttaggatatataaaaaacgcagagaaaaaatttggcttcaggaaagccatttatgatggtttctgtatgttctttcttacattgttggat

SEQ ID NO: 187534 - DNA, 564 bp, Zea Mays
ctagtcaattctttctggtgtcttgcattcactgtggtttggggggattaggcattcgtgctcttcataatcgaacgtcacctcgtaatgtggattctttggtctttggtcttggaatcatccatctttttcaccaatatgactgaagaagaaaactcactgttgctgcgctgaataatgcctgacgacaacatctcttgtacttggcgttcaatttcagtcttcagagctggtgcatatctgtaaggcctcctattaaatggttgagcaccgggcaagagagacatcagatgatcacaatctcggactggaggaaggcctgcaggaagtgcaaatacagaatggaatcggctgactagtgcttgtaattcagctggtaaggtagagaacaccgactggtccttgtctggcaatgcagacaaattacatagttcaatgactgcattttggcccttggcagactggagaccaaacaattagaccgtagaaccgttgtaaggaatcatcaaccacttgtctgcccaattcaccatcataggactgaatttttcaagccaatccatg

SEQ ID NO: 187535 - DNA, 462 bp, Zea Mays
tagcaacagatcacgtcggcgcaggagtagcaggcagttaggtgtgactagaaagtaggagatttgcttagataagaggataagcagcagaagtttgttagggagataagtattagaggataaataagacatggaacgatcaactgcgacacgtgcacgccacgtcctcctcctccaccacctcttcgtcaagtgctccaagtgcgagttcggagccacctccatctactacctcgggcatgtcatctccgctgcaggcgtcaccatggatacaacaaaagttcaagtcgtcacagaatggctgatccctcgctccccatgagcggtgcacgtgttcctaggcctcgccggctactaccgcaagttcatcaagacattcggggccatcgtcacgcccctcaccgctcatcttcgcaaggaggggtttgcctagtcacccacggctaaggcggctttcacggt

SEQ ID NO: 187536 - DNA, 280 bp, Zea Mays
cccgttgcaatgggtgcgcggcggcggcgtctaggatccggctgttgttttccttcttcatggttctgcttcaggcataggccagccacgacgaggcttcgatcaacggtgaaggtaattatgacctatttcgcagaggggagtctgctcctgtgacatggtattggtggcgatcgtgttcattgaaaatttggtatggtgatttgtgactgtcagtactagcactactggaactgaaggtgagggtggaggctgatccccatggcgttcaggattggga

SEQ ID NO: 187537 - DNA, 439 bp, Zea Mays
aaaattattctgaaaggtggtctaagtgaatgatttttttttctcaaaccagttttggctaagtgtgttcctgaacataatttgcttggttcatttggttactggtagttataccaatgcataataacaaagtattatggtgactaacaaaaacaaaggatgtcgaacataaactttcttgtagataggaatagtagataatcttcggtatatttggtagttctttaaactagtgtttgttgttgtcttgtctaatgtcctgcttgtaactttctgtcaagaacatgacttgaccttatgaaacatattttactgggtatctttagggctgagattgttgttgatagcattatctaatgtcctgcttgtaactttctgtcaagaacatgacttgaccttatgaaacatatttgactgggtatctttagggctgagattg

SEQ ID NO: 187538 - DNA, 416 bp, Zea Mays
ctggtatgccatgacggcgtggaataggagattcatccagacttgataggtttctttccttgttaaggatccctacttgcttggaggaattttcctggagcgggcttttgttctaggagatctattgtgcgatgtgagcaagggaacccatatcgtccttattcttgattagtactattggattacattgcttgcttcacagtggagtatccgtccatccatggttctggtttactagtcccgtttcagtttctcttctgccgtgcgtgtaggatcgcctcagttgatgttgacgccttgccaagctgcgggagcacatttattcctaaacataggataattcgcagtttttactgaatcctcatgctccatgccaaggccgccccaggttttcctttgtcgtctatgaagattac

SEQ ID NO: 187539 - DNA, 434 bp, Zea Mays
acttaacgaactttttagctggtagtttagaaacttgcaatggcgggggaaccacaccttgaagctgaatgggttgtccgtggtgcacacacattagtgtccgatgagtccaatgacactctaggactatgaggagaaagccagtcgtaaccgagaacggcatcgtatgcacccaattggactaatttcatatcagtgcgaaaggtatggccttaggtccaccattccaacatgtacaggtttggaatactgagatgaaagacccaactggttcacaaaagcagtactcacaaaactagtagagcttccagaatcaacaagaattaacgtcacttgattgtgcaccagagctcacagatgcaaacaaccatcacgttctgtaccggacagagcattcagggatagatgatggaactccttagtcaaagcatcct

SEQ ID NO: 187540 - DNA, 515 bp, Zea Mays
aaaggccttaggtatggaagcacaatccattgttagtgacgggtggcgtgctagaaaaaatgatgataacaattatggtaacaaagatgacagtggtgatgattgtgatggtgatggtagcagtgatgatggtgatggcagcagtgatgatgatgttaccgatcaaatatgtgcgctatgtgatgatggaggacatttgcttaggtaggtgcacaaaattgactatctgtcttttattccatttcttgtacatgtgctccatatctttatccatgccatgatcaatattattaagcaccttccacttggatcaacacctttaacgcttgcatgaaatatggtcactaacagtatgcgaagattaaggcaataggcaaggggaaataaggttaacgttaaagagataacagaagcaaaaggtagcagagaaaagagaaaggggaagatagataacaatggccaccaattcagcctaattgcagctagatccaccttgcttaatccttctaagtccc

SEQ ID NO: 187541 - DNA, 1115 bp, Zea Mays
caacaatgtcaaatcacataggaggtctgaagccatttggaatttggtctttttcattttggggtcatcagagtatcagactaaagtgcccttagattttagatggaaatccacagaggcttcaaagtttatctcagacagcagcttctttctatcttcaattttctttttaaaattaacatgtcagttgtcactgggataccaaaacccagtttccagactctggctagagtcaggagccaggagttggaggcttctaggcaggcagttaattgaagctaccagccaaccctgccaaacgattgattcccttagaatatggacaagtgagattgacaggagggcatattggctgactaggatggtgacaatggcaactgatgtatgttgccttgtatagccaagttactaaatgatctaatgtagaatttcttgattcatttagaaagtgtgcgcttgtgttggcttgtgatattttctcttcttagatgctcatagatattagatccaaatgtctcaatcttctttcttgtatatgcagaaatctggatggtattgctggctgtaatataaatgtcttccctgaagaaaaggacgttttgaacaatcttattagtgcaatatgttcaattgatcctgatatcctagtcggatgggagattcagttaggatctttaggatttcttgccgaaagagctgcttatctgggtataggcttactgaaaagaatttcaagaacaccacatgagttgaatcatccacctaagatcccagttgataactctagtcaggtgctttctgaaacatcttctgcggatgatattattgatgatgtcagtgagaatgattggagccatactcatgcgagcggtatacatgttggtggaagaattgtgcttaatttatggcgtctcatgcgtgcagaagttaagcttaataattactcccttgaagctgtagctgatgaagtactgaggcgaaagataccactgataccaagcaggatattgaaccgatggtttgcaacaggtcctggacgaggaagacaccgatgcatagaatacattagcaatagagctagaatcaaccttgaaataatgaatcaaatggacctg

SEQ ID NO: 187542 - DNA, 283 bp, Zea Mays
acgtcgccctctacaacagcttgccgtgccagattcctagggtgttttcggacgaggagccagcgatgttcatgggtgccgacgtgacacacccgcaccccctagacgactcgagcccgtccgtggtcgccgtggtcgcgagcatgaactggccttcggcgaacaagtacatctccaggatgaggtcgcagacgcaccgcaaagagatcatcgagcgcctggacgtgatgaccggcgagctgctcgacgagttcgtgaaggaagtcggcaagctccccagcag

SEQ ID NO: 187543 - DNA, 403 bp, Zea Mays
gagtagcgatattccttctccagctttgtctgctcttgttggtctgcaagaattatccatagcaaattttgatcaggctctcgaagatgtcgttcctaaagatatgttgtccgaaccagctgatggtgatatgatgtacgtttgttctgacattccagaggtgggattagagttatcccgagcagcgtctcgtgcctcgtcgaccttggaaggcggtcttcggagtcaagaggttggtcaaggttgctcaattcccatggaggtgactgagagtccttcagccttagaggtggctattgcggagaacccagtcctcaaggatggtgccagcggttgcccagccctcgagggtattgccgataatgatccggctcgggtgggtagcgcgagctgcgacctagcc

SEQ ID NO: 187544 - DNA, 455 bp, Zea Mays
caaccttgctgcaatttgaacagggggcggcaaaggtggcagcagtagaagcccaactcagagatagagatgaattccttgctgaaatccgtgatcggttattgttggctcaagaggtaatgcgtgctcagcatgataagaagcaccgggaggttgtctttgcagtaggagactgggtttggctccgtttgcatcaccgcacagccgtgggtatcactccagctcgtgccaccaagctgggccctaagtactttggaccttatgaagtgctagagcagattggatcagtagcttatcgtcttcgtttaccagcagcagctcgcatccataatgtgtttcatgtggctcttcttaagcctttcgtgggtacccctccggtgggtgatccagtgcagttgccatctcttgtgcatggaagagtggttcctaaacccttgaagatcattcgtgctcgt

SEQ ID NO: 187545 - DNA, 552 bp, Zea Mays
ggtctcccaactattcatgctcttcgtcaccttcttcgagcaccgctaacgcgacactccaacaccatcgcagctctccttgtgtggtgcgactctctcaccgctgccactccaggagcctcgatgcgtcacttatctacttcttcaactttgtccaacacaaactcacgtcattgttgccccttgtcctcatctacttcgtccactccaacaaccgcgggctgcatcgacaccttccttgttgttcttttgcgcattgcaatcgctgtggaggacttctctactagttcctaactcccttcagacactgacgtgtggttgggccctctaccttgtatgtccgatgctggcaacaccggtgcgtgccttcgtccccaacacattctcgggtttagcaaacctggcgcacgcctaggccatgatggttcgacaatgtcgactttggcatcgagcatcttcttcattgattgcatcaattgcgtcgccatcttcgtctatggcgcttcctcttgtgcaccaccatcaccacggcgccctagctcgcccgcaact

SEQ ID NO: 187546 - DNA, 324 bp, Zea Mays
attgttttcactgtatagtattcctttccattctaaattatatgacaattttgactttctagatacgaaacttttgctatgcattagaggcaacaactaatatgcaagcgagatttctggtccgttaaattatgatttaaacccttccaccaccacctcgtgtagatttatagaaaaccccctaacaaaccacgattatgtctacagttagatcatgatctaataatggaccaagagactcgcttgcacgcttacacataaggtttaattgcatattagttgttgcctgcattagatatacagtttgtaaaaagtagtgtatct

SEQ ID NO: 187547 - DNA, 631 bp, Zea Mays
agctcgaggttctggagtacacctatgcgggtttgtggaatgaggattttgatgaatccattcaaatgtttttttttgtgttcttcctccccgctggtttttttgggtgcttttatcgattgagcatttctgggtggtttgctgcagtggagcattatccgtccgaagctaagcggctggagctgtcagcgaagatagggctttcggacaggcagctgcaaatgtggttctgccaccgccgcctcaaggaccgcaagccaccatcgaagcggcaacggcgggatgaagagtccgcactagcaccagtgatgcctccaccgccggtgttaccagcacctgtgatgccagtggcaagcagtgaccttatggtgggcgctcctgggccgtatgataagctgctgcagccggttcacttgcgaaggggtgctgggcggtcctcagcagtccctaggatttccatgccggatctcgggaggaggtattatgagccaccaccagttatgataacgccgttgatgcagctcacacaatatgagctccgtgtgattaattctgtggagtcacagctcggggaaccgttgagggaggatggtccagcacttggcattaattttgatccccttcctcctgg

SEQ ID NO: 187548 - DNA, 316 bp, Zea Mays
gtcgttttaccaccgacaataattgctccattgagtttgatccctttggcctttctgtgaaggatttgcaaaccaggaacgtgatcgccaggtgcaatagctccggtgacctctactcgttctatgcaccctccaccagcacccctgccttcctcgctgcacccacctccctgtggcatcgacgtctcggtcatcttgggcatcaagctttgtccaaacttattacctccagtgttatttcctgtaataaagatgatgtcaaccacatctgtcatgcgtgtcaacttggtcgtcatgttcgtttgccattcagttc

SEQ ID NO: 187549 - DNA, 400 bp, Zea Mays
caacctcatggaaggagggggctcaaaaaggtctaactccccacccagcgcgcgtcccgcaacgtgggagggtccggcttccgcctcagcagggtgcgcaggtgcactagggtgtaattgcgaatacagtatatggacttcctcatgcaacgtattgcaatagacctgcaggtcatcgacagttgagctaagttccttgattcgggcctgagcccttgcttccttagcacatgccagcaaacgggactgtactgcccagtcgagcaccaagtcccgatcagcaagctgatcccgcaggtgacggatgtcccttcttagttcatttattctatctccgtccgcaacccaagcgttggtcctgtgttgcaactccgcttgaagtcgacttactcgggcttca

SEQ ID NO: 187550 - DNA, 419 bp, Zea Mays
ctgggatttcgtcaacccgctttgtttcatgctgtagcattgtctccagtgccacagacttatcgcactgctcttgctgatcctcattggcgtcaggctatggaggaggaattctctgctctacagagtaacaacacctgggacctcgttccccgacctccttcctacaatgttgtttctggcaagtggatattcaaacataagttcaatgctgatggctctcttgagcgctacaaggcgcgatgggttctccgtgttttttcacagcgccctggaattgactttgatgaaactttcagtcctgttgtgaagcctgctactgttcgcacagtcctcactttggctctaactcgcaactgtccgattcatcagctcgacgtcaagaacgccttccttcatgggactttgttagaaacaat

SEQ ID NO: 187551 - DNA, 340 bp, Zea Mays
gaagttttagctcctttatggtaggttgacagaatgacagccaacgctctcatcgttgttgaggtgaagtattctagttgagattgttctttcagcttctcgacactcctattgtgagcgtggtagaatttgtgttatccagctactcttaaactggtactccaatgaattttacatagtttcaatgtaaattgaaccatcaagattggtttctgctatgttaatatgccttccctcaaaggaaacctttacttggttattacaagttcaaacctactttctatgaattcatgataaacaatctaagactaccatattttatctatatgcttagcatgag

SEQ ID NO: 187552 - DNA, 444 bp, Zea Mays
attgtcacttcggtcaaataatgctgactctggaaatctgcatgctggtatgtgtggtatagatgttactcaagagatactaaatgtgcaccaaaatctgcataattctcagcaaataggtattgatgctcaacagcattacgttttaacacagaatcaaccaactttagcttgtttgaactctcaaatcacacagccagaaaagtttctcggtggaatatatcatgatcctcagttaaacatcaaccaacaacagtatctgctatcagagctacacttgcaacccctgattcctggagtccctgaacctcaatcctctctattgaacaacatgctacagctcaggcagcaggagcaacagcaacaatacatttctcagtccatacctcatgatcgttccatgcagcagctttatgattcttcccatgggacaatacatacttc

SEQ ID NO: 187553 - DNA, 328 bp, Zea Mays
ctcatctctggcctgccccgctcctcctcgtcctcaaccccggcttgtccccgctcctcgatcccagatcccgcatcgtcgtccccttaggtcgtccgaccccatccggcaacggcaacagcggctcctcctattctgtgttctatgacttgtatggcaacgacaacggttggtcgtgccccctgtctccaccagttcgtcgctgccggggcctgcctgctagcccctagaaatgttgtcgccttgccgccgcgcatccacggtatgctctcctcacgtccccacttgtcgacccaggccgcctcctctagcctttcgctgctttggt

SEQ ID NO: 187554 - DNA, 1080 bp, Zea Mays
gagctagtcgcctcgttgaccctggccgagagaccgactagactgattgattaattgtatcgtaataaacagatgacttgtgagcactggtattcttatctaagaattatttgctccacattggaattgaaaaaggtacaagttcgaggatgaacgagtgacgaaagaagacatgaaacgagcattggaggaacaatatggtggtgaagaagaggtaatacatgcagacactaaacttcttcaattagcttgggtacataacatttatctttgttgcagctcccgcataccaaccctgggttggatactgcaccgcttagatttaccaagcattcaaatgcttacatgcttgtttacattcgagaaagtgacaaagataacattatctgtgatttggatgatgaagatatttcagaacaccttaaggtatactttttattcaattttaaaaaattattaaatactctcccgtcccgtgaataagtcaaacttttctagatttgacaagtttttaggaaaaatatcagcatttgtgtctacaactagaattactataaaaatatgtttcataattaatctaatgacatttatttggtatcgtaaacatttgtattttgtatatattttggtcaaactttaatttgattgactcctcgtgaagtgagatttgtatttttttaagttgagtgagtggtagagtccacatagtttgtcttgatgttacagaaatattatcaggttaggttgagaaaggaacatgaagagaaggagtacaagaaaaaggagaaggctgaggctcatatgttcactgcattgaaggtttggcttgattttgtctcttacataatctgatcggactatttctcagtttttactaaaatgaaacaatcactcaggtggcccgagactttgatattaaagagcaaattggaagacacatgcactttgatcttgtggactttgacagagttaatagcttccgtgcacctaagaacatgtcaatcaacgaagtcaaggtacatcgctggtccttattgtttgatatgattatgattattgaccttgtatgcgttggagtag

SEQ ID NO: 187555 - DNA, 955 bp, Zea Mays
gcagctgcggacggtcgccaaccaagcaaaagcgaatggaatcctcgggtccgtccggccacgcaagcggcggcaccaccattcatctacgaatccatgggaggagattggagtggggccagctaacggatcggagtcggagtccttcttgtgcttctcctgctctgctggtgccgctgccatgggtttccccagcacccccaacctgaagctggagcctcgccctcgcacgcggaggctcctgcgctgcgccctcagctctgagcctgtggtatgtatagtgtactgacgtgataatctctagctagcactatctcatacagtagatatgaatccatccatgtttctctgccttgccaccaatcaatagacatacatcattactatactacctaactttgatatgcttacttatcggtttcagcagcctcccatgactgtttccatcactggagccacaggtttcattggacgcagattggttcacaagcttctatcgggtctgcttccttccttggctcactactggactggattcacttattgcctgccttctctctctcatcacatacatacacatgtttcattgcatccagatgatcacaaggtttgcatcttaacaaggtctgcctccaaggctgcgtcagtttttcctggtaagaaaagatccaactcaacaatcactacttcctgatgcatttacccatgcatatacactaccgatactactgtcaggcggctataataataaacgatgttcagttctatcgttgctgaaaccaaatttgtgatccgtgcatgtgcatatgacgacctgatccatccatcgcacgcagcttccacctatcctggactcacaatagcccagcaaggggattgggaggcatgcgtcagaggctccactgctgttgtcaacctggcaggcatgcccataagcactagatggtcacccgag

SEQ ID NO: 187556 - DNA, 331 bp, Zea Mays
tctcgagagtgagccagaggtggtgtgccgtgccattgctccctggccatccgacatatattgggggagatggtgctgaagatcacggagatgacaacgtagtccattcgatcccagcatgaatcgatgtctaacagagggctagacaatatgtggtcgatggggcctggacaaggaggttgacgatagcagcctcataggctacaacaaggtcatcctatgggggtgccctaaggtgggggtcaacggccatgtggtgttgtaggcccaaaccctattgaacgatggtgacctcctactcgagggcggcgacgacagccttctcgtttga

SEQ ID NO: 187557 - DNA, 465 bp, Zea Mays
gggttttctggatgctgccgtggcctgcggagtgggctgtgtgcaggatagcaggaagtatgttggaggattgtggtacaaaaatctgattgccatgcattatgagtccctatctgatctgccatgcattatgagtccctatctgatctgccatggcgcaccctgctgccctatactgatctgattgtgcaggagctgaaactcttggttgcttgcacagtcttgctggaggtctttgtagagttgaaaggttggtgttgagatcgtatagaccgatccactggtggtttccctgcgcgaaagagcgtctgctactgtatttagccggccagccctatattccaccttgaagtcgaaaccaaatagcttactaatccactgatgctgaggtacagttgagagccgttgatcgagcatatacttgaggctgaaatggtctgtacgtaccacaaacttgctgcccca

SEQ ID NO: 187558 - DNA, 787 bp, Zea Mays
ctggtgccaattggaatgtggaattcaaggatgcaacatctgctgctcaggcagcagcagagtctgcagagatggctagcattgctgctagagctgctgctgaacttgctagtcgtggaaactattctggagataaaggcactggagcctatgattcagccgcatacagtagcaaaaacacagtgaggaagcaacgggcggaacatgtagtgaaggatgagagtttccatgaccagagttcaggtgttaatgatccaagcgagatgccaagtaactcaagaaatttttttggaggaacagaaacatcccatgttgatagtgagaatatatcgacagccccatatcaacagttccatgcctacaatccagacagccatccatatgtttatgaaatgccaactgaaccacctcgtgctcattcacctgacccacgttttgatgatttatatgagagggaaagtgacattggaagatctgaagttgatccgtttgattttcctagagaaaacttccaagatactgcatctgttgggcacaatttcaaggatgtggaaatcaggacacctagctacgatcaagaaagcacagatgactactatggtaattttaattcttcacatgatacattggcccatggcagcagcaccactgcttgggataagcaaaacgacaaagctcaagacaactcttcacctgttgtttttgatcaatatgattctgatgttgaacaagagaatttgttggacacattctcctcaaagcatactgaacaactacctgctcccgg

SEQ ID NO: 187559 - DNA, 547 bp, Zea Mays
tggctagtttccccctcaatcccgtaaaattctcccggaatcccggatcaccaaaatcagctctaacggtgtaagctgcgacgaaccagctactgctaatcactggtggagagaaccgtagcatcgcaattatgcccccatcatctcccccgtgtcataatttaattccgtagattccgctctaatgacggccattatagcactattttcaccgcgaaccagcatgggtcgtcaaattgcaacctggatgacggaatggcgtgaccagtttccccctcaatcctctccaattcttccgagatctcggatcaccaaatcagctccaacggtgtaagctgggacgaaccagctgctgctaatcactggtggagagaactgtagcatcgcaattatgcccccatcatctcccctcgtgtcataatttaattccgtggattccgctctaatgacggccattatagctctgttttcaccgcgaaccagcatgggtcgtcagattgcaacctggatgacggaatggcatggccagtttccccctcaatcccct

SEQ ID NO: 187560 - DNA, 335 bp, Zea Mays
gcaatccttgcacaagtggagaattgtttctggggctgagttgcagagacaacatactgggttacatggccaacctcttttatgaaggctgtcgacagtcagaattctcttatggagaagtgtccaagcaaaaaattggcacttcggttccactttagccttccaaatgggacagagattcattttactgaaattggatgcgaactggattttgtatatatgcactgctagcactgtactgtccatctgccgttcatctccaagagatgttgtcttccaaaccgttaagctcttgcatattacctatggcctgccaaagagagacgagctctcca

SEQ ID NO: 187561 - DNA, 532 bp, Zea Mays
gttgctacaagcgttgcttattccagatcaagcatggcaggtcatttctatggacttcattgaagccttacccaagtccaacggtgctgactgtatactcatggtggtcgacaagttctctaagtatggtcattttatccctctggctcatccttatacagcctccaaagttgcacatttattcatgtcgacagtgtacaaactgcatggattacccgaggctattatctcagatagagatcgtgtttttaccagcactttttggaaggaattattcactatggcaggcacacagctgcgtatgagttccgcttatcacccccagtctgacggacaaacggagtgtgtcaaccagtgcttggaaactttcctccgctgcttcgtgcacacctgtccatctaaatggcatcagtggctctatctggcagaattttggtacaacacatgcttccattcagcattgggtcgttccccattcgaggttctgtatggccgcactccccgacagctgggcatcaaacctgtggattcc

SEQ ID NO: 187562 - DNA, 603 bp, Zea Mays
cattaacagaaacaactgaatcatcatatgcaagggctgtattgagttccctccatgcaactccagcttccttgattgcctctactccatctggtaggatatgggcatgcgttaaaaggtgtttcaaatgattccaagaatgtaaagattgaagttctgtatcagagagatttctggtaatggaaaggttggatgccaagagtctggttgatattacttcagaagaaatctgtggattctggattgcaggtgggtttggaacatccaaccaatgtaattctgccgtcctgttttgctggaaaacatactgaagcgatttttctgcaagtagcctatccaatatcacatatcttaacatcaagatgatgaacaaagatacaatgacaaagcctccatgccatttcttcatcactcaaccttgtgacaagttggtccggagtttgcattcactatatcgtcaatctaaagcatgacataaattcagaacaatatttcagaaccaaaccatccaatcagaaaagctgaacaaattcctgctgaactgtgaccctgatgtggtgtattgagcaacttcctcaacgtaaccaaacattcccaggtgtg

SEQ ID NO: 187563 - DNA, 274 bp, Zea Mays
aagatatataggctataggcagtaaccaagaatttaagccaattcagaatttattctttgtttctccacttctttcttttacctcccaaaccttgtgaaagtatcaaactgaagttagatagtttgagccagatactaccatagtggcttcgtagaatggttctaacaagatacataacttctttgacatctcccaatcattaggcgaaggctcatgtgtggatttgtgggtcatttcgccttaaagcttcatatgctcttctatacttcaaag

SEQ ID NO: 187564 - DNA, 633 bp, Zea Mays
acaagttctcagcaacacatgaaacatggcacatataatgattgtcaggcaggtaattttccttttttgggatttctttgtttaactaatgcatgagtcatagcattccttttgaatggcttgtttaaccaatacatgtaagattaaaaccgtctttttttctgagtctttgcttagcaactatgatgtcaattcaatattacacattttatggcttgctcgtaactctttgtatttattttatttaaatagctacttagaagttcttaccaatatcttggtgggcaggttgtcctattgttcctgaatgggacacttataaatatagtgctgtttcatactaactatgacccctcatataagttcatcaggacatcaacacatctccaatatggcactttgactaacacattcatagaaacatattctggaatattattgtacaatcaatctattggcatcagtcttatgtggtatctgtacatttatttcatttacaaactgatggtccaagctaaaaaggtttgacttaggagttaagactatggacttatatgttcttgtcttttgctattagctttgaaacgcccatgattattttccatataggtgattttggtactatgattgttc

SEQ ID NO: 187565 - DNA, 309 bp, Zea Mays
ccgagactgacccgctataaacggtcgaccgcattaagtacatctgacactgagtcgtaatagagagccgatccgcctcccactcatgacctgcacaaccctttggtcagcagcgcattcatgacctacgagaccctcggcctgtggagcactcatgacttatcaagcctaggtctgagtgcatggaccatccactgggctcgctacacgatgagccacgtcgaggcctaggctatggagccacgtcgaggcctaggctatggaggccagaggtctgcatggcatagaggtagtaatgatggcaccggg

SEQ ID NO: 187566 - DNA, 307 bp, Zea Mays
tgaactcttagatgaactccatggggcacactacttcaccaaattggacctccgctcggggtatcatcaagtacgggtacatcccgaggatgtggagaaaacagcttttcgttctcatcatggtcacttcgaatttctggttatgccatttggactgtccaatgctccctcaacatttcaaagcttgatgaatgaagtcctagggtcattcctgcggcggtttgtgctcgcattttttgatgatatactgatttttagtactacttggaccgagcatttacgccatgttgcagcagtcttggacacc

SEQ ID NO: 187567 - DNA, 274 bp, Zea Mays
agactgattacaaggaaggtccaaagatcacaatgaaccatgtcaaaatcctgctcagcccagaagacgaagtgggaaacgagagacgagtatgccgacttaactgacaagcatgacagatgccctcaaaatgtctcctactacgagaagaatctagactactggaaagcttggtcatgacgtcaggtcctgggtggccgagacgacgatgccaagtggtggaggtggtggggacgcaccggtggatgaggggcggagtgtgtagagtggctcg

SEQ ID NO: 187568 - DNA, 386 bp, Zea Mays
tctaggaggacctctccatcattgagtattttgtctagcacgatgactctgactcatgctgtcatcgacaaggtggacaactccgacgcctccaaccacacaactccatacgctagtatactctctttccatcccccacccttctatcattatcgaaaatggcaacattcttccgatcaccacattaggtaattaggtttttgcttggttacttccaccttaagaacatttttgttgtccccaacatcatccagagtctgttatttgttcatcaatttactactgtcaattcttgttctatggagtttgaccattttaacttgtctgaagaatcttctcgcccgacgtgatagctctaggcccatgtacactctacagcttcctgc

SEQ ID NO: 187569 - DNA, 296 bp, Zea Mays
acgaagctaaccaaaccggctacctgaagctatataatcgaaggccggaattctcgggcgtggcaccgtcgtcgtccagctcacttcgttgcaaccgaatgtgtggcgaccgccaggaatcacggaccgaacacgatctgcgctccctccaatccttccacgcgtaacaaccttgccgatccgtgggggattcaatccccagaaactcggatttgttggccacgactagtctttagtgcatatacgtaccgccccacactccctctgtaacccctagtgctccgctgccgcctcct

SEQ ID NO: 187570 - DNA, 428 bp, Zea Mays
aaaattttcggggaagaaggtagtggatctggactcgattttggtggatggaagttcagggtcgggtatattccaggggctgggtttgggtgacgagttgcaggagggtttgggagaggaggaagttggcagaactaggtcgcagccagatggtgtgccaggtagtctgctctcagcttatgaaatggtaaaaaagaacggtcaggttactccagaggtggcggtttgtgctgctgttccggcagtgtatacgggttcatccgtgtcatatcgtagcaagaggagggctgcaacttcagcgggagacagtttggagagggcttccaagttgaaggcgtctcgcaacctcgactccgacttcatggaaggtaatgagtcgcttgttttatgcagtatgtcggttcagcaagttgttgataaattacgtc

SEQ ID NO: 187571 - DNA, 353 bp, Zea Mays
aagactatccgcgcagaagtcgcctaagggtgcagccggactagcacaacaagtgcgaaaaaaaaccaaagtctaccgcgaagactatccgcgcagaagtcgcctaagggtgcagccggactagcacaacaagtgcaaagaaaccgaagtctaccgcgtagactatccgtgcagaagacgcctaagggtgcagccggactagcacaacaaaagcaaaaacgacaacaccaaactgtccgcgccaagaccgactatacgcgcaccagcacaacataacaaaacacaccagaccaagtacacaacgccttcgcaggcatagacaaacgagggcatacaacctcatcatacaagcc

SEQ ID NO: 187572 - DNA, 818 bp, Zea Mays
gaaaaatgtttgcatgatctatggacagacttctaaggtactattacccagtcacttcatgccttcagtttttctttgctttctttgacctctagggaattatcacaatcagtagaagaggtacacttctcttgacatttgttaatttagcatatttattatttatgttgacttatttgtaggtgaatcatctgaaaatgggtcctacaatcacattcaatttgaaaagagaagatgacacctggtttggatatcgtgaggtggagaagcttgcctcactgtcaagaattcatttgcgtgtaggggcctctgctttagcatgtgttataaactatgttcttattggtacttcctttatcgggctcagtagagaataagcatttcagtcaccaccatcatttctagatttatgaacgaatactatgctggataaacaaaaagtatcatacgtttgggttgtgcaaatctatgcatgtctgacacatgtatgcatgtttgacacatgttagctgacaatcgtatgagatcagtaatttctttccacttaggactattttgagtgcttctctgatcttggctgatgtagcttctccactgttttgcagacgggctgcttttgtaaccctggtgcatgtgctaagtatgttggtttgtcgcactcagatcttgtttccaattttgaggtacacaatgcgaccttatctgctcagtacaacaacaataataatgtaataccttacagttttgcatctaagtaaagcaaatgtgttacatgtcaggctgggcatgtttgttgggatggtaatgatgtaataaat

SEQ ID NO: 187573 - DNA, 344 bp, Zea Mays
ctcgactcgtccaagacaaggaaagtaggaaaccgcctgccctgcgtgtgggctgtctgctgtgttgctagcccagtactttctcttctcgctcacgcggcacgccgagcaaggggaccgacaggcggagcgcttctcagcccctccgcaccttcgggtctcgcgttggtggcgccggcgggcgctgccgatcgccggcggcggccgagatgttggaggaccaggtcgccttcctgctgcagaagtacctcggcaactacgtccggggcctcagcaaggaggcgctaaagatcagcgtctggagaggtcagtcaggacgcctagccgccacttcccttcttatc

SEQ ID NO: 187574 - DNA, 323 bp, Zea Mays
gttcagtttcctttggacacttcacaagggtttggaaaacctgggccccgccaaagtgtcgttttttcatttggcttgctgcccataataaatgttggacagcagatcgtttagctaagaaaggcctaaaccaccatgagaaatgtctgctttgtgaccaagctgaagaaacccttgatcatcttctggtggcttgctccttctcgagagtcttttggtaccagcttttccggaaatttggccttcactcccttgctccccagccggcggtcacctccttcttgaattggtgggaggaggtttcagaggtggtctcaggtgtc

SEQ ID NO: 187575 - DNA, 960 bp, Zea Mays
gataaactgaagcaaacagatccatataaatcagagcttgagacaatgctggtccgacatgtctttcctgaattcagcagtcgtgttggacacctgcgagcaaaggtggaatgctctggaaatttgttttcctgcttatgtacagtgaataagtatttctaatgctgtattcatattctttgatgatttttggtaaattatactagctcttcactggtcaataatgatatagaagattaagttggattgccatggggtacactaaatctacaattttctataatgggtactccatttcaaaatgcagtttgatttggtactatacttccccatttgatttatcttatatatcatgccgctcatgacaataaaatcaatattataaaactgttacctcttctaaatgtgagtgtcatggtacctagcaaaaaatgccagttagctattgggtaaaaaaattctgatgtttgaattctcaaatatgtgcatacaaaaaaaatttgcagggagtaccaaatattaaacacccatattttaattgacacaaaattacaactattcccttttccagtggatgcattagttgtaccagtgtcgttaatcaataaaaaaccattgggtactattgatcaaatgaacagaattgaccgacgtacattaattaatgaaatgaaatcatttgatgtatttttatatcagtagtaggtgctaggttggtgtttccttcttgggaccttcaaatatgatctaggtctcttcatggttaatttctaactcattaattctattttacaataatgatctgatatattgaatcttataggcagcatgggttgctgggcagtatgcccatatcaacttttcagacccgaacaattttcgtcaggctatgcactgtatagtttcaggaatgcatgatccagatcttcctgtgagggttgattcggtctttgcacttcg

SEQ ID NO: 187576 - DNA, 632 bp, Zea Mays
tatgactccaagattgcagatttttggcaagcctccgcagcttgtctgcgagcctttgtaaagggcaaacagccataatcggctgctcccaggactgctgcacaacctccataaagccatcaagttttggccaaaaactttcgaaatgaaagcgacgtttacccatgaaggagtccctcaaacccagcaataaagggcaatgatctgaaatggaagaagccaaagcatgcagaatgcaatctgggaacagctggtcccaatcagtggtcacaaaaacacgatctaatctgacaagggttggcgcttcccgctcattagaccaagtaaattgtctacccaaaagatcaatttccaccaactcaagctcattaagaagacgacgaaaacggcccatcattgccctgtcaacattttgattatttttgtcttccactttataaatgaggttgaaatcccctccaacaacccatggtccaacacaggtaaggcgaatgctacgaagttcttgcagaaattgcaccttcaagatgtccgactgtgggccatagactccagtgaaccaccaaggggggcccctcactctgctggaactgaacagaaacagaaaaaacatccacccttgatgcaatagc

SEQ ID NO: 187577 - DNA, 306 bp, Zea Mays
ggtaagtgcggggagctggaagaggtggagttgttggtgtcagagatgaggaagtctggatgtgcagctgatgttgtgacgtacaatgcattgatcaattgcttttccaaatttgggtggatcgagaaggcctacagctactttggggagatgaagagactgggagtgatggcaaatgtggttacgttgagcacttttgtcgatgcattttgcaaagaagggttggtccgggaggcaatgaagctgtttgcacagatgagggtgaggggaatgatgccaaatgagttcacttatacttcattggtc

SEQ ID NO: 187578 - DNA, 316 bp, Zea Mays
gtcgtgatgccagaacgacatggtgagtgcactgaaatcccagaggatgggtccaagagaggccaaccattctgtcccaaggaccacatcatatccggctagaggcagcgcgaaaaaatttgtggtggaggattcgccgtcaatggtgaaagggacatttcggtacacgcctggacaggggaccttctcaccatttgccaccgtgaccttcatgttgccgcgcggattcaattggagcgaggtgcggcctgctgcttccgaagaaacgaaattgtgggtagacccagaatccagcagggcaaggaggcggttgccg

SEQ ID NO: 187579 - DNA, 588 bp, Zea Mays
gtcctcgtctacgtctactacctgctctgctctctctcccccacaggccccgcagcatccacacgaggacttcagaatcagcagcagccagcaggcagcagctcagcgagacagacgcgtccggggctcccctccgcgcgcccgccgatcaaggatcaacaacacacggggacgcctcccgtctccttcattcccagcctgcactgcgccgccccagacgcccgcgaccctctccacctcctccggcgaataccgttcctccccggcaagctaccctccgatcctttgttccgggtgagtctacgcgcagcgcttcctcccgcggccggatccccatcggcgcgacgcgattcgtggatccggcggccggggtcttcgccgtccacagcagtacagcatcgcttctcagtcctcctcctccccttgcctctagtctggcagcgcacccctgcctccactagtccactgtcctttttttacatggagactagagttgaccctccgcacggatcctctccgtcctcaccctcttctccctctccctccctctccatatctctgcaggtctgcgaggtagtaccgtcgacg

SEQ ID NO: 187580 - DNA, 492 bp, Zea Mays
atgaaatcactcatctgacatcctatctcatattttccagagtgagtcacacaattagttttggattagcatttcttcatctctatgttggtcgcgagcttgttccatgacagaagcgcggtcaacatagagaggtataaggtggcaaagaagactgcaaagcgagctgtgagtgaggcaaaggatcgagcctatgatgatctttaccgaagacttagtacaaaggaatgggagaaatatgtctataagatagctatgattcgagaaaggaagacgagggacctcaaccaagttaaatgcattaaggatgagatggatcaactcttggtgaaaggacaagacatcaaacagaggtggcagaggtattttgacaatcttttcaatggtgagaatgagactatgaacatccaattggatgacttatttgatgatttaaatagacgctttgtacgcaggatccaagaatcagtggtcaaagaagctttaaagagg

SEQ ID NO: 187581 - DNA, 508 bp, Zea Mays
tggaaaaccaaagtattatgcagaactgtagtattttcccaatatttcacatccaaatttatgattttcaattcggaattgagattccttttggttaactttacattgatattgcattagatcggttcacttctgttcatgcttgagataccatatgcatgtttggcacatattcttggtttcgttttttagtcaaactcctgttgcacactttctggacaaatggtctgtttttatcagggacgtctctgcacctgcttgaggcaacagtccgcaatgcagttgctgatctgaatgatgatggtgaaattaacatgactatgatcaacacaaattcatcgcaattgaccaatgaatcatcatcaaaagtttattcgaagaagaggaagcaagaaccacagatgcaaaactcaaccatctcaggttcagagaaagtagcaatcagcccaaggaaaagaaaaggttcttccataccaattacatcaaagggagtggcccctgaaagtac

SEQ ID NO: 187582 - DNA, 473 bp, Zea Mays
ctggagggtagaggagaagggaggaggaagaagaaaaagagataaaaatgagccttcctaccagcttgtgctgcctccgccactggtcattaggaaatcagaccccctttagcccattcctagatctgccactggtgacgggtttttacatggcagggtaaaaaatggctctgcatagcagggttggggaagactagcctggtctgttttgagatgaatgtgtcttggacgatggatggtgttcttttggtctaagttcagtctgtttgctgttatcgccagactaggtgtgtaataagggttgttttgaagcacagttatttgtttgtctgtcgaaactttgttggcggtaagaatagtggagcttgagtaggagcatgtttgccgggtggatgaaccctttgtgttcatgcttctgggtaggaattcaggatgtggtcgtgttatttcatcgttaaaaaacttctataatt

SEQ ID NO: 187583 - DNA, 811 bp, Zea Mays
tttaggcgaaaccaaagagggcgccgacgtagaaaatgtgcagccactgctccacctctccgtgtgttcgttctttcctccctatttgcgtccgttcgcgcctccagcctcccctgaatcggtgagtccaaggaagtagttgcgggtcccctcgaccaattcgtttgctggcagtgcaaaggtgaggttctctcaggtcaagtgaagtttctgctgggtttctgcaatcttttgtcgatgagacgatgatccttttatgactgtccgtttccttctttcttttgtgtccatgcgatctaaggactcgtggtttctctctctctctctttttcccctcaatcctatcccgttctccttatatgagctctgctagcttgctgtgttcattctttacagcatggtagtcatagccttctgatcttgctgtgctgaacatgtgaattgcttttgcgttgcaggtccttgtataccgtctcatgatatgaatctgcagtctttgcctgttgctactggagctccttatccagcatctatggcaccatcttccagcgctttctccacggttactacgcatggatgctttccttattcgacaccatccaccgcgcatccttccctttctggaatcctgccctgcaacaacaacatgatatcctattctgtactaccagaagaaccttcaggtggtattttctctggacagtctcctgaaggctgtgcagaccctggtgacattgattaccgtgttgagagtcagcaaattcctggtcctggcagaaccgtcgacgaatccgacaatagagatgaatgg

SEQ ID NO: 187584 - DNA, 271 bp, Zea Mays
gaccatggagccgatggagccggcgagcgcgtaggcccactcgggcgagttcatcctggcgaggcgcaggaaggagctggcgccggcgcggaacgccagctgcttgtccgccatggtccggtggtggtggtgcgggtcgtggatggagagggtgaagtcggaggtggagaagtcggagaggcggcgggagtagggggagcggccgtaggaggagttgcgcgtcatgatgggcgagctgacggagttgcgggcgctggagggcctggcgctg

SEQ ID NO: 187585 - DNA, 396 bp, Zea Mays
acatgcggtgggtattgagatcaagacatcggtactccttgtgatcagaagagtacccgagaagacacaatagaagggtcgaggggcaagcttatgagaagtagtagcagagagattagggtagcacatacacccaaagacatgaagatggtcacaggatggggtgatgccaaagagagcaaagtagggcatgggagtacagatcgtcatgggaggagtttgagctagtaggtggtggtatgaatattcttaacccaatagcgagcatggactgaggcctgaaacaacaaagagcatattatgttggcagtagtgcgaataatgcatttaaccttactgttctagggagaggtgtatgggcatgacatccgtagctacacgccatgagaaagcaag

SEQ ID NO: 187586 - DNA, 319 bp, Zea Mays
caagcattgtgttggaggcccttctgtcaactattaatcaaatgtctggatggagtgttagatacatggcatcagggcgtaattgtggtttgcaacatcagagtaggaataagcatgtggaaatcgttgattcatttcggagtggaaaggtctgctgcttatgttgccctgctgttgttgtgtccgataaatatttgtactgatgataaaatgatacattgtaggtgcatctgattattgccacacaaattttggaggagggactagatgtgccaagttgtaacttgataatccgttttgatcaggcagcaactgtacg

SEQ ID NO: 187587 - DNA, 328 bp, Zea Mays
gtgaggtcactggaagaagcacttgccggagcattacggagagaatcaactgcagaaaatactataaaggaacttgaacttcaaattgagcagttgaatgaattggtaatttctggtggaaaaaaatatgttttgcattaccaaccgataacaaattgtaagacggcataattattgttttatgatgtgttcaaaggttcgacaaagagaggatgacacaagatcggctaagatgatgcttaagtttcgggatgataagattcatagaatggaggttcttgtgaacagtaaattgccagcacaatcatatctactggaggaaaacaaa

SEQ ID NO: 187588 - DNA, 517 bp, Zea Mays
tcacccttagccacccgtacatggctgccttggtcgcctatgcctttttcgagggtgttgttcgtgtacatggcttccccaccgccactgttagtgactgcgacccgaccttcaccaatcatgtggcatgacctcttcaagatgtctggcgtaaagctccgcttgagcacgagctttccacctcgatacacaaccggaggttgtcaacaaggtgatcaccgtgtacctctgttgcaccacgatggggttgactgacttccttggggggaatattgctgtaagtgtaatacttcgttccacatggccctctacatcatgcccttccagtgatgtatgactgatccccactctgcctctatttctgcacgtcacaggggtagctcaggcggagacagtggacaccctcctgtgcaaccgtgatgtctttctcgtggacattcacagttgtcttctctaggctcagcagtatgccaagcctacaacagccaccatcgtgagtttgagttcacaatgggtg

SEQ ID NO: 187589 - DNA, 296 bp, Zea Mays
atttgttgcgattgagccaattcttgcctctttagccaaagtaaccagttcattgttagcttctacatatcctactgcaaatcttttctatcctcacatgtggatgtcaagattgcattgagaaaaatgggtactgtgatgatggagaagatcaataagtactgggaagaaaaaacataatgttatggttattgctacaattctagatccaaggtgtaagatgaggtatatcgagtggtgctttggttagatctctaatggtgaccaagttagatttgagatagatgaagttcgag

SEQ ID NO: 187590 - DNA, 315 bp, Zea Mays
cagagggcatcagcttgatggtatcccaaacttcttcttccgaacatgagctgacaaggtgatccagaagatggtgttggatcccaagggcctcaagatcaatagaagactccctgtcgctgctgctaccaatcagctccgtaaaataattgagcagcacctccactttatcatcatgactagtaaccagcccttcaccattagacaacttggcgatgaagttcttcttcttcctataacgagcacatgcatggaaaaccttggtgttggcatcaccatgtctcaaccaagacaccctagagcggagtctagcaa

SEQ ID NO: 187591 - DNA, 564 bp, Zea Mays
ctgaagttctcttaatgacatccctcacgactaaaataggtgctaatagacgtgatactgatgttcctgattttctccctgttaatactaacttgtctgatgagaatactgcagtgcacagacatcaatatgcagggggtcctgttcaccgaattgatggatcactacccactgttgcaagtttgacgccaggggaggaacctgaccagtctaccgcgcatgcatctgagggaatccgggacactgtacaggcgcacgccgctcctgtgccggaccactgtaccacgcatgctgctcctgtgccgctccactgtaccgcgcctacagcccctatttcccctattactacaggcgctgatgtgactatacaggacacactctctttacagcaaacaggggaagcagccgcgttcttgccagagccggtccatgcccatgatgatactgctgacacgtccctacgtccacacacgagaccgcggagcggcatccggaaagagaaaatatacactgatggcacaatcaggtatggctacttcacgtcctctggtgagccacagtgtc

SEQ ID NO: 187592 - DNA, 355 bp, Zea Mays
ggggggcactgcctcatcaactggcccctaacttgcctcccaaaggacaagggaggacttggtgtgctggaccttgatcgttttgcgagggggctaagattaagatggtcgtggctacgttggaagagcaaagatagggcgtgggctgccttgaagcttccttgtgacaaaactgatgaagatctcttcaacgcttccacaactgtcacggtaggcaatggaaaggtggctgaattctggaagtctagttggattcaaggccaggcccctaagaacattgcgccttcattgttcaagaagaccaaaaggaagaacatcacagtggccaaagcgctcaataacaacaactggattc

SEQ ID NO: 187593 - DNA, 338 bp, Zea Mays
gttcacacgacgcaatccatgtggacctaggggagtcgggtagaaacggtctagaggacatggccctcaagggactatcgaccaatggcgaggtggaacgcctcttgccagcaggcatagaacgtcgaggacgagaggcatgaacacatgaatgtgctgcatgacaataacctatatgtactatggagattgagtgcgacgacctaagattgaggggcgacgacttttcacgaagaagggcgttgtggatgtctggtgcatcggcggtggatgcgtcgttcttgaggttgtcctcatcaaggttggtgtcgttcggaggtggctcagatgcgatcgag

SEQ ID NO: 187594 - DNA, 391 bp, Zea Mays
gaaattgtgacagtaaagtgctttgacttgtttcctcaatcagaatcaggagcaagcacaacatcaggagctacgagttcaatcagaagttactctctgtcaagcacaactgataaacacccagagcaaggaagggatgataacaactcaaccatgccggctggaaacttgttttcgtctgatcgcatgcctttagttatcttactgagtaggaagggtcaatatggcattctttatcgcaagtgaacaagttctgactatacggcagcctctggtggacagttctaaccggaactgtttgggttataacatggaaacctattgacaacctactctagtgtgggtgtttgattgtgcatctgcttccaaaatgtatctggttacatttttg

SEQ ID NO: 187595 - DNA, 544 bp, Zea Mays
ctcaggttggttacagagcacaaaagtcacctcttgaggtacctgagatgatgcaggcatgcccatctactttatgtgctgtagttattttcatcatacgcaactgaatcatgacactgaagttatcatgaattcagtggtcacagcttgaagatgctaacttgcaaacgaaatcgatgccatctgacaagggaacagccagtgagagtacaactcctaattttgcaatgggaagtatggatggaaatatatctgcgtccagctcacctgaggagctacttgaagtatgaatgcttacacattttttttgtcttggaatactgttccggtatgaattctgatgcacatacctatatgcttatcatcagcaagcattacagtatctgggcacaggctgccgagatcaagccattccactgatcaggtaagttggcgttctgctttgtctgatcaattgttggctaccatttccatctgcaaaacaatgggagttggtgatcaatatcgcacacaggacagcagtagagagaaacccagatctgta

SEQ ID NO: 187596 - DNA, 500 bp, Zea Mays
cttgctgcaatggtaatatttactgcggccaattatttgttatgtaaactactggtgtgtttggttcgaagaatcaacttatcctaatgcagtgatgcatcataagtttattcctcagatttagtgggatgacctcattcctcatgctagtattaattattaacccgtgaggaatggtgtcggatcaatggatcacatcattccaccaaccaaacaccccatacaggtatcactaaagctgggttcatggattcttagaaaagctacaagagggtattcatgctttagatataacagaacagtaattttcagtctagttgcttaagcagttaaaagtaattcattcctttgtccatgggcaatgttggttctgccaagaggtaacctgcttttcatgacagtgaacctgttatgcaatgggcaatcttgctcattgtgcatgagggattattttgcttggcatttggacacacattggattgcttgggcttcgatttggc

SEQ ID NO: 187597 - DNA, 411 bp, Zea Mays
tacgctcctgaggaggttgcagacaacgagaagaagcaggagttattcctggagggacttattgggccactccaatatcagttgatgtctcctttccatctttccaaagacttctaaacaaggctatagctctggaacacaagcgtgttgagctaggtgagatgaagaggaaggctaccaaccaagggcatgctggtattagtactcgtccctgtttgtccctgttatgcttcatcgcaaggcaccccaatgcttggcagtcctaggcaaccgaattccagaagtcagtccctcaccaatcaagcattccggtgggaccagttggccctaatacttcaacaaacaaggcatgcttgaaatgtgcacaaattggtcattatgccaacaactgccctaacaaggacgcctaca

SEQ ID NO: 187598 - DNA, 454 bp, Zea Mays
taggtgtgggctagaatctggtctgtgttggcccagcattttattgctgctggaagccaccacgaggagaaagttgcaatgtatgccattgattcgctaagacaacttggtatgaagtacttggagcgtgctgaattaaacaacttcacatttcagagcgacatactgaaaccctttgtcattttaatgaggaatagtcacaactcaaaaatccgaggtttaattgttgattgcattgttcaggtatgtccatatgcatgaattttgacacatctataaatctatgaaatgtaatgatctggtgtttcttatcaaatgatgctacatataaaaactttgctggatgtacatgtagttgatcaagtcaaaagttggcagcataaagtcagggtggcgttgtgtattcatgatatttactgcagcggctgatgacgaggatgaatcaattgttgag

SEQ ID NO: 187599 - DNA, 387 bp, Zea Mays
gaaattcccaagttgattggtaatggagattctgtggttgtatcctcttcttccgattcaagcaagaatataccacgacctgaacacttgtgttctggtgaatatttttccttacagtggtagcattctccactggcgcgtttggcggctaactcatctggagataggcgcctaaaacgtggtcggttggccgtagttgctgtcggtcgtgccattgttggtgctgcaggtttggagggtacttccagagctgctgtggactgtccagtggagctgcccgtgtgcatcaaacgtcgttcatacaccctggccagatgcatagcacgctgcagcgtctctggagtttgtaattccacatcagttcggagagcttcgcctaagcctgct

SEQ ID NO: 187600 - DNA, 919 bp, Zea Mays
aaagcttctgaggtgcaaccggaaggagatggtgctgttttggtgcatgaagaaagtaatgcaccggaacaacccaaccaggaagcttcaaatgttgttgctagtgaggtcttgggaggtcactcttctgacttgcatgaaattgaggtgatattggagggagatggattgaagattggatcccatcagtctgatgttgttttagaggttggagctgccaccccttttctaaaatctgagattcaaacaagtcagctctgtatttatgctgctgatggaatcagtgcagtaagcagcagttgggtatatactaccgacaaaatcaacgcgctaagcattttggaaagtagtgatgttgccttcttttatccgttattggtattaactcttaagtagcgtgaaagaattacatacatctctaaggaatacgctctttgttcaaacctgcaaatgttatactgcttctggtgctacgtaccttaatggacgaagtatccgtcatgcacttgtttatcagttgcttcttatgtccgctagctttttatgacatcctagtagggtaacacctcggaatgttatgtctgatatatttatagaagtcttggttcttttctgttattatctgttaatgcgtattggagacttgaagcgatgttgcaattttttgtacagcgttgcattcttactgagacgcgctcactaaataaggcagtggaaagcatccccatgttggaaactggagagcaagctactggtggttcaaagtatttcactatccgttgcatattatttatgccattagctatatagattctgtttgatgttgctaagcatggatttggtatgtcagctgattctgtagtcacttctgtattgcagccagaaacctctactagaattgccaaatagcgcttgctct

SEQ ID NO: 187601 - DNA, 358 bp, Zea Mays
caatgtgatcgttgcagtgcccgatacgaagggtcggttcagtttcagtctttcagtccggtcatcttgtgctctctagataacgcttgttccccatccgactagctgggctcagagcctgaatcgacaaccatcgccttctatcgtgtgggttgcttattggagatgccgagtggttccagtccacaccgtgccacgctgggttcagttcacactgtaactcctctggtaagctagctacatccactacggtggtgtggacgtacgcatcagaagttacgtccatttagctccagtttaagctgcctgcttcgaaagacatttctccactggttagcttttcgctgaaccatacgat

SEQ ID NO: 187602 - DNA, 388 bp, Zea Mays
tgaagacgattctgatgattctgtgtctaagtgttttgagtctgatgattctgggagttcgattgtgtggacagaggagtcttcggatgaggatttggattactttgcggcattggatgtggctgcggcggaggcttcgccgtgtgtaatgggtgatgaggatcttccgggtgcgagtgttgggcataggcggcgaagggcggtggcgaaacggagggtgagtgagctgccgcgaggtaataggcgtcatcatggtgaggtggaaggtggtcgccttcgtgtggacggggctggcaagcgggaattgttgtcctcgccggctggggcgagtgtgggtgagggggagctgcgaagtctgtttgcgggtgaggaattgaggataatgttg

SEQ ID NO: 187603 - DNA, 330 bp, Zea Mays
tcagcaccgagagaacctcagggtccagcgacgtcaacccatcaagcactggtcctctggggaacttgagccccctcctcagcgagacggctcaatcatcaatgctgatgcccgtgtacgacaagaatcgtgctgaaacaccaaacttggcacgccctaagctgccaccaaaggagctgttcctggagcagcttactgctggacatgagagtccatcaacctgccactcatcaggccaaactctctatttccctttccaacagcctttaggctacaacagtgagagtggcagcagcgatggggcgaatatgaattcactctggttcaacc

SEQ ID NO: 187604 - DNA, 314 bp, Zea Mays
ttttgctcgatgaaaccagtccacgagtatagggtttctttagccttttggcaatccagtcttttacgcatgtctgtccatagttaccctgaaattacatccaccgcaatgtacatgcatactccattgcctcttcagtagaatgaaccgtcttcttttctgtcgctgaacaccgccgcgtgctgtggatgtgcagtgcaaagaaaatactcccaggtcataaccaacaacaacaacatggctgcaatacatgagtgatgagtcgtataatggccacctcacattattagctgatctaacaacccagctgcaaa

SEQ ID NO: 187605 - DNA, 1081 bp, Zea Mays
gctcccatgcatgcagcggaatgccactaagctcaaaatcaaccggagtgataaggttggatcctaaagaaccaagtagcttggaccatctcttacacagcaaagaaaaggagcctgatctgataatgtgcctcctatccgttagaaaaatagcctggtgctcatagggtagcataagcaagaactcagatggggaggactgccttagaattaacgaaacagccccaacttcaagcttcagagcgatctcctccaaaatgtcagcagtggtcacaggaagatcgctaataaccgaaatagagaccgcattccccaggtcatctaccgccttggaaaaatgattgttccatccaataatacatgatccatgcttaacaccagaatactgatccaaaagggtctcgtcacctcccggttgatcaatgtgatcggggccaggatcagaaccaccccggatcgaggaccgacgcttgcgatgacgcctacgacgatgacggggagggagggtccctagcaagcctggatcgtccatatgagacggctccaccggagacgaagaaataaccaacgtaggagtcctcccactagaggcctccagcgcgtggccagagccattgcccccattctgtggggagaccctgcgccaaaccatcctccggacttcaactccacctggaggagacgtcggtgggcgaagacggtcccagacagagccaccagatgcccgggtgtgggccttgggcgctaccggaagccggacagggtctactgagaccaccggagagagtctgccccagacaggtcccttggacagccgccgatgaactggaaccttactggcagacctcccaacaggaacatggcagttgtacgaactatggcccagacccatgcagcggagacatcttgtcctcaaacgacaagacgcagcaaagtgatcttcagcgaagcagttgaagcaccggcccaacaagttccgaggaacagaggtgacggagagcgggagctgcaaacgacgcctcctagccttccgggattccactcgaatcaagccgtcctgaggaggctccggcgctctaac

SEQ ID NO: 187606 - DNA, 1045 bp, Zea Mays
gtgttccgtttgcttgggtccgagtttcagaattttgttttcacaccttcagttggggctagtggagggattctagtggcttggaagaataatatcagctcatgtggctctaggattgatgatcattgtgtctcggtgaatcttagccttgagacttggtcatcttggtggttgtcatgtgtctatgcccctcaagggaatcatgagaaaattcagttcttacaagacctcagattgattaggacccactgttctgggccatggctggttgttggcgattttaacatgattctgagtgatgaagacaagagtaattccaatgttgatcgtgctatgatgggcaggtttagaaggtggaaggatgatcttgccctgctggagcttcctctgattgggcgcaggtttacttggtcgaatggccatgcctgtcctactttagtcagattggacatgatgttttgtactgctgattgggaagatttatttccagattgccttcttcagagtgctgcaactcaagattcggatcactgccctctcttgttgggcctgcatgatattaataaaaggaaagggcgcttccattttcaggccttttgggtgaaattggagggttttcaggatgttgtggctaacacatggagttcgattcccgcaggccagtgccctcttgttagtctttccaagaaattacatgctacggcaaaggctttgcaacgttggagtgataataaagtggggggtttaaaacttcaacttgaaatggctcaggagctccttcataggttggagatggctcatgacagcaggactctatctccaagtgaggattggttaaggcgtacccttaagaagcacatcttggtgctctcctccttgtcgagatctatagcccgtcttcggtccagaattaattggttgaaagaaggggacactcatacttccctgttccatgctcaggctagattcagaaagaagaagaattttattggctcattatctacaagtgaagggcttattttgacatcacatgaggataaggctg

SEQ ID NO: 187607 - DNA, 405 bp, Zea Mays
cgtggaacgtagcttggtgaagaacgggcgtcaggggatcagacacatggagttagcctaaggaggtagtggcgaacagtggtggagctagctcgatggggtcggttgacgtggtagtcgctgccatagggtgcggtgtggaggtggagagagcacccgtggcgaggggcacgagggagggaaggtggagcgtggggacaagagcgggcacacgggggtagtcgttggcgcaaggagggaggccacaattggagttcgaggttcgttactcgtctgtcgtggccgcacccgcgcactgtacattggacaagaagtcgcacagacgtgggttgccggcaaacacagtgggggcaggggtggccgacaggggaggggtcgttgtgggggtggtcaaggcaccgactg

SEQ ID NO: 187608 - DNA, 364 bp, Zea Mays
gtccagggctgccaggttgtgtctaggaaggccaagggcctccagatcaattgttgcattcctctgtccctcctgcccaatgagttttttgtagaagaagtccactgctgctgctttttcactatgccccgttaggatatgatctccatcaatcaacttggcaacaaagtttttcttcttgcggtacctagcatgcaagtgaaaaaactttgtatttgcgtcaccttcccccagccacgtgatccttgatctcagcctagccatagtgcgtttgaatgatgatagcagcaatgattgttttttgaggcgattcatgaaccaattttctgctggggatagggctctttcatcttgtgcaatctca

SEQ ID NO: 187609 - DNA, 359 bp, Zea Mays
caacaacacatcagagcgacggctgcatattggaaacagcgagggaaacagaaggcgatcagggaaggggatgcaaacaccgcgttccaccatgctcaggcaactcaaagattgaggcggaatcatattggcaagatcacgcacagggagcaggaactgttcagtcatgagtcaaagatagcagcagtcacagactatttctctgggattatgggggaagcaggaaactccacatggaacttcaacatacatgaactctacaatggaagacagcttgcgtctgaaagtctaacagccccctttacagatagagaagcactacaagcaatccgatcaatgaataagctgagtgcaccagg

SEQ ID NO: 187610 - DNA, 2989 bp, Zea Mays
gcagttggaaagtcggtaaatcagacaagaccagatacaaccatatcacgaaggatatcgagatatcttagcactgtgcaaaaccatcctaaaaaagtttctgattctagccaccttccaaaaagcttgtccacagaaagtgcaatatgtggatcaggagcaagaagtttggagaacagcacagcaaacagaactatgtatggagctggaccactttcatcttctgtagtaacaatgacaaacgacacagagccagagaaagtctggcactacaaggatccttctgggaatgttcagggtccatttactcttttgcaactttcaaattggacaagttacttcccacgtgatctgagagtatggcttacatttgagagtgaagagagatcattgctgttgactgaagtgctttcaaaacagcagaaagattttactcaggctgcatcacatacaagtagcaaggcaacactggttggcactggacatacaaggaacaaccctagtgtggatcagaccaatgctttctcccctgttggtcatagcgtggttagttcttctggaatacctgttcagtataataagtattctgttccagaaagggaaagtgtgtactctccagatgatagcttgtcgctgtcaactagttcggttccaccaaaggatgcttatactgtgaatagccaagcacactgccagaataagcattctgttttcattcaatctcctgggagttcatatgggcacacagacttgaaccatgatggaatacagggaggatgctctggtgaatcaaaccaccatcacagcagtagagccctatggagtcctacagtggcacatgtgagttgtggacgtggtaacgtggaatctcatcagaatcagcatgtttcctggtcagaaagtcaacatgaatctaaaaatggttcacaaggaggatttgttaaagatctgaattcaaggcaggatctatcgaaaaacctacctgctcaacgtattgggaaagatgtttccagtcctttgtttgcttggagtccggccgagtcgaggacagcttcaagtcaacaggaagggtcttgcttaagttcaacaactaacccaagctttctcgatgaacttcattcttctattgcttctgcaaagcctaagagctgcgctccagcaacccccattgaagacagaggttctagttcaccatcagatatgctaagtcatgaagaaagagttccaatctgcagtccacaatcagcccctttagcatctgcttctgatatgtgcaagatggaggagatcatgaatcagcaaagaacacttgtggtggatacatcgaatgcttcagttaaccagtctcctgaatcaagggcttttcctgtatcctctcctgataaccaagatattgaccgcgagtttcctagtccagttccaagatctgagaataaggacattgctgtggacagctcagaattagcaccagcgtcacctgaaaatattactacgaatttgcctgtttcagatacatgcaagatggaggaggtagtgagtcaacaacaagtaattggggctgttgtatcgaattcttcagataaccattctcctcaatctaaagtttcccctgtatcttctaataatgaagatacgaaacataaataccccagttcaaccccaaggcccgagaataagaatcctgcggtggatagtttactttcaacgtcagctgctcctgaaaatctaacgacaacttcaacccatgattctgatacatgcaaaatggaggtagtgaatcagccaaaaacatttgaagcggatgcatcaaatgctccacttcatcaacttcctcattctcacagtttcctggtaccttctgacaatcaagatattgagtgtgaatgtccaggtccaactccaagatctgacagtgaggaagctcttatgaacaactcagcgacaactgcatcagcctctgatacaagcaaaatggaggagtttgtgaatcagcaaaaaacccttgaagcagattcatcaaatgctccacttaatcaatctcctcattctcacattttctcagtaccttctgacaagcaagatattgagcgtgaatgtccaggcccaactcaaagatctgacactaaggaacctcttatgaacaactccgtgttaacatcaggaccatctgaaattcagacgacagcctctgcagcctctgatacatgcaaaatggaggagtcagtggatcagccaaaagcgcttgaagcagatgcatcaaatgctccacttaatcatcatcctcattctcacattttccgtgtatcttctgataatcaagacaatcagtgtgaacatcctagcccaaatccaaaatctgacagtaaggaacctcttgtggacaactcagtattaacatcagtggtgcctggaatgctagcgacaacttctgcctctgataaatgcaaaatggaggagtttgcgaatcagcaaaaagcacttgaagtggatgcatcgaatgcttcatttaatcagcctcacattttcgctgtatcttccgataatcaagatatggagcgtgaacgtcctagcccaactccaaggtctgaatgcaaggaatcacttacggagaactcagtattaacatccttggcgcctgaaattctagcaagatcttctgcctctgcttctgataaatgcaaaacggaggagtttgtgaatcagcaaaaaccaattgaagcggatgcatcaaatgcttcacttaatcagcctcatgtttttgctgtaccttccgataatcaagatatagagcgtgagtgtcctagtccaactccaaggtctgaatgcaaggaatcttttatggagaactcagtattaacatcagcggtgcctgaaattgcaagatcttctgtatccgcttctgatacatgcaaaatggagtttgtgaatcagcaaagaccaattgaagcagatgcatcgaatgcttcacttaaccagcctcgcattttcg

SEQ ID NO: 187611 - DNA, 381 bp, Zea Mays
tgatcatcatctgcagcaacccacggttcgtttgatgggtaagaccgtctcagtttgctcgcatagcaaggatcataacgtatcgaccatggataaagtgagtcctaacaatgttgccattgaagcaagccgcctatccacaatttcatgtcagttacccccaaagagatcgttcccttgtcagaattctgtgacacaaagagtgcatctaaacaattcttcagattttttggcaaggattccgaacaatagtgtgccagggcaaaatactactttacatgaactccatgaccaaaggccacaaccaacaaatagttctgcaacagtgaaaggttgcacttggaattttggtaatcagtttgtttgccaagctgaactcga

SEQ ID NO: 187612 - DNA, 1369 bp, Zea Mays
cggccaccacgcagatccactctacccgagcaatgcatctctaccttctgtcgtcagagatctcgcccttccgcgtggtcccaagctctacagatggtggatagccagagattttgcccttccatcccgcccttcccaccatccttgccccaagccagagattcgcggccatccgcgataatcaatcagcacaaatcgacggccctggttttctgttccttcaatcaccttcctaagtcgacgccaacctaccatcgacggcgaggatggaggtccttaaatatgtccaaagcgaggctgccacaccaatccccatcctccactaacgaaccaatatcttacaggtactctgcatgtgtgtgaagccgtctccgcctccaccaccctcggtatggacaatcgattcctcttcatctccctctcgttgcgtcgtctcctgttgcgatgtggatcgtcgatgcgaatggaatgcggtgtgtggtgtaattctggtggtttttgtgacctacgagtcatctccttaattccaatctggtatttattagtatgggtgaattgtcatggatttgtgatactccactgttctggggaatgcatatgtttttcagattgttaatataactctgcttcctgtgagaatacaggatatgtttttcatgtcatggcccatgggctctgaaaacttatgttagactttgccccggtttctaattgcaggcagtgagtggtatgagtggttgctttcaaattgcctgatgcacaatccctgcatgaggggcctccttttgtcagtgcaaacagttttctgttttatcaatattttccatttttaactgccacgtactgttgtttacatatagagtcaatatgtttagttgtatgtgtcctgtattgagccaattagcatttcttgatttatttattgtggcagcatgtggatgagccaactgctttctactgtttaagacatgtctgtacctatcactctgcatgtgtttccatgcatttcagttgggatttggtccagccaatgtgctatcttcgaacattctacatacccattcttgtggtagccacattaataaattgataatttgtgcgttttgaggtatctgatcttttatcacaacagagcaatgcttcacacacaactttggtgctgatcaaaatgcatattcaccacaatctacagactctgatattgttcttgatgattaagtagtttgggaatctgcaacattttccaaaccatcattgttggagctgatatttttccttttcatttctcgtagcctggcttagaaaacggaaaattgtaattattgactgcttgttggcaggatactgctagatcagatgcaatttgggc

SEQ ID NO: 187613 - DNA, 656 bp, Zea Mays
acatctttctcgtccaactgaatatgttttacagcttcagagtcgctttgctctaaaattttccgtttgaattcatctctttcctgcatagctttctcatacaaccccataagtctatcattttcctcatgcatctcctccagctgaagacgcaattcaacagatgtaactcttgagaaattgtcctcattggtgcatttttcgtctactatcttagactcctgtgccacactagatgagttatgtgcatggaaatctgatgtggctgctggttgggcattcaacagatcatctacagggtttccatcttgatttgcctcaacattgacaacagtgtgttcatagagctcaaccaatctcttgttatcctcaatcaaaaccttaagctgcagcctcaattcttcattctctttggccaaaccgatagcagtttcatgagcttctgcctcccgttgactcgcagaagctattgcatcaaccaaagtcttaagttccatctgagcgtcagacaagttatgtaaatctgcttctccttgctcctggagctgggcagccttgaactctttatatgtgttgttgtgtttctttgtaagctccaactctgtggtcaactcattgacatgcctgcacattatttcatatatcaggcaatgata

SEQ ID NO: 187614 - DNA, 625 bp, Zea Mays
gctgcattgagaaatttggctgggaaggttccatcagatcttgtttactcaacagatgatgtaaatgatgatgaatgtggtattcattctgaaatttcccattgtgatctagaagacacctcttcttatggtactgcatatgatgcatttgggggaggaaaggaaggaaaagaagcatgccatgccattgcagctttgtgtgagatctgttctattaactcgttaatatccaacttcattcttcctctacaggtgagctggcttcacctactctaatgtactttgcattgcaacagacattattgtacatatggctatgcgagcaatcacttaatagtcttagttatctatctgtatctttgtcctatttatatttattatatccttttgttcatctggcagggaaatcatatatcatgtaaggaagggcggattcactgttccttaaatatcaacacagagacaggacgtttatcggcaagggcaccaaatttacaggttggcatttatgattctacattttagggagtttgcatgtgttttgcagtttgaaatgacattcttgaggtcaagaattatacaggatttgggctgtctttctacatattagcgcatttcagaaaag

SEQ ID NO: 187615 - DNA, 367 bp, Zea Mays
tttgttgcaatgcttacttgatgcatgggagaagcacacacaaagtgaaaataagggattttacaagatagataaaggcgacgatgaacatgatgatacttgtgctatttgtggggatggtggcgatttggtgtgctgtgatcactgtgcttccacttttcatttggactgtttgggaattaaggtatgcatacagatatatatatgtgctacaacacttttgtttgtttcaaataggtctgttgggggtgggtcgggggatgcacccctagattgtctattctgtcgttggatgcatttatgtttatttaatttatttataacaattgcctctgcagcttccctctggcgattggtattgtcgcag

SEQ ID NO: 187616 - DNA, 274 bp, Zea Mays
gcgggttccgccatgcgcgtgggtagaacaccctctgcgtatacgcatcaaagcgaaacttgttcccaggtcatctggaagcggtagtgctcacctcgtagctggttagggcagccgtcgctgggttgggccagtccacgccgcgtcagtgatcgacggcgagcgcgccgtggccaggggtttatctggtgaagaaataaaagtcggaggacccctgtgtaaactgtcagcgactcatagcaatagtgcggcgaaccctgttctggttagtcaa

SEQ ID NO: 187617 - DNA, 306 bp, Zea Mays
ttcacataggttttgtttaagaggtaaaattagagggaaagattatagagaaaaggttgtcctaattcacctcccttttagatgtccacattccttttagggatctctcactagaggccccactagactcatagtaggtccttgacattagagtagctacaatcaccctcccatgctcctatagtggggcgatctaccatgtcacaaaatgtgctagcacgatggtcgatgttagaccggtgtcggtgagctggtcgaccttccttagcattagctctcatgttacatccatcttcggctgcgctt

SEQ ID NO: 187618 - DNA, 325 bp, Zea Mays
ggatagattattcagagtttgtggcaatgatgaggaaagggacagctggtgcggagccaatgaacaacaagaagaggcgagacatagtcctatagtgaagcagcaagtgtgtaatgtgtataggagctcaagcaagcaaatttgtgtatcagtacacagatgcaatggagctacttttacggcttagttcaccgatggctgtgtacattgggccattgtttgcggggggttttaatgctacgcatacttagggactgagaaagacatggacgagttcatgatgcgtgcagatcagtctggaagtcctggaccaaatagagagaaa

SEQ ID NO: 187619 - DNA, 516 bp, Zea Mays
cccacatgaaggtccacatcaagcgctccatgtcgttcccctccttcgacgatgttcgcgccgacctcatccttgagattgactccagcgtgccaaaaccgccaccgacaaccgccattgtcgttgctctgccatcggtaaccacctttgttgctccaccacggccttccgatggctctgctcccctagtatcccctcttctgggggcttgacgccccctagcggatccagttgacctaggcgccctccgatagtagttctagctccactagtggcggaggctcctctagtgcagccattgatgtctcaccatgtggcccggtctcgtgggtgcgccgcaacaccaaggtggccaagcgccgcgcatgcccacaccctagcctgcgcaacatgccctgttcgttgccccaacccagtatgtgtccctgccggcccacttcgcccagttcaaccatgggtggctactatcgccacagatcgagccggtccagcactagcttgggctaactcagcagt

SEQ ID NO: 187620 - DNA, 319 bp, Zea Mays
atttgagcagctgtgcgttcaaaacgctcatgtctttttggcgtggcacaccaaaatgcaacactatcacgtaccctttcaatgcctttatccataacagtcattccatctttcacaataagattaatgatgtgtgctgcacaacgcatgtgtaacaatttaccatctagcatgagggagacgaggggcaacttatcttgcatagaactcatcaaactatcattggtcgtgcaattatcaagagtcacagtcgacaccttcttttctattttccaatcttgtagtacctcataaaggacatcacttataacttcaccag

SEQ ID NO: 187621 - DNA, 331 bp, Zea Mays
acctccataaaattcgctatcttggcaggcgcatccactcttctgagtcctgatctagtccttcagagacaacgagcttcctcttccaagtcccaattcccgataaccaatgtcaaagcgcaagcacactgaaggcacgaccgcacgagctagcaaggtcctcagtgactgaccggcgataaagcagcggccagcagcagtgtcgcacagcacaccagctgcttgctcactcagggaagcttccataccaccagcccaccaccatgccgaccgtgctgagcacaaggcgggccgcatcgccggagacgatctccctcccctcctctcgttc

SEQ ID NO: 187622 - DNA, 494 bp, Zea Mays
atcgcgagaacggagtggtggaagcttagaggggaaccgacacaaatgtttaaggataggatgctaggtgaggagccttgggaagaaggagaagatgcaaacatgtggctaaagatggcaacatgttttcaaaaggtggctttggaagtgtggtgtgagtagggaaggcaaacaggaggcgaaagacacctggtggtggaatgacgaagtgcaaagggctattaaggatacgaaggtttgtttcaagtgcctcctccttgacaaaggtgcagccaacatcaagggatttaaaatagagaagagggttgcaaagcgagctatgagtgtggcaaagggaccgacgtatgatgatctttatcagcgactaggcacaaaggaggaagagaatgacatttataggatggctaggatacatgagaggaagacaagggacatcaaacaaatcaaatgcgttaaggatgagacagatggacttctagtgaaggataaggaga

SEQ ID NO: 187623 - DNA, 366 bp, Zea Mays
gtgaaatataagtacaaatgaggtttgctttgagcattgcaattaacatgtgtgcattgtgtaggctgacagctggcatcacgcgcacaattattccacactaattcaatgtcgggtaaattggagtttgcataacacattttccccatctcaaacatgtatcatcttcttgccctcttcaagctgaccatttgtttatcagccttttttctcatcctgtctagacaaccgagaagcaataacctctatgcttacatgaggaatataagattacttacaaaaacttgaacaacaataaaagggttctctgtatccatgagattcagctcaaagggtacccacagctaacaaagtgcaaaacaagtg

SEQ ID NO: 187624 - DNA, 507 bp, Zea Mays
gtcagatttggacctttatgacggacatccagtgacctgttttcttttccatattgctactgcaatgatacctgtacaccagattcaatgggccaaatgaagcaccccgcctgccgccttcctgtcatctgcgtgtcatggtgtcgcacaccatgagcaccaagccgtacgactcctttcgcttctcccatagttttcctcctggctctagcacccccactgtgcctgcctcctctgtctctagcggctcctgccactgcatctgtcatcactgctagtccctcgctaactagaatgaaacatacctcccccatcatcaattcccaccaccacaatgagcggtgccattgtcaagaacaaattcctccccaccaaaacccccagcccctaaccctaaactcctccgcagttcatggacttcatgagttttcctgagaatgagatcagctcgaattattttgcataatcgtgaggtcagtaatttgatcgatcttgcattctagaact

SEQ ID NO: 187625 - DNA, 489 bp, Zea Mays
ctgaagtagagcacttgttaatgcgaaagacatttactaagtatgtagctgcataattactattcttcaatttattgtgtttgatttgctatattttttcttgaaatgaatttcgtaaattctcaattcataactagcattcaccgtcacccctggtattatctggttctgtgatgtcccacctcttccagtctaaaacataattcaaaagaggtttccttttgttgtactgctgcacgtggtgtgttcttcacctttcctttgtttgtgcttgtgtgttgctttcacaatgtattctttttcaatgctactgaagctgttcatgccgagcattacatcctttgcagggttgagtttgatcgtcttacagacttattgcgtgcaagaaccattgagtctgatccacctaaaccaattgtttctcgtgaggaaaagaatgaagaaagtatcaaagttgatggaattagaggctcagcgttacgtcatatg

SEQ ID NO: 187626 - DNA, 279 bp, Zea Mays
ttgagttctttcttgtaagaaaaggtatttaaattgaactgtttaatgatggaatgtttggtcgtaggctcgtagctagtgtcatgttaggctgtgtgtacaacagctggcctcaacttgttcagttcattagggtcagactaagctctgtataatgaacttttagctcctacttggattgagcagtaataaatctctctagtgcatccctgtatccctgatttgtgtggtagctgaccacagttcctaagcctgtcatgatgatacacccacaaacag

SEQ ID NO: 187627 - DNA, 375 bp, Zea Mays
catgcaactctccaaaggcgtcagttgcctcatgctttgtttcaagtaccacatgagccaacacaggatctaaacctccaattatatggacgagctcgacccttccataagaagcaaaaactgcatgaatcacactctcagtcatggggtaatatacctggtgtatggtgacctcaaggacgtggctaggtgacctccagtcgctcgcgggcttgatgaatttggtgatgccatgcaacacagagtcacaactgttgttgaagccctgcatcaaacacttggtgggcaaggtgctagcctgagaaccgcaccctcctcctcacgggtcaccaactgcaggagataggacgctggggaggataagctgagctcggc

SEQ ID NO: 187628 - DNA, 592 bp, Zea Mays
caactctgtcatggaattgaggaacatatgcaaccatccatacttgagccagcttcatgttgaagaggtagaatacatcttccatttcttcctcactgttgttgttgttgttgttatttttgaatccttatgtttgccatcaacaatttgggttctctttatagattgagggctacctacctaaacattacctaccatctattttgaggctctgcggaaaacttgagatgttggacagattgctgcctaaactcaaagctacgggccatagggtgagtgtatctggatataatttgacttgtaatttgattgttcatttttctctctagttgctggttgaactggaatgttcttccctctctggtcccttaccttttttcgtgccttcgttccttttgtggtgattactgattagttctggatcactgatggcaactataatcttccaggttctacttttttctacaatgacaagattgcttgatgtaatggaggattacttggtttggaaaaagtataaatatcttcgattggatgggcacacttctggccatgaaagaggagctcttatcgataaatttaacgatcctaa

SEQ ID NO: 187629 - DNA, 286 bp, Zea Mays
atctcttcgtcaacggaatgtagcagagttggacaaaagcaacgtcctcttgggcttctgcaccaaatgattgatgacgccttcaaaggaaagcgacagttcttgagtggtaacatctcagttgatacatatgaatgttaagtcattttgtggtgatgttctggctcacaatttaacattttattttaggtaagcttcacaatgttgctagagctattgttgatgaggactttgatactgtttattcgaaagaaggtgtcaacttagaaaagaaggatattttgag

SEQ ID NO: 187630 - DNA, 572 bp, Zea Mays
gggaaagactgagctagtccatcgaatttacaataaccgaatgattttggatacctttgatttgagaatatggctgcatatgtgtgataaaaagaggctattaggtaagatagtagagctcactacttttgcatcctgtggtgatgcctcaatcagtgttcttgaagaaattgtaatagaagaacttgctagcaagaggttgttacttgtactagacgattctgaaatcaaggaccagtatttctggggttatctatggaagctacttaatgtttgtgcaaaaggaagcgctgtcattgtaactaccaagagcatggtagatgctaaccagactggagcaatgcaaaccttttacttgagtcctctatccaaagaagaatgctttatgattttcaaggaacatgtgcttgaagatttagttgtgaataattactgtcagttagaaagcattggctggaagtttgcggagaaatgtggtggcaatccaatgtgcattaaagccctaagtgggttgttatgtcattctgaagttggattgtctgaaattgatatgattgttgatggtatcttac

SEQ ID NO: 187631 - DNA, 364 bp, Zea Mays
ttttttggttacatgtcatgctctatcagagtattatgtgctatgctgattatctatcccagctttttcttttttgcaggaaacaagtttctctgcaccagggtcccatcggagttctaattctggagatagtactgcggatagaacaaacttctctcctagagacaactctagtggaggactttatgtgggaaggcaggattctgctagttcctatgctagttatgttagtgctggtcgtggcgatgatgggcttagatccaataattcatcttttagttctcgggcttcaggcccaaatttgctgcaagggaatactccaaaaatattttcaaatggcctttctcaattatctatgggggca

SEQ ID NO: 187632 - DNA, 431 bp, Zea Mays
tgaacaccaccatgcaattgctggtatttaaaacaagtgctccaaatctcaataataatgccaaaaggtgttcgtgttcgttgcatgattgctttgttagtcgtttgctctctcaatctctgccaagaaaatttggctagcagctgttcctcgttttttattgatcgatcggtaagagctactacaatacacagtttgcaagtggtatacgtacgtatttgttcatttgccaatgcctaaatgataacataaccccagcccatagcacggcgactgatggatcaaagcatgtgtgttcgtcttcttgcctgaacccagattgactccagactccaaagaggtaacatgctgatcgacactagctagaatggttgatgcatggcaacttgcattgacatgtggctgtctcttatcaagacatgtgattcttt

SEQ ID NO: 187633 - DNA, 664 bp, Zea Mays
tgaaaagatgactgctactgataataaaaattatgttgatgatgggggaaatgtgttaccatcaaaattagaggtaatttgctactattaaggttttgcacaacaacaacacttcttagaatggatatagcttcaatggcattaggtattctccttatagggctgtacttgacatttatattaaaattaagttactgggtcactaatgcaggacatcacagagagtgactggacaaggttagagaattacgcaagtaccggagaaaaggttgaggtggagctgataaattgcagtgcgaaggggtttgttgtaagtttgtagttagctttcatatattttcatattttatcaaattatagaattgttcttttctgagccctgttatgttttccttgccaggtgtcacttgactcactgataggtttcttaccgtaccgtaatcttgctacaaagtggaaattcttagcctttgagacttggttaagaaggaagggtggcgatccttccttgtacaagcagagtttgggattagaggatagttttgaggttaatgacacaaacctagaaccagaatctagctcagtttccaaaatagctggtgaggaccaagaatctctgtcatctaagccgaagtttgaagatcttattcgagcatacaaccaa

SEQ ID NO: 187634 - DNA, 312 bp, Zea Mays
gacaacttgtgttcattcgtcccactcctgcccccgtctcgaccaatcagtcgagtgcccctggtgctcgtttccctgcacttcccagttcctccagtggttgcttcaattgtggaaagtccggatatttcatcaaggcctgcccatatccgaagcactcacgagagatcccatgcgctagccaccgcttgacattgaaaccctagttccgtgcggaggcggcaccgaccactctccctttacccgcgccaatgggcaggcgccacagccacaacacagttggggctcctccatgcgaactggaacgagaag

SEQ ID NO: 187635 - DNA, 386 bp, Zea Mays
gttccttcatcgacgaagacaagcccatttgcttctaaaattggatatcacaaaagcctttgattctatctcctggccttttctcatagaggtattgcaaaggatgggatttggacagatttggagggatattctatgtgggctgcttgcaacctcttccactcaagtgatggtaaatgggtttccgggcaaacatattgttcatcgtcaaggactacgacagggtgaccccctctcaccgatgctcttcattatagtcatggatgtgcttgggcgaatggtcactacagctgaagaggcaggacttcttcaaccttttgctacaagatctgtacaacaccgagtctctatgtatgatgatgatgtagtcctcttcttgcgaccag

SEQ ID NO: 187636 - DNA, 787 bp, Zea Mays
gaggaggggcggcggtgggaagaggaggggccacgaccactaacacccagcggtgggggagtagagaagggaggagaggaggagagctggatggagggggaggagcgccggccatggcgcttgggccaccggaggctaccatgttggagaaataaaaccccttatccattgattttgggctgcagtagtacatatacccagcactagtgggttacatgagctgggctctaggctcataatacttaaacacacacaaacagtacaggaactttggctagataccatgttggagaaataaaaccccttatccattgattttgggctgcagtagtacatatacccagcactagtgggttacatgagctgggctctaggctcataatacttaaacacacacaaacagtacaaggagtctaacaatctttataattaatcgactcttttcagggcctcacttgtggaagtcagaatctacctgcagaaacatgtccgaagcaaggaacttcatcttctggtgagcatgctgtagcctgaagtgtctgtttgcaggccatcttttcatctcagcagcctgaaaactcttataaatgtgcaactgcaggtcaagcagaaagaaacacaacaatcttgagtgattacaccatacaacaaaaattggtatttagcttaaatgggaaagagcttgaccggtctgttactctatatcagtcaatcctgcaggatcatatcaatgcagggtctgagataattctggacatgcagttttggcgcagtgtacatgacataa

SEQ ID NO: 187637 - DNA, 1068 bp, Zea Mays
caagaaactatcaaccacttgtctcttgtgtattttctaggcaagtttggtttgagttgctgcggagagccaagttgcaggagctgatgccacagcctaaggagcaaaattttggtgagtggtggaggaacagcttccttaaagtgcaagggcagactagaagagggttcaattccccagtcattcttggggcatggatggtttggaagcatagaaaccaatgcggttttcaaggaaaatctcctaatattgctgctgtcgatagatgaggtctcggtgtggtcttcagacggggttaaggacttatccttcctccaaatttctgccccccctggctgactagtgtttaggagttgtggggtgtgtgtgggttctttcccctaatatattcttcttaatataattatacacagctctcttgcgtgttcgagaaaaaaaagatgattgctgtgattctttgatggaaaaaaagggatgattgctgtgattctttgatggttctgatccttatacaatacttttgatattatgtctttactgtttcttataagaatctgaggctcgtgaattgatggagcactttgtggagttacctccagagctatgctctttgaagataattgggttctcaaaagatatgggcagttctttgtccttgctaccatctctaatgtatcgcttggagaatttgttggtggctattgagttgaaggatgtcatgtcatcttatttcccagaggcttctcaaattagtgcctcgggtgtaagtaatactaacttttgcactgttgaggctgaaacttctagtttgattttgctatctatgctgaagtaattgtgatttatgacattcattacagatccttgaatcattgactactgaaaggtgtttagagaggatctctttggagcgattagaagtcctaggtgatgctttcttgaagtatgtagttgggcgtcataactttatttcatatgagggacttgatgaaggtcagttgaccaggagacgttctgatatagtgagtaattcgaatttgtatgagttatcaattagaagaaatttgc

SEQ ID NO: 187638 - DNA, 586 bp, Zea Mays
gtttgagaaaaatgtgtctgatatgatgaacactcttcttagcttgaagttggcgagtgaaaattattaggatatgtatctatcaggatcaatcagagcctgattagcaattgattgtaatcccctagattggctagctgccttgtatagactaggattaccttctatctatagcctaggtctgtttccttgtacagggaatagccttccttacatgtaccttccatacatgcctattggctatatatgacaggctccccaccctcaatgggtgtgtggtgattcaatccattcttccctctttctacatggtatcagctctctagatcctgcgcccatctccctgctgtgcgcagcgccaactcctccctgctgcgcctcctccccctggtcaccatgaccgacgccaccactcctgcccccgctgtgattgtcgccccctatgcgacgatcaatgtcaagaaccacatcccggtgactcttgaactggcaaaacccaacttcaaccagtgggaaccattcttcacctctctctgtggcaaattcgctctcctctcgcatatcgatggactgcaggaagctcgtc

SEQ ID NO: 187639 - DNA, 328 bp, Zea Mays
gcggaaccggcggcgtgggtgagataccaagacccctactccccgttctacaaatcgcctagcatttcccctgtcaaaagtaagatcgcgtggccaatttcagctcctagagagcaaagctgcagagctcacttgtctctgagtttgacaatatcttagtgccaattactgggtttgaaacatgcgagatagtaaacatcggaggacgaaggataacatgtttatgttgcattgcaatcttacgccttctccaacttgtgttgccgtgtcctgcggcagcacttcgtagcttacttgctagatcatttgacaagatattgactgggtg

SEQ ID NO: 187640 - DNA, 567 bp, Zea Mays
ggctcctcaatactgcagcgaaccgaccaatgactcgctcacaaaccggctccctctacattgtctagcgcttctgcttctccgcctccgtcgcctcgccaatccctgcaaactatcgcagtgctcttgccaatccgaattggtgtgctgcaatggcggacaagtacaaggcattgatcgacaacaacacttggtgcctcgtacctcggtcacctggtgcgaacattgtcactggcaagtggctgttcaaacacaagctccactctgacggctccctcactcggcacaaggcgcgctgggacgtcagctacgacatgtgctccacaactccatcccacgtgcgaccgttgtctactgtgacaatgtgagcgtcgtttacatggcggctaacccagtccatcaccgccgcacgaagcacatcaaaatcgacatccacttcgttcacgagaaggtagctctagggcagtttcgtgttcatgtcccatctacgcaccagttcgccgacatcatgaccaagggtctgcccatccagctcttcactgattttcagaccagtctatgcgtacg

SEQ ID NO: 187641 - DNA, 757 bp, Zea Mays
gcaggatcaacaaagctagtaggcttactatagtagacagtctcaatgatagtcccatgaacaaaagctatattgacatccagttgatgaaccgaccaagaatgggacaatgccaaaatgagcatggtacggacggtagcagacttcacgacgagacagaacgtatcatcgtagtcaacaccaaggcgtgtataccaccgaagaacccggtgggtcttgtaccgatctagagagccatctgcctttcgcttatgggtctagacccacttgtcagtcaccacgttgccgcctaggggtcgaggcactagctcctaggtgtgattggcaacgagggcttggtactcttcctccataacacaatgccaatggggatcggcaagggcgctatggacagaagactgcacaagagaggctgatggtgaggcgttcgtggagaggatgaggcgatcaacagggtgaagtaccccaacagactggcaagtcaccattgaatggatgtggcgagggttgcgatgaagaatgggatggggtgacacactgctggttcggggcgagagcagggcggtgtacccacccaagcaatacgttgataggcatgcataggttgggcgtagcgatgaggaacaggcataggcgcaggagccacaagaggcatcaagccaccagccgaaccaatgtaagagaacctgcatgtggaaaaacaaacggtggctgaccataatgcgccacggagtcaggatctgtcgccgcccgaaac

SEQ ID NO: 187642 - DNA, 298 bp, Zea Mays
attatgctttattggataataactgtgagagagttggaagcgtgtgtttgtatttattgatgaagatagacagcacatgtacaggtatatataggggaggaaggtgagaggtaaaaggaagccttctacacctaaggaaagatctagagtacaatcagatcctcaatcatagtgattgagatcctcaatcagatcctcaatcatagtgattgagatcctcccctaatcctctctatctatatcagacaatacttccatatagggcggccggcatatctgccaggcgacagccaggata

SEQ ID NO: 187643 - DNA, 273 bp, Zea Mays
ccgcgtcagtcttgaaacattgtattcaaagcgcgcactgctaatcgatctggtccagtagcaaaagacgtgcacacacggtacacattgctaaagattaagaccaacctgtcagtgccaaaagcctcttttcaacctggcacgtggtttaccgtagcccgttccgatccgtcacaaaagagaatatatatcagctacgtgaatgtacacagttactccttaattagggcatccttcacatctttacaccagatgttttctgcccattattca

SEQ ID NO: 187644 - DNA, 342 bp, Zea Mays
cgacagccatggcgtgatagataaccgttgccgtgagcacaaactgaacaatagtggctcgcccagccctcgtcattaggtcggccttccaaccaggtaagaggtcggccagccgatcagtgagaggctgaagttgagccttggacaacttcttaagggagagtggtaaacccagatatttgataggaaactcatcaatcttacaggggaaaacatccatgacttcttgcacaaccagttgagagcaccgaataggggccaccgaacttttatgcacattagttttcagccctgtagcgtctccaaataagtccaaaatcctagttaccatgtccagttcag

SEQ ID NO: 187645 - DNA, 442 bp, Zea Mays
atgagaagctgaagttagccttcttccatgtcttggggaatactgttgttgcaaatgatcttgatcaggttgatccttgatttgtttggtcttaaactttttcctactaacgtagttgcttgtagttgtaatttgtgctgtgattaatggtatctcagcacctgtctttgtcaggcttcacgaattgcatacactgcagcaaaggagttccgtcgggtagttaccctcggcggtgaattatttgagaagtctggtaccatgagtggtggcggtaaaagggtacaacgaggcatgatgggaacagccatccgagaaagcttttcagaagaggctattaaaaatgctgaaaatgaactaaccaagcttgttgatgaactcaacaagttgcgtgaaaaaatgaataatgctaaaaaacaatatcgatccatggaagatgctaaat

SEQ ID NO: 187646 - DNA, 476 bp, Zea Mays
atcctcaggtcatcatactccgctgtttggcatggactggagctgtccttagtcctcgtcgccttgatcatttcatcgatgattttggcattggcaaaacttcaggaaacgagctcaagaaattcaccaacattgcacagaacttaattgttggttccgtccttgtttcaacggtcacgtttgcagcagttttcactcttcctggcggctacatatcggaggggcatccacacgccggtgcaccaattctgtcacacaggtacaccttcaaggcgttcgtgatggcaaacaccctcgcatttgtcggctccaccttgtccaccatctggctcacctatgctgggtcggaacacgtccacccactgcttcgtgcaatctacatgttcctctccgtaatttcgatggagcaggcaacaagaagtatggttataggattcgcattgggtgcgtatgtcgttctgagcccagtcagcgag

SEQ ID NO: 187647 - DNA, 559 bp, Zea Mays
ctgaactagctagcgcagactctgctggttgtgactgcaagatgttcctatcagacgtatcttcctttcctgtgtgaatagattcccctgtttcggtgtcacctgattgatgtattttagtaggcgaagaagatgcactaccatcaggtaagtctcgaacagactctctaagctgattcggctctgcttcatcactaggatcagaatgtttgctaacttgatggtgctggttttcttccactgttgaaggatgtcctgcagattgtgatgtttctgatgcttcagcatcacccaccttagatgcaggtgcctcagtagagctatcaagcttttcttctgctactgaaggatgtgttggagtttgtggtgttatggattgctcagaaacatctgccttagaaacaggtgacccattggaaatactatgaacttcttccgattttgaaggcagttttggagatgttgttcctgatacttccgaaggatctacctcagatatatgtttcttagttggtgtgctattaattccttcctctgctgacagattcttcagagattg

SEQ ID NO: 187648 - DNA, 455 bp, Zea Mays
tttgaaacggctttccgggagcaccatgtaccccaggggctcgttcagcttaaggaagacgaattccgggaactgactcaagacggaagatctatcagtgaatatgtgcacaagttcacggagttagcccgctacgcgccagatgacgtcagtaccgagggcaagaagatggcccgtttcctgaagggactcaggccagaactcaagacaattctggctagctaagacttcctcagtttctctcacctctccaacaaggccatgcaagttgaaagggcaaaggaggaagaaaaagggcatctcaaaaggaaattccaagtcctccgggctcaacagcaagaccggcaccagaagactcgatcctttggatttccacccaagggaccaagcttcagtagaccagctggacccaccccgtcatggttcagtcagcagagtcagagctctttccatgc

SEQ ID NO: 187649 - DNA, 299 bp, Zea Mays
ctcgtttgtccacccggttggccatttggtgcgatagcctatcatgggggcctttgtgtccttccgatatgcaaagttgtagcatccgaagttcttgtgcaggccatcggctcttgccttcatctaataatgaagctcgtgcacccgacagaacccttcggcattgacacttttttccttggcttcgaagtgcccatatatatacgctgagcctaacaatggcgttggggctcagctggtgtaggtagatttcaaactttttcaaaacctcaccaatcatctcataaagggggaaccaa

SEQ ID NO: 187650 - DNA, 415 bp, Zea Mays
taccagccacggctgttccacctgagtcttacactgccaaccatatcctgaagaattcaatcaggaaggatcaaactgttgtttcggctgtttctagtgcaatggatttcattggcaaaataagtatgaaacctgcagccttctaccaaagccaaagctcactcagaagaccttcattcccccctcttctgctactgctctgcgacgcagcaggcacgttgctgggataggagtggagtttaacatgcgagattggagctgcagagcatccaaaaaagccttgaaagccctgcacatcatcaacgaaaatgaagaagtcaataaagaagccctggatgactacgctctgcttttcaagaaccctctatcacaagctcaggtggaggccgccttatctgcactctttggctggtcc

SEQ ID NO: 187651 - DNA, 321 bp, Zea Mays
atgttttagatgataccggttcaaacttgttgcctacaattgtaaatacagaacatacagttgaggagccagcgaaatttacaggtgcaatttcagataaaatgaagggatcgaaggatggtgcatcaaaaggacacattagtggcaagaacaaaaacattaaggaggaaccttcgcttgatcatggattttctcgtaaaaacagatgtgattctgatgagtacaatggtaaacctcatgccagttcatgtcagttgcaaaacattcccaacaaaacttcgccactggagagggacaaagggaaagtattgcatatggaag

SEQ ID NO: 187652 - DNA, 779 bp, Zea Mays
aaagttaagacaaaatcagatggttccattgagaggtataaagctcgtcttgtggcccgtggttttcaacagactcaaggacttgattatgatgagacttttgcacctgttgcgcatatgaccactgttcgaaccttgattgcagttgcagcctcatcttcttggactatcttctagatggatgtcaaaaatgcttttcttaatggtgatctacaagaagaagtttatatgcatcctcctccgggggttgatactccctcagggcatgtttgtcgtcttcgtcgcgcactgtatgggctgaaacaagctcctcgtgcttggtttgagcgattcatctctgtcatcacagctactggtttttcttctagtaaacatgatcctgcattgtttgttcatgtctctccaaaaagccgcactttactactattatatgtggatgatatgctgattaccggtgacaactcagaacatatttctcatgtcaagcagcatctccgtaaggaatttcagatgtctgatttgggacagcttagctatttcttgggcattgaagttcagcagactcaaaaaggcttttatctgtctcaatccaaatatatacaagatcttcttgatcgctctggacttactgatacacgcactgttgcaacaccgatggatattcatttaaaacttcgtccgaaggatgggacaccactagcagatccaactcggtatcgtcacattgtgggtagtcttgtttatctcaccatcaccagaccttatattgctcatgttgt

SEQ ID NO: 187653 - DNA, 379 bp, Zea Mays
cgcaaaccctataaaaggcatccgagtcccactagctccggccccgtgtcttccccagttaactccgttgtacgtctctctccctttcactagctccgatctccttggatcgatctcctgctagctcctcctccgatccacttgtcgacacgatcgatcgtcgtcgtacgcctgcttggcgtacatactgctactaatggagacggcgctgcagcagagtgctgctactgctggcggcggcatgaggccggccggcgcggcgacgacggtgaagaaggcgaggcaggagctggagctggagcaggagcgggagttgcggtttccgcaggcggcggcggccgcggatcagggcggccttgacgaggagctccggcgcggg

SEQ ID NO: 187654 - DNA, 428 bp, Zea Mays
acaccacttccaatggtatccaccaaaggacacactctcacaagcatgcctctatccaagatggcactcactgcagcatctacatcatcgtatgctatgcattgacgacacgtgtaccttgcgtccggaccactaacttcaggcatgcctaacctctaagtaggtacatctactatcatccacacactgcttgacctaacctcgtctagcacaaccacatctgtttcacatctaatttgtctaatccgacaacagcaggctacacctagcaccttctacccccgatgttctacgcgttgcaatcatcgttgaggatcgctcaaccgtttccttaaacattggtatatggttggggccctctacctagtacaacccggtgcacagcctccagtcacgacgcattctcgagcctgccaaccacaatgtat

SEQ ID NO: 187655 - DNA, 398 bp, Zea Mays
cagctggtgtgctaggtagggacaacgatgttgattcccgatggctccacggtcatcgttttcaacatcgtcttcaacatcgtcgttggggaggttttccacttcggatccctctcttgcgtcatcggccaaaggggtgctctacaccgcgtagcggacgcgggaaaagacgcttcgaggtctcgcctagctagtctcatggagaagaagcccccgccgaggtctgagacaacaccagttgatcatggcttgacccacgctggcacgttctcggacccataggccccaactcaaccatgtgttgcgccaggatgcctttatgccaacaaagtgcttggtcatgtcaacacctccgcttcatcagaccgttacgacggtcctgacgcgtcggactccac

SEQ ID NO: 187656 - DNA, 332 bp, Zea Mays
aaggtatgctccttgcacttagtcaattgttttaggtactaatcatatttgtctaagtgctagagactatatgaagtcaagtcaaaaggagccaaagaagtttgtctcaaaagaaagaaagttgggctggtctcggcagcaccggacagtctagtgccacccaccggacagtccggtgtgcaccgcatagtccggcgattgtacggccgaagaggctgctctcgggttcagtcgggctccctcggctataattcaccggacggtccgcgcagagtgtcaggacagtccgatgtgatggacatccaatggctatcagccacgttagcaggtgg

SEQ ID NO: 187657 - DNA, 663 bp, Zea Mays
caccaatgtccgatccttgaccctgacctggagcttcatggtgctgctgatgtcaatgcccgtgagggcatgaagagaaatgcccaggtcttccgctgctgcattttcctccatgtcgtcgtccatttccagcaagaataccccccttgcggtgcacttgtgatcagtcgagtacttctcgttgcagtggtaacattctccactttcccgtttcgctgctaattcttctggtgttagacgtctgaaacgcggtcgatttggagcagccggcctggccccttaccgactcctcgctggtgagtctgtaaccttggtttcctggtgtccttcaatggggagtggagagggagattggagtggcgcaaggtgtatggaagaagagggcgctgatcacccagatctcctgcgccggcgtcgtgcctggccaggatgatcccaggtgatctcgcccaaacagaagggagatcttattcctggttgattattacagctgatgcccagccgcctttatagccataggcggtctcaggatagacatatctactgctactatttagccacataaaaaggaactaacctattatttaggaactgctactatttagccacataaaaaggaactaacctattatttaggaactgataaaacagaaactattcctg

SEQ ID NO: 187658 - DNA, 289 bp, Zea Mays
actccaacatctactgatttggaggccaactctaaagcaaaagctgatgtggactctaatggacagaaggatttagtcacatcacactcctggccttatcaaaaggataatgtaccaatggatccgactaccacagatttgtgcccaccctcaactttaagtaatacacttgctcctcatagtgatggtgcaggaaacgacatggttataaactctagcattgagagtgagtcatcctttgggaaagaagcgggggttattcaaggactcacaaggatgtcaaatcatg

SEQ ID NO: 187659 - DNA, 1044 bp, Zea Mays
cacctctactccaccatcgccccgctgcaccgcacccgcctcctcttcgacaggatccccaagtccacctaccccgtcccctggaacaccatgatcctacggtagccagactcagcttccccatgagctttctcaaagttgcaatctttgtctgtgattgtgactgaccatttacccctgtgattttttttgcatcttcctacctatgttaggtacgcgcaggacggattcttggatgaggcgttcgatctgatggtggccatggaggaatccggcatccccattggtgcctccacctggaacgccgtcatcgctgggtgcgtccgagctgagaacggagagctcgccatcgagctgctaggcaaaatggtttcggttgggggagttgtgcccagtgtggccacgttcaacaccgtgctccacgtgatttcggcgttgcgcggggtgaacgtgctccgagagttgcacgcatttgtgctgcgcaacgctgaggttgtgggacttgggcctgtggatttggatcgactccaggaatccctggcggcaggatacatgtgcagctcctgtgtccagtacgcaggccgtgtgtttcgtgatgtcaggataagcacttgcttcctgggcaacctgatgatatcgggatttcttgacacggggcagcggaatcaagccttgggtgttctgcgagaaatggcgtttggctgtggtcatgaagctcagcatctgccatcggcttcgcttacgctggtcctccctgaggtcaatctggcaacaaagagaggcctagagatccatgcttatgcctatcgccatggttttgagtgtgacacctcggtctgcaatgccttgatggcaatgtatgcaagagggggcaagatatgccggtcagacaaggttttccaaggactggatgctaaagatgtcgtgtcatggaatactatgatttcaggctatgccacggttcatgattttgatctctcatttgagctgttccgtgaaatgcaacgtaatggtaccagacctgatgactacacatttacatca

SEQ ID NO: 187660 - DNA, 625 bp, Zea Mays
ggtgaatcttcgatcaaggatggagcaccgggctttgctgctcggcgtggcgctggcctttctgctggcctctggctcccagggcttgaaccatgaaggttggcttctcctagcgctgaagagccagatgaacgacactctccaccacctcgacaactgggacgcgagggatctaacaccatgcatctggaagggcgtcagctgctcgtcgacgcccaacccagtggtggtgtctctcgacctcagcaacatgaacctgtcaggcacagttgcgcctagcattggtagcctgtctgagctgaccctccttgatctgtcctttaatgggttctatggtaccatccctccagagattgggaacctgtcgaaattggaagtgcttaacttgtacaacaacagttttgttggtacaataccccctgagctcgggaagctagataggctggtcacgtttaatctgtgcaacaacaagcttcatggcccgatacctgatgaggttggaaatatgacagcacttcaggaattggtaggatacagtaataatctcactggctcactacctcgttcacttggcaagctgaagaacctgaaaaatattaggttgggtcagaatcttatatcaggc

SEQ ID NO: 187661 - DNA, 622 bp, Zea Mays
cttgaagtttggtttagaaatgtaatgtaaatagcaacggtaatgatttacactcgagtatcggtaataataagctaaaatagaacaatattaatttttagtgtggtatccgattacggtaacgttatcagttatctatcaccagttatctctcacgttacaaatacaaatatgtgaagcaaacatcacctcagtgtccataagctagtgacctgcttggagcatgatgcaactgaatggcctgcttggagcatgatgcaactgaatggatgcggaaaaaggagacttgaagaaatccgtgggaatttgcagatgttcaagctttgtcaaatacaaaaaatttggttagttttgggagtggttgctatttcttgtgcaaaattgtgagcaacgatcttaaattgaaacatttgcatgtagagaaaatacttgagcgttatattgaataaaactaattgtatagcaccaaccgaggatgaatggatgatctatgcaaaatgtaacttacaagtgccaaataacaggtttgcaaggctaaattaaagtgacaatctgaaatttccaacaatacttagggtgtgtttggttcaggtttctgaatcaaattcagaaccaaaaatct

SEQ ID NO: 187662 - DNA, 377 bp, Zea Mays
cacagccatgtaaacaatcattttccaatatgaaacagagggggtagaaatgtatttccgatccacttcagttcttcctccctctctctccaactcctgtgttggtgattggaagctgggggccaccaccacctcttccttctcgcaatatgaatcgcagcctgatctgtgcttctacatcctatttgtccccccagcagcgagtccaagctgggtgccggcagctcatccatccccttccagcagtgggacggatccagatgctgttgctcgcctccattccccgcccgtaggaggcacctcatgcacagccacaacctccctatgcacatgcagctcacaatgacagattcaggaagggcaaagaggtggagggg

SEQ ID NO: 187663 - DNA, 388 bp, Zea Mays
ccgcacacttggctatgcttgcgaaggcgttatgtacttggtctggtgtgttttgctatgctgtgctggtccggctgcacccttaggcgacttatgcacggatagtcttcgcggtagagtggggtttttcgcacttgttgtgctagtccggctgcacccttaggcgacttctgcacggatagtcttcgcggtagacttaggtttttcgcacttgttgtgctagtccggctgcacccttgggcgacttctgcacggatagtcttcgcggtagacttcggtttttcgcacttgttgtgctagtccggctgcacccttaggcgtcttctgcacggatagtcttcgcggtagacttcggtttttcgcacttgttgtgctagtccggctgcac

SEQ ID NO: 187664 - DNA, 497 bp, Zea Mays
ggaaagatgattacagtaagaataagaaggtattcactattttcttattttttgttgataattgttgtgtatgtgcatggcacctacatttctgcaacatctcttattgtgtgttgttcttttttttacaatattggatatctggagtgattttctgagtccttccactataatttacaggtaaatgctcgcatcctgttcgttgatccatcaacaagagcagttgggcttacattgaacaaacatttacttcatcttgaagtaccccctattgtaagttgtctgttttgtcatgataatcagtttgatgtattcttatatgtttacctgtatgccagtgatgttggcctctctagaaaataaagctgctgttatttcattcagttttctttttgatcaataattttcccttatgcagaatctaaaagctggagatatctacgataaatcaaaggtgctgagggtagataaaaaggccggtctctttcttgaaatac

SEQ ID NO: 187665 - DNA, 689 bp, Zea Mays
gctgtcaagtgaagatgttgacatcctcaaaggactctctgccctcactgctctttctctctacgttcggagaaaccctaagaaaggaagctggatcctattcagtaagggcttcgcagtgctcaagtattttaagttcacttgcactgcactgtgcgtgaaatttagtgaacaagctatgcctgctgtccaaaggctgattgtgtgcttcaatgctaacacaatgcagcagtacaggccggaagatgcaggaatttggtacctgtcaggccttcaagttatctctgccagaataggagctgccggtattgatcaagccagcagagaagccgcgaaatctaggttgctggacgccattcttagcaaccatccaaagcctcctcctatcagaaacgtgcaaatggtggactgggttattcatggcgacacagaggagtgttcaaccggtgtgatgatacgtaaagatgaaagcagccgtgagcatactaggtcatttttaagtcagttcccgttcagaagacgacccctgcttccctccatattcacaaggcgtggccaggatgatgagcaacataaaatcgaagaaaatgatgtgctacaagatagtattatcttaaggaaatcctcttcgctaatgcaaaaaccaggtactctccattcttatatatgcttattaataattattttac

SEQ ID NO: 187666 - DNA, 475 bp, Zea Mays
gaaaaagatacttgatgtggtatatggcggggtgtcaaaaatcgaagttttcctcaggtggccattggatgatgattggtcatcggagaaataggaacacccggtagtagaggggctggtcctgagaaccaagagtaggtgaggcttgagacacagcttgttgagaattgtgactctttaggtgtaggacggtgatccgtataaacctaggtactgttgatactgctgcatttgaaggtgtagcttgttgactctttaggtgtagcttgttgagaattgtgacttggaggtgcatttggtggtgagaaaacaacacctgatactggtgcatttagagctaaggcagctgcgccagaggaaaaccaggtggtggtatggggaggccgtacggatgaggaacaagaaatgcatgctgaggaaagcggtgccatccctgctatccaccttgttgttgacggtgttgctgacactgccc

SEQ ID NO: 187667 - DNA, 318 bp, Zea Mays
ctgtgtgtcggtctgcgcataaggaggcatttgtgcgtgctggctgctggggaatgtgtgtcattcgaaggctgcattgggagcgcaacaaggtgatattcggcgacgtcgctgcattgatgtgtccatcaccatgtcaagattagggggagattgttagcactaatcctgacatgcgtgcgttgggtcggttagctcctagaattgttagctgctgcatgggcaaatgcaaaggatgctcaccacattgtgcggatgagcggcatgcgaggtcgttgtgatacgtcattggaggatctacatgcggttagtttgttg

SEQ ID NO: 187668 - DNA, 301 bp, Zea Mays
gtcgtcgtccagatggtgcggcctgtggagtctaacaagacaaggtcagaactgttggtaaaaactagcttcccaggcacattggtggtaattgggttgtcgcggttggcaatccacacgtatgtgcgctcgggaatgttgttgtaccatatgccgacataagaccttgaagagttcttcagggagaagaagccaagagcaaagacaccaccgcctgagatgagcacctcgttgggcaagagtggctttgcaggtgttagcctgtcatcggattggcataagacaaccatgaacaggaaga

SEQ ID NO: 187669 - DNA, 284 bp, Zea Mays
tacatggcaagttctgttcgtctctgtgccaatgattgttttggcaatcaggttgcaggtaattttgtgcgattctgttggctacagtttcgttactatatcatgtaccaagtcatgtgctttgctactgtttttcttccaagaggtgaaacagtgtatgtcttatatttataattaccattgactgaaatgttaaatctcatatgcttggtcatgcagaggtattatttagcctcatctaaggaattgatgaggatcaatggcactaccaaatctgctctcgc

SEQ ID NO: 187670 - DNA, 495 bp, Zea Mays
gtggatttgatacaaatagggtgaaggctttgggaggaggcaggttccaggccgagtatgccactggagcaccaacattggacaccttgcccctaaggatcatttctagacggctcaccaagtctgctgaagggattctcctgttggtaacccgagttgagtcggctagcccccgatacaaataagctgggtaggccctgtctttcagtggctgaatgttcttgaaaacaaagtcagtgaccacagcttcagcagttagacctctttctttcagcagtccaacttcagctagcaatacacttgcctcagctacctcctcgtccgtgggagactcggtccaacttggagtgcgaacatctggctgtcttcccgaccgggaagggagagaatttccataattgtcaactatgaaccactctagacgccatcccttgatactgtccttaagaggaatctcaaggtactcagtcttccacccgcggcgcatctccaaac

SEQ ID NO: 187671 - DNA, 271 bp, Zea Mays
catacgagacattcagtgcagtaacatgacacatgtgctgtccctttcacccctccccttgtaggttgtagcgctggtgagtaatgctggggacgagtagtggcattggtgagcatgacacgagtgtagcagcagcgcgaggcgagcaacatcatggatgagcggcagcgttggtgagtgggagtggaagcagagtagttggtcatgacatgaagcaggtggtggcgcttgggtggacgtgaaggaaagagagaaaatttgggaattggaa

SEQ ID NO: 187672 - DNA, 275 bp, Zea Mays
agggatcaggtagactccggcgaggacatgatgagcgtcattcctgcatttcaacaagatcgtccctcgaccttgaatggccgtgacggagccgtccccgaaccggaccgtgccccgcacgttagtgtccagcgacgagaacgcagtgttgtcactagtcatgtgattcgtcacgcctgtgtccagcacccaccgggcgtcggccacagccttgtcaccgagctgcacgaatagcttgtcctccttgagatgcacctccggtggtgctgttgcac

SEQ ID NO: 187673 - DNA, 370 bp, Zea Mays
gggtagattggagaggatcgcgctgggtttgggtttgcgcagcaccgggttgcgcacggtcggcgtcgtggctgacgaacaggacgaagaagacgactcgccgtccgttgattaggggaccaacggctgtgattcatccggtgcgcccttctccgccgtggtagaggtagatagcgtcgtggaccgttagattgagatcgggttgaccagggcacctaggggtctcgtgcgattttggaccgtggatccgtgatccaaggaccacgtctgtgtaccgcttcactcaagtgatggtctaatccgagccatcgggatgtggatcaacggccagatccatcccgtaccccttcgtctgcatcatttgcataag

SEQ ID NO: 187674 - DNA, 865 bp, Zea Mays
ccggaaaccgcagagggtagagtggaccggagctatcacatcggacgatctctctccgagagtgaaggtccttcacaaagcaaccaagaggatcaaattccacagaacaattattgtcagaggtaaactgtcgaacagaaatgaggttcttaataagacttggggaaacaagaacattattaagacgaagagaatctgtaagaacagcagagccagtggatgtaactggaatagaattcccattaccgacaataatagaggagggaaaagggtgttgtaaaggagtggaatgggagagagtaccggcatcagaggacatgtgggtggttgccccggagttgaagtaccactcattttgttgaggggttggagcgtcatggtgttgaagttggagacgagcgattgctggtcccatgatggcatgggaacaacctgatggggggagcctggtggtggcgcagaccacagttgaggttgtggcgacgtccatgtttgctgctgcgcccctggccaggggccctggatgcccgtgagcagggactggggcagctgaggagctggtgcagtcggcgcaggaatgatcgggcgggtagatgacgccatccgtggtccggcccacatttgaatggacccagaccaaggattgtagaaactgggccaggtagacgtgggggcctgcccagcttgtttgggagcatgaccgcctttcttctcggcgcgtttgccgcgcttgccgttgctgccggaggaccgctgcaggggcgcctgttcctgcttgggcggaggcctgacggagccggaggcgagaagagcggtggccggcagggaggaatgatgtgtgaaggcgagttcctcaagaagcaga

SEQ ID NO: 187675 - DNA, 297 bp, Zea Mays
ggcggacctaggtataggggagtgagggcacaggccctcgctcatttatttggtgcaagtagtagagactagattttcactataaggtcccctgcttagtttaacttagatgcccctgctctggtgttttaatgtttgtctttataagtgtgtcctcactctcatttcgctctgggtccgcccctgcccaaggggatcccttgtcacctatgcttttcatcctagttatggaagttttgaactctatggtaaattttgcaactcaggagcatctcgtacagccaattgcatatcgac

SEQ ID NO: 187676 - DNA, 484 bp, Zea Mays
cagcttctgcgttgccgacctgtaagctgctcgatcgccgtcgtcgcccgtcagtacagaataacccgtgtagctgatcctgattcgtggcggcgtgctcagggaggaggactggaacgaggccttcaactacacgtccgacctcagcttcgtggatcggtgcctcacggagacccaaggtaagctcatgcatggcctgatcccggatgtggccttcatcgctgtttgactggtcaatccacatctcaggattttgggtctgatttccagttgatttttaatcaattcttctgtttgcttccgagtgaagtggttttgaatccgagaatctcgtctcggcacggcaaagattgttgggccgggtgaagaaattattaattatcaattattctgtttgataggtgcctgcttgcctagggtagtagtagtaggtttcgtcaacttatgaacgcgtggaccacaccttgtgtcgttcttgtagccc

SEQ ID NO: 187677 - DNA, 1234 bp, Zea Mays
tgcttgtctgctcaacattgtgacatacatccggatatggcgttgccttgattatgaagcactcagaacaaaccgaggccttatagagaagatggtaaactatcagccggtaggtttaccctgaatcatacttacatagttacgttacatatttacatgctatattgtctgtagggtgataaacttgcagaggacagatatcaaaggactgagaagctagtgttgaacttactatatcaatatccatgtttcctttttctttgttataatattttatcatggaaagagaaaaaaaaacattcctactttttagtggacaatgaatccagctgtattcacatcataatcgaagtggttactgaaagatttccggtggctatactgacatgggtgatttgattggtcccattatctgatccccacagatttcatctacttcagagaacagcacggaggatgctggtccaactgacagcgtggagatatggaccaagttgtctgcaatggaacttaacacttctcagaacgatgctgtcttgaactgcatttccaaaatgcactccaagagcagcacatttacccttatctggggtcctcctggcacagggaagacaaaaacaatcagtgtgctgctttggttaatgagagaaatgaagcatggtacgctcgtatgcgcaccaacaaaccttgccatcaaacaggttgcttcacgtttcttgaagctggtccaagagcactctggcgacacaaggtgcttgggagatgtcctattgattggcaacaaagagcgcatgtgtgttgatggtgacctcaaacaaatatatttatatgaccgtgtaaggaggctttttggctgctttgcaccattgaccggatggaaacatcacctatcttccctgtctgattttcttgagaatggctactcacagtacctccaacatctacaagacagtcaggaaggtgatacgccttcctttttctcttacgccagaaaaagatttgccgttatttatatggagctcagaagatgtttcaatgatttgttgttacatgtcccaaaatccagtattctggaagtgaattacaacagtatccttttacttcttgaaatgcttgaagagttcaaccacatgattcagtgcaggtattttggggatgaaattaggaaagttttcttgtacagtaatgatgaacctgatcagacaaactcgagtgtagtcactcttggcaaaat

SEQ ID NO: 187678 - DNA, 412 bp, Zea Mays
gtgctcctcaactgacactgatgggttaggccctgacctcaagtatctcgagacatgaatggttctcttctcatatgaaccataaggcaggctgagcgtctctggcttctgttgcttgacaggggagatgaatgtatcgaagatgagctcatggtggtcatctccagcaacaaaccgttggagagccattgaaacacgcttcagggactcgatgtaagcaatgtgagaagatgcaaatcggttgcgctgctccagtgcctgcttgatgaagtcccttctgtcccggcacatcttgatggcttcctcatcttctaacctggaagcagcacatcccatctctccaaagccgtgtatagttttcaaggaccagtcatgcttgtgtcataatctccgagcttcgaacatgagaaga

SEQ ID NO: 187679 - DNA, 391 bp, Zea Mays
tcaccattttacaaacaaagggtatcaaatcaacactggggtaaatcattctggcagagctttggttgcttgtaaattttttatgtttgaaaatatatttcttagttaagtttcaaatatgatgtgtgtcttatgtgccatgtgacccaggttagtcagtgatatacatgaaaactttaagttatatctatatttgtgtaggcatcacgacattggtgggtggtggaaccggaccagcacatggaacttgtgccacaacttgcactccagcaccatctcaattgaaattaatgttgcagtccactgatcaattgccaattaacatgggattcacaggcaaggtataaatctgtatgctgtgaaattaaactattagaaaattcagtattgg

SEQ ID NO: 187680 - DNA, 306 bp, Zea Mays
catatccaatgatgttcaagtcatcaacatagaccgaaactatgcaaaaacccttctgggattttctaatgaatacacaaggagaatctggattatttacgtatcccttcttcaggaggaattcgctgagccgattgtaccacatccgcccagattgtttaagcccatacaacgccctctgcaacttaacgctgtacatgttgcgatttgacttggcatccggaactctcagcccatccgggaccttcatatagatttccgaatccaaagacccatacaagtatgcggtcactacgtccatcatct

SEQ ID NO: 187681 - DNA, 310 bp, Zea Mays
tgggtgccgccggccctcccggctcttttcgccttcccgatgtccttgtcgctccttctttggtccacaatcttctctctattcgtcgttttactgctgataattcttgttctgtcgagtttgactcttctggtcttactgtgaaggactcggcaactcggcgccccctcctccgatgtgacagcaccggccccctctacacccttcggcttccgcacgacacatcttcttcgtcttcgtcacctgacccagctgctgtttttgctgccgccacgtcttctaccacctggcatcgtcgccttggccaccc

SEQ ID NO: 187682 - DNA, 302 bp, Zea Mays
agcggcgcacagtattcatcatcccttctacaagaagtttcccttgcacgccgaggatacggagatctcgggcgtcagggcacaagaagattgccccagcaacaaacatttatggcttcaagcgctatattctttatgtctctgggcccacatgtcggggctcagtacctttgtgcatgccgcccttcaactataaaaggggagtcatgcaacgttatacacaggctcaatctttcaggctcactcagacactcacaagttcatacaagctctcaagcaatacatcacacattggagtaggg

SEQ ID NO: 187683 - DNA, 476 bp, Zea Mays
agccaaggatgcagaggtgaggagcttgaatcagctagagcagtcgaccaagaagatctatgagaggaagttggagctaagggttgcgcaggagaaagccaattcagcgcaatatgtcaagctaaccatggagaacgagctgagaaagtgcaaggccaagcatgagcaacagaagaaagtgggcgagtcagtccattccatttctgacgtccccaatttgaagagtggatcattgtcttttgacgcagcatcttcaacctccaatcctcacatggttggagcattgtctagagctgacactatagcaacaactagagtgaaagagccaaaaccacgaaagtcactctttccaaggtccgtagtggccatgttcgtgtctaggaagaagacacgttgaccattacattcctatccactaataatattgtgctaaattcttcggtatggttcattcgtaaatgtactcatgtagcaca

SEQ ID NO: 187684 - DNA, 344 bp, Zea Mays
atggagaccatctaccatttggttccaaattgagatcccccgtggcataatatccaggcatataactttcccgttctacttttgcccccattcttgttgcaaaactgtgcaagagaccagtgaatcaaaccctcaatggaataataaatacaatagatcacagaaaagattctgcaataatggcctaattgtggaagaagacaagtgtgcattattcataggttgacataagaaacaaataaattggcagcttacaagagaacaccaactcctaagtcctgataaatttagtgatgattactgagagtatatgcacgaaaagacaaactttccgtcagctggat

SEQ ID NO: 187685 - DNA, 719 bp, Zea Mays
ggacagttttatcgggccttccaattgccagcgagttgccttgtcttaccgaaaggaccagccagccagccagccatatgaaatgcattccattgacgggactgccagatcttgtttgcatcccacgcaattggggaccgctctttgttcgtagcagcgtctgggttttgttcccctgcagttattattattatagtacagcgctactcctccgttgaccgctacagaattcgctactgcctagtgcctactacaaccgtttagtatctccacttcaaattcccaccagtttctgcccttttcttttccagtgccctcatgtacaaaatgagttccattagatatagattatgaaaatgctttttatatattattataatttaccgtaactggaaatcccttgtatttggacgaagggagtacatgtaccgatttttttttaggaaaagaaaatgacagcacaacgaatggatttggcttccagcgcttttattttatattattaattattacgcctttcccctttgagctgacaacttaattaaagtcgacaacttggcgtgcctactgccacctttaaagaatttgctggtatataacctttcctggtccagcctcaacgtttccaggatggcttaacgcttcacacggacgtttcctagtggaacgaatttatgcgaagtttttatttatggccctttcagctgtcacaccttcac

SEQ ID NO: 187686 - DNA, 446 bp, Zea Mays
cagagaccagagaatcaacgagcagcaccaaggcacggcgtcaacagcaccacaccaccaccaccgagaacaacacacagccgacgatacggacgagaccaggacacctggaatcgagcagatcgaaagatttctcgccggaacagtggataggatggaatcgtagagcctctgtctctgcgtttccttaaaagaaagagaacagaggaaggggatccacttaaggagccgagggaaagtccgttaccgagaagaggggagagagctgcggtcgttcaacgaggaagcggagaaaacggagctgcagttgccgccgccgcccacctccgctctgccacctgctccctgccgtctctgcggtttcttactgaggcaactagtgcccaggtcgtgctgtccgctggctgggccgctcggcctccgggccttgtagtggcccagttggc

SEQ ID NO: 187687 - DNA, 454 bp, Zea Mays
cagtaatgctggttttcagctacccaacttaatttgcacaaaagtacttgaagaagaggaagaaaactcttctgaaggcaggagcttgagctttgaagctgttacacctgaacaggatgccccatataatgatgacaatgaagaatctcaaatgcctgttgagaagcatcaccatattctggaagaggttgatggtgagcttgagatggaggatgtagctccaccatctgatattggggcaaccaccaagtgccaaccagagcaaagtgacaccaatcgtgcaccatctgaccaacgcccttcagatgctggccctccacttcctgtggaccggcctccatctcctccgccattgccatcatctcctccacctgtccccgttcctcagagtgcacagatgcagcctaaattacaaatggcatctgatcccatggcgccacatcctcaaagagct

SEQ ID NO: 187688 - DNA, 296 bp, Zea Mays
caaggtggtgagtgagtaaggattagggtaatgcttctcatgccattggcaactttattagcatttgatctccaagttcttatgtgttgccctaagcctttaccccttgtgatcacagcttctagtgccaaagtgggttttagccagggtaacacctggggtgttacagggtgcgcgtgcgcgaagcggtacccgcggtccgggccgtgcgattaggatcggacgaaggggataagaccggggaggggtgaacggctacgggtgacgctgctcctctctgcggcggtgaggtcgcc

SEQ ID NO: 187689 - DNA, 387 bp, Zea Mays
caaggacttaccagagttggatgatgatctggaggtccttattcaatcaagtaagatagaggttgaaacaactgagcagaaaattgattcaaatagaaaagaacagaaggttgaacaaaatatattagagcaaagggttgaaccgaacttgaagaacattgctggttctacgattagtgaacagcctgtagcatcactgtctaaaactgtcacttcatctggtggtttatttttatcaaatgatcctgggaaggcagttcccaaagcttctgtggacaataataccgaatttgcattctcaaatgggcctcctggcacccgccctgcaactggtgtatcagcaatgccacttgcttcagttaataacgataaacagactggtgcttc

SEQ ID NO: 187690 - DNA, 345 bp, Zea Mays
ccaccgcccccaacgtccaccagccctaccatatggcatgccaggttacggcgggatacctcccttgtcaaaccccaccgcgccacccataccatcaccgccgatcaccaccacagccgctccactcccatccacctcaactaaccttccaccgccaacctcagccttgttgccacccacatctaccatgcccatacccatccatcagatacccttcccacactccccatcaccaatcccaggcttttccgaaccccaccataccgcttacccaccgcagcaaaaccctcccaaccagcaccaccacaaccttccttttcccacattcgacggcaaagaggatct

SEQ ID NO: 187691 - DNA, 557 bp, Zea Mays
ctggaagctagcagcagcgcaacatatccggagctattcgcaattgaagctgaacctaagatgcagtacaacatctcgaccaaaataaaacccacaaccagcagctcagcgcagccgattgcaaaagggactaaaactgagttgcagtacatcatctaaaaccaaaatacacccggacaggctggcaaggaatcagacagccaccagacgtgctgcagcattgctccttgcttctgcttgcagattgtccatctcatcctgtatttcttctatagcttcacctgcaattcccatcagtgccttgtcaacgtgttcggtgtccggcatatgaatgttgaacagggattccaaagctgcccctgcctccttagataatggtttctggaaccaagcctgaaagtcctggaaagcattatcaaaattaggagttccttcattcgccaagaggccaagtttgcgacagaggtagcgttgtgcccgctgcatgatcggcatatgagggccattagcgagtctagcactacgacgtaccgcagagaggttgaataagcgtcgat

SEQ ID NO: 187692 - DNA, 755 bp, Zea Mays
cgctcggggacgacgacggggactgtggccaggtggacctggacgccgaggatttcatcaagaagttctacgaccagctgcgcacgcagcaggcccttgccaccgccacgccggactactgcggcgggtatgcgcgaccggtctctggcatcgcctagaattcaacccacgcatccacacgcgtatgcatatgtaatatatatgtacgtgtccatagagtatttgtttgaacatgcatgatgcatgcatggataaagcatgttcgtttgagagctagctactggtggtagagctagtctagagcttggtctttgtgatatgagggagagattttgtacaacatcatcatatcatgtttgcaagctagatccatgcatgtatagtactcctatatatgtgtacgctgtatgtgtatattttgttgtagtgacatgtatcaattttactgcaagtaaggtacatgttgcaaagacattagcatataagaacactggtgtattacatagtataagaattgcgctcgtgtgtgtggttcctgatgtcctgcatgctggccctctgtccatgccagggacttgtacatagtgttgttctagaaaccactgctacatgtaattttcagacaatctatggtcggtatgctgacaaagatcgatggagctgtctggaatagtggaatcttctactcatgaatatattctagcatctgatgaaatttcattttctttcatacttttattgttcttgtggatctt

SEQ ID NO: 187693 - DNA, 311 bp, Zea Mays
aattgccctttagacatatgttcaactgattcaggatcaaattcgttcataactttggattggtttgatcttcatatggtttacagtttggggttccctcgaaggagaaggctaacagatgaagacataattggaggctaacagatgaagacagaataggaagcacatgttagacgaattaaaactaaacaaacccaatccttttaccggcatgtggcatatgcggcggcatatggacttgcgagtgcacaccggagtaagaagcgatgaacgaaaaaaatggggtggagagaaattttggctctttggta

SEQ ID NO: 187694 - DNA, 404 bp, Zea Mays
ttctgctggtactgggcatttgcttagacaccagaaagcttgtaagaagaaggttgatcacgctgctagggtccagtctaggcttgctttcaatcctgatggttctctacacaattgggaatatgatcctatttttgctcgaactgagttgtgtcgtctgattgctaggcttgaccttccattaggtattggtgagtcacaggcctgggaggattatattgcccgtgctcataaccctaggtttaccaaagtgtctagacagaccaccactagagaccttctgaagcttttcactgaacgacgtaatgtgcttatcaattctgtgttgcctactacttctttggttgcattaacctcagacatttggtctggtaatgctaaggaggactacattagttctggac

SEQ ID NO: 187695 - DNA, 730 bp, Zea Mays
caggaactgtcggcacttggcagccatggtccatggaggaactcgcgtcactgcagcaaccatgaagcaggtagccaacacagtccccatatttgtaaacaaagagggacgtgttagaggccgaagcgatgaacctgaggcggtgtatgtatgtggcaaagcactggtaccatgctcgaggagcctgcttcaaactatagagagatttatacaacacacaaacatgattaggagcggagggggcgacgaagccagacgactgctgaaaatagaccatctccttgagatggcaatgaaggaacacattcttgatgtctagttgatggctgcgtcaggcccgagaggtggcaatgctaaggatgacacacatggtggcaggtttaaccaccagactgaaggtcccatcgtaaccaacgccgtgctgttgtgaaaagccttggatcacccaacgtgccttgtggtgggcaagcataccactctagtggaacttgtgcttgaagatccacgtgcctgtaaccacattggctctaggaggccgagggacgaggtgccatgtgttgttgttgatgagcgctcgttactcattagtcatagcagcccaccaatgtgggtcggtgggcacgctacggtagtttgatggcatcggggaggtagaagaatttgtagcattgaagttgtacacatgcagcttgagggggcctatcatggacctggtgatgcaccgcagaag

SEQ ID NO: 187696 - DNA, 340 bp, Zea Mays
tgcaaattcataatctatttgaatgttaattcatgtcaaaatacctcttttttaatgtccgcaaaccacaacaaatcagtcttgaactatggttcatcatgtaatgcaatccatctcattcagtatatcgtcctagaatgaatagccttcaacaaacagtacgggttatggcaatattttcctttcccccatctgtatttcagttgtgaattttttatagtaccagctgcctttatgtgtcctaacaaattaacaatggtgttgtgcaataaaatgataagatgagtgtactccaaaaagaaataaatggtttcaaaaggtactaggtgttaggcaggca

SEQ ID NO: 187697 - DNA, 290 bp, Zea Mays
ctaaactcttagctctagcgctcatccaggagctcatctcatgcctgagtttcgttgctatgctcatgactggtgtttccttgtttctgaagattcggtcgttccttccgttccaaattgcctaggcggagatcattaggtgttgatgtccgccgctatcttgccggttgcagatcttgctgctttgtccatgttgcgaattgagcccaaacactcctcgtgtatgcacactccgccatcagatgaagcgttgtttccgggtatctttggcacaaaggcatatcgggttg

SEQ ID NO: 187698 - DNA, 814 bp, Zea Mays
cagaaattcataccatagcaggaaagatgaaactgctactgaaccaccagaagtatttgtatttgggtgtaatgtttctagcttttcttctacccatactgcaagtaaatcacatgatcccacgactcctgaattttgttttcaaagtaaagcagaggcaacttcaggatatggggctgttccccaaaccaaagttcaggagtcatacttgtttacgactttgaataattcttgtagtccctctacttttgagaatgcagttcctgctttcagttttgggacaatggatgcagaaatagaaactgctccagatgatcatttttctgtcaaacaggatttgcctgggttttccagggagaccttatttggtttagacagtataaaatctgcatacaaggacaaaagggaagcacacaaaggcaaaatgaaaaataaaaggccaactaggctaaagcaacatgctcagctccatcaggttatttctaaggaagcctgtaacgatggaaaatcatcagatttagcaggtgactattcaccaatggattgttcgccatatcctgcagaagctgaacatgtgccaacagaggcatatgtggcttctggtcagcccgttcacattggtgatagtgttatctcaaactggaacaccagctgtgctgaagatgatgtagtttctgcaaccgagcacttgattattgatgtaaacctaccaatgtttggagatgaaggtagaggaccgaaactagatgcatctgagagcaattttggtagcagcttttctagttttcaaggagatcaaagtaatggaccacag

SEQ ID NO: 187699 - DNA, 611 bp, Zea Mays
gtcaaggttgataacagacaaggctataagtgaagaggtaaatgtgcatcagaaccaaggatctaagtacaaccaagaatagagttaagctaagtcttgcaagtggtaaggaatgggatataaccacgggtgagataagcaagacgccactcttgaacggagatggaagattggagattttagataacgggcatggagtaattaccaaggtaagatcaagagagaaaggtggaggcaataacaaacaaaagcacaacaaaggacgaagttacaaactcgcaagccaaagaagaggatacgaggtaaagataggtaaagtatagctctcagaatgagatggaagagaggtgattttaaagggcaggtatgagacaaacatcaaataagatatagaggtgtctaaggtgaaggtgattataacaaaaggcatgacaaaggataaagttaaggcaagactcgtgaagtggcgaagtggagaaaacaatcaagggtaagataggtgaggatgcaatagaatggttgaagtaagaattcattatcgatagaagttataaaggaacaacgagatcaccaaggatgggcaacataaaatgatcgctcatggaccgttg

SEQ ID NO: 187700 - DNA, 760 bp, Zea Mays
cttctacaagcgctatgccctgcgcacgggcttcggcgtctgcgtcaagaagtcctccttcaccaaggccggcctctgccgccgcctcgtcctcgtctgcaacaagtggggcaacggcaaggaggacgcctgctaccaggccaggcccacggccaagaccaactgccaggccaccgtcgtcgccagactcctgggggacgacttgctgcacctcacggatgtgaacctggagcacaaccacgcgctcaacccatccgccgcacgcttcctcaggtgctacaagacgctgcctagcgggttgagcaaagatctcgtggtgagggctgccagaggggaatgctcggtggcgggtgacatcgatgtcccgatatttgatgaatgggggcggcttaagaccgggcaagctgatgtcctggccatcaacgctttcttcacccagatgcaggcaaagcttccaaactccttctatgtcatggacttctatgtggagggccatctgaggagtgttctctgggctgattccagatccagggcagcgtatcagtatttcagcgacgctgtttggattgatacggcatgcttaaggaacaagtatcatgtcccgcttgtttcgtttctgggtgtcaatcatcatggtcagcttgtattgctaggctgtggattgctgtcagatgagagcacagagagcttcttgtggctgttcaagtcatggttaacttgtatgaagggacagcctccaaatgccatagttaccgatgaa

SEQ ID NO: 187701 - DNA, 360 bp, Zea Mays
tgaagaccttcataggctgatttggtcgagtatttgccatccctagctaaactgaatatatgcttatcttctacttcaggctgtaccaccacttctgataacaattcacacaactgcaagtaatccactaatgctccaactgaaagagcccctttgatgtcagaaatccattttctgttggttaatgcctcaagaacagttctattatttgcaattctttttggtataattgcaaaacctaggagccagatcactcactctttgacccaagagccatttgtctatccagaacagagtgcgggctccattccccacatctgaaatcaagacagtggagaaaaaagcttttgccttttttgg

SEQ ID NO: 187702 - DNA, 356 bp, Zea Mays
ataggaaaggatctgttcagttaggaaaggatctgttcagttatagatataatctgaggcaatcaatcagatctgttatagatagaatccaatcaatcataatctgttttgattgatttgattgattgctggcgccagcccctttgtaatctgatgatggtattccatctcctataaatacatacaggcggtctactacggtaggtaaaaaacgcttcccaacctggtgttctttcaggcaggactgtgttgcgcaggctagcgcgcgaggccaagcgagtgctcaagacgagctgcatgcctgcgcaggctatctgtgtgatttattgttgatgaaagcaactcaaaaaattgat

SEQ ID NO: 187703 - DNA, 521 bp, Zea Mays
ctctctgattgacatgtttgcaaagtgcgggtgcgtgcaggaggcactacaagtgttcacggatatggaggagaaggacaccttgtcgtggaactcaatcatactaggactagcaaacaatgggtttgaggatgaggcgctggacatttttcacagtatgcttactgaaggtcccagacccaatgaggttactttccttggtgtgctgatcgcttgtgccaacaggcaactagttgaggaagggcttgaccactttgaaaggatgaaatcagttcacaacttggaaccacagatgaagcattacggatgcgttgttgatattctcagccgtgctggtcagctggagaaggcggttagttttatcagtgagatgcccctggctcctgaccctgtggtttggaggatactgttaggggcgtgcaggacacatggtaacgtggctgttgccgagatggccaccaagaagctcagtgaactagaccccggtaacagtgcggactccatgttgctgagcaatattt

SEQ ID NO: 187704 - DNA, 2999 bp, Zea Mays
gaccgtgcaagttgcaacatcaaagatcaggagctgtagctttgtctttttatatcgaaggctaatggtggtacttgtctacttgattctgtttaaaagcatgagaacctttttttgcagttgttcgctgatgttgcaccccttgtgactgagaacttcagagctttatgcacaggtaaccttctcaccacttccttttcgtcaaatcagtaaaagttcatctgttagttagtgttacttattattttgtaaattggtttatgtggcaattggacatgttgctcgagatttttaatggtcgtggtttcacataatgcgttcatcaaaatacttgcgtttttattgtcagactattaaatatttgaagtagcatgatatgatgtaaaatgctgtaaattcacaaagccacactcttctgaaattataaaaaactgacaattccaagagcttgctttgagcaacaacactttttattgcctacggcgtagagcgacacccttttagtgcttggaggttactgagtagtaaaacactcaagtacactggagatttagaccatgcttagtgcttacaatggccacttaatgacatggtgctaggaaataggaaccaagtgcaaatcatgtcatattgtttaggagggattgtgatgttatcaccaaattgctagggttatgctacaattgcccttgtttatccagatgtgggtcatatccagggaaagttagatctgttgacgccccatccaaacagtaaaaatgaaaactgtttcactgagagtttctgtggtgaataatgttccagtgctaagattgcaattctttttaattttaggaaactacaagtttaatttcaagttcaagtgtaactttcttttaattactttgggatgcttgtgaaattttactctgattgaaataggccacagtttttctgctttgtttaatttcgctccaacgattccagttgttgaggaaatatttttcctatatttatgtacaaatgctttacttcctatccttactaatacaagcccattaggacattgatgcattgtccaatgcttaagtttgactagcaatatcaagaaaaatggataatatcaaaataaaagagttcatattttgaaaatttaccctgatgaatctactaatcgagatcttctgttgcaaatctttgtgaattatagatattgatgtttggaactagaaacaatttgacctaggacaaacttaaatgaacatgtacttgtggccaatggaagtaatgtgtagcttctttttgcaacattgaagaatgccgcaataatgtcttctattactgctcctactactgttttaattatctgcactaggcaattgtaactgatgttctggtgatactaatccttctatcatcacttggtagtcctaatgatttttattgttatttttttctttgcttaaaacccactttggaatatcattcaaacttccactctgtcatctttcaagccatatccaatgtgccattctgtgattctgtttgaatatttccgaaatctgagaacctaatcttttctttctgtgatgatcaaagatacacatttcgatgttcattgtttcataggaatttagttaatttcctggcaaagtaattctgcatccttaatggttgactatatttttatatatgtttagctttaatatactggactacaaatttatgatctctttttaaattatgaaacttcattttgaatttttgagcaaggtgattatgttactacaagggagtctcttacagatttcatgtaaagttggatgcatgacataccggttgatgtttctattttgaaaagttatgttttggcagacaatttgttataatattcttcggtttatgacatcaactaaaatcaggatatggaacgaagattctgaacttgtgtacatcagtaaacacatacatactcgcattcgcatgcaattagtataacttgggctgtagactttttagtccgtttcttgtcttgtaagctttccgcctaatttatgcataaaaagctattttgatgttgatctgagcggttaatatactaatatgtgttttggaaatcttctgataatgtagtgggtacctttgttctttgtgtcacagcccaccttgtgcttgtgcatagacaaatccacagaatatattccattctcagtttaaaaaggcctccttatttcctagcattgttgctcttaattgatgttgcacactttaggtgagctgggaattggacacaagactaagaagccattatgttacaagggatcatcgttccaccgtgtcatcgaagggttcatggcacaagttagtttttcttttgtatttatgcattttgcttccatcaccgttacgatgtttgtattttgtggttagaatttggttagctttgtcttgttctgtttttagtcagttccttgtttagttgctcataatgtaggatgcaagacagatgatattgactgcttttcttatcacatagtatttaaggtcgaatgcagtattatctatgtctgcaattctaataatgagtggaaaatgtattgttttgttaatgtttgtattttatggttagaatttggttagctttgtcttgttctgtttttagtcagttcctttccttgttcatgatgtaggatgcaagacagatgatatcgactgttttttttatcatatagtatttaaggtcgtctgcagtgttgtctacgtctgcaattctaataatgagtggaaagcttatttgtttcttagttataactgctgagtgtgcattgctttttctttcagggaggtgacattgcgaaaggaaatggtgagtttgcacaattagttcttcctttacattttgctatttctttcccttcccagaaaaaaagcagcaattcccctccccactttcacggcctctcattttttgtgttctcttatataccaatgttcttgtgtacgtcaacttatgggcttgc

SEQ ID NO: 187705 - DNA, 349 bp, Zea Mays
cgtgggcgcgcggcgctgttgctgagagctgctggtgtggtttgtttgcttgtttcggattgggtcggtggattggattttggattcggctgttgggctgcaatgctcgcttattttgaatatttcccttggagcttcgtgctggaattagtgtacgagtgcgctgtggctgcgagatgtgtgattttgcatcgatgtacgtgtatgctgttcccgtggatttgagggtgccagtggggtcagagcttgtgctgctgaaaggaatgatacgccttggttctgattgggcttaggtttcggggaggactgaatcatttgtgtgtgacaggagattcattttatggcaaag

SEQ ID NO: 187706 - DNA, 378 bp, Zea Mays
gggaaaggttgaccctgactctttggttcactagagaccgtgcttatgatgaggatccaaaacttcttaactttctgtctcagacatcattgagctgtgaaccaactgagcaaaattcttatattcctgtaccagcttctgataacatgtatcgcttttcttgtgatcagtctggttttgacatacgatgtgctagagtgcatattctggggtttagttttcactcaagtagtggtgaatgcaatatatctgcgtcaccagctgaagatgacccaatagagttgcttggaaagcaactgcggctcgggaggggagatgatgtctttgagaaaatattttctaacagcttacatgctcttcaggtatgttcattctttg

SEQ ID NO: 187707 - DNA, 380 bp, Zea Mays
ctgaggcacttcttccgctgagatacatggaatacatcatgtacatctgacagatgatcgggtaactccagttgatatgcaacctctcccactcgttttaagatcaagtaaggtccaatgaagcgaggggacatcttgcccttatctttgaatctcttcattccccggagtggtgacaccttcaaatagacataatcaccctccttaaactcctgtggtcttcctctattatcagcgtagctcctttgcctggtttgagctaccctcaaattctcctgaattatacggacttgttattctgcctcttgaataagttcaggtccaaagaactgtcttcctctagtcttatcccaatatagaggagtcctgcatttcctgcc

SEQ ID NO: 187708 - DNA, 403 bp, Zea Mays
tcaatttggtatcagattcctctgacgcatcgaccaacatatccgcgttgatcacgatcctgcgaagacctcctccgactcagccaagttggatcagatattggcgcagctctccaccatcaactcacgcctcgacctgcatggacagcggatcacgcttttggagaagcgcccaatcgaccaacagctgccggaatcttcagaaaccagcccacgtaccgcagcgcctgtcggggtcatgcatagcacaagatctgcttctcatgaccgcatcgacgatggtggctatcgaagacccaatgtctcctttccccactacgatggtgagtccgaccccctgccgtggatcaataaatgtgagacttacttcaggggcatgaggactccagagaaggtgtggcag

SEQ ID NO: 187709 - DNA, 325 bp, Zea Mays
aagcggggtcagagcactatttcggcgagtcgctgacatttgcagaaataccctcgttcttctatttcttctccacaaacgtccctagcgacggtgcgcttgtcgttcatcacagacaccgcacgggctggccatgaccggcgatggtcgccatgtctagctacagggaaggcataaccgacccaaggttaccctagaacatgctctaatcggactaatttgggccaggatgtgcctgaccacggtgatggcggacaccaagcattgatcaatacgttccggtttcatacgtaaggtaaagctccctgggttgcgtggataacaa

SEQ ID NO: 187710 - DNA, 327 bp, Zea Mays
tttcgctcacttgtagcccaaaacagcagaaaaaagaatggcctttcggcctggcttctctagtcccaccacccaccctcacaggccggctcactactaggcccagttagccactccaccggacacccacgcgccatgtccaaattttaaccagacaagaagtatagtagtagattgcagaaagcaaatattgggttgagagttcactggtttataaagcttgcaaaatgaagaacaattgggttgatttccggactttgtgtgggatatgaggaagttgatgctactgtttgccacagctaatagtgtgggcttcgtgtagccaag

SEQ ID NO: 187711 - DNA, 530 bp, Zea Mays
tgtggatactgatatatctgatgaagacgaaggtgacgacgatgaactgaaagaaagcataaatggttcagaggatgaagctttagaccagaatgaagacagcgaagaggaagacaagtcaaaaggcagtggctctaaagcgcagaagaggaagttaaatgattatattggacagctaagttctgctgatgcaagccttcgagttctgaagaggttagcaactgccaagaaggctgaagttccatctgatgaaactggtaaaattctatccgatgaagatttcaaacgcatcaaagaactcaaggtatgtggattttggatggcttatagatctacagtaaattttttttaaagctaattttggcaaaataaatttgctcatattctgatcttagatggatcattgatgtcctaaccgaatatatttgtgtttcaggcaaagaaagaggcgaagctggctttggctcagcatggactaatcaagggtggcgacacaaggtctgtaacctttaagatgccatcatctgacc

SEQ ID NO: 187712 - DNA, 277 bp, Zea Mays
cagagaagtaatcatccacatattggtcgatttcagcagctggaccacgaagagaggtaatgaagaagagggcatggatacatggcaacccagtaatctcccattgcctacaactacatgtcctcttctctaagttcactgggtacctccattccctcttttctctgtcgtatgctgtcacctctgcctcaaatggcgtacgctttatcattttcatcttcaaacccctagttttcgtaagcaatttcttcatcacagaagggattattttgtggcc

SEQ ID NO: 187713 - DNA, 641 bp, Zea Mays
cctcagtctgctgaggacccagacgaagatgaattgatcgtcgctgaccagcgcctttacgaggatgtcgagacggggaatccggtcgatggcgttcattgtctccatctggatgcgtgccatcagccggtggggggggaggagagtcctcagcccccgacgaagcatcaaccggaaaggccgccatactaatattgtatgacaagcaccgcttctcacttgtcaccatcccaggctcagcgatgtagagcttcatgtttcggtggagtttttttgggtcaaaacaccaagccctcagcttgaaggaggagaggtctgacttcaaggctgtggcaggatggatatctgaaaccaaacaagaatcatgcaggaggtgctccgccgttgatcttgcccaggcatgagccgggatcccccaaatctgcacgtcgaccagaaatgggagagcccccgccgttgcatgcgtaaaccgcgaccaccgcttgaattgcaagttgaaacgaggccctctgaaaactttgccttcattgaaaacccttgtggcggtgtcttcgttagggaggaatagcagaaagtcctcgggcatggcttgatgaattgccaaagaatcagcatctatgccgaaacaacgtgccacttcc

SEQ ID NO: 187714 - DNA, 352 bp, Zea Mays
aaccatgcctgatcaggcttatttgaaattcaaagatctggtccatcactcatccttctccagtttatctaacctgttccacttagcaataaaaacaattctactaaagctagtttagattttgtttttttgcactgagatattagtttatggcatactgacatagtgggactgcggaaggtggcaaattaatttcatataagagagcgccattttttaaggaatttctgatttctgtaatgaaggagagtttttaaaattgatcttctgggtgtcccaatctaactcctccccaccacaaacaggaatttctgatttgtgtaatgaaggagagattgtttccccaattttt

SEQ ID NO: 187715 - DNA, 652 bp, Zea Mays
cacttgtaaagtctgatgcaccatcaatgtctcggccatctatgttcaactttctacctgtcgactcctcacagatcccactgcttgaaccagttaggtctggcatcaaagacaaggtccttgcagaggatatagttccgtgtgaatcttacgcttcacagaagatattctgcaagcccagtgaagttgcacggctcaagccaacattttggactatccttgccaaagcatgggggctaggagtggatctgaagaatctgtcaacccatggaacttatattcttagctcacattttgacaaaagtatctatgacagtgtgctaaactttctggatgtgaaaaatgtgaaccatgaatggtatgcaaaatgcattgaaggctcaaatcttgtcaaggaggtagatgaacaactttacctggaaattttatattttgttgcagtcaattggcaaaacttttctggtacaaacatgatgtccattcccctgctgaagtatgttgataggggtggtgttctctcgttctggagcatatccagagctagtcagtgtaatgataggttgtgcattgcgtctgaaaacaagtacatatcatggctaatcagctggaatagggagttcctatcttctaaccggttctttctgcctcctag

SEQ ID NO: 187716 - DNA, 300 bp, Zea Mays
cctcgtcgtatggtgtgtgggcgcggggtcaattgagctcgggggatcgtcctagcacaagcgatcgaccgccggcgcctcctttccgtcgtggagcgtggtcgcggattccgacgtcaggaatttaggtaataagctgttcccatagtccgttctcgcctccactccgcgtaagaccgattagatgggagttcagtgctctcgctcgtcggatggtcgtactccggtgatggcctccgccgcggggctaagggatgcagcctgggtggccgtcgtaagggagaatggtcgggcgccgtc

SEQ ID NO: 187717 - DNA, 284 bp, Zea Mays
gtcggtggtaagaggagcgtcgatggtagtagtttcatcattagagaaccggagcattcgtgaagggtcggtcgagatacaaaggatgagattatgggtatggaaagagaggttatagtatgaggcagcagagacaggcaaaaacgtccttatgatgatgatgtacggtagaaatgctatcgaagaagacctaccccacaatgggaggttgtgtcaaaaagttgtggatattgatcgttgatcaagtcggtggaagtttgggctccatcttagttgaaaacaga

SEQ ID NO: 187718 - DNA, 347 bp, Zea Mays
tgatgctgctacagcaagtgctccagtagagtggaagacttccaagcgcaaggtgaaaaagacaccagcggccatggaagctgaagctgagaaggagcgtaagatgaagaaggcccgggtctctcctacttatactgataaaaagcgcaaacttgaagagttgtatgatgctaagttgtcggattggcttccaactgcaaggaatgagattagtgacaccactagtgatatggaatcggaggaggccttattgcctaatgttggaactacaaatgatgatattgtgctactcatgccaaggaagcagacaacgactgcacctgtaagggcattgatggataatgaca

SEQ ID NO: 187719 - DNA, 918 bp, Zea Mays
gtggagatgactcagatttgatagcaaggaaaaatacatttggttcaaacacatatcctcgtaagaaaggaagaagttttttggtatgctaaggtttcgtttatgatatagtacttctcttttctctgggttagtcacacctgctgattgaacatcttgtttaggctttcgtatgggatgcttgtaaagacctgacgctaatcatcctcatggttgctgctgctgtttcactggcattgggcataacaacagaggtgggcatcacatctgtagttctgactccctaactgtacaaaattgtcaactgtgttttgtcacactgaaacagttgttttattctttttcccttctgtgggtatcctatttcaaatctatccaacttcatctactttccagcacatgcatttcttatgcagatttcatcatattgccttatatctttccatgtgcttacattgattacattgctcatctgtgttcctttattttgcattggaatatgatgatattagggcataaaagaaggctggtatgatggagcgagcattgcctttgctgttcttctagttgtatttgttacaggtgtgccactatgacttttctctgactttctgtgttctttgtcatataacaagcagtgtgtttctattcacatcaaatcatcaagtaatatatgataaaactaataacaagcatgtgaaaagttacatataatgatgcaaaattagtagtggcctaaagcaacaaagttgaagtcaagtatgcatgcctgaaacttcaaataaaacctcttactcagcgccaacagttccttttacggtttgtgtacagttgctcaaatctagtggctattatttttccatgttaattttcagctatcagcgactacaagcaatcactacaatttcaaaatctgaa

SEQ ID NO: 187720 - DNA, 422 bp, Zea Mays
caaaaaaccaccaaaattctatgaagttacaaataactcaaaggagagaccagatgtttggattgaaagtcctgataagtaagtttttttttaattctttgattgagagccattttcttagatataggaagcacatgatatgctaaatcactaattgcattttcaggtcagtcataatatctgtaacaagtgacattcgtacaatcaagtctgaggtatttgatttaaagaatcaaatacttatatgttctgcagttctgtctttaaaagcattaattcttggactgatttctcttgtgcagtcagctggtgtattttctcttctaacttacttttaatgttttcaaccttatgcaggtatttgctgctccatactgtttgaggttcccccgtattcagcgagtgagatatgacaagccatg

SEQ ID NO: 187721 - DNA, 290 bp, Zea Mays
agaacccagtgtgcccaagtgctgaagaaacagaccaagactcaacaccagttgggcaggacccagtgtgcccaagtgttagagcagcagagaatgttacaactttgatgaacactgaggaattgccaaatagagaggaacctctaaggcttcctgctatccttgtgcagcagactagagacccctgggaaagcatcaagaaaagattgcaagcaaagcccccatgctataaggtatactcaagaagaagagaaatcctacctgaacgaactcaggtagacagtccgaca

SEQ ID NO: 187722 - DNA, 1217 bp, Zea Mays
ggtttcaaggattacacaggtaaggttggtgctgttgatacaaatggagttgatacgacataccgcctagtcgcagatcacatgagaatgatcgctgttactaatgcacccggttctcaacttggttagagcgttatgtttctgttggtcacgaatgttaatataattacgacatcaatgtatgggtttgtcatgagcacaagtacaattattggtcattttcaaggaacaatcagaccaatctgattgttggatgacttattacatgaatacattttttgtcattacattgttcttattatgttaaaattgtctttcatctttatgaataccagggttgggaaatgaaggtcgcgagtatttcctgaagtgtgctgataaacaggctgtgaagtatggctatcaagtacttaagataaatgaagaggattacgacatgtaagaacaatcacttttatttgaatctgtgctttattttacatgcatttgtacaaaaacagttttccctgtttacaagtcttatttttgaataatgtattctcacgcattataaactttgaatttcaataaaaacctttgtatggcaggatgtcttcttcaatgcaccggtgcaaataacagagcatccagttaggtcacttgtcagtcttcatgatttttagtatgagtcgtcgttagcaaattttgtatttttgctccctgctgtattgagttttctctttgtctttcctccagaagtaccttgccaggaacaccttgaaactacttatgcttggtgttgctgcatatatgtcattttgcaccctgctgtattgcgtttctgctttgtctttcctacaacagttatcttgccaagaattgtatgttaggctacttatggttggagttgctgcatgttgtcatctcacagtgtgcagttaccacttctatcttttgctgtgcgcttctttactaaaagtaaaaataacattcaagatgaaacctactcaggatattgattctatgactgggttagttcttgccagcctgtcatgcaacttctatttcgagtaggttaaacatactcacagtgggtatatagaaagaatacatgccatctatgattactgcatgtgagcttgtactcaaatgaatttttttacttggacagtgttgttgatgaaattcttctaaatgaacctgattgatgcaatgagcttgaaagagaaataatcgac

SEQ ID NO: 187723 - DNA, 580 bp, Zea Mays
atcgccgagaatgcttatcttctacaactggtgattcaaattcctccggctcagcaactgagagctcgttcaaaatacattccaggtcctccagttcggcatctgctccaaactgaccctctgcttcaagagcagcggtaggcagtgaagcagctttgactattccatcctgtttgtcttccatgttctccctttgaacagcaacgtcactgacggccaccacctcagttttcactccaacagtctgatcttcagcgacatcaccacttacttgcaaaggcttgaacgatccctcttcgtcaattttgaaccctgaatcctcctcctggccagccgcattgctggtttccacatgtttgagcctttgcgggtcatctgaagcaacctcaactccatgctccacaacattgaactccaccgtgccccaatcgccatctggatgcaccgagtccccctttttaacctctaccgatgtgcagtgctttgcctccggagacccctcttccgtgcagtccggtgctgccagctcctccttcctcgcatcaggaaccccgtcagcaacagaagaaggcaccggcct

SEQ ID NO: 187724 - DNA, 547 bp, Zea Mays
tggaaaattgaaaggttgaattttgtagataatgatggatgggcatatgctgcagattttcaaaacttgaattggccatcatcatcctggagatcttctaaatcaccacacgacttcgtgagaagaaggcgttgggtacgttctagacagcagtcgcaagaacaaagtgcagaaattcctagaaaagtacttgctactgtcagtcctcattcatctactgcgttgccttggacatcgatgattagggatatggatttatgcttgcaagttcgcccatattctgaaaaatcagaggaatcatatagctggagccagatttgttcactaggttctgagagtatacctaaacagcagcactcttcactttctaggcaaagcaccgtaaagcagtcagtggtatcatcaaggaattctgttcttaagcttgctgaactcgagaaaaaagatgtgctctcatattgccatcctcctgttagcactgaaagatatttctggtttagtgttggaattgatgcttctgttgttcatacagatttgaatgtacctg

SEQ ID NO: 187725 - DNA, 550 bp, Zea Mays
taatccagaacatggtatacctgtcaggacaacaatgttcagtaattgagaaggatgcaatacaagacaagacaatgtgaagatgggttaacattttaacatacttgaagagggagaatgcaccttcgtgcatccctctaccaacaaataaccgaggctgcagacaaacatcgaatctttaaaaaaaagcatccacaatcttgaccgtctaattaacagcagaaaacaagaaatggaatgctacctgagaccaccacatcatgatcgttatgaccttaacatttgaactctctaggattcttctcataaatgggaaaagaaatagcatagaagcaagtatgtttggtgccatatatatcactactgccagtatatacaaagatggctgattctgaccatccccaagccagctttttattgttcttgcaagaccagtaggattctcccaagtgtacgcgtaagtcactggtaaaatcacaacccatgcagcagcagatattaatttcaagacatatcgtagcttgactgcaaatgacatgcttctttttgc

SEQ ID NO: 187726 - DNA, 523 bp, Zea Mays
gtattcagtcgcatatacatagtccttgttgtacatggtatctatcctataccaatgtatatatacggacttagtgtcctcatattgaatatagtgtatttgggttagggttcgtcttcccttctctacgatttttttctcacgtgttgcatttgcacgtgttacaatctgctcttcgttcttgagccgaatctcctccatcttctgttgaaactgaaattggaagccgcgcaagggagacgtggtgctcggaagccgctgaagggagacaccgttagtcgaatcgaccgccaatcaggagctatctagccatccattagagtctccacatcgacgacaaaatggaggacgctcacacaaggacatctgacgctttgctccgcgcgaggctaagttccgctcgcgcgtgccgtcagtgtgctgttgtgctccactcacgcttgtagcccccattccagatctggttttggtccgatccgggtttgcagatccggttctaaccgtttttgttaggtttcggtaa

SEQ ID NO: 187727 - DNA, 393 bp, Zea Mays
cataactctccgcaatttatgcaggtagcgtgacactaattctgacggtttcttgacatcgtcagtgacgattcgctgatgaattttctttgaaatagtttgcccctcaacattggtgtcaacctttgcttcctttttgatgtttacgtcgacattctgaggaacaattttgtctacgtccccctcgtcgagttccttcgcaagaggcgatatgattgtttcaacgatttttttggaggtcggtgtcatattttcctgcaccatggggtatggaatgatcgaactatctttctgttgcattggtgttgaattcggcgttggtgacttatgacgcgatacacggcttaagatcggctcatcacccaacttgatgtcgcgtcgatgccaaaggac

SEQ ID NO: 187728 - DNA, 409 bp, Zea Mays
ctctggctgggcgtgcaaaggtcgtctggaggacacatccaaccctggaaagttcgtatgcatggcatcaggagcggtcacttgtgcgtcagatgggaatggtttcaaaacatgccagtcactctgtccatgttatgtaagtagcaatggagctttttcaaaaccagttaagagagcaagtcaaggagaatctagcacaaatactgacagaaatcatagctcacacaatgctgctactgaagcatcgcaatgtaacaacagagcctgttacattcccaggttaagagtagaaagtagctaccttggtgttcattcatctacccctacaaaatcctttcgccctctgtctttcaattatgttgcaccttcattatattcaagccttttctcatgggacacagatacacta

SEQ ID NO: 187729 - DNA, 1168 bp, Zea Mays
ccgccagctccaccgccacttcgagtcctcggtgttcctattccagcagcaggcggcgctggctacaacctcgtcctcgggaggcggcggggaggtggccaaggagctcggggacctcgccctgttccttgcccacgtcgcgcctttctacccggatgacctcgccgatttgcccgaccagattggtggcttgctcgacaccaacgcgcgtgggctgccgccggggctcaggtctcacctcgtgcaggcgcttgtattgctggtgaatcggaaggtaaataattttggtcttactgccgctgatagtttttcaatcaaaatctcggggacatgtgagttatgtttgttttgacaacgggtagccattttgtcttttaattgcagcttagtattgcaaatgcaaaatggttaattttttgtgtggagtttagaatagatatgattgcggttggcttagtggaaggatgccaacagattaaggaaatcggttttacactgagtatgatttttttagaatttttcaaaactacacgctcatgttcctattctagtatttcaacatcaataaatcattgatttttttatcaaatatgtgagcttcactacatatcactacacttggatatagtgctagataacttttgctagatctgtattacaatgagtaccctctttcaagtaagcattgggaatatatatatctgaaactagtatttttgggtatgggttattaactaggtgccaataattcaccttttctttgcacaataactgattgaacttacacatcctgtgaaccattgaaatccaaccacttgttttgctaacccctctttcgttttaaaaataaaaatcagattgtcgatcttgaggacacaatggagttattcatggagcttcaagttattggagatcgagctgtaaaaaagctagcattttcgcatattgtacacagtatcaggaggatgaaccagaagcacaagaatgaatcgacaaatcgtaaactgcaaaacgtcctttttaaattcttacaggtctgcaacatattgtgaatgcattaatcagtggtaccaggttttagcatattgaaaaacaaatacaaatttgttttcccctagctcattttgtacacctgtttgtcaggctgaagaagagtcacgagcaaaga

SEQ ID NO: 187730 - DNA, 305 bp, Zea Mays
gatcattgttgggcccattcatggaacctaatgggaccaaagcttccttcgtcccataatgatccacctcttcttactctgcaaccccttcgcctttgcttgtaccaccacttctcaactatgagaacaaagaggacatggtggaccttgacgagaaaggtgatgccggtaaaggatctcaacaatatcaacttgcctgcacaatgcttgacatcaccaccatctcatggatggagaggacaactataacagaaacactgacgcccaagcgggcgagagggtgtggcacaaatgttttattgcta

SEQ ID NO: 187731 - DNA, 772 bp, Zea Mays
agaacgcaggagcttgtggctgtcaagatcatctcattaacagaaggggttagtttctagcttcttattacaaagttctgtgaatattccggaaggctacccaagacatatttcatatttggcaaccatattgcttttgttgtgagcattttgtttgcatgggcttaattgtgggagaatctcataaatgtggttgctttctgatttctgagtccttgcatttttgtctttaaaatataagcatgtatctctggcattcaggaagaaggctatgaagacatacggggagaaattgagatgctgcagcaatgcagccatccaaatgttgtccgctactttggaagctaccaaggagaggagtacctatgggtataaataatcaaatagcctgcttgtatccattttattaatattaggaactagccaaacttttctatcattgtgagatttatctagttgtcaactcatttaacatgatcttgatgcaaatgtgattctcaacctacagataattatggaatactgtggtggtggaagtgttgctgacttgataggcatcacagaggagcctcttgatgaatcccaaatagcttacatttgtagagaagcactaaaggttctaacaccacatttgtggggcaattaaatgtcttcggatatttaacttttgtgtgcttattttcttctccagggccttgcttacctgcactccatttttaaagttcacagagatattaaggggggcaacatccttctaactgagcaaggcgag

SEQ ID NO: 187732 - DNA, 555 bp, Zea Mays
ccgtggtgtattatggtaatggtggcgtaaggtgtttatttgaggtgtgcgggtatatgccgtaatatggttatactcgcgacaaggaaagatgtatgtattgtgtgacccgacgtttaggttgttattgtacaatcgtgtgaaggatgctcccgatggtcatgtgactaaaatgggttgtagtggcaaagcgagaagtaagtttaattctttaaagcaattagtggatagcatctatcggtgttgtcataatttttgttgtatggcaatgtgatgtttcactttatcaatcattacattccatgcccattggataaataaatgtgttgttgatcgattagaagtcttgtatgagcgttatcgcagcccaataattatgggaggcgagtagcgtccgtaagtcagtccttgttagaatcgaagaacaatccgataacatatgcacataagtgctttaggtccttcagtagccagtataagtcttatggagtttatgccatgttttaatgtctctatgttagaccccaacgatgtgttattttaggtaacttgtgt

SEQ ID NO: 187733 - DNA, 470 bp, Zea Mays
ctctatccatttagtgaatttgtcgattgctaccaacacatgagtgtatcctgcttgagctttattgaaaggtccaatcatatccagtccccagcatgcgaagggccaagttaccggtatggtctgcagttgctgtgctggtagatgttgttgttttgacaaatactggcaagcttcgcacctctgaactaactcggctgcatcactcttcgctgttggccaatagaatcctgacctaaaaaccttcccgactagtgtcttggacgccgcatgtattccacattgcccggcatgggcctcctccagaagtcgcttcccagtagatgagagaatgcacttcatgagaacgcatgttgcaccccttctgtataatgtctctccaatgagtgtgtagtgagctgactgtctggcaatgcgctcagctgcatttttatcatctggttcctcttcattctttatatacctgatga

SEQ ID NO: 187734 - DNA, 523 bp, Zea Mays
cgccgaaccacaccggcgtcgcgctatggaggagtacgcaacttgttggtcgtgggactagtgcgaggacgacgaatgtaggttttggtaactggtagttttgaagcgaaatgtgaagtgggtgttgaggtagaaggatttgtaatggtaatgagaacatcatgtgaggatgtggtagatgatggtgtagtggaagatgaagaccaggtgaaagagcatagatgggaggaagacacatgaaagagtttgagtatgtagaaaaagaagatgaatgtgtgagagagttataaaagaaaggtcggttttcattaaaactcacgtcacgtgaaatacgaatgcgacgcgcggaaggatcataacatcaatagcctttgtgctccagactatatccaagaaaatcacactcaacaaatcaagcagttaatttactccgttcatgagaggctaacaacacgtagcatgtacatccaaaaactctaagatggtcatagcgagaagtgccaaaaaggacttcaccaggagt

SEQ ID NO: 187735 - DNA, 520 bp, Zea Mays
gccggtgagcttgccacggcagtagccacgtattcaccgcgccaggcttcttcctcccctccggccgccagctctgtccggccaaattaagcgccgccgtcgaagccccctataaattgagcccccgggcagctgcgctaagtcatcctgaagctatagcacccgctcccaccctcgatcatccaccagcacgcgcgaatttctcattctccccaattacagtccccgccaccgtgaaaacaaccgtactgcggccagcacaatcccggtcagttcatcttctatgccttctcgtttgagtgcttccacaaccccgtgatgctcaccgacccacccaattgaattatactgccaccaatctttgggaacgcgttgttctttggatcacccgcactgtcaccgtggccaggacgttgtagtgcgccgttggtgaaattgatttaggggaagtgttcggtaggagtttaattgtgtccctgtcgcacgggagctccagccatggcgttggccggccggaatt

SEQ ID NO: 187736 - DNA, 519 bp, Zea Mays
gaccgcttcagcaaatactgccactttgttcccctggcgcatccatacaccgccgagtccatggcgcaggcattcttcaccgacacagtgcgcctccacgggatcccacaatccatcgtatccgaccgggacccagtattcacctcggtgttctggcgtgagctcctgcacctcatgggcacaaaactacacatgtcgccggcattccacccccagacggacggccagacagaggcagcaaatcatgtcattatcatgtacctacggtgcttcactgggtatcgaccccgacaatggctgtgttggctgccgtgggctgagtacatctacaacaccgcttaccagtcctcactccacgagacaccattccgggtggtctacggacgcaacccgccctccatccgctcctacgagcccggtgagactcgtgtggcggctatcgcccaggagatggaagatcatgcggccttcctcgacgatgtcaggtaccgactcgaacaggcacaagcagtacaaaag

SEQ ID NO: 187737 - DNA, 958 bp, Zea Mays
gtttgctagctggaaatgttagtattgtgactggggagaatatcaggccatcttatggtggggatgaggaggcattcttgaagaaagtggttacacctttctatagagtcatcagaaaggtactttgataaatcatcactgaaaaatgagcagttttttttgttaaatacggataattgtgattatttgcaggaggcaggcaaatcacaacatgggaagacaccacattctgcgtggtctaactatgatgacctaaatgagtacttctggtctgttcactgctttattttcttagtacatatctactccttcgtgttttttaaagaaacagaaggggtagccccctactggttaaaatgtatttataatagaagcaaaaggagtttgtaagcaacataattcatgaagcataaagggacacaaagaatattaaaaagatcacaatgtattgcgtgtaacaagtcctactccattcactcaggacatctgattgtttctcgcttgggtggcctatgcgggatgatggtgactttttcaaatccgtgcatgattcaaggcctgtaacaacggtacaaatttgatattcgtatgtgttctgtcaatatttcttgacaacaaatttgattgggattgctttgtgacaaactttatttgtaggctggaagctcaccacaaaaggattccacgaaaagtacagggaagacaaatttcgttgagactagaacattttggcacatcttccgaagttttgaccgaatgtggactttctatattttggctctacaggtactatactgaaattgtatatggatgttcttttatcttgactacagtttgacacctgctaatattctagtatcttatttaacaggcaatgctgatttttgcttggaatgattattcagtgaccgaaatccttcggaaagaccttttgtattatctatctagtgtattcgtc

SEQ ID NO: 187738 - DNA, 403 bp, Zea Mays
ttgtaatgccccatgaagcagatggaaaaagaagtcgattgaatagaatcagaaaaaagcatctgattgataactcatcatgagtgccaagcactatcttgtcctgaagcttgacaacatcaaattcttctttaccaactttgagatcatgtctaagttttgcagcagcatccacttcaccataccaatcagtaaactccctgccccctccagcacatggcaaacccaaaataagacgaacagtctcttttgttatcttcagttccttgccagcccctggcgtatggtcatgtcatgtggatccaatttatccatcaaccacctaatgagagatctgctctctaaggcatcagttcgcaaatcaaatatactggaaaatcccaacctagcgactgcatcgcgc

SEQ ID NO: 187739 - DNA, 748 bp, Zea Mays
tcctctcctctgctcacccagccacccaggtagggctcctccctcctctcctctgctcgcccagggctcctccttctcctctcctctcaatctcctatcatctcagcattggttctgcagtggaagagaggcacgcacgcccagggatagagggggcgcgctagcaggaagctgaagcagggactccccatcctttgtttgttgccaggtatggatgcctcttgcttcctctattttatagtttgttgtttgctcctgattatgcatagtagttcatgcttcaatcttcatggctctctatttcttgtcgttaaatgttagttcatggcttaggcttaatgctagtagggtcagatagtgtacaacatggctagtagggtcagacagtgtacttcatgcaaatgattgattgtgcattgcaacatgtaggatgtcatcggcggcttccaatccatcagctcaaccaggagtggacaagcaaccacttaagcggaatagcgatgacatagggtgggagtatggaactattgtcaatccaaatgattggaatgtcataaaatgcaagttatgtcctatggttgtcaaggatgggatttataggcttaagctgcatattgctggtagaaaagggcaagtccgagcatgccccaatgcaactcaagaggatagagacaagtgcagtaaagctcttgatgattctaggaaagctaaaatagctaggctaacagaaaaacaagaggttattgat

SEQ ID NO: 187740 - DNA, 440 bp, Zea Mays
cctccaagcccacaacttctcctctcgtggagtccatctgcgtatgtcttgcccctacacttcagctcaaaacagcaaggctgaacgtgttattcgttccattaacaatatcattcgcaccctcctcattcagtctagtgttccccccagtttttgggttgcggctcttggcaccgcaacatatcttctcaacatattacccaccaaaacccttgctctttctacaccacattttgctctcttcggccaaaacccatcctatgagcaccttcgtgtttttggctgcaaatgctaccccaacctttccgacaccactgcacataaactatctcctcgctcagcccactgtgtctttcttggctactctccccaccacaaaagctacctatgtcttgatcaccagtccaaccgtatcatcatctctcgtcatgtggtttttg

SEQ ID NO: 187741 - DNA, 484 bp, Zea Mays
aggacgagctaaaggttatgtttggacccattgtctgcacaaatgaaagaaccctggttcctggcgtcgaggatgctaattcatcttctgatgatcatttggaatacactttaggtgggggtgaaaacagcacacctgacccctgcacaaatgctactgcgaagcgtaagatgcgacatgattccccaaaaccaaagaagaaaaaagattcgagggaagagtacatgaaaagacttgtcgaggcttttgagtcccgctcattgaccacaaacaagtccattacctcttctgacaatgacccagttcgaatagagcttaaaaagcagatgcaacaagtcaaggaagatggatcaccagaagggagcgaactacatttgtttgcgactcatcttctgattcagaagaagtatagagatgtttttgcaaccttggagacaaaagaaggaagaatcgcttggcttcgcaatgcttacgcgttagaaac

SEQ ID NO: 187742 - DNA, 1902 bp, Zea Mays
ttaacgttttgcaggatctcccactgaaagacttgtaatacctcgacctcatagctcttgtcccatagttgttctgttacatttgtattgataattgaaggcatgccatttatcattatcttgtcatttacataagttagcctatttgtcgagttttacctaacgacgtatatggtattgcgatacgatgtggcatcaatttccatctctgatttcgaaaaagtgtaacatttcatgttggctccagccactgcatgtttgacttgaacaatagttcagcagatcatgattggccgatggctaacactccacaagcttgtgctcggttcctaaaggagttaaaaaatttaacaaactatctcttgctgccttctcgtagcatgttgcacttgcacttctctcatgtgccgctcactaatatctggaagcaatgatatctctatagggttttcttctttggagaaagtaacacatgcttcatttaccatgatcttgcaaatgagcacttaatcagctaaggaagtgttaagcagttcacgtcaagctctgcattcgtgcaatacagttgctctactcttgtacttgaattgaattactgaaaccaaatatatctctaacctcatatatttaaaatattactttgatcattaactgtttgcattttttaatatactttcctgacttcgaacaggaacatagagaataatcttttttctggaccggtgcctgcgagtttgcttaacataccaaacttcaagtgagataccttctttctttcatgtttaccttaatcagcttcattaaacctccacgctgttatttgtagtaatgctatttcatctattaggcaaatatgtaattgctacttagataagttatgtaatatatatgacttgttaagcgactaatagtatatcatcacagaaaggacgggaatccattcaataccagcatcgtcccatctgcatctccgccttcaacaggaccagctccaacaccagcagcatcaaaaccagctccaacaccagcacccaccacttcaaattcaacgcccccagcaccagcaccctcatttccttcaagatctcctcccccgcctaaaacaacctcaaactcttctgaaggatcaactacccgagatagcacttcaccatctaagaaacacagtacatcaaccctcaagattgttggctttgttcttgccggagtagtgctgtttattatcatagtcctcctagtattattttgtctatccaagtaccaagagagacggtcgagatatgatcataacagaagtcagcaggcaagggtgcatcatagggttgaaccgcaaatcaagccacctccagtgcaacaaagcaatgatcttaaaaaaggtaaacctttcatcccagtattatatagctttgtgtttatttttggttttcctgtaattggtttatttgataggttcaggtgaggtacttgatagaaggggccatgaactaagttcatcaacggcaggtataaagtctttatgacaaagtgcatctaagttatattcactaactacaaatgtctgaaagtttgcgtgctattgtttacagctctcgcaaagaaatctcctgaaaaccaaaaggagcatgtaattaattttgatcgaacagattcagatctgtttcctgtttctctaccaccaccacctcctccacctccattacccccaattgaaagagttattgcaaatcccattgttccaccagaaaagcgatatagtcctccaccaaagacaagtagctctacttctgccacatcattctctattgcatctcttcagcaatatacaaatagcttcagagaggagaatgtgataagagagagtagattaggaaaggtttacctagcagagcttcctgatggcaa

SEQ ID NO: 187743 - DNA, 434 bp, Zea Mays
caaaacttgatttgagcacacacaaaataaataatgctaactaaactaaactcatttgccccgcatagtttcagttatacagaatacaactaagatcctataatataatccagttacagaggaggcaaaaagcagttttgtgttaacatttatgttgcttttaccactagcctactatactcgctcccaaaaagggaagcgtattttatagagcgaaaagccaaaccttacagactttgttcaacaattaatcaaattatataggagtttaggacatgtagaagcctcgagcaatgtctctgcccggtgcccagatagcaaaatgattgtggtgtttactgagacaccataggccagtaaaaaaatcgctggtgcatgaggatttgcaccactgcaataggttggtatgccgcacagccacaaccacacaggca

SEQ ID NO: 187744 - DNA, 429 bp, Zea Mays
cagtttcttggctctggccaccttccggcggatgttcgctgcatctgttgctcccaaccgcgtcaccatggtttctgcacttggtgcttgtgcagcacatggtgctgtggacactggcatctggattcatcagtacgttcagaagctgggttgggaactggatgtcgtgttaggcactgcgcttgttgacatgtatgggaagtgtggacacgttgcggaaggagtccgtgtattctccaaaatgactgagaggaatgtttttacttggaactctatcattggagcatttgctttggtacaggatggagaaatggctctgcgttggttcttcaggatgaaggctgatggcatacgccctgatgctgtcacgctaatttgtgttctttatgcatgcgtacatgctggattagttgatattgggaggaaaat

SEQ ID NO: 187745 - DNA, 528 bp, Zea Mays
cttaaaagaactcagttgatggagcgctgggctaattgggaggtacacatacattgtcctgtgctatatgttggtagttttaatacctaaccatgtctaatttgttcagatcaacaattttgagtacttaatggaacttaacacactggctgggcgcagttacaatgacattactcaggtcagtatcctgtatacttaatatttctggccgaatctagcgacctgtagtcctgatattgtttctgcttgtgcagtaccctgtttttccctgggtagtagcagattacaaatcccgagtgttgaatctggatgaccctttgtcgtatcgagatctttcaaaggttgcattcacctatttgttgctcctgtcttttgctgatcactaacacagcttgttttatttgatgcagccaattggagcactaaaccctgaacgtctaaagaagttccaagaacggtactctacattcgaggatccaatcataccaaagtttcattatggttcacattactccagtgctggcacgg

SEQ ID NO: 187746 - DNA, 483 bp, Zea Mays
ctgatgattatatgtttgaggcctttatttcaaaggtttggggctgcctattttttcgggggtgtttgaatctcgaaatggtatagagaagcattctcttttgctttcgactgtccattcaaacagcttgtctcttccaatcgcgtcgctctgccatccaatgtaccttggccttctttgcttctgctctggtgcaatttgcagaggacaacagaagaccgaaagcatccgatcgcccggacggctcccaacgagattcacgacttctcaattctcatcgtcgtccctgtttaaagtgcttttggcgctgcgcccgtgttctcttcttcctcccgacgttgccgctcgtctgtttgctcccgtcgatcaatctcttcatctgtttcctttcgtcgaccaagtatcatgattttttccagcgccaataggtttccgtgacacacgatttggttgtatgcgttggcaacatcttggggagccatg

SEQ ID NO: 187747 - DNA, 283 bp, Zea Mays
agtctggctaggacggttgctgagtgagatcactggacagacagtgcagccatcagtcctcaggatcgacaacaagtcggccattgaattggccaaaaatcctgtccttcacagccgcagcaaacacatagatatcaagtttcacttcattagggactgcgtggaaaaggggcaggtcatcatcgagcagattggaaccaaccaatagctcgcagatgtgttcaccaagccaatgggaaagatcaactttgagaagctcaagacccaggtgggcatggtggag

SEQ ID NO: 187748 - DNA, 486 bp, Zea Mays
gcaagatatcaagagtgatggagatttcatccaccgtagggtgtaagaagagggctacatcatctgcataaatggatactctgtgaagttgtcttcttgctggttgctgctagctgctgcaataaacctgcctcttctgcctttataaataagtgtccaagaacatccatgaccaatatgaacagcatcggtgacaggggatccccttgtctaagccctcttctatgctgaatttgttgaccaggaaacccattgagcatgacttgtgtggtggatgaagcaagaagaccacaaaccatgtccctccagatctgtccaaacccaatctgctgcatgacatcaattaaaaagggccaggagaccgagtcaaaggccttggtgatgtcaagtttgaggagcagccgagataatctatgttgatgaaacagtcttgttgtctgttgcactaacatgaagttgtcctggatgaatcgccccttaatgaat

SEQ ID NO: 187749 - DNA, 594 bp, Zea Mays
ttctggggaggccttgttatcttcacctcagtttttgccgggcacaccccctccctcacttcaatcctgtgtcctggatttctctgatgttttggcgagggaggagtatgctcttcgtcgtgccctgtttgtttcagtgactggtacaagacctgatgtgaccgaggtggatgtgcttgaggaagtggcgcggaattttgatgtgaaccttggtgacatgtcaatccaatgcactaggccagaggattttctgctgtttttgcctgatgaagatactgcaaccagagtccttaatgggggtaggctgttcagaggccctcggttctctcttctgttcaaaagatggtcgcggtttgtgcacgcttcgtcagcttcgttgtccaagctggtggatattgagattaaaggcattcctgaacatgcttggactttctctacggcggagcacatcttaagtggctcttgctggatttctgatatccaccaggattcggcacacaagaaaaacctttcatctttcctggtgagagcatggtgttttgatcctagatttctgccctcagaaatggatcttcatattattgaaccaggccc

SEQ ID NO: 187750 - DNA, 689 bp, Zea Mays
cattaacagacaaaaacaaaccccctcggagtggcaacagttttgccctagcaagaaatggcaattaccagaacccatggagattctccagccaaaattagcaaagaactcttgagacaaacatttaccaacatcaagccaacaaaaatgcgtccagtcagacagccgctaagcaatctaaattctaaaacagagcctttcaaaactcactagttgcttcatataagaatacaagattaaaaagagactttctgcaaacataaattgtaagctaagacaagatcttacttaagacctccatgtcgcacccgagaaacaaagccaatcagcactgattcaggaaagtgtgtcctcctctaaagagcgaatgcggccgaaaaaaaccagctgaatgatcccagcagatatagctgttatgccatatgccgctccggaaacctgaaaccttagcgccatccaatccagtcctaacactagacctcagaaaaaaaaaacccaaagaccgccgctgctacagaaggacatccaaatcattcccagatagtgccacaattttgaacagccggcacacgcaaacactgctctaacagttcctgttgctatggcacatcacagcgctcgttcaccctaagcgaattcaaccacctcaacactgctctaacagatcccactacttcatctcactccca

SEQ ID NO: 187751 - DNA, 569 bp, Zea Mays
ccagaaactcctcctgaacagtatcaatattggggacgaggtgcttgctccccctcttgtttgctctcctccgctacctacttgttttggattgtaacattcacttctcttttcagggtgccaaggcactttcgaacatgctgaaaaagaataaatcaatacgtattctacagttcagcaataatgcaattgaatacagtgtaagcataagcatccacaaagacatgcacttgaatatatatgggaaaattaatcaccatattatgataacacccttgaaaggttgcaagaccttttacctttgtttttccttgaaacagggttttgcaagtattgcagaagcccttttagagaataatacgatacggagcttgtatctcaagttagtcactcacaacctggtagccttaatgtgatttatactgaatgtgtaaatgattttatgaattatgaatacagcctatgatgaataattgtgtgtaagtactgactaactactggtgcgctatgttaaatttctctagtggcaactatggtggtccccttggtgcatgcagcctagctcaagg

SEQ ID NO: 187752 - DNA, 377 bp, Zea Mays
aggtagtcaaggaagcttatggtgatgagaagcaccctgtgaagggttacatggggaacgggaaggccgcaaagggagagggtaggagcagcacgggggatgaattgccccgcaagtccaagtcatctgaggccagtggtagtggtagcagcttggagcatgacgttcatgtagtggaaaaaagtgttgtcggagaacaagttcgacactcggagccacggcagcatgttgccggtctaccacccacaggatcggaaaagctatacattgatgacactgaggtggtggtggagatcaggactcaattcgagcgtgcctcacaatcagctggtgaggtatcaaagatgcttgaggtcggaaagatgccttactaccag

SEQ ID NO: 187753 - DNA, 1114 bp, Zea Mays
gaaggacaaaaaatgatgatttttgcacaacctgtaaggcttcaaggtggaaggataaggaacccaattgcatactaacaaagaaggaaaggaagaaagaaactccttgcaaagtactacgatacttccctattaaagataggctcaaaagaatgtttatgtgtagagaaacaacacctctcctaagatggcatgacgaggagcgcatcaaggatggtttgctacgacatccagctgatgctccagtgtggaagaggtttgacgaaaagtttccacaatttgcatcagattctcgtaatattcgttttgcattggctactgatgggtttaatccatttgggaagatgagctctatgcatagttgttggcctgttgttttggtagtctataacctcccgccatggctttgcatgaaagatcacaatattatgttgtccttgatgattcctggtcctaaaagcccaggatatcgaattcatgtgttctttgagccacttttggaggaccttaaggatcttttccaaactggtatatccacatatgatgcatcgagaaatgagagttttactttgcaaggagccgtgcttatgaacataagtgatctacctggtttaggaatgcttgcttctcatatggttcatgggaaatttgcatgcccaccatgtggtgaaaatgtatggacgaaacaactgaagaatggtcgtaaatcatgtttcctaggtcatcgcaaatatattgatcttgatcatccgtaccgtttcgacgcaagttcctttgatggaatgatagagcttggcaaggagccttcaacttattatggtcgtccaattttgcatgagatcactgcacttggtaatttcaaggactcaaaaacttataagtcagtaagtagtttgttctctttgccttactgggatgataatattcttagatacaaccttgatgtgatgcatatagagaaaaatgtgttcgataatttgtatgacacaatatcgggtttagaagggaagacaaaagataacctccaagctcgtttagatcttgtagacatgaacatcagagcggacctacaccctcaagtaaaagattcgggaaagttatacctgccaccagc

SEQ ID NO: 187754 - DNA, 1046 bp, Zea Mays
gtttttgtcagacaatattgatttttcaggagctactcttgcatgctatttagaatttgatttcattttaattaatgtctcatctcatttcatagtgaaatcatcctgatagtgttctgattgctagtttctctttttcagaaatcaggctatgaggtgtacttgctggaggcaccatacaaggatccaacggtaatagctgcagtattgtcaaccataagttcactcactgttaaatatgtatttatgtgtttggcaactgcctactttgccatgcgtggagcctcggatggaccttgcttgtttcatttccttttttttgacatagctacatgatattgtccaaccaaatcttctagtgtgtactggtcctaatcaatcatgcacattcaactttggaaattagattaacttgaggtgggcattttttgctagaatgttgaatcttcataattttagttactgttcttcagtgaaatcaagtagatcatgtattgcagcaatccagcttcagtaaattgtatgcttttgcttaggcagtctatagagtattttactggtttacagtagcaacataaaaaagtttgtagtcactaacatataacctttctgctattgggttttgaaaccttttactgattggatgctgttatgaagaattatcttgtatatcattcttcacttgactgcaatcatgcatctctactttctaatttactggattaactaagagtcttaagattgttttccgttattgaagttacctcattgttaactatatcatagtaggcgtttgatatccttatgaataacagggctgtgctgcaaggaatgtgcatggatttacattggatgagataaaaaagatggcagcggactgggaggaggctccaccattatatctgcagctagatatacatgtatatttcttgccatcatttactgttgcagtttagaacaactatcagtgtatgcttatcatgtctcatgattgaccatctttatttccttcagtcattattccatgatgataaccttcgtggcca

SEQ ID NO: 187755 - DNA, 569 bp, Zea Mays
gtgcttcacccttgagtacatcagtaagcaacacttattgattgagcatgttcacgtcgttattcgatcctaccaccccaaaatagcatgctagatccacaagtcgtacaatgcatccactccgagcatgatggtcggagatccaatgtccttccttgtgaattatcctctccatccaataggacaacttttcccttctgatgcatgcaatctttactccctatcataccataaatattctttcttccccctcaattaacagtcgtctaaggtcatcaatagtaggacgacgactgtactctgcctcaaaacatgcaataacaccactacaaaatagttcgaaaaactttaaggcagaacttttcctccattttgatgtactcatcgatggactcaacaatgctaccatgcacaagcatgtttagggtaggtgtgctcttctggtgggagagaaaccactgtggttgagtgcatcagttcaaagagtgaagtacggggagtgttcacaaaacctcttcaagatgtgaagagctcctccacatgcaatgtctttgatgaaagtagagtga

SEQ ID NO: 187756 - DNA, 729 bp, Zea Mays
gtcggccggaccgcgctgcagctggtgagcccactttttggctcctgcgtcggcgaatccgttccgtttctcgtttcgtgttgactgttgcttgcggggtggtctgacgttttggagcttccttcgctgcagttggatttcgatggcggggcgccgccggagcaggcgtggcggaggcggctcaacagccacgcgaacatcctcaaggagttcagtgtcactttcatggaggcaatgaggatggtatggacgcctcggggatccggtcctctgtgttgggtgttttaggacatgtgctttttctattcctcttctagttcaaagctgttgccttgttggtgctgcctgctaagttctgctcccgcaattgcagatgagccttggcctgagactatggtcgtatgttcgggaggaggcgtcacatggacgggtgacatcagctatcctcctatgcatgattttcttcagaacacaaatggatccaaaaactgtgctgacagggtgtgatctgttgttgtgcttgcagaaagcaccgatcgatccgttcacaaaagagcgctgtaaaccgtcagcttcccagggtgtgccacttggtgggatggggtgtgtgctaatgccattgcttatctgaacttcatatatcgatgcattctggagaactttgccttcatatcagcagtatcggtttttacaggagcggaagcatttcgagaggtttcaggggagagt

SEQ ID NO: 187757 - DNA, 309 bp, Zea Mays
gtcctcttttagtgatccggtccgcatttcaagaacggttctttactgcaagccaaatggagagcttgcagcaaagaggagcccaggacttccaaattcgtttccatggagcaaagcggatggaactaaggaaaaaggtattgtaggccgactttgctagagtaagaatcgttcctagtaagcctccaaacaagctgatcagcatcattctgcttcagcgagaaaccttccatcaagtctcataagcggagatattatgtaagaacctggacagagagctcctcttatgtcagctacccaacgatgggg

SEQ ID NO: 187758 - DNA, 1021 bp, Zea Mays
ggaaaattaagtgatgctcttgctgtgtctgatcgttgtttgcgcaatggagcatctgataatttgcttcagttgctcatcgaacagaaggaagaaaaaggtccaggcacaggacaaattcatccatatggatctcacagtcttgggaatgatacttctcagtactgcttgaggctgagagacaaaaaagttgcagctcagctcgctctaaagtacttgcacagctgggaccttgatgctgcaaccaatgttctaactatgtgcatgtgccacttacctgagaatgatcctatgcgcagtgaggtagtttcacttgcatttattcatatttgaagttaaaaaaacatctgaaaatcctctgtctgattgaaccatgattatacatgccagctaaagatgttccaatacatatagctgaaatggcttatctagctaattatagtatttcacattacaatctgtggttgagtgctgtaaagatctgtcacgccatagggaagctattttatttctttataattttgtttgcatcattttgtaacaggtgttgcacatgaagcaatctttacagaggtatggccatatcatgagtgctgatgagcactacactagatggcaagaggtaacccgatgatatgttctttagctgcatcattgggaatataaatttgttttcttatcataaaggcattttttttctgaacaggtctttctcatcataaattattcttttaactcaaaaatgttgaatgttgttaggtggaagctgattgtgaagatgacccagagggcttggcactccgtcttgctgccaaaggagctgtttccgctgctttggaggttgctgaaagtgcctctttatcaattgatttgcggagggagttgcaaggccgtcagcttgtcaaactgctaatcactgatccacttaatggcggaggcccagctgcagcttcaagatttctgtcaactttaagggattccaatgatgctcttcctgtagccattggtgctatgaatttat

SEQ ID NO: 187759 - DNA, 783 bp, Zea Mays
ggaatcttgaaggagttgcaataggcaccataaaagtaattacaccatgtcacccaaaaggaatgctagtggcacacttatactattgtgtcctgatttatttcacttgaatttatacttttcatttttcaacaaagatactgagcacctttcttttgttttatctttcatagcttgtgtcacatcatttaccttttggcatctgttttgttcctcatgccttttgaatttgttgtgaacacacatgcatattatatccatgtttatatggtaatataggagttgacatattgtaagttttaaattggttttcatatggtatagaagacttgaactggtgtcaacttgcatgtttagtatatgtccatgtttacatggtaatataggttactgatattggttcattcaattttattgccttaggatatgctctctgtgtttgcaggacagtgcttttgaagggtctgttttcactcatgatgatgttaaacctggaatgttagtgagagctaaggttgctactgttgagccattcggtgctattgtacagttttcaagtggcgtgaaagcactttgtccgcttcctcacatgtcagagttggaacatgttgttaaaccaccaaagaaatttaaggttgctcatttccacatcaattgtttgcacatgaattttttatgttaagagatgttgaatatgatgatgaatgaactttaactttgttctatgtttaggttggagctgagcttcttttccgtgtgttgggctgcaaatccaagagagtt

SEQ ID NO: 187760 - DNA, 532 bp, Zea Mays
tggtaaccatcttgaaagtaccagtgtgattcaaagatattgggatttgaccatcagagttgctggggcgtttgggtgggcttttctgttctgattgggtgtgtttggttggatggctacgtccccaaccaggcttcccaaatgcagcatcacttgtttgtttgccctctcggggtctgtagcgaggcttaatgcaaaagatacgctctagcctggcttggtgggaacaagaggagtgtttgtttccagcaagcctggtgtttgtctagtgcgtggtggcccacatgtaaggattcgcctcgcctcacggtgttccctcggtggctgttgctttggaagctttggtgggtggtgctttagaggaggttttttatcgaccaaccaggcttcccatatgcagcatcacttgtttgtttgccccctcggggtctgtagctaggcttagtgcaaaagatacgctctagcctggcctggtgggaacaagagcagtgtttgtttccagcaagcctggtgtttgtctagtgcatggttg

SEQ ID NO: 187761 - DNA, 534 bp, Zea Mays
gttgttggagggtcttttgtatcccctcatggccactagtataagctagcgcaaggacctactagcgcaactcgggctgccctggcacaaagacttgcttactgtggagtatgaagctgcgacagtctgccttagcgcctcgagagatgcatcttgtagttgttagcagaggtgggctgcctcatcgtctgtggttgtggcatatatcttgtcaagtaggtggaacgagggtcccaatagggtgtgcaactcggagtttgtggtggtgccggtgtcgcatcgcaagagggtgtccgccattgaggtgatgtgattaggacaatactcgaccatgaaatcaaagccaaacaacttggtgatccatcggtgttgaggaacaattgataattgctggtctaagagaaacttgaggatgtagtggtcgatgcgagcgaggaagcgacgagcccagaggtatggccgccaatgctgcatagcctggactatatgccgatttaggctcgtatgctgccaacttgtgatggacgacgaaag

SEQ ID NO: 187762 - DNA, 320 bp, Zea Mays
tctctaccctgcttcaactttttttggactgaaaggctttgtttttattgctgattgttgtaatcacaaagggaaatacatgtgttaggcccaggtccattacaacaacaaacacacaataatctaacacccccaggtcgcagttgaaactcttgctgcgacagatgttgagactagagtgaaactccgagaacaacaagagaagaccgttggtgaagatgtcggcaaattacgagcttgtcgagacgtgatggacgtggacgtcctcggcaacaacactctcatggacgaaattgaggtcgatctcaacattcttcgtg

SEQ ID NO: 187763 - DNA, 309 bp, Zea Mays
cacaggggcacaaacctccctggtataagaaataggtaagcgccagatgatgaaacaaggagggctgcaatgcaatgcggtttgcaacctaatctagggctagcgtggcgagaattcacacaaggcggctagcgagggcaaatcgagtaatgtggtgtctcgacttgtaatctgggtaaggtggatgggctagcggcggaaacaaataacagcgatggagcggttgaactacgattacgacacaacctaaaccagcaataagactcgaacacggacacaaattcaacaaagcaatctgaaacgaaattg

SEQ ID NO: 187764 - DNA, 475 bp, Zea Mays
cttctttcagacgatacaggtgggtcttcaaatgcagcaacctgagacgtatcaaactggccttcaacaggaacagaactaaggttgctattaaactgggtcatctcataatctgttggtgctactggaaacacctggggcctgctggaaggaggcaacaggctagaaccagatgtgtgaccttgaaaagcataactaggcgcagcctcctcagatccatggagaagttgtgatcctgatgtgagagaaggtatcctggaatttgaagcttccactggagtgtcatagtagtgaggacttgccctctcatatgtatcacttggttgctcaggaaggaactggtactcatggacagcccgtgatccaacatgaggttggactacgggagaattaccaacagttgattttctcttcccggtaaacgaatttggaacaaatggggattctatagtaggtaaaaatgctgaagcctgga

SEQ ID NO: 187765 - DNA, 328 bp, Zea Mays
tgtagaagtaaccaattatatgtagaagtaaccactaatcagaacacccacttatatgttccttacctgggtctcttacctagtgacgagggagagcgcgtccaaatccggttccttgcgaactaccagcgccaccgtcagcctcactcctcggccacctcgtcggaagccaaggggtgtaacatagtaaattgggtttgcgtgcttgttttcgcagagcaggaagataagaccaagcgattgatgtaccttgttatactcctcgccgacaaagggcctgaagaagatctgggcatctggtgtatggcagcagcgactaaatctgcca

SEQ ID NO: 187766 - DNA, 1274 bp, Zea Mays
cacggtcccggatgcccgtgaagcggtacaagaagatccttgctgaaatcttccccaaaacacaggtcgggacatgctgtgtccgttttttccctttgtcgaatatgagcatgttgacgcttgaactgtgttgcggatttatttatttaatgagcatgtttgtttcggttgcaggatgaagagcctaacgagagaaggattgggaagttgtgcgagtacgcttcgaaaaaccctcttcgagtgccaaaggttcactccccttgcttcctcattggaatttcgttgtttccatgccaggtgtggaggttctgaccttttgagcgaattgatcttgctgctaaacttagacgacccttcagaatacagtttgctagctttgtagcttctgtagtactgattataaatgcaatcgaggatcgagtggtataacttatcttgaaactggagatgcctcatggatcattgttctaggcctctaaacttaatgttttcagtatagttcccttgtctccttggtgccctcatttcagagtagtagtccttgttaaacatattgtcaggcatgattgcctcttaagcaaattcaggctctgtaagcttgctgtcttatgcatgttgatatctgagcagatcacagtttacttggagcagcacatttaccgggacttaagaagtgagcagtacggctttgcaaaagtggtgatgttgatatatcgcagactgtcggtttcctgtaaagaacagatgtgagtcttcttttcaagtttctcttgctcatatagccctgtattctgtgaagttaatatttttatttggtttgcaatggatacttcttacactttgttattacctttgctggttacaaatgaaattgttattttcttaattcaggcctctgtttgcaagtagcctattaagcattgtgcacactcttttagaccaaaagaggcaggacgatttgcgcattgttgggtgtgaaaccttgtttgattttactgtcaatcaggtattcctaatggactagatgccaatgcccgttagcaggattaagtttatataggtatgtcccattattggtgatcttgagtctgtctattccaggtggatggtacatatcagttcaatttggaagggctggtcccaagactgtgtgaaatagcccaagaagtaggagaagatgaaagggcaagtgccctacgagcggcagccctgcaatctctttcagctatggtaagttctgtgattgcgccttatcaaactgatgtcatatgtta

SEQ ID NO: 187767 - DNA, 278 bp, Zea Mays
gtcgatggaccaggagcggtgaaggatgagcgctaggacttgatcgaaggactggagttgccgggatgactagccatgatggctgacacctaggaaacactcgcgtgaggacgtggcagaacgggtcgtgttgctggcatggttgaggactgtcaggacacgtgtcgaggacgtgggggatgcgcacgcggtgcgatactcacacctgtttggtggttgagcctcaaaaccacccaacgctatggacgtcagattttcgactgggtttggccttaaaa

SEQ ID NO: 187768 - DNA, 322 bp, Zea Mays
cgcagagtagaattgtgtgtgcttcacaccatctctggatacagctgctcctggtagagctgatggctgccacagccacacggggaggcagcagaacaccataacagacagaagccaaccctgcctccgccacagacattaccagcacgtccgtgttgtaaaaaatacccatcatgtctttggctcttctctgtggccattgcctaggacaaagaaatgacagacacagggacaaccccagtaacggtttggtgagagtaaaagcaccttgtcatgttgacgcaaaaacctcaaatatagatagatgacgacgaccctgggg

SEQ ID NO: 187769 - DNA, 302 bp, Zea Mays
atcgacagcaggatccggtaaaccgtggcgaatcgagcacggccgcgagccctcttctctcacccacgattttgtgttacacgtgctctggtcactacggcgaggcgagtagggaagaggtggtggtcacgagaacccctttaatcctctggagtccaagtcgggcagaggagaagaggttgtggcccgccattgtcgcgcgggtggttgcacgcgcccgcgcggagctcggcgaagctgttagcacacgacccggcgcgtcggtcccacgtgtaagcgacaccatgcggcgtgtggatgag

SEQ ID NO: 187770 - DNA, 366 bp, Zea Mays
ttatttcttacaaatcatattttatataggttttatcaactaaaatatcaatgtttgttaggaacttgaaaacccggacttctgaattagacctatgagctttagcatacatacctgaggttttgcctcttgtctaacttttggggcaacagattttttatttggttcagatatggtgcttcctccattacttttgtcactatcaatgctggagttgagactggtaattttcccattattgcttgataccccaagcatgtaacgggaagcaacaactatatattgagtagctccattacaatttctagacaatcccattatttagttaaaaatgccattacaatcatctgaatgtaatatgtggag

SEQ ID NO: 187771 - DNA, 490 bp, Zea Mays
gcaatacgtacaaggcagttggctagggatatgctgatattttggaaacgagtagacaaagagcaggttttctttttgcccttgcggtctgctgaggcttattttgatttttcacattctgatttctcagtccttttcattatctgcattgagttcaacatatactctctcttcatctcctcttgcatatatcttgtttctttggttcagttttgcacatgactgctttccttttagttgtcttcaaaacatgtcacttaagatgatgacactcaaattcttttcccggtatcagtatgagttgagaaaaaaagaggaaagagaagctgctgaagctttaaaacgtgaggaggagcttcgtgaagccaaaagacaacaacagaggctaaactttctgctgtcacaaacggagctttatagtcatttcatgcagaacaaggctggtggctcagcgccacctgatgaggaagatgtccctgatgaagatgag

SEQ ID NO: 187772 - DNA, 2171 bp, Zea Mays
agctgtaggaaaccggttcttcaacacttcatagtcctcccaagtggtaacctcagctggcatattggaccaagtcacccttacttgcaccacaggatgattacccttcttcaccatcctcctttccaccacagccaatggcataatctctttaacagacagatcaacaagttgtggtaaatcagaaaacaccggagaataattgggagtaaaagccttcaactgagatacatggaatactggatgaatcaaagatgtaactggtaaatccaacttataagcaaccatcccaatcttctgtaacaccttaaaaggaccatagaacttataggccaatttaggacagggtcgactaaccaccgacttctgcacataaggctgaagctttaccaaaacgctatctccaatctgaaactctctgtcagatctatgcttatcagcctggagtttcatcctattttgagcagctgccaacttctccttcagcatactagcatgtaactgtctatcagccaacacctcagtcacagaactaggagcaaccccagaaagcataggagcagcagcaaacacagggtcataaccatacaaggccttgaatggagaacaccccaaagctgtgtgatatgaagtattgtaccaaaattcagcaagggccaaccatttcttccaagtattaggtgcctcatgaatagaacagcgaagatacatttccaaacactgattcactcgctctgattgcccatcagtttgagggtgatatgcagtagtgagagccaatttgatccccaaagcctgaaacaaagatttccaaaacaaactagtgaacacttcgtctctatcggaaaccaaagactttggtgtcccatgcaacttgacaatattgtcaagaaacacctgtgccactccaacagcagtgaaaggatgcttgaggggaaaaaaatgagcatatttggaatatctatccaccacgaccaaaatagtatcatatccctcagatctaggtagaccttcaatgaaatccaatgtaagatcctgccaagccccttgaggcactggtaaaggttgtaggagacccggataatgcaccctttcatgcttagcatgctgacacacctcacattgctgcacaaactgaaacacggctgacttgagccctttccaccagaacaacctcttgatcctttggtaagtggcctcaccaccagaatgtcctcccaccacactatcatgcagggctgaaatcaacttagtttgaagggcagaattgttagctatccagatttgatccccttttctaataataccttgatgtaaagaaaaaccttgctcattaggactggccagggccaattgagccaatagatcttgagcctctttatctgtcacataagcattcaggagttcttgcacccaagctggtttcacctcagtcaccgtgtgaatctgcatcacatgaccaatcctggatagagcatcggcagccacattgtccttgccttttttgtaaacaattttgaaatgaagccccatcaacttagccatagccttcctctgcatatcagattgcaaaagctgatcatccagaaaactcaaagcctgatgatcagttttaatcacaaattcagccctctgcaaatattgcctccacctgtccactgcaatgattagagccaaaaactctttttcataaatggatagcatcttattcttagcacccaatgctttacttagatatgccactggtctatcacattgcatcaaaacagcacctatcccatcatcacaagcatcagtctccacaacaaataactcatcaaacctgggtagggccaacacaggagtagtaagcatagccttcttcagcgcttgaaaagcctgatcagcctcaggactccactgaaaagccttatgcttcaacagattagtaagaggttttgcaataatcccataatgtctcacaaatctcctatagtacccagtgagacccaaaaaccccctcaactcagttactgactgaggaacaggccatttctccatggctgttgtcttagcaggatcagtggccactcctgtgtgagagataatatgtcccaaataaatgagctcattcctcccaaacacacatttactcctcttcagatagaactggtgctctctcaaagtctgca

SEQ ID NO: 187773 - DNA, 454 bp, Zea Mays
ctaactcagtagccccagcaagggccaattcctggcatcctctccgatatctcgcagcacctgggacacatccgccacgccttcttcgaagatagtaattgcgatgtttccacaaccaccaagccactaaaatcaccacagaattgaactcatttccctgcggtttggggactcttctctctgcttgattccaccaatcctgaaaattgacctccctgggcattgggctaaggtgctgtaagttgattagagaaagaacttgaaaccagacctgtctaccaaacgcacaggccaccaacaaatgctgaactgtttcctctttctgatcacataacaggcaaagttcaagatgctcaagtcctcttctagcaagccagtccacagtccagcacctattgaggctcgcaagccaaatgaaaaacttacatttcggagggccccaggttttccaaac

SEQ ID NO: 187774 - DNA, 537 bp, Zea Mays
agcaagcacacttgggaatcatcgtcgtccgagcatgctttgtatcctaaggccatttgtgttagatcattggcttcagtgttctgagtcttgcggatctagtggaacttgatatacttgaattgtgtcatcaactcactgcattccatccgtatccagcatcctcctgctgaggtcgaaaacgaccctctcctggctgtcatgtatttgtactagtactgaggcaatggaggtgtctcccactgataggtatacataaaacggctcgcttggccgtggtgggaccaacaccgacggttttggtaggtactccttaatcccttcaaatgccttctgttggtcccgcccccaattgaaatcgtcgtcattcttgattttaaccaggctcataaactgttcaatccgtccggttaggttcaaaataaacctcctgatgaaattaattttgtcgatgaattgatgtagttccttcttcgtggtcggcggtaccattgttctgatggcttcttgacttttcaggctgatttttatccctcg

SEQ ID NO: 187775 - DNA, 2010 bp, Zea Mays
cgcagccggggaacgcggtgtgttgcgggagctggcaccgcctccttcgaggtgcgtcgtcacggagggtagtttccgtttcgtctccatctccccaaggatcggtcatggtcatgctcagcttcgttgggatttctaagaccgttgagcattctgccgagcctatggtcccaatccataaccgaaatcgcttcatggatcctaatgggcgcgtcgaacatctcggggtttctattttcactggcacaattttattgcacgttgaaacatatagttagggttttatgacaaatgtatttaatggccatggtatccgtacgaaaatggcactacattttgtacagttttgcatgcttaccatatgctgtgccctcttgaaattttggtgtagctagaccaggagagagagtcgcactgtgatttcatgcatgtaattaaaatggactttaattgcatggtacaagccaaaatgtggtatgttcgttaaattgcttgggtcagattcaaacgaatccagtatattttatgttcctgctgggagatcgttactagtctgtgtatttgtgtgacagggctgtcatatataaccagctatttattttgtgatgccaactgttgaatacactactttccctgtttctttttaacgcttgaatcaaacctctcactccacatcatgcttcaaaagacgtttgcctaggcgctaggcctcacctctttcgtgtagtttccacgtaagcagccttggtgaatattttcgcctgcctaatcacgtaggtacaactgttgtctgcctagcatagcactttcaagaacaccatgtttagcatgggagaagataatactcttctgtgtattttgagaggatattgtccttttttgcatgggtagtgctgtcactccacacatttgttaaatagaaaaatcatcataagttgcatatattattttctgtttcaaatgcaactctgttagttttttgtgtgatttttagttttttctttttcctctataattgttttctttcgaagcactgcatatactctaaacaacagtttcctactttttctatgtagaactaagtcaacagtctttatgggcttcatgctagtagatgatagttcctggcttcctgcactgcttttggaagacctgccttttcaatcatagaggattggtagaccagatcctggcaaagcaatgctgatggaccctcctgttatgcaaatggactgcaagttgaaaaatgctatggataaaacaccacaaatcgcctatgataggaagctgaccgtctcacatgatgattatgggtgggcaggctctgatgtccacctaaaagatgatacaatagtatgtagccctgtcgatcttagcgatgcttgtcaatcaggcatggatcgggtattagattctgcttccaaaaattcatctcttaatttgggcgatttatctcaggggacagaactaagagagaagaatagcgacagttcttactccgatgtaaaacttcagttaaatttaagtgctggaaattataatggcttgcaaactgatgattatagctttaataaacagagttttggtaagaaggatatgcatcatcctcaggaagagatacattcttctcccaatacaatgtcattaccaagtccatgcagactcaatggagacgtcacaccttgtgaagcggagaaaatagcagaggatcgtggcaaagtagatgggattgtagatgctgtaagtaaggaagtcaaaactgacttggtaggatgccatgcacggcaggaagaattgcaatgcacgctccaagatctatcagaaatagcctgcagtattgatttagtacgtaataaatcttctccacaagaagagaagaagtctgtttcccctttgaatgacatgggccataatgtggataacaatagttgtaatggtgataccaattataaagggcaggagctcaatatggggaatgttggagatgaggatcatgctgtagcactttgg

SEQ ID NO: 187776 - DNA, 352 bp, Zea Mays
gattggtgagcgacaatgtttaccagtgaggcacgcttcacacacctgctccacttgggtgagcaggggcatgccgcggacgagaccatacctatccatctcgcgcagcatggcaaagtggaggtggctgaattgggcatgccagacccaagcttcctcttctcctcgcgtcgccaggcagacatgatgtgcaatgacgatgtcaagcatgtagagctagcctcggttgtggtggaccttggcaagcaggcagtgctcctcgttatggatccacatcaccccgtattccaccagcacttagcacccgatctcgttgagttggccaatggagatgttggttgtgaggcgcgat

SEQ ID NO: 187777 - DNA, 2188 bp, Zea Mays
atgatcgtagggccctcaaaagatggcgatggagctgtgttttgatggatgaagcacatgttttgaaagataagggtagcttccgatggagaaacctgatggctgttgcgcaacatgctcgccaaaggctaatgctgacaggaactcctctccaaaatgatttgcatgtaagtctttttgagaaatgtttggtacatggcagtccattaaacataaatcctgttctcttaccaaatgcatgagtagaaaaacatccacctatgtgatgaaattggtgtacggaactttctggaaaaaaatgcagcgtatattggctagggggaattcagaaaaaaatgtgcacacttaaaacgtagtaataaagtgtgcagcagcagccattcaacaatagatttgtaactactagcactgagtagcacctttttagcgatttcaagatcatgtaataaacaaaatagtgcccagaagcaaatactctaataccaattgtatgtttctttgaacttgtggactttatttaaatacaagatattctataacatgaacgtacattcaaccatttctttcatatttattgaacaactgctcagtgtcaatatatgagtttacaactttatatctgtcatgtgtgtgccccaaataacctatcaaccagtggcagatccaggatttagcattagggcattctgagaacatttccccccatccaagacagcaagaaacaactcaggtctaagagtactaactactaaccagagtggaggatgtgaactttcatctcttacagtcaggaatgggcccaagtggctgagacgaagggtggaagtttcaactgacggacttgcttgtctctgtgcctgctttctgcgctgttgggtgctgcccgccagctgccacttgcgcctgcgctagggctgtggaacttgggtgcaattgggggaacaccaggcggccgctcggggagtcggtgatgattgcgataggaataacacgttctctttttcctgtagtcctgaatccttgtatcattgcggggctgtttgatatgtttgtttgtgccttgttggactggttgaacaggatattatagtatacataatacatattcattttttacgaaaaacattggcattccaaggattcaaggaataccccttctgctgtcctgctatcaaccatctacctccaaaaatataaagaggaccactgaagtgctagaataagtgaagggcattatgaatttttctttcttactctttaatctgtgtgcggaaagctatagtggtttatttatcccttcctcagaccccatttatgtgggagcctccggttctggatctgcctttttttatatagcacatgaagtccttatttgcatcttgctgttatgtgctgtgttttatgtttttcttttataacactaacatgttctgcctagcgacatgacacgtgtaatgacagttaaaattctaaaaacaaatatgtaatacattttttatttatttgagatttctacaatcactgtttttataggcactattaatgcttaaaattctatttcatcttaaatcaccatgtacctaaaacttcttttcatggagttcttggttttaatatggtatgcaggagctatggtcattgttggagttcatgatgcctgatatatttgctactggggatgttgatctgaagaagctgctgaatgcagaagatcgcgaactaatttcacagataaagtccattttagggccatttattcttagacgtttgaagtcagatgtaatgcagcagcttgttcctaaaatccaacatgtgcgtgactctttttacacactggcaattagttgtgtctctattttttcagcataaattcatctcgcttgcaggttaagtttgttgtcatgggcacagagcagtctgaagcttacaaaaatgccataaatgagtaccgtgctgcttgccaggctcgtagtgccaagtcttcagatggcatttccaataatgttgctggattgattccaaagcgacaaatatcaaactattttacacagtttcgtaaggtgagcatatcttatgatgcagagtttgagaaatatgtttatggttatcttcaaaggttatctcattgctccacagattgcgaatcaccctttgcttataaggtgtatttatggtgacaaagatgttg

SEQ ID NO: 187778 - DNA, 372 bp, Zea Mays
gaacaagttctggctaatttaatggaatccatgaagttgcatggattcaacggacagattcaattgccaatgcaaataccttctcatttgtctgtagcgcatccccctttactggctccaacaacttattcacaaaagcatttggctggggttccaccagctaacttaattgggacaccatggttgcccaatatgcagttcctgcatggatttgttccacctatggcccattacatacacaatccaaattttgcaccaaacatcgaggatggtactgagactgaaaaacctaatacatcagatgtgaatcatgatgctggcaaaacttggcaagagtatggtgttgggttttctagacattttgatcctgaa

SEQ ID NO: 187779 - DNA, 1265 bp, Zea Mays
gtttattattggtccagcgatttagtcaaaggaaatgaaatgcatgtgggtacttccagttaagaaaatcatacctgaccaacccacagctttagactgtcaatatgtacatctacttcatctggatagaacaattcaatcatagaaacaccttttatttttggttttcctgatttagtcacagtcgcatcagttagatcatttgtttcatttttaacctcaagggcagtttcacttgtctctttgttaactgacaagttttcttgcttgatatgagagtccatctcactgggaacaccaggaatcacattatgccttgatgtagtcacattttcatcaatgtcataacttatttttatgggcttttgaggagcccgaatgtcagcctttgcatctacctctcgtttcagatatgttgtcctattattgtgctcaagctgctcaggctgtgcttcctgcaatagaaagcctgggtttacatgatgattggagactacagagatatcattttctgggccactgagtgatggaagatgcatctttaaacgttttggaacagatggttgatcctcgaacgcttcagctgacattggatcaacatccattctatcaccttctatcccgttcatgattctctgaggcacattttgttgagcaagttttctagactcaagagttttttgcttagatgcctgttcagttgattggcgcaaaaacttccttacaacgctgcacacaggacattgctcatcgacacaagttttataatggtgagacattgcttttgacttagtgcaactcctgtacgaacaatctttcctttgacaattctgaaaatggttcaaaagctcctgcacctgaacacaaccattgaacttacaacttccaacagggtatgtgcatgtttttgcatgaaacagcaacagcaaccactttatctgacggaggtaatgaatatttctcttgacctgcccaaaccctccagctgtgggttttggcactgcaggatcaacagaagcgagagtgccattagaaagacaccaatctgatgaaaatggttgctgtactccatcttgtgacattattctttgacaacaatcttcttgtacttgtttttcgagtgatgaattagtagcgacaggagccttttccattgtttgtggctgccattgagaaagcagcatttgctctgtctgtgatcctttcagcacataacttacagcatttgaaccgttatcaagctgcggattagagggcaacaattg

SEQ ID NO: 187780 - DNA, 596 bp, Zea Mays
ggataggggctctgtcattcatatcaggaagaagagaacacaccttccactcgggtaggacataccgacagaaaggccttctcaacacctcacctaggaagcatttgttttattgactagtttcaatttaagttcatgagataaaaaaatatgccaaaaaaatcttttgtctagtcaaagaatcattttcaaactgctctgcttcagtatacagcattgatccttcccttgtacaagtaacaagttgtttgtctaattgtcaggaaacatgttgtgaaaactgccagaggcatccagatcttggaggtcaccatcgcgagaattgagcaagcgcagcaagaaccacaggtgttttgtagcctcagaaacaaatcagacaatgaatattttgagaacttgggatgccctggtcgtcttgagctgccaatattatacgactatgttggctagagtgaccaatcatgtttatatgatcatacaaatgaccctgcctttttatactacgcacaacatagctgctgatagacgtagctcctcctgaactgtgcctggaaagaattagatatatggtattaatattatgtgctagttctttt

SEQ ID NO: 187781 - DNA, 305 bp, Zea Mays
cccgcggctggtgtgcccgaactatctcgcggggatagtcccatgcgcgtgccccgaggtggacgagatggtcgccgctgccgaggtggaggacgtggcgacggagttccttgctggcgcgcggaagaagactaagactgctggtcgccgtggcaaagcggaagctgcaggtactgccggaggaactgtccgcgcggcggtggcggagatgaagtgccaagtgcctggctgtgaggcggacatacgggagctgaaagggtaccatcgccggcaccgtgtgtgtctgcgctgcgcgcacgctgcta

SEQ ID NO: 187782 - DNA, 768 bp, Zea Mays
ctggtgaattcaagtgggctcctggttcgcttacacaggtctgtataggggaatactgttcttcatataatcctggggtagttttttttctctctcccatgcatattaatatctttcaccaggctattgtcaaagggttttggattgtgtttgaagacatagacaaagcacctagcgatgtgcgttcaattttagtgcctttattggagggttcaaataccttttcagttggccatgcagaggtaagaccttccttctgatatctgacaatactctaagttgcttacttttacagtctctctgtgtgtaactgtgtatttaaaaatgttgaaaccctcacgtgaattcatgagtgccactgtaacagaggttctataagttacaattgtctcatgtaggccgtggaagttgctgagagttttcgcttctttgcaaccgtcactacatcaaagaacgatgtttcccatgatctgccaggtttgttcagttggttttaattgtatatgatgttgtaatattactgtagtgcacaccacaaaaattttcttagtttatacttgtaacgatgtattaaaaatttgataagcaacaatcatgatcaagactgttcgtttgagttttggccacacaaaaacagctctatatttccacaatcttgcaatttctcttaaggagcaaaatattcgcatgtgccaattcatgtctattttctttggcagggagactcacatttagtgcattgtggagaaaagtgatggtgggagaacc

SEQ ID NO: 187783 - DNA, 380 bp, Zea Mays
tattccgtcatgaaatgaaagcaaagcgtatgaagaagatcaagtccaggacatatcatcggatgttgaagaaggacaaattgaaggcagcatcagcagatttcgaggcagatcctgaagctgtcacagatcatgctaggaaacaagaatttaaacgggcagaggtaaatcactgctcatatgttttttctcagttatagggaaattccctcattggtcttcccccaacaatgttgctaatttatctgaaatatttataggaaaggatgacattaaagcacaagaatacatcacaatgggcaaagcgcatcctcaagcgtggattgtctgttcaagatgaaggcacccgagctgccattgcagcacagctccaacaaaat

SEQ ID NO: 187784 - DNA, 804 bp, Zea Mays
aaaagtagcaactcacacacagtaggagaggagaggaaagaacccagcgatagatcagagtcggagagaaaattttgcctcctcccatcggaatctagctaattattttccagtccttctcccccatgtaagtctccctctcccatccccgtcgcctgcacctaccggaagcgaagccttctacagttcaggtccatatccgggtcgccgccgtcggctagctctaggcggacatggtggccgcttgccggagcacggcctccacctacgcgtttctgctgctcttgctgtttgccgctgcggtcgccgtctcttcttcctccgggttgcgccgtgtccaggaccaggacagatcggcgctgctccagatcaagaacgccttccctgccgtagacctgctccagcagtggtccccggactctagcggccgcaaccactgctcctggctgggggtaacatgcgactcaagctcccgggtcgtcgctctggaggtgctctccccttcacggcgtttcggacccagccaggagcttgccggcgagcttcctgcggcggttgggctcctcaccgagttgaaagtggtctcttttccgctccacggcctccggggcaagatccccggtgagatctggcggttggaggatctcgaggtggtcaacctcgctgggaactctctccggggcgcccttcctgcctccttcccgccgcggctgagggtgctctcgctcgcttccaacctgcttcacggtgagatcccgtcttccctttccacctgcaaagacttggagaggttggatctttcag

SEQ ID NO: 187785 - DNA, 506 bp, Zea Mays
gcatggagctctgggatgttgtggataccagcaacgctgagcgcggtaaggatcaacggatgctggccatcgtcatgcgcggtgtgccgccagagatgaagtccgggttgccgcaaagaagagcgccaatgaagcatgggtggcggtgaagtgcttgagtatgggtgatgagcgggtgcaggaggccaaggcgcaatacctcatcaagcagttcaagctcacgacgttcaaggatggcaaggggaccgatgactttgccgtgcggattgactcccttgccgtggagctgcgcagcctcagggagaagatggaggagtgcgtcgtcaagaagatgctctgcgttgtgccgacgaggtacaagcaagtcgtgtgctccatcgagatgtttggcgacttgaagaccatgtcggtgggggagattgttcgtaggctgcacgaggtagaggagtgctacgacatcgtcaaggcgatcgtggatggtgttgagtgtctgttgctcatggtgg

SEQ ID NO: 187786 - DNA, 713 bp, Zea Mays
gaaggatgcaattgctgatcgcatgaagctggtccaggaactccattctaaacttgatgaacgctcaattcaagacgttgaacaactgcaaagttttgaggatgatgtacagtttgccaagactgctgctatagctgcggacgacagtagaaaagcagctttccagctagcatttgacgaggatcagcaaattgttgcagtaagttgttacctcattttatggttttaccaaacataatgtttagatatttaatattccatataaattgatttatgtttcataacaggacaagtggattcatattctccgtgctctgagtgatgagagggggccatggtctgctgctccttttccaaataatattgtgacatactggaaacttgacaaaactgaagataaatggcggcgccgactgaagctcaagcggaactataagtttgatgagtgcctttgtcatccatcatccatcaaatctagtaacgataatgctgccccaactgttgacccatctgctaatgccaagataacagaaaaaatgaagcacttacttttgaaaggagtgcgtggaattacaggggatatcagttctgaatcatgtgaggatagcaacgacatgattgatcctccccagaatgtcccgccagagaaccacactgttagtgatacttctgattctgcagattcctcagattatcctgctattgttcaaaat

SEQ ID NO: 187787 - DNA, 619 bp, Zea Mays
ccacatgtcccgcgccaggaagcgcctggttctatccgaggacacctccagggagtccatactcgcccaggtgaaggccgcgtacgagtgggcctgcaccgagtacgtcaaggccggcaggaagttcgaggactccatagacgtgaagcccgacttctacgagggcctcatcgcgctcgggcagcagcagttcgagcaggccaagctctcgtggcgctacgccgacacgtgcaaggtggacatgggaaccgaggtgctggagctcttcaaccacgctgaagacaacatggagaaggggatggagatgtgggaagggatcgagtatctgcgagtcaaagggctgtccaagtcgaggaaggggaaggcggccgcggtggtggacaagctggtggccctcagtgagcagggaaaagatctgtcgccggatgaagcctttgagcaggcatccaacatgcgctcgcagctcaacatctcgtggggcaccattctctacgaacgctccgttgtggaattcaagctggggctttctagctgggaggaaagccttcaggaggccattgagaagtttaagaccggaggcgcttccgtagcggacatcagcgtcatggtgaagaaccac

SEQ ID NO: 187788 - DNA, 465 bp, Zea Mays
gccacttactgtagcactcatttaatttgtgtcatgacatcatagtcactgatttggtaaaaaatttgccacccacctttaaatagtggaaaatagttaaattttccatatagctaactgtgtgataattgcagtttagatacagagaatctaagatattgtaattgtctcgaattatcgatgttgtcaatctagtttccttccatatttgtttgtagtaatggattgtgtttctgttcctcagtggtctctagtcttcgaatgaaatcagtgtgccgcaaggagtagcacctcgtttgagtttatgcttgtcagcttgtgcctggaatcagaatgtggggcagagcattaatagatgaggattgaattagcctcgtcattcatgtcattcgtccattcaatgcttgaagtgaatttaacactgggaagcaagaatgagggttagggcagatgtttatgaagtga

SEQ ID NO: 187789 - DNA, 890 bp, Zea Mays
tggggctgaagatcctgtcaggtaccagcagcaactattctcttatagcatgcagccagcacaagttctagtgaatggcccacaaggcattgatgccagtgcatacaaggattcaaatcatccagcagcggaaccgctgagagaatatgcacacaatcttcttcatgactatgccagagctatcgatgttcatacgcaagcagttcatttgggtcctattgcaccaccagaatctactgtgcatgggaagccttctacttatggtatcattgatcatgccaaagttggaaagctacctttaaatattgatggtagttctatctacaaatctcaagctggagggtatcatatagggattacaaatgcctttgctgctcctgcattcaaccaagaggaaaacatttccaggcacagtgagaagccacgttatgcttttgatattggtacacaaaatgtccatcctgacataatccagcaaccacccaatctggctgtccagagcaaccttatagctcccattgaaccacctggttctaatgaaaaggttactgtgctaccatctaactctggtgctcaggttccttctggatcacctgtacagcgtcctaaagaaatggccaatcacttggtttcaattccccccaatggcagtaacaaatttccattgcagtctactgttggtattgatcgtgttgaaggtacacaggaaccggcttatgcagattcacttttctcaaatcaggatccttggaaagcagtgggcaatgcatctttagtgcctccaagaccaaacaagctaactaaggagtctgttgtttctggaggtcaatatattgatggccatatgcctgatatgaacatgcatgctgccataccctcagaagaagact

SEQ ID NO: 187790 - DNA, 421 bp, Zea Mays
cgttccccatcctgcatcagacgacctggcgtccagttcagacagcaccatcgagcacaaaacgctgtcgacaacatatagctgcatcgacctatcagccgtccccagcatcgaacgagcgtctcgcagcagcttcgagcgattcccttccagcattctggagcagccagaccggagcagcgtggaggacttagcagcccctgaccctggtggaccagcagcagccgcagacaccgacgcgatgccaaccccgtcgtcagtggtggaggtcctgtcccgctacttcttcaggaaacccgagaacgccaccgtgcagcaggtgcagcattctgtcgcatcggacaccaccgaccatccagtcgtcgaccgtcagctgcaagagccaaacgcgagctcatcagaagaccgtgagatccccgag

SEQ ID NO: 187791 - DNA, 656 bp, Zea Mays
tcactggctagcaagatggttcaggcttccaagttccaagctatccaggtaatctgacaattattgatatattaagggtacgtttggtttagcattctgaaccaaattcgttgccaaataaactggaacctcaatcaaacgaatacaatagcagaatagattcctaaaatctgtagattcatattgttcaattcagaatcacctcttaccctagatttcataaattattgctatccatgttaccaagctatcatacttttatagaatctacaattcacagttgtttcaaccaagcatattttacctttcccacaaccgtcaccctacaatagctttctcgcaactcatagctaaaaccatatttttaggtctctcatttattttttaacgcacaggcccgactttatgaagggaaagaaccaattcagttctttgtcatatttcaaagttttcaactattcaaggtttgcttcaagttatcagtcaaaatcctagacctattctaaaaaatctcttacttcattgtgatgttctatttattttctctttatctgaattttcaatatagggtggacttagctctggatacaagaactttgttgttgaaaatgatattgtggatgacacttactctgaaggtgggattgccctattcc

SEQ ID NO: 187792 - DNA, 275 bp, Zea Mays
caggtggtgaagttacatggacctcccaagtccattgtgtcagacagagacaagattttcattagctctttttggaagcacctgtttcaacttatggatgtcaagttgctgttttccactgcctatcatccacagactgatggtcaaagtgaacgggtgaatcaatgtttggagacatatctaagatgtgcagtaaatgctcagccggctaaatggaagttgtggttagcattggcagaattttggtacaatactacttaccatactagtctggg

SEQ ID NO: 187793 - DNA, 377 bp, Zea Mays
gaatgagttactcatcttgacattttattactttgcttcattccttacagtataacaaatgattacaaaaataccttcgctttacgttcaataatgcgaaggtgaagagaaagaccgtagcttcgtaggcagagagagacgattcactccgactccgaccaaaaagcgtgtccaatgcatggtactattcttctatttataatcacgagatacagcttcagcaaaattacaatcataccctcaagcatatacatataagctataaatttgaacaagggcatcaacgtcttttccttccgtagtcttattgagcaagtcgaggactttggtttgctatcgctgattccttcctcatgtacatgctctgttgaaccgat

SEQ ID NO: 187794 - DNA, 578 bp, Zea Mays
atttatattgattgatgcaaaataaaaaatggcttacaaacttatccttgcaaaatcagttatcctcttgtcaaaccattaggaaaatgcaagcaaacgttagtctaggaagcaatgtaacttacgccaggtaaacctgctgatatttttaggggcaatagttaaccatggcacagaactcatccccacaagcagaaagcatttcccaacatctcccaccatcaaccacggctctttcttccccatctctctctcacgctcaaccagccacgccaagccaagaactggtggcgccggccactagccggccctccatctccggcaaaaatcatggcgagcagcggcccaatcctaccttcttcactgatcggcagttgaaaagggagagggagcagtgtgcacatcacagggagattaccgcacgatgtctggagaccagggggcacgcggccgaggcgtagcttgagcctggaggagagcctgaaggatccgtgtccaagaggtccggagaaaatgacgtctactgagtagaaagggacggcagagtcgaagttgcagacgacgacattgcggttggc

SEQ ID NO: 187795 - DNA, 502 bp, Zea Mays
gttgttagctagataatagcagggagttgttcgctaaataatagcagggagttgttaagcaagtttatctcttatcagttggtgcagaccctggtctataaaggggaagcagtagcatgtaactaggcatcgaaggaaatacaatctccctgtggggcgattacctcggtcaccctggctgacggtgatcttgctcctgcttcttcctctcgctcttctccaccatacacgctcaggtccctgtcccaggctgcgctgctcctctattcgcccttacgcactcctagaaggcccaggcgtatcaatttggtaccagagccgatcgacgcctcgacaaaaatgtccggcatcgagaacgatcagggggacaccatggcgatacacgagaagctggatcgcctcctagcacaggtgaccacaatgaacaagaggatggatacccatgaccagcgtctagcgcgggtcgagggtaccatcgcagagcccaccgacgatggttttc

SEQ ID NO: 187796 - DNA, 368 bp, Zea Mays
ggcgccagtccacaggttctggtaggtgtagacgacaagaggagagcgcccaggggtattgtcgccaacccctgaagcccttgtgcatcgtgggaagaagcggtgttgttcctgttgtagtgtttgccactgcgacggtcgcatgactgctgtcggtgcttcggtggaggaggtgaagattgctgttgtggggaggcttggtcggtggtttggggccactagtgccaccgctagagctgcccccagggctatcaacaaagaggacagcgagggttgcagccgtagaagccttagccatggtgtgatcctcaaggcgtaggtcgtcctagacttgcaggaaggagggaagtggggtggtgcggcgaagc

SEQ ID NO: 187797 - DNA, 573 bp, Zea Mays
ctgccaaagagtatcaattgatctggagttgccacatcatcgtctcaaccgccttcagattgtcggtcacctctaaaattgaggtccgctgtgccgagcaaggtgctgattgcaatcaccacatgcttgtactgcctcgggacgacacacatgagcttttcaactgcatgctgctcggtgatgcccttgccatagaggtcgagggagctcatcatcccaggcggagcacaaagtcgtggaacgagagcaactaccagtccctttggagctgctgcagcgtagacttgcgtgcgtgcttcaaaccaacattgatggacttgatcacctcctaaacctcttttgccgtcgtcttcattgccagcaagcggataatctttggggctacaatggagaggatggcattgagagccatgtgatcttccatgcgatcagcgcatcatacccgatctcgcatcctagaagccacgagcttccaactccaccttcatgaggaggctccaatcctcatgcttgctgtgtgtcaccgacttccttcaccatgctggaccaccattccacgcctccatggcttcg

SEQ ID NO: 187798 - DNA, 346 bp, Zea Mays
agcgaggggctcttgaaggcggtgtctggcgacaaaaaaaccaagatttcatgactgaggatgacaatagatgtaggtttccaaaatgcgaagaggggatgatcctatggctgcggacaagagaacatcgccgaagcccatgctgcgacagttctaagacctagaggccgtgtggatccgtgcgatggcgaggtcggcgaggaaggtcgcgccccacctcgtaccctctttcgcagcagctacacgtgggaccgcacgaaagcagggcccaccatagcagcgacagagcgactcccacgcggggatgaaggtgcaggtggacgaagctcaattgtggatttggggt

SEQ ID NO: 187799 - DNA, 470 bp, Zea Mays
cccggctgccacttgccagcttccacccgcggcctccagcatccccgttgtttgctagccttcaccgtgcgacagagcggtcaatctcccgcaagcggacagcctacactccaccgccccatcggtcgtgcctctcccgctggtggccttccccattcgtgcggtctccaccgtccccactccctgcgcaggtcatgcaaccgactccccctcctcagtccccacgacgtccactcctgcatgcttcctccccacgacctccacttctcctaggtcagcacacattcgatgaagataaatgatgagcatttgggaactctatgtcgtccgagcacgcgtgtacaccagagtcgggttgctctgctacgacgccgaccacatcaccgctgtcggcttctcctgctcactgctcctcttgtccacgtctctcatctccggcaaggtattgcttttaatttgtagcgcatcct

SEQ ID NO: 187800 - DNA, 338 bp, Zea Mays
cgataaatcacccaaaactatgtgactaaactgtaagaacttgaaattgattagcccattaggatcactagcctagtggtatggacacactaattcccagattaattagtacatacctcaatggctcaattagcagcagatcattagggcagggatgtgcagtggagtgccatgtgcatcggtcttcacctgactgccatgccctctcgattggtagattaggggagcacattcattctgagtggtgtcctcgcacacgtttttggtcaccaggaacccctcttatggcatcgcatcggatgggaccgagccagtaggaagcagtcagcacctccgat

SEQ ID NO: 187801 - DNA, 442 bp, Zea Mays
atcgctgcttctcccccggtcggttactgtagcaccaaagtttgatcttgccggggtttggaggaggtgaaaggttggggttttcttggtcctgggaatctgtccaggttcgtctctctatgtgaagattctgagaggttggctgtgagtcaagattttcggctcggcggtggcgaatcctctgctcctgactccgatttgggtattctcgttcttgattcctgactcttggcccgaaacttctgttctgttcttgccgaaatcgaagggaaacagctccattctggttgcaagttctttgtaaagattcgaggtggcattcagatttcggttacctgtgcttgtgctgttggttttgcttcgaaaatttgctgtttgggtagaccaaggttactgacggcctccgccgccgcagatgtgcggatttgagatggaatcgcag

SEQ ID NO: 187802 - DNA, 616 bp, Zea Mays
gcattcaaaaaaaacaccagagcccaaaagatcgttcagagagatacacatgtaaggagtccaaggtgacttacaccaaaagatagccgcaagtgaagaagtatagtcgaccgtgtggatcagttcctagaatctctgctcctctcattggatttgcaatatttctagatccatccttccgtatcaaacattcaggacaataccaatcaccttcaggcaaaagatcctccaccaccccaacacatttcgaatgaaatgcagctggacagccatcacagcataacaagttgccatccatgccacaaagataacattcatcgctgtttccatcatccacttcagcagatccttctggaaattgagaagaacccactgccaccttagcagaagagcccctgcccctcttttttcttcttacaccagtgcttctgaagccctcgtcgtttccatctgactctgacaaccttgaccgtatagccccgatctctagaacatcatcagagagtgaacgcagcagctcgagttttacccctgcaggctgcctatagtactctgtactcagcaaacttaaatctgtaagcttcataccatacctcaattctgagcccctagttag

SEQ ID NO: 187803 - DNA, 711 bp, Zea Mays
gtagttttggtccaagccgatcgatctcgcataccaaaattttcttcgatcatgtaggttttgctcagagcaatgtcagagcacataagaccctgccgattcctctgatcatttgctgctgctcaaagcattcatcaagattttactcgtcaggtttgtgtttactgcttggttaccatcgtcttgttgcaatgcgaactattgatgtgtgtgatctctcttgccgttctttcaaaagacttctttttccccttgggatcggaattgatgattttgatgagagtacggttccaaaaccttataatttcaataagaacttgtccatgtattttttatcaggacactgttctctaactctaatataaatatgaaatgatataaatataatataatgatgtaatatgttatgtatagggttagctaaggggaggaggaagatttgtgtcacaatgcaaggccgctgatgctttgccatgtggtgaagtttcagacagatcgattcagctagcttctttccatgattccatccacggagctcagctagctcggcatggacttcagccctcaaagaaagagcgccgaacgcaaccgcggcagcttcgaacacgatgacagtgatgatgacatcagagctgaatccaccgcctctaataagccatctgcgcattcgcacgacagcaccaaatccaagcccaagacgagccatggcgg

SEQ ID NO: 187804 - DNA, 895 bp, Zea Mays
ctagatagtaaattttacacacattcgacccatacaaagagtcacacagttcatacatattgatttcagacaggttcaaacagacacattcaaatatttgttgttcttcttcttccttggtgtcattcacttgctgtcaggttcttcttccttggtgttattttttttgcaggctttgcattctttattgttgcaagctttgttggcgacacattcaaatatttgttgctgccaaggttgaagtcagcctgctcgcttgtgctctccccaagcaacatagcaagcccctgcaaaaaaatgaattagaatgcagttataattagttgcaacacagataacttcacaaatagtgctgaccttctagtcaatctaacagggctatcctgtaatattgtttctctatttggtctgataggacttgatatgatagcatttgtctcttgcacatcttggtatgcattagctgtctcttgcgcagtttggtctacagcagcatttgtctcttccacattttggcctctcctttttgttggtagtttggcattctctccatacttagtggtattctttcgtggtttcctcttcctcttttttgttccatttagcgaacacttgtagcttgtttctccgtgccctagctctccacatcttttgcactttctttttcctcggatcatttgtttctttgtcccccattcagcttctacagcagccacctttgcatcttttttgggttttccaccacctccaccctccaaacaacttttgatcctaagttttctctgtctaccagcaagccttttgtccagtggtgctccaacaacaaatggcaagtccacttcaggccattgtgttctgtcaggaagtggctcaatcaatcttgagtatgctttcc

SEQ ID NO: 187805 - DNA, 425 bp, Zea Mays
tacatccggtctttcatgtgtcacaactgaagccatttctgccctgctattctctagttttctcagagctacctactgtggtggatttgtctcaagggggtatagagccagagcagatcctggatcgaaggatggtgagaaagggcaatcgagctattgttcaagtgttggtgaaatggactggggtgcctaaagaagctgcaacatgggaggattattcagtggccaaggcaaggtttccggaggcaaacgcttggggacaagcgttatctgaggcccgaggagatgtcatgactgaagatgcagcctaaagtggatctgtgggaaatgggagtggcgcgagaggatggtggaatgaggtcagtcaggcaatttctatttcgctattatggagttggtaatcgagtctgtaatggagttgtggg

SEQ ID NO: 187806 - DNA, 693 bp, Zea Mays
ggcggatcttcccagtttcacaccacacgctccacggctggggatcacgctgtcacgctcacgcgcccctccccccgccgccaacgcccacgctgcgagcgcgaatccatcttctctacctcctcgtccattcctagggttcctcctctgccgaatcgcggggaactctgcgggcccaatttggtagggtaatctcctaccaggaggtcaaattccagtcaacgccgcttggttttgtagccgaccggtcgatttgaatccaggggcaccgattggctgggtgagagggcaggctcgatttgaacccgcctctgcccttttcgtggaagttttgggtcttattaggcgcggattactggggtctagggatgtggtagttactagctgcttgggttaggcggcgcgccgaggtgcttccgtgcttggctgactagtgtcaatggcgggatctgtcggcaaggccagggcggcgctgcggtcgtccccgaagcggtacagcggcacggacccaccgttgtctctggcggggccgacgttggcggatctgcagaggacggccgagctggagaaggttgttctttgtctctgcttacgttttgcagctctaacggcttacttggcttccattgtgacgacgttccgtttattttgctgaaaaactgggtttcagttcttggttgaagcgggcctcta

SEQ ID NO: 187807 - DNA, 286 bp, Zea Mays
ttgaaacgcgatccccaaatgacctgaatgaacagggcacttcttcgacgagtgtttcacattacgctggaatcccgtcaagtgacattgttgttgtttctgaattccagcgtccaagcaataaaaatgaggatgtcgaggatataactgtcattccaaataaagagaatgataaggatatcaatgctatgcccgttattccagataaagggaatgtcgttgatggcaaccatatcctcgccattccttgcgccatgttgagtaatctagctagatggtgtatccg

SEQ ID NO: 187808 - DNA, 503 bp, Zea Mays
ctcaaaggagtacgtgttgtggcaacacatcgtcgtgatatagccatacattacaagattactgggataacctcacttcccttgaatagtttaacgtatctattcagttttaattgatattctttttcttaattcattctgcactgttttttaatggcacatgtttaaatattcatgtttgtttatataggtttaatcaagatggggcaagtgtttcagttgtccaatactttaaacaccaatataattacagtttgaaacacattcactggccatgccttcaatctggcaatgatagtaggccgacttatttaccaatggaggtagtgcctatattttatctgtttgtgttaatattttgtcagtgttttgtcagatttctttaggatgtctcttatttatgcaggtttgcagtatacttggcggtcaacgctattctaggaagctaaatgagtaccaagtcacaagcatcctgaagaaggcatgtgagcgaccacctcaaa

SEQ ID NO: 187809 - DNA, 434 bp, Zea Mays
acgaggagcttgtttcagcccatacaatgcgcgacggagacgacaaacatgccctgagggagtatcaacccctggaggaggatgcatataaacttcttgtagatcgccattgagaaaagcatttttgacatccatctgggagatagtccaagaagatgaggctgcaactgcaatcaaagttcgaacaatagtcatatgcgcaacaggtgcaaaagtctcatcataatcaagtccttgagtctgttgaaagccacgagccacaagacgagctttatacctctcaatggaaccatctgattttgtcttaactttgaagacccatttacatgtgataggaacaacatgcgagggtaaaggaacaatatcccatgtaccagtgcgttcaagagcagccaattcatcaatcatagctagctgccactcaagaatcccag

SEQ ID NO: 187810 - DNA, 284 bp, Zea Mays
cgtaaggtacggtgcacctcgtgtccatccttacccaccccgctgcctcctgtcgtgttgctagggttcatcctcgatcccgcgacacccctccccctcatgtccagtaggtccacttaatcttgaaaggtcatgaaccacctactaacagaacatttttcttcattgccgcctacagattttcgtatcacttcgaggtcaaggtcttcggttccaagatcatctgggattctaggacttcggttgcaacctccactcaagctaaggtaacgtgcaaatcaatt

SEQ ID NO: 187811 - DNA, 294 bp, Zea Mays
gcaggagcatccgcaacggaccacttttcccgcgagaccccaggcggccgtgacaacgatcgagaagagaacgtgccgaggctgcatcgggtgccggcgtggagtatgtggcaacggcggagaggagggggaaagggactcgacgaggctgtgtatagactccaagagcacgggatgcgcggtgtttattaataaacagggtgatgaccaaatcttaacaacttcccctggaatcccaacgaatccaacggatatggcggcaatacaggccactggcagcatgcaagccaccca

SEQ ID NO: 187812 - DNA, 918 bp, Zea Mays
tttgctaatgttttaccacttgtatgatggcaaggtatgtatatatcatggaaaattgcttttagctactgaaatatgccaaatcatcaacggtgtcaatttcagagtcgaagagaatttgaaaatgaactttatgaacgttttggctcccttgttaagatgcctctcctgaagccagataggtaggatttttttgcattgttttgttctgtttttttaattcaacgatgagctgtgcttatgcagttacaggaaaaaattatggttattttccaagaaaatgacccccttcagtattgtgcaagaaaaataaaatcacgctgatgttactagtactgtttgctcctgatttcagagcgccattgcctgatgcggtgaaagccatcttagatgaggggattagcttgttcaagatgcatcggagcaggcatggaaggtatgaaactgaaatgcatattaatattaaaaccccctttttagcacgttgtgaacagtaaacaacactctggttgtatagggtcgaatgcctttgttcaatagcagattaacattcctcaaaaacaagcagactagcagtataacccttattttatacatagtattacttcatatttatgtcgtcgagggaatacttttgtccaatcttcaatcacacttgtatagagaagaatgttctccaaatccccttttctgtagaaacagttaaccacacttgtagcagtattacttcatctgatgatgttgacataactagtggttttcacatgtctatatacattgcctgatgttttgcaaaacgatgtcaaatcagagcagagccatcaaaaggttcatacgctaaagaatgggcacaatgggaacaaaggttgcgtgcgaccttgtttgggaatgctgatcatcttaactcaattcaggtaa

SEQ ID NO: 187813 - DNA, 330 bp, Zea Mays
gtaacaataataatggtgatgattctactccggtgcttggccatacatttctcgagcaaggcgctgatgagcaggcgatttcagaggctgccttgaacaaacttgttggcactgctgaaacatttgacttagaggtactaatataagcttgtagaattgtttgattgtttactcatgctaccctaatattctacaaaacttaaactgttataaatatttggttacataactataaaacaggaagcagagcctcccactacccttgtctctgttctaaagccataccagaaacaagctctcttctggatgtctaaattggagaagggaatt

SEQ ID NO: 187814 - DNA, 376 bp, Zea Mays
aagacttactcccttctgtgctggatgcattgaatgaggtaaagtgtttctaaatagcattcctttttggagcgatcatctggaaaatgtcgattttagtcatttttatgattattttgaaatccgcatgtccaatcaatacgtgggattttaggtcaccgttgccaaggtgtttggaaatctttataacaaattttttatactgtgtcacagaatataacatatctgacgatctatttttccagatagcttttcatccaaagttttcttcatctcgtgttgagaaggagagaagagcaattctttctgagctccagatgatgaacacgatagagtatcgtgttgattgccaggcaagggaactgtttacactgac

SEQ ID NO: 187815 - DNA, 908 bp, Zea Mays
gtttctatatatgttgccaatttccattgtctcacctttctgatttttcttgactttagggaaacggacttcataaccagggaaagtattcagatgctgctagtaaatataagcttgtgagttttgaacaacaatattccattaaaataatgttgatatgcttttcagatgacctaaaactaacagttaaactatatgcaatgttcttgatcaggctaaggataacttaaaaagcataccatcgtctacggcgcatactctgcagttgcaatgtacacttaatttaatggcttgttacttgaagacaggccagtttgatgaatgcataagtgaaggtacagaggtatgcttacgtcatgtagtatcttactaccttttcattcaaatattatttcctagtacaagatagtttggcattcttaacgaagtcttctttctgtcatagcctacagttctagtaataaaatgttgtccatcaaatatggtgttttttttctatcattcgaatttcatgactggtgcaaatttactgctttagcaaactatatgcgctaaaatgtgtgaattctgtaaaataagtttttcccctaagattactaactgaaggcaaaataaatccggttcaatgtttttgacctggtagtatgtgtgactaaacgtcatagtactacataccttactgcatggttgataattcgcatacctttggctagtaatttatttttttcctagattttttaggaaaaagtatgttgtctattgaatcacccaggacatttcagttcttctttgacatgacatactggctgatctatatctaatggattacaggttctaagttatgattcaaacaatgtcaaagcatattatcggaggggtcaggcatataaaggactcgggaagttgga

SEQ ID NO: 187816 - DNA, 988 bp, Zea Mays
actcagaagttcgttgcttgataaaggttcttcctttataacttctaaacagggtgtcttgagcctgatacaaaccttacgatctcttactacaaatattcaattctcatgagtctctgcttattgttttgattgattttatatttgtcagtcaaccctaaactttggtttggaaacaagggctccattacttctacatatttgctcagaaagttgttgcttaatcagggctcattccattacatatacctttatcccttccaaatagtgagctcagcttccacaatttgttttccattgttggtagtattacatatttcttcttttgataattgtgcattttttaaagggcttatgaatgttggatgttttctaaatggtatatctaaatgacattataaaaaatcgatccttctcttttctatgactgtgtgcttaattgcaaactaggtatacaaagcaagtaaaagcatgcacatgaaataaatagttgcgactaaaaaaaatacctaccctatgttctaaatttttcgacaattatttttcatgagatgtggtccatggaaaacaaggtcctctacttattgtttttgttgttttttgtagtacattctaaactcctgattagcaacatcggcttcattaacatctacaaatatactcagaagtttactgcttcgtaaaggttccttctattacgccttcgtttataacttcctcgcatggtgcattgatcttgatacagacctttcgagcatcttacaacggatattcaatattcatgactccctgcttattgttttgattgcttttttatttatcagtcaaccctaaactttggtttggaaacatgggcttaattatcgtctacgtatctgctcaaaaagttgctgcttaaacaaggttcatttcattacacattcttttatcccttcctaacagtgtgctctccttacctttttacgttgttagtagtattacatatttc

SEQ ID NO: 187817 - DNA, 331 bp, Zea Mays
ttcatgttcatctcatccaccacgttcctgtgcctctacgtgttcggcttctgctgggtgaacctgctgctcatctcccggcgctacggcgtcagcttcggcagcgccgtcgcggagtcccccgtgtcgggctgcctcatcgtctacaccttcgtcacggcgtggttcgtcggcgggctcacggcgttccactcctacctcgtgtgcaccaaccagaccacgtacgagaacttccggtaccggtacgagcgcaaggccaaccccttcaaccgcggcgccggccacaacatcgctgagatcttcttctcgccgatcccgccgtccaggaacg

SEQ ID NO: 187818 - DNA, 1098 bp, Zea Mays
agcagcgtcaggtctagcaagtagccttgatagaatgacttcagtaaatcctttctcactatcagaaagggcaaaaccctcagctttaggggataatgaccgaagtgattcaagtgttgtcttgcctgctgcaactttttccataagagcctgttcatctaaaagaagcctcatctcaacccattgccagtgaaattttgcaggttgaagagtatcaagaagttgcataagcctctctgaaagctttagttcattatctttgggatcacaaggctctgaagcaccatccccctgaatagttggtgtgttgcaatcaataatagcgtccagaaaaaggcgtgcacggagaggtataaatggcaatatttttgaattccggtccggactatgactttcaagcattgctgcaaacttcgaatcaccaacatcagaagccagaagattatacagccgatgtgtattacggaagtagatctctcgaaaaggctgatgtctggtaatatcgtttattgcatttgaaaaagactgataaagttgtggatcttcacagttaaaaatatatcgtctccaaagaaccatggcaaaaattgagtaggctggaggaaaaattacagttagaggaagcatccgctgcaaccttgagagtgcaataatgtatggatctccaagaatatctgcaataagcccatcatagacagttctgcagttccccaataaaatcctaaaccaatgtaccgaaacttccgtggaattttcaatcctaaaacctccagtaggatgggatacaccattcgtatttgatttcaaacctctcaaaagctgcataatatccagaccatcttttatttttagagtagcaaccatccgctcaaggctaacagctccatgaacaacagcccccacaacaagagcagaaatagcagcagatacttttgcagttctcccaacaaaacctttccctgagttgctgagctcacttgtatgatttccatatgcatcatgggcctcaggagatggttgaaactgattgcggtgcatctttggaggagcaaaagctgctgtaacagctgcagaagtttcaaccgccagagctatttc

SEQ ID NO: 187819 - DNA, 442 bp, Zea Mays
cgtttccctgagccatttgaatcatggatcatcttctttgcccctctcagtccttcatattctcttctgagtgcatccctctcctccctgaggctactcatctccttggagagatcttgcccacgccgactctccttcacaatttgctttcggagagtctgcaactccatatctgagacatccaatttcctggttaaagtggctatttcacttcttagcttctccacgtcgtcatcctcccctcttaaccctgcctcaccagaattgctcgttgacccatctgtactagcatcaggagctgagcttcctgaccagtcacccgaactggtcaatgggttcctcacagtgccattgttggcaaatggtgagagagcattgctactatcctgaagatatgagttgtgcatggtcgcactaattttgggggtatatctcccagaac

SEQ ID NO: 187820 - DNA, 299 bp, Zea Mays
acatcgtccatggctgcttgacacgtcgcccccggcatcgacaccctcatctgcctcgacgcatcgcacctttgtctacgactgcttctcaacgccacggtcaccacgacgtcctctggagcgctgtgacttgtgcagtttgttttctccgtcatcctcgacatcttcctcgaccacgactacccaacacacggcacttcgacaacggctctgcgtcctcatccttggctacctcgacatcggcacaaagggctactgccttgcttgggcaacctcattggcttccactctagccacag

SEQ ID NO: 187821 - DNA, 752 bp, Zea Mays
aattggacaagttatacagtgtagcaacaaatggttcagaagaagaaaaaacagctgctgcaaagattctttgtggcgcatcacttgttcgtggctggaacattcaggtaccttgatttacagtcgtacaccttatcgtgtgaagactgaaggcattccatactgtcaacatatagctgactggatttttttgtttcttctgtaacgtagttcattattttttaggtgaatcaatctggcaatgtggggttgtgcatttggttttctttttcatactcaccaaagggcacctccactatttatttactttgtgatgttttgtaatgaaactaggaaaattcaaacattaagctattagcatagctgaaagttcactatcgtttgttagtcaaatgcacgtcgcaatagtcccaaaaatcgtcagaaatgcagggacgtagggagttgacgtgttgtcatataccaacattttggggacacaactagttacctaaaagtggtagaaaaccttacaaacacacttttctacaatgggcatggcgtatgttttttttgtaacaattgttgctatatgttgatgcacattatgtcaggaacatgtggtcagtatggtggtcaagctattatcagcttctttaccctcagattcctcaacttcaactcctgggagcatgagccactaccttgctcatatgtctacgttgaacgaaatcttactcggtgtgtcttatggtgatgtcatccacattctt

SEQ ID NO: 187822 - DNA, 291 bp, Zea Mays
tttgttttagcttctaactagtgctcgttgttgaaactagaagccaattgacccagagtgtcctaggccattcccagcgaagagtgaacatgaacaccgcttattgccccaaaggtcgaagtagcgccagtttatgatcatagtgttgctggttcatcgtcgccgccttgacctagtgtttggattttggaacgggaaccggaaggagagaagcagtgaaatacctggtggatgggagtcacgtgccgtgcggactagagtcacatgtcgagagacagggaattggagaaa

SEQ ID NO: 187823 - DNA, 973 bp, Zea Mays
cccatctttcaagtaattgtgttgcctctcttgctctgccttaagccacagacgagttaaccttcctagatttttccgacaaacagttttgtcaactgtagcaccacgcctgatacgctcacgattgtaatgagcgacattagtccaccagtctgccttcgacttcacataacgaagaatcatgttctcaataggcacaggtagaccagggactttccatgggatatttgccttccagcaacgccatgcctcactaagatgctgtaatatagttcgagccttattttgcttgatgccttctggcatagcatctaaaacatcgtgcataactgcagcgcgaagttctaaatcgaagtgagactcaacacgttgctttgttacagttttggccacacccttggaatgacgaccctcaaactgccgtgccaaaagattacccaaccaacgctccaatagtgggacaatacctcgaaggaaaaagagccacactctccacattggagcccaaaacccacaaccaggtcctttgccaacaggaccagtgttgaaacggtaatatatcaagtgcttcagatctttgcacatcctaatctgcctcatcaatcggtacttgtacctatacataccagttaactgtccaacatgagaaaatatatattgcagaccatcagccaactggaaggcatccacatttcccagacggaactggatgttagcatcaacaaccaacttcgtaagtcgtaaaatctcacgacacagatgaaatgcatttccaaaacgagatttcttcctttcctttgttgtaagagtcttcacaggcttcaaattgaaattgtaatctaaatggagataattaagattcttcctgtgaatcaacaagtttaacatgttgtacccctgcttgcaaacttgcaagcctgcttctgcccagtcaagctcagtagtttggaaaaacttagttgcttggagtgaa

SEQ ID NO: 187824 - DNA, 489 bp, Zea Mays
atcggttgttagaactcgataaggtgtaacgattcgatcagggtagctgatcgtccttatcgtccgcctaattgcgatttatagcgattaatcgccgtgttgggcgatcagccgataggcctggtagtccaaaagccattttaggcttaaatgctgtctgggggaggccaaaggacgcccaatcccttcagatacatcctgggtagacgtgagcagtcagcagtgctttaaatgctgtctgggaggccaaaagacattttggacgtgagcagtcagtagcaccagccttctcccccattttagacgtgagcagtcagcagcatcagccttctccgccattttagtcgcgaaaaacagcagctgagaagtccaaccgaagatgagcagctcttctgaaggtacggatgttgtgctgcagctgcttttgcctgttcttcactctttgttctctgatctctccctccctctgttcttcattcctctttgttc

SEQ ID NO: 187825 - DNA, 489 bp, Zea Mays
tgaaactggcatattttacaaccttgtttttctagtatttggttgggtccaaccattcttcgttcttatatcaaactacatagctgaagaacatgatcaatctctctttaatttcttgattaattaggctgtgatcatgtggaaatatggaggtcgtcgttaataaccaccctggtaatgttctgcaggtgataaccccagggtcaagcgagcttttgcttgacgtccacccgctgacactccactttcccttccatgcccacaagttgatcccgtgcacgctgcacctaacaaataaaacagatgaacatgtggcttttaatcttagtatagaagacggaatggagtcttggcagcagatctttgtaaggatgcccctaagtggaattgtgccaccaaaatccacttacactcttgttgtcacaatgagggagctgacgtatctaccaacacaaaactttaatttgaccctgcagtctaatatatgcg

SEQ ID NO: 187826 - DNA, 298 bp, Zea Mays
tggggatagggctctttcatcttgtgccatctcaagtctgtgcagcagttcttttgccagagcaagctgaattcgaacgtggcccacctgcttattactccagctttgaagttttcttgttgtcgcccctagctttctgtccagggtcagaaaaggacatctgatattatgcactgaatcccaagctgcttggacaacctcatggaagccttccaattttggccaaaacgcctcaaaatgaaagcgtttcttcccctgtatgttccctgtgaggcccagaaggagcggacaatggtca

SEQ ID NO: 187827 - DNA, 350 bp, Zea Mays
gacaatattggtatacgattgaccttatcctcccttcttattgatgacgacaagacagatgaagctgccactttgctttctcctcccaaaattccaggtatagtacttattaagctgctttatgcaaccaattggcgcatttttcagtgtttttttatgcagttgtcactttacttcatcctcctaaaagtccaggtatagtactttgctgttttatcaactaatgctgtcttttgcagagttgcagtctgctaatactccagaccaacagaaaccttggtggtgtgatgggaaagttaagatggcgcttgcaaaactttattacaataaaggaaatttggaagattttg

SEQ ID NO: 187828 - DNA, 334 bp, Zea Mays
cgccaacgcagcgctagagcaaaagatcgacaccatgacgatggcccttgtcgatctcaccaccgccatcactcaaatgatcagtaggccgccaacaccaccaccgccctcagcgtccaccagccctacttccatcccatatggcatgctaggttatggagggatacctcccttgtcaaaccccgccgcgccacccataccatcaccgccgatcaccaccaccatagccgctccactcccatccacctcaaccaaccttccaccgccaaccttagccttgctgccacccacatctaccatgcccatacccatccatcagatacccttcccacac

SEQ ID NO: 187829 - DNA, 353 bp, Zea Mays
atgaatgctcttattgaaatcaagtactctgaagctagtcattcactgcaagctggagatgacacagctatgaatcttcttgctagtgtggcaggagaaatatctaaatctgaattggcttcttcaccaagtacttctgtaaagaaattggtctgtgagggtgtcaatactggaaaggttaaagtagaaagtgacatgggcccatcacatccagggcaagcagatgctaagaaagttgccatggggaatgaagtgaaaaatgatgcttgtttggttccgaaggaggaacaacatcaaactgcgccatctcctgagctagcagattcaaaagcagttaaatcttcagcaaagat

SEQ ID NO: 187830 - DNA, 395 bp, Zea Mays
ctaccccatcaaccaagtttcagagctgcagatactccacgaaaacttgtacagacaagccccccttatatctaacacccatttacgatctgtgagcccctccgctactgttttccgttttaatgcccttttaggaatcatttggatcaggcttggacggtgttcagccacaattttaccaagaagccaacgatttgtccaaaacttcacaaattcgccactgcctaccacggagacaacaaccacatcaaagagtgtatttgcattacagtgtacttggacatggagtgcctttgcattacagtgtactttggatcattcttctgaagccaaagccaccggacaggtggacacgtaaggcccatcctagcatctcaaggttgagaatacccaga

SEQ ID NO: 187831 - DNA, 550 bp, Zea Mays
ctagttcagacatgctttgtggtgggctgttggagctagggttgtaacttgtgggctgtaaattgctttatgagcttctagggtagggaaagctcacctcaggcacaagaccagaacgccccagtgcatagtaccacacgcacaggcacagccactctaatctctcctccacatcgcagcagccgttgtcgaacacagacgctgagccgccggcgcacacagacgcggaaccaccggtacactcggacgcggagccgctggcaccgcacacgactgctaccgccgctgcagcccaagggccaagacgcagcatcaccccaagagcttccaggcgcccgcacacccctcccccccgaaccttctaggcacccaaccctatgcagtgctcgccctcaagatgagttcatcgtcagatggtgagtggggggtttcttctctgctttccttgtttgatgtgtgccctttggcctctctgtttgattagatgcatgccatctgcttaatgcatgtagatgtggctttgttcaattagtcgatctagtggacaact

SEQ ID NO: 187832 - DNA, 390 bp, Zea Mays
caccggttggatacccgataaactaaagggaatcaataatctccagtaagtacctttactgcaaccattgcagtgattattatttaagtatatgggatggatacaacaatctactcatcattttacaggacaagtggaaactcgtttaacaatggccctgctccaccacctccaccatcaccattatcacctccatcgacaaatacccctcctccctctcggcagcatgctgttccaagtagcgctggtaaaaataccccatctgaaaatggtggaaaacactcgaaacttggtggtggtgcagtagcaggaatcataatatgtttgctggttgttagcgcaatagttgcattccttgtgatcaaaaggaaatcatggaggttatcacag

SEQ ID NO: 187833 - DNA, 1129 bp, Zea Mays
ggcaggtgctgcaaaggcagatctttttccccatttttctcttggtggtcttgttgtatgtgcagtcatttcatcccatggactcgaatccagagttttgcctttggatgaactggcatgtgaagaaggaacatttacatagccactcctcttagagtaatctacagcagcttctctacttgtatgattttggaacatgccagtataggtttcatcatctacaccattattctcaactgtaaatttcatctgcctttccaagggagcacctgctacaccattaggcaaagacaaatgttctttgccatcaatatcatagatgtgaggatctcttgcttcaggatcgaactgtccagaaaacccaacaccatactcatgccaggttttgccagcatcatgattcacatctgatgtattaggcttttcagtctcagtaccatcctcaatgtttggtgcaaaatttggattgtgtatgtaatgggccataggaggtggaacaaatccatggaggaactgcatattgggtaaccatggtgtcccaattaagttagctggtggaaccccggtcaaatgcttttgtgaaaaagatgttggagccaacagtgggggatgcgctacagacatatgagaaggtatttgcattggcaattgaatctgtccattgaatccatgcaacttcacggattccattaaattaaccagaacttgttcgtcatggtgcatatccgacgattcagaaacagaagggagttcttcattcattacaaaaccattatcatcacgatagctgcttgaaacactatttgagtccgaagctgctgcactagggtgagataaacagttcaaggaagacactgattcatcctgtgaagacttagtgctgtggttgctagacatttctggaaccaggatgtttcttctgctgctgtaatcaacacccaaagatttttccataccaactgcattagtccgcctgccacgaaatccttctgcagaagagtctgtgagttcaggacttgatcgggttcttgcaaatctagacctgttctgcccatttctgtcattgacaaagagaccatttggcactctcttatccctttcactttgcatcaatccagctgaattattt

SEQ ID NO: 187834 - DNA, 668 bp, Zea Mays
gttgttgtcatcatactcttcatccagtatgtcatgtggcagcatcaagcccagtctttcctcttcttcagcagtgagtcatcctgagggctgaggtagatcccaatccggcagttgtgccctgctcgttgtgactcctcccttgcggaatcatctccacccactacggtctgtgcactgcagatcgatcttcaggcaaccatcatgtccatcgtcgattccacctggatttgtcgtgtgctctcacccgtctgtctgtgtggggcctcttcatgcatcgacggcggcctaaatattgctcttcatgcatcgacgatggcctgaagattggtcaacgacgcacagaccgtagtgggtggatatgattttgcaggggaggagtcgcaacaagcgaggaatggctgtcagatttggatttacctctggatgacttgtactgctgaagaagaggaaggacaatgacttgctgctgctgcattacgtgctggatgaagaatgcgatgaagactaaaaacattctagatctagaaaactgcctcgagcagagacgatcctccttggggagcacagtgaagatgaaggtggtgagtggtgaatggatgcctgtatcacaaaacctagagttgtggtactatgttacaaatggggattgaattcgatgatgcatt

SEQ ID NO: 187835 - DNA, 580 bp, Zea Mays
gcggttactaatgcttggggttctgttcagcagtcctcttgtcccctcaagaccctttccctaaaattcaaagcgactacaaaagggctgcaaagctggagtgacagaaaggttgggaatttcaaactgcaacttgagcttgcccgagaaattttgctgcagcttgaagtggcaaaagagagcagaattcttaatgttttggagacatggctgcttgggcgcttgaagaaatgctctctggctcttgcctccttgatccgctcgatggctaggactagatcaagaattgcctggctcaaagatggtgatgctaatacaaagctcttctactcttggtctcgttatcggaaaaggaaaaatttcatagccaaaattcatgacggagagcagcttgtgaccagtcatagtgataaggctgaggtgtttcggtccttttattctgatttaattggtacagggcagcaaaggtccagatctgtcaaccttgacaccataggactgcagcacattgaccttcatgggctcgaacaacaattctctgaggaggaggtgtggaataccatcaaacagctccctccgg

SEQ ID NO: 187836 - DNA, 924 bp, Zea Mays
ttctggtttacctgacattcatcaccgcttatgcacttctgacatggatcaagataaacacttgcaggaaggaatggatttggataaacacttgcagcatgaattctctcaaggaacggatttgcatcttgatgtagatgaagtgccaaacaactttgtgataaaaggtagccagtcatctaatgagcttgcagttcaatttcatgacacagagattatgaatagttcaaaaaatgatggagtgtctttggtaccacatgctataacaccatgtgttcccatcttacctagtgtttctggatgtgtgcataacataaatgtgatatacgaaatgggcataaaaaatgataattgtttccaatctgaaaagtgccaggatatttccattcaatcaggtgcatactcgtctgaagctgcaggcagctttttagcaccactttacccattgcagacatctgaaccagcaataatgatgggtggccctgtgtactatcagagttctgtaatgtcattaccaccaggctttatttcttctgatggtgcttctaatgcatctggtgtcaaatctgagacaagttactatcctgtttctcgccaaaatttggagattaaaacttgccacaatgcttctggtgatcctgaacaaaattcatatattagcagcgaagatgacagaaacaagacttctgaacctatgggcagaatatcagaatctgaaaagaaacagcaagttgatgttgaacaatcatgtttggagcctgcagcctgcattggaaaggaagcattatctagtcatggtgacaccatattaagtaaaaaggaggatgctggagctctatgctatgaacctccttgctttcggagttttgaatttccctttgtcagctgtgagcttgtaaactccagcgatctcccagaatatag

SEQ ID NO: 187837 - DNA, 280 bp, Zea Mays
tttcttatccaatcttgtgagcacattaaaccctctaaaattttaggggtcaatctgatgcgatgctcactaagaattctcccactagtgctaaacgcagattcagatgcaattgtgctaactggaataacaaatatatcacgggcaatctttctcaatgtaggatagcgtgtccctgccaccttccaccaatctaatatctgaaagttctctgatgaaaaattaaccaaatcatcctctaagtatctatcaagctcatttttaactcttgtcattgttg

SEQ ID NO: 187838 - DNA, 1017 bp, Zea Mays
ctgatacaaaaactgttgtctgtgaagaggccattggcagttccaaagtttcatcaaatggtgataccaagttgacgaattataataaaaaagcggaccataataaagtctctagcagttcagtgaaagacatcacagggactcaagctcccaagaaggcaccgaagctagataagaaaaacaaagcaaaagctgtgaaagaaataaatggccgagctgaaggtgtaactggcagagctagtactgatgaaagtgaaactatttcactggatcaagcactctttgctacaaaaatttcaaagtcatcaaaatctataagcttggatttccgactttcaagaggcattgcacaggtatcatccaattattcagcacaatggcatttgttattgtatctgaaggaactttgcttaaaaaatatttttagtaacatctaaaagcttgctgaggctgtattttgaatgcttgtttaggactgcagaaaacaaacattacaaccaattagctacatttgtttattcaaaatgattttactctcacaaaatatttggtaaggtgctgacaatatatagaaggagatgctattattattatattgatcataattggttgaattacatattttcaggtaaatgaaggaagatatgaccaggcgatatccatttttgatcaggttttgaccttttaccatgattttttctccattatgtatcctgatgcaaagagggaacctgataatttgctattgaccatttagatattgcgggaaactcctacgtatcctgaagcactgattggaaggggcacagcttatgcatttcaaagagaattggattctgctatttctgatttcaccaaggtagacctttagatattgagaacctccagtgtctgttatagtaaaatgtaaaatggcctcctcttttcttgcaggctatacaatctagcccatcggctggggaggcatggaagcgacggggacaagctcgtgctgctttaggagagttcaaggaggtg

SEQ ID NO: 187839 - DNA, 312 bp, Zea Mays
ggcggcgtgcggatctggagcggagggatgggatcggggaggaggagcacgggatgggacaatttgagatccggacgtggaatgcgacgaggaggaaggaagaattgctggagatggaagatgtgcttcggtgacaccggatttgcgccgctcgggttaatcgaaatcgacgtcactacggctggacctcggcttcctattggtcggggctcggggctcgcgggttttctgtctacgagaagagcagattagtagaaatgcttgcggcccgacggcgcgggtaggccggctgggttcctaccgtttgcaaat

SEQ ID NO: 187840 - DNA, 311 bp, Zea Mays
gaggtggacatctctaagagaatacatccaagatgaagttcatggagctatgcctgatcctcaagtctttctcaagttactctcttctaccagccaaaaacatcaaagttattctcagagcatacaaaagaataatgctcaactttctgagcctcctcaaaagaaacgaagatgcagtccttcctgtgaagttgatgatattattattggtggcattgatgttgagcaggataaggacgcatctgaagaacaaggcctggaattaaaaaatgaccgcacaaccaccttgtgtgagatatggagcttagata

SEQ ID NO: 187841 - DNA, 712 bp, Zea Mays
atgatggtcttcttgagatatttggactgaagcaagggtggcatgcatctctcgtgatggttgaacttatatctgccaagcacatagctcaggtaacttgctcccccaaacaaaaacaaaaaaaaagtattctataaactatagaaagaatatttattacttcattcagaagcaccgcataatttggtgctaatgttcaggcagcggcaatacggatagagatcaaaggtgggtattggcacgacgcgttcatgcaaatggacggggagccatggaagcaaccacttagctccgagtattcaacatttgtggacatcaagaaggtgccttacccctcactaatcatcaatggtggagaccgttagctggaaaccatatttgtggcatgcatgacctaggcggatcggagcggccaagaaaatattttcagcttccagcttgatgaactgcaggcacagcacaacctttttatcgcggttgcatgcagctctaactgtatattgagttgagcttgtgcgtggaacaacgtaatgcaatggtgtctccactgtcccttgatcgcaattctatttgaaattcagtacattgcaactatctgatgcatacttgcaaatttgaggattgtagtgattagtatcagatgcaagagatgtgattgccaggctgtcaccctgcttcctttatggacgggcaaggcaatcgtgcagacgac

SEQ ID NO: 187842 - DNA, 510 bp, Zea Mays
cacgcataaaagtccaattctttgttcactttttttcttggcgtcttatctcttcccttctctgcctcgcttcgcttcctacccacgccacgcgtgtgttcttggcagccacccaatccccgcctcgcgaaatcagacgccaaatccccttatcttatcatcaaatcgatcgccaacgggcatgatctgatggctccctcatcatagcctctgctgctgcaccgcagcaaaatggccctggtttagtttagtcctcaagatcccgcctttctggtgctctgtttggctagtgtcgtgccgccgcgcgaggacccggagattcgattccggtccggtgtatctctaggctgcttggtttgggttaggatttagtgggcagggttgtgcagctggtgtctcgtggaggaagaatttcgtgggaggattttgaccgggtttgggcaaagagcgcgccgttcgggaggaggtgattctcgcgtggttgcgtgctttgctgggagtctgctgcgg

SEQ ID NO: 187843 - DNA, 471 bp, Zea Mays
ggactcgagactcagctccactcaccaacgaggaatctggatagggcgacaagggttttgtcccggccaagacgcaacccatcccgcggtcatcaacagcatctccgatcgcgccaggttcgttcccgttgcctcgcctcgcatgtaatttgttcgctcgttcttctactctatcgtggctccgctgatgtcgtggctccgctgacgtcgttgtcgtgcagacgtggccactgctttcgtttctagttcacatgtgctcgcccgccacacgttggtttgcgactctcaaaacttacgttcaccatcttgtctcgtatgcctgctgtgtaaatggtaagcactccgcacactcaggttgttcgatgaaatgtgccaacaatattttttttgctcgtctaggacatcaaagtagatctgttgtcagccgtgcacctaggttgttcgacaaaatgtcccgacatttgttttgtc

SEQ ID NO: 187844 - DNA, 801 bp, Zea Mays
cttatcaactggtgaggtaaatgtgaatgaaacaatctcagtgctgactttctttttgtttgttgaaaaagatgactgctcatcaatcacaatattgtgccgaatccgcctctggcttctctcagaattaatactatcacttgactggcttgtatcagagtacgctctcctgtcttgtaatcttcttggcttcgggattgctttgggtacagaattatttcttacgttagcatgagcatttggctgcaagtccacttttctgctaccttgactactgtttccagcaaatgtgctggccaccctcacctttcttggatgggcatttatctggtggatattgctccgttgtctactgggggttgctgggttcgagttcaccttatgtttggtggctgtagcattctgttttctgctgtttggcatgagcacactggatgaacttgttgtgccgatttggttactatccttttgtcggttcaacccacttcttttagccatgttattttcagggttcttgagagtttcaagctttctaccaccttttctcatgcctcttttttcctgggcatgcatagctcgagcagtatctaatctatcgccggattttacctttggaccaactggaacacatacatttgcctgtgagatcctggacgtcgaggtgccctccgaacctctcaaccttccatctgaaggttttccacttggcggcctaaaagatgcagggccatcacattttctcagtgcttcattaagtttctgtgacctttgttgggctcctatgagctctcctgggttgta

SEQ ID NO: 187845 - DNA, 553 bp, Zea Mays
ccttaatgccctcaccgtcaaagatgctttccccatccccatcgtcgacgagctccttgacgagctgcatggtgcgcagttcttcacgaagctggaccttcgctccggttatctccaagtccggatgcggtcggctgacgtgcacaagacggcgttctgcacccacgacggcttctacgagttcctggtgatgccgttcggattatgcaacgcaccggcaaccttccaggcgctcatgaacgacgtgctccggccattcctccgtcggttcgttcttgtcttttttgatgacattttgatttatagcaagacctgggcagatcacttgcgccacatccgcgccgtcctcgacgaacttctccgccatgtcctcttcgtcaagcgatccaagtgcatttttgggtccccatcggtggcgtacctaggccacgtcatctccgcccacggtgtggccatggaaccggccaaggtgcaggccattcacgactggccgacacctcggtcggcgcgcgcggtgcgtgggtttttgggcctcgccgggtactaccgcaag

SEQ ID NO: 187846 - DNA, 493 bp, Zea Mays
agtgaagcagctactgcgctacatcaaggggacgattgaccatagcatggtcttccccaagatcggcgaaattgacccgcaattcaaagtctttaacgacatggacatggtggacgatgttgatgggcggaatagaacctcccttgtgctcgccttccttggcctgtaatgtttgagtaatctggaccgtgccatgatgggtcgctttcgtcgtctcataaacgaccttgaacttaaagagctggagttgcttggtagaagatacacttggtccaatgaaagggcttcacctactctggttaggctggacaggttgttctacaccactgattgggagatctacttccctaactgtattctccagagttcggccaccatgatctcagatcattgtgctcttctcctcgccctgcatgagtttactcaaggtaaaagaagatttcacttcgaaagcttctggacaaagttggatggatttgatgacgaagtacaa

SEQ ID NO: 187847 - DNA, 610 bp, Zea Mays
aacgggttagttcaacaaaatgttcaactaagaaatcaaattcacatgctctcagccgatcttgacaaaaaggatatggaactacgggtaagtgtgatatgttactgttatttttactgcaaaatttgaattgtttaatttgtcaattgcgagctatattctcaatttcaattgtgaagacacttatttttattcctacctttgtaggagagcttccaaatcgagttgaagaaaattacagatgctgctgcgtccagggttgaaaaagttatgaagaaatctgaagaacaagcaataatgattgaatctctccatcgatctgtatgtcttacatattcttctttcgaagacagaaaatctttttgtgttgaaaacataattatactaattgctgcatgtaccatgaatcataaggtagcctattgttattctttattgttgtgtaggtggcgatgtatcggaaactttgtgaggagcagcagaaggctcgttcaaatgttgaatcggcacccactactctgcaaggtttgttctattatgccttttattttgatttgtcctgcccattagttgaataacttgtatttgtttggggttgactgtgttgtgg

SEQ ID NO: 187848 - DNA, 326 bp, Zea Mays
ctctctcctctccagggagttttctgcgggggttttggttgggttttcttcagcgccagccgtggatgtgtttaacgcaacagtattagtttcttcatgatcagctgtgtgtcctcaaattgagtttcgtgccgtgtaccagtcgcgcatgttccccagatcgattaaagtttcttcgcgcgtatgtatgagctctattcgaatgttctttgctctgaaaagattccccctgttcatggttacagaagggcctggagttgaagcacgaatcatcgaagcgcagcaaaactgagacacacgtcttacttcttcacaagtactgtcct

SEQ ID NO: 187849 - DNA, 338 bp, Zea Mays
ggttagttccctaaagcgttggcttagtacgtctccgacgggggaccaacgcaggaagggcggcgccgccgtgctcggatgtcgggtggggtgggggatggcccttggccattgattgcgaggaagatggataatattagaacgagagataatgtttcggccaattaaatctaggacgttcagatgtgatctggtggttaagaataggtcacacaacacacatggaggtctcttgggttgtggatctctaatctaggggctcataatgtgtaccgcttcagtttaaatattgatctcttctgaaccataggcgtcgatcagatgactgtagttagccg

SEQ ID NO: 187850 - DNA, 586 bp, Zea Mays
cccagtccactgcctcctgccaaaataaatccgtccgctctccagcttggtggcacaatcccatcgaaagctagggtttcaagcctcttccgacttctccttcccttcccttccccaccacaacgcggccgccatagacgcggtaccgcgcgaactcccatagatctgagcgagccaccctgcgaatcatcccctgacgcaccaaatctggtcagaaacggtgaagagttcggacacgatcttaagcgtcgttgatttaagaccacacacaaacacatctgtttgcccttcccccctatttttttcctgtttcggacgattcataagaacagacctgcaaggtttgcagatctacctgttcaagaaccagggaccttgttttggacgcccagaacgaacccttgaccctgcggatctgctcgatccgttttggatctgcttgcttttttctggatctagagagaatgttcaagtcgatggtttatttcgtgaacatctcaatcggggaggttgaggtgtggcccaagggccaggcgagcgcaggcctggccgtggcggcgtgggcgcgagatatccgcgttgaccg

SEQ ID NO: 187851 - DNA, 458 bp, Zea Mays
ctactccatctttgtcttcttcagtgatatcctgatctacaatgagtcatgggctgccatcttctccatgtcctcttggtgctcgaggtcttacagcagcaccaacttatcctcaagcatgtcaagtgcacctttggcgtgctcacagtgtcctacccgtggcacgtcgtgtgcaatatgggtgtttccatggatcgttagatggtgcacgcattgatgcctagcaagtcctgtagttcctgcgagcgccacatggattcctaggattggccggatactaccatcccttcattaagggatacgacaccacagtgcacccctcaccgaggatgacttcgcctagactgacgttgcatccgtgttcgccatcctcaagcttgtgatgtccatgtccctggttcttcaattgccaaacttcaacgagccattcgctgttgaatgtcacaactccagtttag

SEQ ID NO: 187852 - DNA, 651 bp, Zea Mays
aattgatggtgaggggccattagagattggggcgcagagatcattgcaggagctagaggagacaacaacatccttcaagatggaagctgagccttgttcgccggagatggctcctccagggtttgaagattgtaagtctcaatggttgccactgtcacatcctaatcctctggttgaatccacacacactgtggtacaagtgactactaccaatgccatgggaacgactccagatgcagcaactgggtcactgtcttcacctcgcctacttccactgttgaagagagatacagaggggcaaacacttccaagatcatgctctccaacaacagaagctgcaccatgttcaccagatatgccacctccaggctttgagaattgtaagtcatcgtggctaccactaccaactcttcaacccatagctgaaaccacgcatgtgttgcacgacgtggctcccaccaagtcaatggtagtgggacttatggaaaaggcatgctcagtgctggcattggagcggacagatgtgaagatagactcggagcagagcctattgccgccattggagagtgaaactgagagttcattgcaagggccactgccaaggtcaccttcttccatgatgaaagccattccctgttcaccagatactgc

SEQ ID NO: 187853 - DNA, 948 bp, Zea Mays
gttctaaacgatctaagccacacgatcctaaaccgagggctcagattttataacgcgaagaggtattcttggttttaatctcggccgtccatcctatgatcaacggcataagtgatttcttccacccagtcattgccagcggcgatgtccagggggcgccgcggcggagcttggccggagctggcccaaccacgtcctggcgtgctaatcctaaatttaactggcgcatcatgtaacctagagggtagccaatgctgtgggagagtcattaccagagctagaagaaatggcgaagctgcccacgcgcacacccagatccgcgggggggagaatcagttccggcgagcaattcgcgcgccacgacgacaatgtagtgctccgattcgccaggtacgcatacgatgacgtagtccgaagcttttgaaccaagccctgggccccaatgacgacgacggcgcgagatggttgtggcggcggcgtgatgcgatagcagagaggatgcgagcacgggaggaaaacgcgagcgcagggaagaagaaaaagcggggcggagtagctgtgagggaggtttaaatggtcggataggtgcggtcatggtaggatatgcgcggtcgccatgccgaagttaccggcggactttgagccgagcgcgccgtggaagtagtcgaggggaggaaaggttagagctgacggcgtccggatccggagttgcaggggcgaccggcgaataaccacagcggaaaccgcgtacggcgcgggagttggctagcagcagcgaacggatctccaaccaatacgcccgagctccacggatccctcttccttcgcatacggcggcgttggcgatgaaccaaccggctgacacggaggtcccacacgtcagccgaccctgcgcacggtgagaaggggatgggccgcgcgggagctactggccagatgggccgagat

SEQ ID NO: 187854 - DNA, 355 bp, Zea Mays
ggccttgaaaaggtccaagtgttcctttggtcagacatctgtggcttatcttggtcatattacctcagcagcgggcgttgcaatggatctggagaaggttgctgcggtaaaactgtggccacgacctaagtctctacgggctttacgaggatttttgggcctcaccggttatcatcgaaagtttattgctggatatggagaggttgcaggacctctaacagccctactgaaggaggcttttcattggtctgatgcagcagaagctgcttttcttcagttgaaagaagctttgatgactgcaccactactacatatgccagatttttccaaacgttttattgtggactgtgatgca

SEQ ID NO: 187855 - DNA, 373 bp, Zea Mays
atgccctcggtgatcttggcgaaccagtctccgaccggacgttggtcctcaacgttctgcgcggcctcagcgaccgtttctccgacatcgaacgtcatcttcgcctcggtcgcccctttccgacgttccacgacgtccgggccactctcctgttggaggaactcatgatggctcatcgtgcgtcttctccatccgccgccctgcttacctccaccaaacctccacaaggcgggacttcgacggcctccaacaaggctcctgctgctttcaacaaggcgccttcggctccacgttccggccaccccaaccgtcgcagcaagaggggtggccaaggccgccagggtatccttccattcccaggcgctggtcccgg

SEQ ID NO: 187856 - DNA, 1395 bp, Zea Mays
ggcgccctctgctgccgtcccgggtggctctgaggttgaggggtcaccacgcatggccaagttcctctgcagctttggaggcagtatccttccccgaccactcgatggctgtcttaggtatgttggcggcgagacaaggattgtcatgttgccgcgtgacatatcatatgccgacctggctgcacggatgagagagctctataaggatgctgatatcatcaaataccagcaacctgatgaggatttagatgcgctggtctcggttgtgaacgacgacgatgtggtgaacatgatggaggagtatgacaaggtcattgcgacaggggaggcgttcactcggctcaggatcttcttattttctcagcatttggatgatgatgctgcatcagtggatgtgcattacaatgtagacgagcgggaaacagagagaaggtatgtagatgcgcttaacagccttggtgatgttaagtcaccttcctcccctgtgtctgtggagcagctttttggcattggaggcaatgattcaggaattcctgattttgctggcttgagacatttgaatgtccctcgtccaacacatagtcagaggtatggagagatggattctccttggagccctgcctatgtctcaccaggccagtacggggtacatgacccaagggattttccaatttcaccatcatctgcaaggtttcaagtaggagcggaggattttgatgagaggactcctgacgactttgtaaggcagtcaccaaaatatcgtcattatgaggcgcattcaccatcacatatggataatttagtctggcttccacctggtgctgtaattcagcaaaatgcaggctttcctggtaatttgagccggtccaacaatttcttggatgggagcaatggatgtgatcactgccgttcaccattccataaggttcaaggttcagtgaatgatcctatctatatgaaccctcgttggactcggccagtccaacaacattttgaccaaccaagcatgattaatgattatcccggtcaccatgctaattcttgtccagattactgccgccctggtgatcattatgtgggaggtcaagatgttagattggaaaatggtgtttatgttaaagagcaaaatggtggtcatcctcccatgttctataatgagtcacatcctcacgatagagtctggcatgtgcataccaagcaaagtcatcagcgatacgaggatccaaggctgcatcatcctgctaatggtagagtgatcgagccatacattatggatgccaacaaagtatatgaagttcattcagcatctcttgctcgttctagccatgagagtcctcactattatcacggtagcagtgaggtcataaatgacacgtatcacaaccaacaagttgg

SEQ ID NO: 187857 - DNA, 308 bp, Zea Mays
cgggctcgtggatgaagcaatggttttatgtgaagaatgacctgagctagagaagcgatgttaaggatgtaatccaatggcctgttcgatcctgcttcgggttaaagaggccagctatcgtgaacacagaaaaatctcaagcctgcctggcagcgttgaacgatgtgtgtggttacattagcactagagacttagtgcaggagcacatttccttcaaggtatggcccctggctgctaagtgggaaatgccaaaagataatggggctggtttgagtcaaagtgctggaagaagtagtctagtatatttg

SEQ ID NO: 187858 - DNA, 406 bp, Zea Mays
atcaaattatactacaatgtgtatatcacaaatacaaagactaagaagtgaacttctttgtacacaatattctttgtatgttacatttgagaagcactcatttctcttgttgtaagtatctttacctctcgcaattgctcgtgacaaggaaacatataatcgggacaaggtagctaatagtgttgatgtcctagatcctagatggagaatcaattagaagcaacatcttgcagtcaaacttgagaaagacaagttgtaggatgatgatggtgattgtcaccccgagccgttcttctatcgctgatacacgccccgttattagagatattccaccaaagcacgccacactgaaaactaatagccagatcacctgaagagtagtgattgttgtagatcggggtagaac

SEQ ID NO: 187859 - DNA, 565 bp, Zea Mays
cagccgcgcgcgcgcgcactgatggatcacctgcatcggtcggttctttcgtttccctcccgcgtgacggcgtgagtcatgagtggcactggtgtggtgtcccgatcgtgtggcagtggcacccggaaagaggccggtggcgcgctgggcagtgtaccacgctcgccgtcgcatgtgtcgccggcctcgctttccaacgagtgaccggccgagcagggatctcaaccacactccacaccggccagccatgcaagtggcggtcgccgagcgcgctgctgatagcggatagccctctgctaggtgcaaacgactagctagcacatgtccgggaaggcgccccacgcgtacgtacgtcttgctaatcaggcagctagctacctgaacagtcttgtcgttacactgttcgtcagagtttgccggaatgatatgggtactgtacatgactactcgctagcagtagcaagtacgccaccccggtcgatcagccgtcgacgtcgtcgtcgtcgtcatcgtccgcgccggtgtttgtttagccccgtgcgggggatctctcgcaagattttat

SEQ ID NO: 187860 - DNA, 883 bp, Zea Mays
tgcatttgctgctgcttgtggagaaaaggagccaagaggacgtgttcgtgctttgggtttaggaccaactccccaagatgttggtaccccagggttgaagtgttacacacccccaagactacagatggaagtttttggcccgtaaaaaggctgaatgtgagaaagtagctcttcaacaacgcataactgaattggagcagcaaatgcaagaggaaaggatggcaagggaattgcaagatgtggaaactcatttcacataatggttcaaattcacgacataatggggtaaagtatttcagcaacttagttacattctaatggagttcagctcaatgctagtgaaatatatttgtaccctatgcagatttattctttatatattctctctcttgtatgtttgtagagccgaaggtatgaagagcatgatgtggaggcatatcatgacgctaaatttgtagaagatgaagattgtgcagaaaatcacatcaatcatcattgtgatgatggtgagcaacaccatcaaaacagtcctgttggtgcagcccggacagtgcaacgccatcaaaatagtcctgttggtgcagccccgatagtgcaacgccatcaaaacaatcatgttagggcagccccaacaattcaactccatcaaaatagtcctattggtgcagtcccaccaaagcagcctcaacggtgcatcactacaagtttagcccacccagtcccaccagggaatgaggccccctctcgcattcaacatgatgaacttgtattagtctcatccttcatgttttaattataatttaatatggttccatagattgattcaattctaataaatttatttttttgcctcaggttggaaaggatgtaatattatatgcca

SEQ ID NO: 187861 - DNA, 513 bp, Zea Mays
ccctggataggtccagcttggcatcctcgccgtcgcgcaacgccgagtcccctcgccacgagatcatgttgttcaccagcttcccgacgaggatggacgctgaagggcgacgacgccgatgaggacaagcagtagcacgcctccatcgtctgatgaggatgagcggcgcacacttggcgggagagctgcaaggcgcgggcaaccagctgcaggcgtggcgcggggccgaagagcaccagcgcaagccccttgcaggcgcgggctcaacactggaaagaagaaacacacgtgacgtagagaaagggaaaaggaggagaggggcaagacaatctgttggttttctacaattaaattggagttattttagtttttgttaaacaaccaaatgacattttagcgtgtacaccatggttcataatggcatctggatgaaacccattcatttgatggcaatatagcaaaacccacgtttcataatgacacaattccaaatttctccctgctgggtgcttg

SEQ ID NO: 187862 - DNA, 296 bp, Zea Mays
ccggtcacaattcagaaataactcaatcaagaagcagcagtaagcaaagcgctaaggcaaccagcgaaaccatgatggaagcaatgagagaatcttctgcaagcaggagtacagctcatcatttatccacttttcctgattcaaagaaaatagtggatctgaaaacaaccagtgggcactccagtcctcatgcttcactgtcctccaggatgagacacaatgaaaacatgatttatgccgagcatatgtctgttgatagagcattattggattctgctcaaacaagtatttcttct

SEQ ID NO: 187863 - DNA, 386 bp, Zea Mays
ccacaatagaccaacacttttttttctttgagaactaactaacggaatgcaacaagtatatgtgtgcccagatttcacctcaccactgaactcctctgatcgattcagatggccactaaactccacatctcctatgttatggttgccctttctgctttagcttggatgttttgcaactaaggccagggcaagtctaatctgaagttgtgtcgctagggtgggttgtacttattagatgttgggtaagaaacctggcccaggctattatttgaaaattgcttgcagcagtaatcatgagcttaacacctgcaatcatgtatgtggctttaccattggaacgttgagcaagcaactaatgcacttgaaccatatcatatacagttgct

SEQ ID NO: 187864 - DNA, 485 bp, Zea Mays
acaagttctcaatggaagagtttcgctgcaagaagccttgtggcctcaagaagaactgtgggagacatcggtgcagtgagatctgttgtccactgtctaggaaagttgcacaccttgaaggtggcaactgggatcctcatctctgccagatatcatgtggcaagaagctccgatgtgggcagcatgcatgccagctactctgccacagtggtcattgcccaccctgcttggagactatattcactgatctcacttgtgcctgtggcagaacttctctcctgccacctctgccttgtggaacaccaacaccatcttgtccacatcagtgctcagtgccccagccttgtggacatcctgcctcacattcatgccattttggggactgtccgccttgtattgtgccggtgatgagagaatgcattggaggacatgtgatgctgaggaatatcccttgcggatcgaaggatatcaggtgcaaccaacca

SEQ ID NO: 187865 - DNA, 680 bp, Zea Mays
cgagtttcttggctccgaggaggagccgatcagggccaaggggaagggagaggacaccttgggcgaggaaaacggtggggcaaaggaggtagtgcggaggttcgaggaggaggaggtcgatgagctggagcggaaggaagtcgcattcagactgaccgtgcatatgcttgggggcgagggtgggctagagaccgagcagattgggaaggtcaggaatgctgctgcgcgacaggtccgatcactcacggattttctcaaggtaagattcttcccttcatttgtgcctctatatgatgcttgttgtgcttgctcattattgtggtgatggcttgcagattagaaagcgggactggagggagcagggtacacagctcagggcaaggataaacaccaaattgatgtgttgtcaagctgcagtgggggtgctggtgcgaagcgtttccaccatggatactgatatcaaatcttcgaaggatatgctccagcagactctagcttggttcatcgaggccaccaagtcgtgcatcctgtcatcctggcggaaactgaagatatgcgaggagctattttgcacactgctcaatgggatcagccagataactgtctcacgtgggggccaacttctgccggtgcttttgattcccttaaaaccgcttgttgtgagcacatgttcgcaggca

SEQ ID NO: 187866 - DNA, 388 bp, Zea Mays
cgacgatgctttcacccctgtggaatggatggaatctgtgcgactccttgcgctggtagcctaggagggctgggcacgttcatcacatggacatcaagtcggtgtttcttaaaggcgacttaaaggaggaggtctacgtacacgagctgctaggttttgcgatccctggcaaggaaggaaggtgttgtgcctgcgcaaggccatgtacggcttgcgacaggcaccgagggcgtggaatgtcaagctggattccacgctcaagaggatgagcttcatgccaagctcgcatgaggcgaccatctatcaacgagacaatggagaaaatgccttgctggttggtgtctacgtcgactacttggtgatcagttgcgccaaggatgcagaggtg

SEQ ID NO: 187867 - DNA, 511 bp, Zea Mays
ctggttgtaagtattatttactcattctcgatgacttctcgcattatctatggacttttcctttacgtcaaaagtccgacacttatcccaccttgtctcacttcttcgcttgggtctccacacagtttagttgcaccatccggagcatccaatgtgacaacgggcgcgagttctataacaatgcatcacgtgacttcttcctctctcgtggcgtccatctccgcatgtcttgcccctacacgtctccccagaacggccgggctgagcatatgattcgcaagacgaacgatgtcatgcgctctctactcttccaggcttcccttcccgctcgttactgggctgaggccctcgccactaccacctaccttctcaaccgtctccccaccgaggcggttgcccaccccgccccttacttcgctctcttcggcatccatccctcttacgaccatcttcgtgtcttcgggtgcgcttgctaccccaatctcgcttccactgctcctcataagcttgc

SEQ ID NO: 187868 - DNA, 460 bp, Zea Mays
tcaggacgtgcagttgtatccgtggagatttaaagcgcagtttgtttggtttccttttctacgcacacagactgaagagatgcagaaacagaccgtcaaccaggccagtgcgagatgctggagatctacgtacgccggcatgcaggccgagccaatgcagtagctgcatgtagcggcacataaacagaaaattgttttttagattattttccattatatcttacaaataaaagatttaatcaccgaaacaattttctattcttgtctctgagatttttaggaataaaactagacgacaaatgttgtataacatttagagatttatttatacacttttctctagtacacgtctaaggcaaacaaccaaacacgagcggtatctatcctgaatgcatcaatacaagcaaccaaacacaagcatacgcacggatttagcctgtacaccggagacctggctcct

SEQ ID NO: 187869 - DNA, 367 bp, Zea Mays
gcgactccggcaagacgctggtggccagcaacgtcatcccggccgactggaagccgatgaccgactacccctcctccgtccagttcccttagccgcacgctgtgcgatcacccggatctatatctatcattgttattcgtccgattaattatatattgcttttttaattattgtgtttacgtgtcttaagatgcgtgggatgatggaggaggcaatgtgtatgtgatctcccgcccacgatcgcaacattgaaataagacagaatgcccttgttgctattgaaacttataattaatgattccttggttgccaccaaaatttataacatctcttggttgccatcaatttgtaatattttagtccttct

SEQ ID NO: 187870 - DNA, 409 bp, Zea Mays
attcaaagaaaaaataaataaacaaaagaagtaaatatactcttaagttcttactagcctaataaaaattgggtgtaccttgtcgaatattgatctcttcgatggataggtgtgccgagaaagggaagtatacatctatggaatgggatcaggcggtatcgataagaatgggactgggtcatagttaaaatgtttctggatcgattgaattgaggagcggtgtcatgggtcgttggtcgacactttaaaaagggaagtatacatctatgggacaggaatattatgaatttagtatgttgattctaatgggccgatgatctcgggttgattctatgggtcaagggtcgtgttctaaaatttcaataacaaactaacaccagtgtaatatcatctcattataccattgaaa

SEQ ID NO: 187871 - DNA, 326 bp, Zea Mays
cgttgggttgtttgaactgtactgggaagtgggaagatcacccgcaatccgtcatcctcatcctcgtagaacgctgaacacacggagagaaaggtagatcaaagacaaagagtgggttgggtttgcttttgatcataggatttttagtctagtagcacgtggtacagttgttgaacaaacctacgtatccaagagccaagtcaaagaaacagcaacaagaagcagtagcacatctcaatccgtgcgttttccttgtgttttacctatggcattggcatgatcatgtaaaacaatattttgggatgaccgtatggccaaaatgctga

SEQ ID NO: 187872 - DNA, 408 bp, Zea Mays
cacaaattatcaaaaggtgggataccattggctaatggagatgtgcaactaccaaaaccacctccatgggcctatcctttgtggagcagacacgaaacacaaaactatgaaacagacagaatgctgaagtctacttctcaggttattgaccaagcaatggctcaactctgggagactaaagtaaaatttgtaaatgttagtttctctattgagaaacttggtcgctcaaggagcattgtactttctgaaacgggtcgtaggctgcgacatgatgctacggattctcatgatccacctggagattcgcaaacagttgctgatcagcctattgaatgggtgaaggttacgttgtctgcagttccaggagttaacatggaagatgtagatgataatgaaccaacacgaaag

SEQ ID NO: 187873 - DNA, 299 bp, Zea Mays
caaatgtgcagtgttcatcaggtgcagcttgcgcggatccccctcatgaactgagcaatcgatagaagaaacaaaaagggccatttccgctacagaaaataaatcatcaggaatgggaaaacgaggccacaggcggtctgcatcacaagacgacgacaatgtgggctgtgtgtggggcctcatgcgcatgctttacttccgccgagaccccaaacttttgctggatgcgaagcagttgagtgggaggcatgcgttccgggaggtcagcggtaagttttcttcactaatcagtagccaca

SEQ ID NO: 187874 - DNA, 704 bp, Zea Mays
atatccatgaccacccttgtttcctaatgatccatgagcggtcatcttattttgcacatacttggtgatcttgctaattccttgtaacttctttcggttatgaatatctatttcaactcttctgttggaaccttacttatcttatccttgattgttttctccactccacttcgtgactttgtaagtcttgccttaactctgtccatggactatgcttttcatcatcatcacctttacccttatcatctctatatcttactttgatgtttatcttatacccgccctttaaaacctcttcttttccatcttgatctgagcgttgtactttgcctacttttcccttggtcgtgtcctcttctttgtcacctgcgagtttttaactctatcatttgttgtgtttttgtttgttatttcctttacccttctcagcactctatcctaccttgtgattatgttatgtctgttatttaaaatctccaatctcccatcccaatttgggagcggtgttttacttacctcacccttggcaacatcctcttctttaccgcgtgtaagccttgatgtaactccattctttgttgtacttataccactggctcttctgtgccttcatcttttcccttatgcccttgtttattatcgcatttgacccttgcgatatttatgtcttctacctaaatgctcaccttgaacttatcctttaa

SEQ ID NO: 187875 - DNA, 347 bp, Zea Mays
agagtgcgaagccaatggacacctaatacaatgtcaaatccatccagtggtagggtatagaaggatatcgagaaatcagcttctccaataaccagaggcagttgagtgcacacacccgcagtagttacccgatctccgttggccaccttcaccgtcagacctggacgaggttcaacttgaagctgcagctgactgaccacagaatcattgatgaaggaatgtgtcgaaccagtgtccacgagggccactaactgacggccatacaaacaaacagaaagtttcatggtagtgccaatatcaataccggtgagagcatggagagagatgccaacatcatccaatgtttc

SEQ ID NO: 187876 - DNA, 308 bp, Zea Mays
cctcggggatacgatttctcatggtctgaaatcttttgaggtgtgactagagagtctcatcccctcggtgcttgatggatttgaggtcccatggctgcgctggtttctcggagagagattggaagttggcgatgaagcgccgactgaagtcgctccagtcgtcgatgcagtgtcggggtaggtgtcgtagccattgtagtgcatcctgcccgaggacgatgggcaagtatgcggtcatcacgtcttcagtcgccctagtagctcgggcggcgatggtgtagacggccaactagcctcctggatcctgc

SEQ ID NO: 187877 - DNA, 565 bp, Zea Mays
tgcttgctgaagcgatccacgaccgttaagatgacagatttgccgcccacctttggaagagcttccacgaaatccatgcctatgtctgcccatacagccgacggcacgggaagagggaggagaagcccggctgggtggagatgttcggacttgtagcgttggcaggtagcgcagtttcttatgaaagcctgaaccacggaacggagattgggggagtgaaaatcacggcgaaggcgatggagggtgcgctggaccccctcatgaccatcttcatgtatggcagtgatgagttcttgcagcaggggggcgtctggcggaatgtagaggcgtccctagaaagccaccataccgtcgatgagagtccagggagccctgcgaagatcgctggcaatttcctccttgagggcgaccagcgcgggttcctgatcatgtgctagatgaagtcggtcgatgaactcaaatctgggcccagaaatagccaaaatagtactgtcatcggtgtcacggcgtgatagagcgtcagcgactgtattgctgttgccggtcttgtattccacggaaaaat

SEQ ID NO: 187878 - DNA, 273 bp, Zea Mays
cgggggataccgatatggacgaaccttgacaggagaggctcccggtatcaatggaatactatgatcacagtaacgagaaggaggaagaccagaaggaggctcgaacactgtgagaaattcagacaacaatgccaacagaggtgaaggtaatttcaagtccgtcacagactgcgagacaggttccaactgatggacagcaaccactgaacctggagaacaaacagcagacaagccttgcaacaacaccgaagattcttgataaggaataatcat

SEQ ID NO: 187879 - DNA, 277 bp, Zea Mays
ccaatatgtcttttttgattgtgtttctggacactgctttgaacaaaggttgtagtgctgcacaaaattttctaaagcaaacatggtcaaccatagataatggatactcatgtaaacatatcattaaagctagctctttcctagcaatttcctgatcaaacacatatttttccactactactgacccatccgtatttttgcccaacttcaaagttgattactttagtccttttctaacctgcctagattgacaagttctcagatgaccacgcagatg

SEQ ID NO: 187880 - DNA, 310 bp, Zea Mays
ctcgcatcaatcgttcccatgtgtaataaagatgctagctctcctttatgccatgcttgtcagttgagtcgtcatgttcgccttccgttcgtacgtctacttctcgtgcggttaacaatttcgatcttattgactgtgacttgtggacatctcctattttaagtgtctcgggtttcaaatattacttagtcgttcttgatgattgctcccattacttatggactttccctttacgactaaagtctgatgctttcccaaccctcacttagtttttcgcctatgtgaaaacacagtttggtgtcacgattaa

SEQ ID NO: 187881 - DNA, 493 bp, Zea Mays
gacggcaagaggttttgctatctcaagattagttattcgatttctttggttaactgcagtttcaacatttgtaacctatctctatgtgtgagtactcacttagcttttgtaccttatactgtcaatgcacattaatgctgtctattcacttaaatgctgaatattgaacaggaaagtcctggaagagagagacacaaggaattcagattcgacttatttccgaatttatggtcttgttcttggtggttatgctgctgttcgaatcatgtttgcactgatggctaagatcccagcttgtcataggctctcaagtttttctgatcggtctcagtttttccaatttttcaagtggatataccaggtatgatgtcattgttcaacataacttggaaatatatttcgattacttatttatgcactgattatgtttttactaatttgttttcaggagcgatattatgttgggcggggactttatgagagtattagtgat

SEQ ID NO: 187882 - DNA, 1198 bp, Zea Mays
gaatatcaaagttggagatgtaataaaactggagaaggataatttctttcccgctgatatgattctgctttcatctagctatccggatggaatatgttatgtagagaccatgaaccttgatggtgaaacaaatttgaaaattaaacaagctctcgaggtgacattggatttacaggaggacacaaagttcagagaagtcagacaaacaataaaatgtgaagacccaaatgcgaacctctactcctttgtcggttcaatggaatggagaggccagcagtatcccctgtcacccctacagcttcttctccgggactcaaaactacggaacacagactacatatatggggctgtcatcttcacaggtcatgatacaaaagtgatgcaaaatgcaacagatccaccatctaaaagaagtaagattgagaagaaaatggatcaaattatttacgttctgatgtcttctctactcatgattgcattacttggttccatcttctttgggatctggaccaaagaggacgtaagagatggtgggctcaaacggtggtatcttcggccagatgctactactatattctatgatccaaagagagcagctctggcatctttctttcatttgttgacggccttgatgctgtacagctacttcatacccatttctttgtatatatccattgagatagtcaagatcttgcaagctctatttatcaaccaggatattgaaatgtatcatgaagaatcagataagccaactcatgctcgtacttcgaatctaaatgaagaactaggtatggttgatacaattctatccgataagactggaacattaacatgcaacatgatggagttcatcaagtgttcaattgctggcacagcctatggtaagggcgtcactgaagttgagagagctatggctatgaggaaaggtgacagtttagatgatgacattgaaaatggagactacaaagacaaaaaaaatcacaacagtcccaatgttaaagggttcaatttcaaggatccacgaataatggatgggaattggattcatgagcctaacaaagatatgataagagattttttccggctcctagccatctgccacacatgcattgctgaaatagacgaaaatgagaaggtttcatacgaagctgagtcccctgatgaagctgcatttgttattgcggcaagagaactaggg

SEQ ID NO: 187883 - DNA, 418 bp, Zea Mays
gtggcttcggttgtgaagaatttctctgtctcagtccagtttcaggatgagtctggttcttcctggtggttcacaggtgtgtatggacctcaccaggatatttttaagcaggagtttatccatgaattgagaacggttcgtgatgaatgtgtggggccatggtttttatgtggggattttaatatgatcctccgggaggaagataagaataattccaacattaataggctaatgatgggtcgcttcagggggtttgtcaattctatggagctaaaagagattcctttgattggcagaagattcacttggtcaaatcagagggaggtgcctactcttgtgaaattagatcatgttttctgcactgcggactgggaggatttttttccagattgttctcttcacagtaatgctactgctg

SEQ ID NO: 187884 - DNA, 567 bp, Zea Mays
ggggggaggcagtcacgactcgcccgaggccaccctcagacgggagacacaatcacgactcgtctgaggccaagcctgagcgagacaggcaaccacgactcgcctgaggccattctcgggcgagataggcagtaacgactcgctcgaggccaacccccaacgggagacgcagtcacgactcaaccgagggcaagccctggctagacagtcagtcacgactcgcctgaggccaccctcgagtgggacatgtagtcatgactcgccaaagggcaacctctagcgggagacgtagtcacgactcgtccgtggccatcctcaggtgggacagatagtcacaactcgcctgaggccatccacgggcgggacaggcagtaatgactcgctcgaggccatctgcgagtgggatagacagtcacgactggcccaaggccaacctccggcaagacaagtagtcacaactcgcccgaggccatcctccggtgggatacgcagtcatgactcgctcgagaccactctcgggcgggagaggctgtcaaaaatcgcccaaggccaagcccggcgggagac

SEQ ID NO: 187885 - DNA, 307 bp, Zea Mays
aagaaaatctattcatttcacacgtctccatctcgttgagcatttaattatttttgggcaggaaagaacacataccagagatgaggttgttggtttaatttgattctaagtcctaatgaagaagattgtgagctccggcccggcggtgccgccctcggggttgtgcatgtagtacgtctcggagtccttggaaccgacgaggcggtcgaaatgcgcgcgcatgtaggtgagctcgccgtcggacgggtgggacatatcggacggcagcacgccggcgcccatggacgtggagtggagcatccgcatc

SEQ ID NO: 187886 - DNA, 590 bp, Zea Mays
gaagatttaattcagcgaagtagtgtgaaaattcgtatccaagcgaagaaatctgcactgaaacaaacccaaaatcagaagtccagcactgtcccctacctgacccatagaaagcgatatgagccaccactcacctcggctccacacacgagggaattttcaactgtcgaagaaaatagcgcttgatggcgcaataacgaactcgtggagaacgacagcaggtgcaagaacctaatctcccaaatactttagatccacgaagagatgcaagaaccaagaccctaaacatagacgcaagaaccaagaaccctaaacgccctaggtgcgatagaaccagatagggaggaagaagaataccagtgagaagatgaccgccagaggagatccacgccggagaggaatcccgtgtcttagccactgtcgctgtcaccgtcgccgcttgccttgggttgggatggtcggttttgagcggtagagaggggagtgggaaggcacacccggtgggtgctcgtagccggcgaagaccacggctgcaagacggaggtggcggacgcggcggcgaactcggatttgacgttgctgtggcaggg

SEQ ID NO: 187887 - DNA, 327 bp, Zea Mays
gaggctctgctcctagcacatgcaagcatcgagctttctccagtggcaccggccgcagcggcactccacctttatgagtcgaaatcacgcgctttcctcggcgacggctccagcaaagacatgatcgaaggatggtgcctcgacaccggcgccacgcatcacatgaccgaccgacgggagttcttcaccgagcttgactctagcgtccgaggctccatcaagtttggggacgcctctggcgtagaaatcaagggcgccgactcagtcgtcttcaccgtcgcgtctggtgagcataggcttctcaccggagtctactacatccccgcg

SEQ ID NO: 187888 - DNA, 419 bp, Zea Mays
gagatgcgggtatgtacggagcgacacggaggacaggaacagcaacgcatttggcgaggctgacgtcatgctgaccgccggcgcaaggatggagtaggtggctgcagcgggtgtggccgtggtggagttgggagaggggggcacaaaagataagagggagtgggcggagggataggaagggtagccggatggattggctgttggtagaagatcggatggctgtcaacaaagagactgacgtggacacgctggttggcccgttttgcgtcccactttgatatatagaaatatgtacctgcgattgcggtattgcctcaaaactattacatgttgcattagagtctccactattgtctgaaatattaaaattgacaacttcaaatgcagtttattctactgattcaatcaacatgttaaat

SEQ ID NO: 187889 - DNA, 879 bp, Zea Mays
cagcagtttatgtaagactgtgggggagcaaagctaccacccttctgaggaaaatatgacatttggtcgacaccaacttttgaaggatgatttgaagaaagcagctataagtgcaagtgatatatcagaatcatttgataattttccatattatcttaggtatgtactcgtattccagctgctctttgttatatcaatacattattaattgtttatggtgcagtttgttatgtaacactataacgtttgaatttgcaacaacacttcttttgttaacataataacacgacataattacaatgatgcaatactactgattacttaagagtaatactgttgtcaagctgtatttattttgattctttatactaaaatttttcatttcattttccatcctgcatccaacggcggctgtaattcttatctctaaataattagtttaactagtaaaatgaatgggtgccactgaatagaactggtaaatactgattacccaagtatgtcactcttgaagctaatgacctgttgattgattggtctcttgtagttatgaactatctcttattagcttctcatccttgcagtgaaaataccaaaaatgttcttttgtcatcatcgtatgtaaatctatgctgcaaggaatccactaagtggacaaaggatatatcttctctttgtaaaagggtactattatctggcccaccaggtatttgctcttgctttatatgatcactacattgtcaatttaaaaattctgttgctgcatgcatataaaaataacttgccttcttatagggtctgagatctaccaagaattactggttaaggcacttaccaaatcctttggtgctaagctgcttgtcatagattattcgctgc

SEQ ID NO: 187890 - DNA, 312 bp, Zea Mays
aactcatggctgcaactactggatatgtgacggcatcatacatgtacaacatgggcagagagaggttgaccgcgacattggattgtggaaagctgttgaagctctgcagcgtgagatgcgaatggatgtggattactaccaccaccatgaccaccaagatatgcctactcacattgtcaagtgtgccgacttcagtccacgctggacttctccaacgtaccgtgtcgttcagatccttgagagggccacgcctgtcagatgcagtcttgatcattatgacaaacttggtgtcctcaagctatcctactgcac

SEQ ID NO: 187891 - DNA, 478 bp, Zea Mays
gccatgtggaggctcaagcagttcatccccaaggagcagcccagccccagcggcctcgagggtcggacggtcgatgttggcaatgtcaaggtgcacgtccgagaggccattgctgagggtgggttctcatctgtctatgctgctcgagacctggtaaacccagcgaagcagtacgccctcaagcgcgtgattgtccaggacgaggagtcgctgaacctggtccagaaggagatcacggtgatgcggtcgctcaaggggcaccctaatgtggtcacactggttgcacacgccatactggacatgggacggatgagggaggcactgctgctcatggagttctgcgggaagtcactggtttctgtgttggagggcagaggagcaggttactttgatgaggagaaggtggcgctgatcttccgggatgtttgcaatgctgtctttgcgatgcattgccagacgccacctcttgctcacaggt

SEQ ID NO: 187892 - DNA, 394 bp, Zea Mays
atgagctccctctcgtaggttgccagcttaagatggcaggctgcaaacggcttgctgaagtaggcgaggggtcccatgccctaatgaaggacggcaccgaaccccgcacctgacgcgtcacagtcgacgacgaagagcttggagaagtccgacatctagaggaatcccgagccggcgccatagttgacggcgtagcccacatggcagcctgacaggcgctgatcaagcacgaatttcagtctgtaatgctcagtgcgaacagaaaaatgacgcccccacaagtacgagcgccagtgacggacgacctgcacgaggccgatgagctccctctcgtaggctgccaacttaagatggcaggctgcaaacggcttgctgaagtaggcgaggggtccca

SEQ ID NO: 187893 - DNA, 534 bp, Zea Mays
gtccgctttcctcgacctatatcttccttttagatgtgttggcacagttaccttgatagcggttccgtctaatgcacccaaacaattctacaaatatgtcataaaagaaatatcacttcaatgtgtctatttatagttgaagaaaaaccttaaagttttatgtatttaccttaaagtttttccaagtattatctgtgctattctctggaattgggtcaggggtcttaagaagcaaatgttgcaactttagaatagctagaaggcataagttgaactgcctactaactgtctcaccgcttcgaaagaaaaaccttccaattgttcggttcttcaaatgatgagccaacgtatacaaaaaatgagccactatctcctctagggtcatattgcgtgtggcctttagcccaccaacatctctaagcatctcacacaaaataaagaaagttcttctatccatacgaagctcactaatacattttctatcactctcacgaatgagttcatttaaattctccatcctacgctctctatttc

SEQ ID NO: 187894 - DNA, 459 bp, Zea Mays
gcccactctaactccccatccgcgcggcccaggttcaattccaccgtgcctacgcgccttgggtcgctgccttgtggggtcaagccgtcaggatggtctccctcctctggttgtggagcttgggtcgtaacgactgggaggaaagtccgcctggactgcgcgcccgggcttgtcgccatcgtgcgatgcctgtacctctgtcgcggtgggccccactcgtcatgcttatgtccctcaacaaaccgctcggcatcccgggattttcgagctccacggctcaaccacccgcgcgattcacagttgggctcggccgggatcttcgctgcggactccgcgactccctgggcggccgtggataaatagcgtgcccgtggacccttctccccgcctacccagcatctcctccacttattgcacgaagccgcaaccacggcgtcaactccgcgctcccccgcctcg

SEQ ID NO: 187895 - DNA, 317 bp, Zea Mays
taatgtggaacaactgacggatcagcgcttcatgttgatcccgcccaaagcgatcatgcacctgagtacagaattccatccacgaccagaagggtatgcggcgcccaacggattgcagccatcccttggcgcgcccagaaaaatgcatagtagcaacccgtatccacatgcgaggatcaacgtcatacatatcaaagtaattttcacataaggacttccacaattgcgagttatccccgtcgaacgaaggaaaattgagacgtggcaggttgccactgcccccatgaactccgtcacgacgaccgctcccatctaca

SEQ ID NO: 187896 - DNA, 289 bp, Zea Mays
ccctcaccgttgacccactcctcggaccttgttctgcccaaaccaaaatgtgtccgtagaccctggtgaacccgtgaagctttacccagccccaatttggccatcctcatcgctgtttgatcggaacacgttcatccccttgcccgtccgctcggacaccatgaaccgattgatccagtgcccccttggtgaaattaatggaggggaaatgctcgggcttggtccaatttgatgtccgccgctcgggaaccctagccgttgccccaatcggccggcgtaggtgctcgcc

SEQ ID NO: 187897 - DNA, 787 bp, Zea Mays
gtacatgctctctcgggcatctgttccacgccatgccattattaaaaagcttgcaggagaggatattgcacatttagatgaccttattgcagttctttcaaaattgtctaggggaacacgagtgcctctagaatacgtcaaataccctgaccgtcacaggaacaaagtaagatttgagtagctatttatcacaataatcaatgccttatctcctgcacatcccagttcaaaatttgagttcagtttcataaataaactaaccatttttatttacgtgactagtctgtactggtgacaatagatcaacatgaatggtatgcgtcacctcagttatatactcgaaatgatgcaactggcttgtggactggaaaaccagctataccaccagaatctccgtttttagctctagctcatcatgctagtcatgtggacacaaactcaaacgctgtttcatctttatccgaatctagtcctatggatctcaagtgccagtatgattctgagaacctggcagacggatgcatcaaaatgcaaactgatgatgagattgttgtggatggatctcattctaacgaagattctgttattgagaaaaaaaggcgacgtgtggtcgaggagatagctgccgacggaactttaccatcttatggagatctagaggatgtaaaaggtggttctttgaggcatccttctaatgcagatggatctgaacttgctcgaacaatatcaagcaatgcatcattggcagaacaagtaattgaaccagcccttgtgatgtttgaggtga

SEQ ID NO: 187898 - DNA, 448 bp, Zea Mays
agggagcatgcatgtgaagacaaacttgatgaacagcataggcaatatcaggtcgggtgaatgtcagccattttagggcaccagcaagactgtggaagcctgaagcgtcggtcaccagctcaccatctgcagaggcaaccttcgggttgatgtcaacaggtgtcaaacaaggcttgcaatctgacatccctacgcaatcaagaagctcaaccatgtactacttctgagagagaagaccatctcttgagggttgaacatgcataccaaggaagtgatgcagaacaccgagatccttcatggcaaactcctgctgcagggccgagatagtccggcgtaggagtgcagacgatgaagcggcgaggatgatgtcgtcgacatatagcagcaaataggcagtgtcagaaccacgatggaagacaaaaagtgaagtgtctgacttggcttcaac

SEQ ID NO: 187899 - DNA, 813 bp, Zea Mays
aatcacctggtacgtgactgtcgttcaaggacaagatgcttcaagtgctgtgggcttggacataaggcatcccggtgctcggaggctccagatcgtgctcagatttccacagctgttcccaagcagtcggtgtggtcacgtcttggtggtgtcgccccaggcaaagcttctgtctggtcccgtcttcgaaagcagcaacctcctgggaacttgcagtctgtctggagcagactttcccctccgtcttctggtggtttgtgcctgacgaagcgatctattcaacctgcagcgcctcggaaggtttggcgtaggaagacttcggtggctgcaacttcaggcagccagtatttgtctccagaaatggtttctgaccttgctgggggtgctgatgccgtcaatattaggggccgctctcgccggcgtcactctcgcaagagacggaaaccacccacccctcccagagatgatgggagcaggatttgtttgcagccccatctgccttcttcaggactcgtacccccatgtttgctaggttggagccacgccatgactgttgccgaggaagatcttcgtttggcagtggttgtctcggtgatcagcaaccgtgactcagtttctgaattcgaagtggcatccctgctctcaccaagattggaaatcactgaagactcccttgttctccgtcgcttatcaccaagtagttttctgctggttctcccgtctgaagacatggctcaaaggctcgacacgaggtggtccattcagcgggctgcaactttcacagtggtctgcaagcgatggtctagatttttc

SEQ ID NO: 187900 - DNA, 332 bp, Zea Mays
acagccgtaatgcgaagcttccaggagcagcggatgcgtacgccagctgcaggtggagagacacctttacgcctaccgttgctatatgatcggacgatgaatattaaataagatgacgtggacaacgtgatagagcctgttttaaacccgctttcatatatagacgatttgtgcgggcagggcaggggtacaggaattggagttccacccaagcgccagaggatgtcgtggagttcacgggtgtcgttgacggggtcgtgagtctacgagagagaaggggatgggggtgcagtacgaggcggcgacgatgtgaggatgggagagagaacata

SEQ ID NO: 187901 - DNA, 304 bp, Zea Mays
tcgagagctaaaggccggacagctgctggaacagctgctcgcgttcactgttgcgcggcggggaagccgagagctaaaggccgggccccacctccctcgggcccttgtgcagatgcgcagaggttgcgtcccctaattcgtttgtcaccaaactttgcacccgcctcgccgtacccgtccgaaaccctagtctacctcggcggcggcgggccctccggcgatggaggtggaggaaccgctcccaacgtccaagaacccccgccgtgctcggcgccgggacctcaacgcactggtcagactcacc

SEQ ID NO: 187902 - DNA, 1156 bp, Zea Mays
gccaagcggaaccgtcggctgcctcagccggcgtcggcggtagaaagggcgtcacctcctgggcggatactagtagtagcagccgcggaaaagggaagacgaccgagctgccgatgcgaagtacagctgggacgagcttgggaccagtagggaagagcgctgtaaaaggtaacaattatgtatgctgttttttcttttccaagctagtttagtttagctatcaagtatgggcctggaagctggctattgattttgtcaaagctaggagttaattttttgctgttttgagcttgggaagggatgggggaaaacatgtgagcaaacaatagttgttagttactccctcaaatgcttactaagatgctatgagttgagattgcacaattcgtcttactccgctgtagccgtttacacttgaaacacgtgcaaacgaagcaagtttctagctgtttaaagcgaaatcagcaagctaggagggttatagtttataagtcgagttagcaagtgcttgctctttttgttgcttgaacgcaaggcatttctaatgagcaggctcataaacattgtttctatatatgcatcttattgtatatatgcttcattaagggtacgtttgatttctaaaaatattagtcaaatgctacttctgcagcagagatattgtttgtgtatgcgcatagtaatttctccaattccccttctttttgtctgttatgaaaattatttttgacaactaattggtgggctctccttttggagctttgttctatttttctctctccacaaccttttgtgatacatgggctaatccatctcattcacagctaaacctagtgcacagcggaaccattctggagatttgaggacacctactcacatacctgaggctgcggtagtgatatttctatttttcttcttccctatgactttcatttaagtaaacaatggctaatccatccttacatctttttgcttgcatttttagtgtgcatatgatccgtgtgagacaccaaaggaatccgagtccccacgctttaaagccattatgcaggctactagtgcaccgaggaagagactccctgcagatataaaaagtttttcacacgagctgaactccaaaggggtgcgcccatttccttttttgaaacctcggggc

SEQ ID NO: 187903 - DNA, 389 bp, Zea Mays
gaggttgtcgaattcgcgaccattgtcacattggacaccctggatggtgacaccaaattgggtgcgaacataagcgaaaaaatttgtaagggtggaaaaggtgttaatacttaaggcgcaagggaaacgtccacaagtagtgtgaacagtcgtccaaaatgtccagataatatttatgaccggaaacactagtgattggtgaagtccaaagatcacaatgtattaattgaaaattgcgagtggcatgtgatgaagaagaatggaaaggtagacgaacgtgacgtcctagctggcatgcatggcatatgggggtgtttttattcgggggtacaagggatgacagaagactgagctagctgagtgaggaccgcagatcctggatgtccaag

SEQ ID NO: 187904 - DNA, 482 bp, Zea Mays
gcaacaaggccatggtgcatgtcagcttctaccgcaacagtaagcccgcgccgatgatctcctcgccctacttgaccttggtatggtcagggcttattgatggatgttgggagcatctaaagctttattgcagtttaagtccccatatgtgccatagttgtgaggtgaggtgaatggttttaatggcacgacggaattcagtggatttttgtgtttccactgcttttgctaacagtcgattcgaggtttgtagggcgttgatcttgaactaattcatgggagtgaatataattggtgattagctttgtctaagatgagagagtccaattttccttgtttgcccatgtggagtaagcatgtccgagatgagcgagttcaattttcttgtttgcccatgtggaattaacaaatgttatatgaattggttggtctgtatacattgtcagtgttcctttaaggcttgtgtaaattcattagaaatt

SEQ ID NO: 187905 - DNA, 432 bp, Zea Mays
gcctataacaaccactgccactgtccctatctagatcaagcaccgctgatgtccctccctcacacacacacaaaataataataactagcctcctaggtgatgacttaagaaccatgatgcaaacagtaagatggtattcataaagttaactatcttaaacacaacctatattagccatggcgataacttagctgtactaacacagtgcaaatctagagttccaattttcatggaaatcattagggcttgtttcgatacagtatccaccacaacccacttgtgtttggagtggattggagagacaagggtgtcaagaaaagcaattcagagaggcatcatgggcaagagatgtgagaggagtcaagatatatgcatgagatgggaggagaaacgcacatcaggagtaaattaggacactgttaggtacccatc

SEQ ID NO: 187906 - DNA, 445 bp, Zea Mays
ggtaaatgcaaggtaaattggctccgttccgcaaggccaaaagagtgcggaggtttgggtatccttcatttaaccaaatttgcaagggccctgcgtatgcgttggctgtggcaagaatgggcttcatcaactaggttctcgacaaccttggaactcccttgcacgacaaaagatcggcagctcttcgcagcaacaacatcgatttcagtgggagacgggacaaaggtgtccttgtggaatgatgcgtgggtgcaagggttaagaccgaaggacattgcgcctctcattttcaatgtgtcccgaagaaagaacagatctttgagtgaagcgttgtggaatcatacttggattagggacctcaacctgttttctgctgaggtgacagaacaacacattgtggagtactgtaggctttggtcaattttgcgaagagtatccttgcaac

SEQ ID NO: 187907 - DNA, 284 bp, Zea Mays
ttaaggagtatagagacgatatagtaggtgacacgaatgatgacatggcaggtgatgtggataggtgacatggcaggtgatgtggaaaaatgacgtggcaggtgatgtggaaaggtgacgtgtcagctgaactggcgagtgacacattttatagtaatgccaaaacgcgtgttaacaaaagtagaaacaatactatagccacatttgtattgtgtgcctacgcatatcaatacgttatatagtaacgtcaaagtgtgtattaagacctgtagaaacgattttgt

SEQ ID NO: 187908 - DNA, 753 bp, Zea Mays
aaacttctttgcggctgaagaacctgaagcaaatttgtgacaggtgccaaggtccttgtttttcactatagctgtcatcaaaaggtcctcatcattgatccgcaactcgcgaggtcttttcttcatgtacttcaaccaatccttcgttttcattttggcagtgcctctctcgcagatttgtgagtcacagattagataagttcccagaacatcatgggataattcaacaggtgcagtatttcctgttggctcactctgtgaatcctcataaaattctccatgggatgggactatctttttccagaccttgtcatcatggcagaatgttgtggcatctgactgtgactcccttgtagtacaatgggtatctgagaatgtactgtaatccttaagttgcttgaccactgaagagaggagcatgtcacacttgctgctttgatcatctttatctagcttttctgattttgtttcagctttcatatcgtcttttagtgtgctaacacctgaatacataatgtgttcctcaaaggcattagtgtctcctgggtcagccatgtccatagttgctacattggtctcgtccagtccatctgcactaatatcaaatattcttttcggtttcttgcttgacatttttacagagctattaagagtttttggttgagcataagtttgtcttccatcattacttgcatcgatgtgatgttttgtctcgtcacttgcattgtaattcagactctcattgcaggaaag

SEQ ID NO: 187909 - DNA, 358 bp, Zea Mays
gcaattttttagtaaatatgagatgatattagagaacaaatacaaaaaggagtggcaagcagatgaagaatcttcccataggtctccattgactgtaacaaaattttacatggaagagcagctggctaaagcctatacaataaacatgttcagaaaatttcaagatgagttgaaagcaacaatgtattgcgatggtatgccaattaaagttgatggccgacttgttacttttgaagtgaaagaatgctcatacatggaagatggaaaggacacagagagcaggacctatgaagtttacttttgtaaagaagaacccaaagttgaaattgagtgtgaatgtggtttcgttcagttcact

SEQ ID NO: 187910 - DNA, 509 bp, Zea Mays
gttcgcctaagggcggcctgctgttgttggaagacgtcgtctgctgggccaccagatctgcgatggccctggtattggcctcggcagtggactgcaatgacttcacgatggcagctaatgcagccacggtggttttgagttcatcggagtcgcccatctcgacggagtatgatgccgcggaggaagtaggcgaagacggcgtggtggctggcggtgagggtggcgtggcggctgatggcagaatcggagagcggcgtgaggaggaagccctggatcgcgataccaggttgtcaagggttgtaatgcccaagtgagcaggtccccgactacggagatcgtagtcgtggtccgttgtcgccggctgggttatgccccctagccgtcctcgtcgatcaggctgtgttgccctgatcgccggctttgggtagagaggaagaagatagaatagagatgacaatattcttaattaatttccaccatccggtctcacggtatatatggcctatggc

SEQ ID NO: 187911 - DNA, 452 bp, Zea Mays
aaattgggcctaaatactggctgtcagacactctgaataggtattctccatggtacagtgcactgattaggacgacagcgcgggcagctcgacgccggtgacccctcgccgtgattcacgccaccgctgtaggattcacgtcgccgatgacccgataaggccgccaggtaaaagccatcccctggggataactccggtgactcaccgtgactgcccttctgctttgcggctgtagccgataagctcaccgtcgaccgccgcctcccggccgtgcgccgcgtggctcaacccttccaccgcgtcgctgtaactcgctactgctgtcaaatcaacgccggtgaggttgccacggcgtaggacactaattcgcgtgcgccagtgttcttctccacctccgaccgccgcgcgtcttgctcgaaattcgcggccaccacccgctagcactataaatt

SEQ ID NO: 187912 - DNA, 535 bp, Zea Mays
cagatgtaacaactctggtccgttgtaccccctgcggctcccgtcttctactctccttgcgtctaccttatggcatcaacgacttggacatcccggtcacgccgttttatctcatctagcgcagtcatccgcaattccttgtaataaaaatactagtactcatccatgtcatgcttgtcaactcggtcaacatgtccgtctaccatttcctacctcttccttccgcgctacctgtaactttcagttaattcactgcgacctttggacatctcccatcaccagtgtgtctggccacaaatactatcttgttattttggatgactactcccactatttatggacatttcctttacgcctcaaatctgacaccctctccaccctaaccaatttctttgcctacgttcgtacgcagttcggtgtcaccatccagggcatccagtgcgacaatggttgcgaattcgacaacctccaagcccgcaacttctcccatggagtccatctgcgcatgtcttgcccctacacttcagctcaaaat

SEQ ID NO: 187913 - DNA, 499 bp, Zea Mays
cctacgctctggagttttagtgcgaatcgttgccagtttcagtcaacttttgatggagcccaggtgttgagcgccaatttgggagttccagctgacgctgcagtctgcattcttctaaggccatcagtgaggaattttcgttccttggtggcagatgggttcctccagctctaaagtggacaatgaggagcccgtgaggcgctccaaggacaggaggcggctcatgaagcagctggtgcgccgccgcccagagcttgcagctgcgcacattgcatacctgcacgccctccgcaacacaggagccactctccggcaatttgtggagctggagtctgctttgtcacagcagcctccggtaggccttgcggcgccgccctcgcctactccacagtcgctgccgcagccgcagcccccgccacctcctgaaccctcactgccaccctcgccacaccccccgccgcctctgccttttagtccagtaaccaccataagaaagatg

SEQ ID NO: 187914 - DNA, 470 bp, Zea Mays
agagagtcgaccaagataaattgtccagcaaggatatctttgaagttaaggcaagatagatggcttcatattgatgatgctaagctcgagcacaaccatccatacaaccagtccactacatcacttattaattgttataaaaaactaacagatgccaagaatggggtatctgcctcacgattgaagggtcgcaggaacattccagctgaaaaagagcaagggaacttcacggagataggaaggcttaaatttggggaaggagacgatgaatatatccagaagttttttgggaatatgcagaacaagaatccttacttcttctacttagtagatttggataatcagggacgtttgaggaacttattctggagtgatgctaggtcacgggcagcgaatgattactttggtcatgatgttgtttactttgacacctcatacttgacagagaaatatgatttgccacttgtttt

SEQ ID NO: 187915 - DNA, 795 bp, Zea Mays
ctgatgttccaggcctcggttcccgctcgcttctaggccgaggccctgcacacagccacctatctgctcaatcgccttcccaccaaggcaattagtgctcccactccgcactttgctctctttggtactcgtccctcctatgatcaccttcgtgtcttcgggtgtgcttgctatcccaacctctcgaccactgctccccacaagtttgcaccccgctcgtctcgttgtgacttccatgggtactctcctgatcataagaggtatcaatgttatgatctctcctctcgtcttgtcattatctctcgccatgtccttttcgataagtcctgcttcactttcgctaccactgcttccacctcgagctctgacttggcaagtttatttgatgctgaccttgtggctcctcctgtccagccacctttgtttctcccccctgcaggtcactcaccaaccgccccgttgtcgccgctcatgcatcctggggtacatgaggcctcttcggccccgtctgtcgtgccccgcacggccccggtctctcctgctgtccctcctatggccccagactcccctgttgcgccacctgtggctgcagagccctctgctgtgccgcgcacggatgcggtgctcccacctcgcccaggcctggaccccccttgctttgtgcgcgtctaccaacgatgcccgcggatcgagctaccaccttctccgacagcgcctccccctccgttggtgcctcgccgcttcgtcgagcccatgcacgtctactagcgtcgtgcttgtgagggtgcaccgacc

SEQ ID NO: 187916 - DNA, 868 bp, Zea Mays
attcaagaggctgggttatggacttgtcgagtgtgagaaagtaaaattatattttgtccttttcaaattattggacttttccccgtttcatgctgatgacctatatccaacttaccatcagaatttatgacacagatctttgttccagtgcatagaaatgcacattggtgtttggcactaataaacatgaaggataaaacattgcagtatcttgaatctcttgttggttggggccgtgatgtactggacatactggtaggcttatctgaccaaactgaaagttacactattcttagactagagtgcctgaattgcatggggttgcctttgcaaattattcatgtaatacttgtatatgttttttttgaaaggtatatataattgatattcattatcaagaaagcaaaattacaaagtacgatgttcttcataaaaggacccagcacaaaattaaagggcctgcaagatttctctattgttggattgaagcactacagttaaattttctgtctggcaggctagatacatcgtggatgaattgaaggacaagagtaacatagaggtagaacctagttcgtggactgtagtgtcagagtctttgcccttgcagcagaacgggtatgccttccttctagtactaatcaccataaaatccagcatgtggcgctgattgatttgattaaggaaggaattcatataaagtattaaattccagtcaacgcattactatttttcaacgtccaagtgttttctattttgaatccgtgttgtgcacattaatgggcaagcatgagactatctttgacattattctctcgttataggtgggactgtggcatgtttatgcttaaatacattgatttccata

SEQ ID NO: 187917 - DNA, 711 bp, Zea Mays
ggcgccacggtagcgagtttctagaaccttcccacgccctgcgcccctttgctgtctcatacctgtcttaaaccctagctagtttctaggaccttcccacgccctgcgcccctttgctgtctcaaacctaccttaaacccttgttagtttctagaaccttccagacctccagttcccgacctcggcgccatggacctggacccagaggggatcttccgcgacgacagcgatgaagacgaagacagtgtccaggttcgtaccggctcttagctgcgtcctctctccatattctccttctattggatcagtgttttgaagaaaaaaactaatttgagtatttgaccatgccgcggcactgcatttttcgcgggtgctggattgctttctcggggaaccaggagagggaggcgaacaaggagatggttgtctaccttgtcgacgcctcgcccaaaatgttcacccctgccaccacccaggtgaggcacaagtactctagccacttaattcgacaatctgggtaccatttttatgtctctttatctgggtatcaattttttatgtctctattgggaaattaagacctgtgaagttgcatcattaagtttgttctagatttttgctactaaataacaacgtaaaatttcttttcaggacaatgaaaagcaggagacacatttccataccattgttaactgcatcacagagtctctg

SEQ ID NO: 187918 - DNA, 442 bp, Zea Mays
tcctgctgcgccacacccttcttgctgcgccaccgtttctccctcccaggtcgccatgactgaggccaccatccatgctaccgctgtgttcgtcgctccctatgcgacgatcaacgccaagaatcacatcccggtaacccttgagttaccttgagctggcaaagcccaacttcaatcagtgggaaccattgttcacctctctatgggaaattcgccctcctctcacacatcgacggactgcaggaagcctaccccactgatcctgcttggggcatcgcagatgcctacgtccacagctggctcctcggctctgctgggccagatgtcgtcggcctcgtcgcggcaccaaactagactgcgcgtgagctctgggtcgccatcaagcgcattttcgaggccaacctaggcagtggtggcggccgctggaagaagggcaagggcg

SEQ ID NO: 187919 - DNA, 628 bp, Zea Mays
accgtgatgcataaccaggaaaacaacaaatataggagtcgtacctatggcgagggcaatggcgatgttgtccagggtatcgctgagagctcggtggaaagaactattctccgttgatgaactcgcacgcgctccacgtgaacgacgactagccacggccgcccaccgagatagaacaatggcatgactaaagtttccctcgcagctacaccttcctggcaatggtggcaggtgatgtcgagctctctatgtcttcggatatggcgaggctctcagcgttctcgtgatcggcccagatggagaacctgaggtacggggttgggttttatattccccacggccaggggagatctgccctgggacgttacaacagacggcaatctcggcggaggttgttttagtggtcaagcgtgcgcggtgttcggacttcggcatggtttgttacgataaggaaggaagacacggttctgaacgagcaaggcgcagagcttcgtacgtgatcctgtggtccacatgtcggcgacggcgactacctagaagtagacgtgtgcatggaaatacgactgcatgtgttgcttgcttgatgtcacacttgtgtcatgctgacatcatgtgcggcaagaggatt

SEQ ID NO: 187920 - DNA, 598 bp, Zea Mays
catctgtagcagacaaatattcggttcagcaatgtttcagttcgcatgcatacatcacaatataacccattttctttagaggagattggcagaagaaaacttccagattttttatccgatgatattttgctgttggatgactttgatgaatcattagcctgtggcaatgaagtccgttgcccaacccttgaagatccagcagcaagtttgggagaactctacacgcaataaaaagtaagatccctaatatctacaagtactaatttcacaactgccaaatcaaaactcagaaacaaacctttggtgcatcctcctttgcatcttttctcacggttgagttccgtgaggaggatgcaatagcagctgcagctgcagctagtacagcttgggcttccttatgtctcttttcttttctcccacgtttcttagcttctctgacatcacgaaggaactgattcacaaaaataagatcccattttcttttactgagggcatccagctcgcgagagagattttggacaaccattgctatcaatttttctgcatgaaagaagagatttcaagaaattaattaaatgacagctgcactcagggaaag

SEQ ID NO: 187921 - DNA, 416 bp, Zea Mays
cggtccgagatagcttacgtacataatagttgcagcaaaatcacatatatgaagctaaatcgtagcaataggaaagggggagggggcaatcggtccgagatagcttaattcaatcggtccgagatagcttaattcaatcggtccgagatagcttacgtacataatagttgcagcaaaatcacatatatgaagctaaatcgtagcaataggaaagggggagggggcaagcagtaccagttggcaggtcatcggccccgacccgcggaagattggctcaagcagcaggcagcggcgaaacggattagtttgcgacacaattattcctcttctcgtttactactccgggtaaatgaaagggcgcagcgcagtactatagtacatgaggggaaggggaagacagggaagcaggtaatggc

SEQ ID NO: 187922 - DNA, 314 bp, Zea Mays
tgactggagggaggctggcggcggggggctggaagacgggacctggcaggtggcatgaaggccgacagtggaggacggctggcatggaggtgggcgatgcctgctgcggagagcagggaggtggggaagacgggactggggggcggtcacaggggaggcgccgcggaaggaggcgtagaggacaggggtgggggccagaggggccatgtgggggaaaatcatttcgcttacaatataagcgctttccaggccgcgtactagaaaatcgggatggacgttgtattttggatggtgggctaagcggcttgagaatt

SEQ ID NO: 187923 - DNA, 353 bp, Zea Mays
atcgccctgagatttttcctgaagccaccgtcgtctagcctggagatttttctcactgctcgatgccactccttatcccttcatacaccgtactccatcatactcatccactcacagccgctagcttcgtcaaatttcttggcaccgtggcattccctgatgaatccaccgcttatttctccatgttcatttatcctctcctcgcgcagccaagaccaggacgatcgtcctcaccctctcggctctctgcccgtgtccgtcattgcctgggcaaccagctctgttgcagcaagcgctctctcctgccgagcttcacacctcccatggcgcccagctgctttcctctctctctt

SEQ ID NO: 187924 - DNA, 316 bp, Zea Mays
gtgaaggagtatagaagggtaaatggattgtgctacacttgtggagagaaatttgagccaggtcatcaagctaaatgccctaagagggtgcctcaacagctgaatgtgattaccaaagaagatttggagatggtgctttctgaggaaatgttggaaagggtagagcaagagaaagggcaggaggaagagttgcataaactgtccttacatgtcgtgagtggagctgacacttcagagtgcatcatattcagagccttgatccagaatcagttgatgcttatgctggtagactctggaagttccactagtttcatca

SEQ ID NO: 187925 - DNA, 382 bp, Zea Mays
ggcgggagcacaaggaccaccaccatcacaaggtggagtcggaggacacactgtggaagaagggcatcatcctcggggagaagtgcaggatcccgggggagcgggaggcggagtgcgccgaccccgacgacgacgacatcgccgccgccaacttccgccggtccagctactcacggcccgtgtcgcggtcaagctcgttcgccatgcaccagccgcagcacgacgcccccgggcccgccttgcacgcctcggatacttgacagcccgagagtaggtgtacgtgtaggcgtcaaaggggagaatcggcgaaggatgctactatgctagtgtggtgtgaagtgcattcagataatcaggttcagatgtttgctctataattttc

SEQ ID NO: 187926 - DNA, 551 bp, Zea Mays
ttatcagtgagacatgacatgtattcattcgactcaacacagacagatcgaaaaaaaccattttaacagtattaccagaactttatcagtatgcccagataactgatggggtatgattggatattgaactggagtggagatccaacgacgtggaattctacaataccattctaggtaacaattccttgcatgggtagcatctcaagtccttgtttcctggcgcttaacaacagagatgagcctgttctcccattccttaataatgtagttatcatggtaagtaggccaatgctgatcagctttaccctgcactgtaacaggttcgtcaatgttgattagctttaccctgcattgtaacacgttcaacaacctcatggctcgttcggtacaatgcgtttcagttccaacctgaacgattccaaggcaagtattcagtgaattcggttggttcgctcaaacctggtgaccaatgcatccggttagtttcaatcctgttcgtttcaggtaggaaacagatcaatttgagacattctctcctctgtcatttcaaa

SEQ ID NO: 187927 - DNA, 420 bp, Zea Mays
ccgagctaggctgcgacggccatggcgagctgggccatggagatagcggagcaggggccacgacgcaaaagagcgagcagagggcttgggcaccggcagagaggagcacgcggctgagctgaagctagcgcgcgcagggagatggaatccgagcgcagggcgagctctgggaaggtccgcgcgacgcagggggaaagtgctggaggtggatgacgcgcaggggcgagctgtaggcaccgagcagagtgacggcagcaacttgggcgagatccgtactgggcgtagggagacacgcaaggtcgacgaggttggccggggtgccatgggcgaagtggaggacgagtagagagggtcgcgatctgagctgggtgagctccatggccgaacagagagcgaggtaccagggagattcgatttggc

SEQ ID NO: 187928 - DNA, 301 bp, Zea Mays
gtgaggcctggcccccgtgtcataggatgggaaccctggtgcgcatcgggggagaccttgcccgtgacgcttcggggcgcgagcggggaaatctgcctttaaaaaggggttcacccctcgagtagcagccatgtcttgcttctctcccactcgcggtgtcctttcacctccgagctccctgcgcccttttgccttcaaggtctctacttcacgttgtcgtagtttgccatggccttgtgacttcatcccgagcacacccagactgagtgagtgctcgaaatggtataccgcctgcttggat

SEQ ID NO: 187929 - DNA, 646 bp, Zea Mays
aatggtgccaacctctggagatagtaaaagaagacactattgttatagcaatgagaaagcagggtggtactcagaaatttgtaaaagctgagatacgtggttatgaggaaggttcaagattcttgattgtattccgtctgggcccagcatatggaccaatcaggtagtatgaaatggtaataagagcatccagacatttgtttcccagttttacgactatgaccattgtatgattgtttgtaggattgagaaccggacgagtcataccacaatcagtacttgccagtctggtttaggggaggagagttggatccaagtgaagccacatgcaaccagaaaatattcttgggatgacccatatggacagaaagttattgatgttagcattgataaaggcgatgatacttgtgtcctatgtgttgacctggaaaatcctattggaagttccaccagttttagggaacatggcctcatgtttactgttgataccagtgacattaagatattgaagtttgctgattacataaggaaagaggaagtatatggattgcctggatctgaactgactgatcaccaaggatcgtcattgaaggaaaatgagacagagccaggtgctggacccttggagctcattgttgaacttgga

SEQ ID NO: 187930 - DNA, 660 bp, Zea Mays
gcgtaaccttggcatttgggaatagagataagcgaagcagcagcatgaatgtatgctccatcaggtgctgttttgatcttcccgtgttatggtctcccctgatgcctctatggagcggatccacaagtccatatagtgtgtactttgactgtatactgaatattcttgcaaaagaaagccttggtttctttgaaaagcaataaattatagcacaaatgaatcaacatattctagtgaaaatcatttgtctggctttgtgctgagagctttaacgatgaagtgggaaatcttttcgatatttggatatgtaaaataggatcatattatacccaaattgtgggacgttattctcaagtaaatgtgatttccaacttgtttgctgtttgtagtggtgatttgtgattctcatcattccttctcgttctgttctgtttttttgttctttgttttgtttgctgtgttgctttgcttttgcctaggtgcataattgtctacttcattccatgctacggtttccattaaagtttcattggaaattttcttattgtgaatgcttcatttgcaggtcataattatggttcctcctcaatggctactaggtgcagtagggattcatatgatgacagtgttaacaactgcacacaagttactgcttcgaag

SEQ ID NO: 187931 - DNA, 338 bp, Zea Mays
ggggtggctgttagggccggctgcgacaatgatgacagagccgctacggccttggatggcgaaggcagggatggcagcagctggagcctagcatgacggccttcagcgtggctacgtcagactgcagcaccatcatagctgttagggcttgtatggctgccagattgttggagaagtggagaagggacgccgtcacctgctcgtttgtcatcgtgggaagggcggtggacacgccggaggtgggctggatgagtgtggtggtggtgatgctgggcagcagttgggtggatgtgaacagggaggcggttgtggctggtggcagcggctgggcggaagag

SEQ ID NO: 187932 - DNA, 436 bp, Zea Mays
gttatgtctccatgcaccccttgctccaaatagtctttgtaccatagcgggagaagaaggaagcactaccataaacccagtatggtacatagcgggagtgtttgacaggcttctcgaagcgagtctgagtgaccacttcgatcatcttcaaaataaagggtgcatggagacaccccttgagtggagaccaggaagcacgaaggatctcttcctagatcatgtcaaacacgtttatgcgggaaagactatttggagcaaggagaagaaggagaatccgactctccccaaggacattcatctgatttccacccttcgagagaacgatcatcctggacaaagggttaaggtacctatagtacctatgcatgttggcagtgatccaaaattcccgctctatagaaatatgaataaattcagtttcttcccgcatgggcag

SEQ ID NO: 187933 - DNA, 544 bp, Zea Mays
tgcagacttcatgttataaaaattcaactttgtgctgcattttttgggtagtgtgcagacttcatgttataaaaattcaccgtttgagccttagctcccaaactggccagcctggtcttcgggtcaagtccacaggcggccgtacagcatcgacaaccattattgctatatactattattgtccgtactgcactatcgatcgaacacacgcacccacagacgcatcactcatgttacggatagccggcagcaatcaaagtgttcgtctggctacagtaaattcttgcgtgatttgtgtatagggccttcaccatcatttgctgatcgatccagaactggttgataggagtcagaagaaatgtaacaagtcttgtatagttctctcttggtagtccaaagaaaaggagaaatcaatacaaaggttaagtctggtacatcacagtatcatactatcacagaccgagcatcctgaagtccaaattatctcatgttgcatcatattttctttatcggacacgtaggagagctacatatcattattatc

SEQ ID NO: 187934 - DNA, 591 bp, Zea Mays
gattgctcacattacttatggactttccctttacgactaaagtctgatgcttttccaactctcactcagtttttcgcctatgtgaaaacccagtttggtgtcacgattaaagctgtgcaatgtgacaacgggcgtgagtttgacaactccagctcccgaacgttcttcctcacccacggtgtcctcctccgcatgtcctgcccctacacctcatctcagaatggtaaagctgagcgcatcatccgtactaccaataacaccattcgctctcttctctttcaggccagcatcccaccaaccttctgggttgaagcgctccacacagcaacacttcttctcaatattctacccaccaaaacccttcatttttccactcctcattccgccctcttcaaaactataccctcctacgaacatcttcgcgtgttcggttgcacctgctatcccaacctatctgccaccactaaccacaaacttgatccccgttccgctaagtgtgtttttcttggctactcgtcgcaccacaaagggtaccggtgcctcgacctcctatccaaccgtgtcattctttcccgacacgttgttttcgat

SEQ ID NO: 187935 - DNA, 385 bp, Zea Mays
gatcagtcttggcgcttttgtgtcgattttagacacctaaacgctctcacagtgaagaggaaatacccagtgcccattattgaggaattcttggacgaactgcaaggtgccagttggttttctagtttggatctgcgcgccgggtttcatcaaatactgctccaaaatggcgaagaattcaaaacaacatttcagacacatagcggccactatgagttcaaggtgatggcattcggtctgaccggagctcctgccacctttcaaggtgctatgaacactacattgcaaccagtgctccgcaagtttgctcttgtctttttcgatgacatcttgatttacagttcaaccctagaaaaacatgtggagcacctgtctgcagtattgt

SEQ ID NO: 187936 - DNA, 369 bp, Zea Mays
aattaaaatatatctagcttaatagatccatcatatcttaaagtattctctcttatctcaaaacattcatcctatcctaaccactttattcttctcatccaaatgtaacaaccatgagcaaatccaaaatttatttagatcctatcgagtctaaaatagtcataacaatctaacctagatctgatctagtgtgatagaataatctaacctaatgaaggctaaccttaagttgagctaatctaatgtaagttacttaatactggtacaaaggataaggccatactcctaattcacttaagactaaattggtgacttaaatcaactcggctatacccaacaacttgacctacataacagatctatcttagc

SEQ ID NO: 187937 - DNA, 992 bp, Zea Mays
gagaacccatcgcgccttgtagcgctcaagagagccatcagcattgaacttatgtttgaatatccacttgccagaaacaacattgcaggagggaggacggagaacgaggtcctaggtgttgttactctgtagaccagagaattcctcctccatagcctgacgccaatgaggatcagcaagagcagtgcgataagtctgtggcactggagactatgctgcagcatgaaacaaagcgagttgtcgaaatcccaacttagcacgggtggtcatacggtgatgattgaccaccggggataccggaatcgccccaagtggcagctgaggaggagccgatgatgaagaggtggctgtcggtggagaaggagcaatcacttccggtgagggggatgctgttgcagttgtttgtgggagtagacgataccgtcgaaacgttgtggatgtagctgttgggtcgtggtgcggccagtcccagcaggtggtcgatgctggacctttgcagccctagcagatggtcgttgctggaccgctgcaagggagggctgctgaagcacagtgtcgtcaggaggggacgccgaggctgaggtgttcccaggggcaacaacgatcgtgccctgggtgtgctccagaggtgatgcagggccgacggacgcctgggcctgggtacgtccaggggttgaggcgggagcaggcaaccagtcaggactgttgggcgtcgagggagcagtattggccgcacgtggctgtgcggtgggtcaagacatccggaggtgaacgccatgggtgagaaaaaaggtgcgggcactggagttgtcaaactcgcggcgattgtcgcattgaattcctctgatggtggcgtcaaactgggtgtgaacgaatgagaaaaaattggtgagggtagaaaaagtgtcagatttgagtcgcataggaaacgtccacaaataatgtgagcaatcatcaagaatgagcaggtaatattaaaaaccagaaatact

SEQ ID NO: 187938 - DNA, 371 bp, Zea Mays
cttcgctgccgccacctgcgtgaaactcctcctcgtccccacctaccgttccaccgacttcgacgttcaccggtactggctcgccctcacgcacgcgctccccgtgcggcagtggtacaccgacacctcctctcagtggacgctcgattacccgcccttcttcgcttacttctcccgcctcctctccctccctgcgccgctcgtcgacgccaccctcgtttcaatccccgtgcgtgacgcgacgcccttcgcgcatctcatctacctccgcctcactgttgctttctccgacctcctcctcctcggatccgtcctcttactggcgagggacgcgcagcggaaacagcggccgttcctcgctctcgctcttg

SEQ ID NO: 187939 - DNA, 552 bp, Zea Mays
tccatcatttgtcaacaagctatatcaaatgtttaatagtaaaccaaaagatacagaagcttctgccccacttccctccaagctgaacgacccttcagatattgccgaagaaacactgtcaaccagctctgaagctcctgagaagcaggatcatgatgtcagtgcaactatgacctttgatgagctactaaaggccttcggttctcagcatgaagggaaagaaatgcctgaaaatttgtctggtggagttgttcttgatcaagtttatgctgttgcaccgagtgacctgaacacacttcttttctctccaagttcagactttctgcagtcacttgcggagattcaaggaactacaggtcttgaaattcaacaatggcgacttgaaaatgacggtgaaatcctgaggagggtggtaagctacacaaaagctcctaccaaactagttaaggccgtgaaagcaacagaggacatgacatatttgaaggcagatggagagatgtttgcagtttttgcagatgttagtactcctgaagttccttttggcaatacttt

SEQ ID NO: 187940 - DNA, 282 bp, Zea Mays
gggcatcgcagacagacaaccgcgttcccggtgatctaagggattctaattcaatcaagttggtcagggagcatcaggggtacacaagaatactaaaacgagagggcagagggcatgagaagacctgaatcgagctggccgcggtgaggatactttcatggtggcagaaacttagtttgggggaagtgagcaattcgtggtctctagtggataattggaggcaagcgtgggtgcgttggcttcgtgataacatggcgcaatagacccggccatcaatttata

SEQ ID NO: 187941 - DNA, 1865 bp, Zea Mays
gtctccttctcctcctccccgtcgccgtctccgagtctccctctatttctctccgcccttgttcttctcctctctccctctatcttattacctcaagtagaagtagtatatattttttgtccgccttttcaatttttccttttatctccctgcgtctcttcgtcgtcctcctgctgtggcggccgccggcgatccccgatcggcgatactcaggtacccatcgctcttcgactcccaccgatttccgctgcgtggacgcatacgccgctcgaactcgatcgtctcccgtcctgccggtgccgctggttccgattgagtctgtgcacacgcccgcttcgcgggtcgccccctcgcttttcgtatctagtactagttcctgcccgtgccggtagcgaaaagcgtctttggttgttttttttgggtggggggacggacaacggacggggattttttttatctcagtcctgcctgcatgcttggtctgctacggcgccattgctgacggctgaccccaagttttagctcgtactatttctgcgtcgcgtcgcctcaagtagagggagggacactctcgtgcccatcgaatcatttctgttcacctccaattgattactactggaatagtgggggctacttggagcagggcgcagctaatgctccccccacaaaccctttacttctgcttctgctgcatactggttgttgggtgggcgctccactgcgaatctatttatgcagtattgcttactgcagtgggatcacttcattcaatcgaaaaaccgtggtgccgcatagatcctaccttaccatgtttcgtactacaactccgtgctattgctgcagctggatgttccgttgtcagactggctgtccatgcagttggttggtgggaggcaaggccaacctcctccttctcctgcgctgactgattttgctaatgttataagtgtgacccgggtctatagttggctagtccttattacttgtagcatagtaccgttgatttatgcggaccaagagctctcggaagtatcatgacctcaactacgggcctgatgctgttcatgacttgctcttttggatcctccagtgttctgctactcatgtcatatccttcgcactcttgatgcaggaaccgattcatctcattgctactgtccccttatctttgctactctgttaacttattattactgccactgattttatttccatactgaattgccattgtaacagtggtctcttccatatttgcagattctagttgtccattgtgctgcactgcagcagtagacaatcgtgtttttcggtgttttgtctgtctctccttgatcattcagatgcctgtacagctcaactgctatagctagctgtatatatctggttgaagaggactaatctagcaacaatgtcatcgcttcagttattgcaactaacagaacgggggcgcaaccttttgtcttcaagaaggtttgctgttgagctgatccagcagtaattgtttttaaaagatcgatgagttgacccttatgtaactgttaacagttaacctgtctttccttcccccctccctgtttttttttacaggagaacacttgcaattgtttctggtgcagtacttgctggtggagctttagcatatgcgcagtcaggtcgatggaaaaaacaccaggaagcaaattcttgcagtgatgcaaactcacatagcagtaataacggaagaactagtcagaacggcattgatggtaaattggttaaaacaaggaaaaagaaaagtggactgaagtccttgcattttttggctgctattttacttaagaagattggcccgaatggaacgaattaccttattggcttgatactaa

SEQ ID NO: 187942 - DNA, 376 bp, Zea Mays
cagtttatgtggggctagatgcagctacttctgtatatgtaatgtggcccaaaataaattaattttctgtatctgcaatactttgttattatggtatgatcttttccttttccatttctatttctatatgtgatatatttatgttgtagaagtagtcaaatggaatttactctccacatatacattttttaaagcgcaggagagctacgtttcattgaaattagagagaaataggtgggtcccctacatgatcattactcatatggggaccagaacatgagtgaggtagctacagacaagttggagcagatccatgactgaaacaaaaacacacacacaacctagaggcttagcttgctgatgaaggaagcacgag

SEQ ID NO: 187943 - DNA, 463 bp, Zea Mays
gttccttcaacctttttttgtggaagagcattcactttcccaatttcatgagaaaagaaacggagtgacagaggaaaagttggtcgacaagaatcaaatttcagaatcttttggttcgttgatcatacaggaaatgccaggcacactgacaaatgctggaaaatcaatccagtcaggcgagcaggaggatgcctcaaacaaagtgtccaagaggtccaagttgaagtcagtcaaatcacttcgtgttgacacaggcaggagcagcgagagaagcagcactctgagccatagctttcagaagggagaccaaaatgatattgttgtatgttctcagagctgtgggacagaatgtgcggtatgtatagctttatttggtatttctgaaattgaaaaggctgaagaaaaggaagagttgattgctgaagataacgttgacatgaatcccccggccagcatgatcatg

SEQ ID NO: 187944 - DNA, 615 bp, Zea Mays
tgcggacttaaccatacaactaaacaggactcaagagtcaaatatagagcttctttctattcttcaggaactggaggaaaccattgaagaacagagagttgaaatatctaagatttcgaaggtcaagcagactgctgatcctgagaatgggcttttagtaaaagaagacaaagaatgggctaagaaactgtcaatgaaagacgatgaaatcacagttctgagggagaaattggatcgggctctcaacattggaaatgcaggtggtgctggttccaatgccatttatcttgaattggagaaagaaaatgaaattttaagggctaaaatacaagagcttgagaaggactgctctgaactaacagatgaaaatttggagcttatatataagctgaaagaaaatgggctcacaaaaggtcaggttccacgtatttcaaacaacaatgagctgcaatttgaaaagcttacatcccggattcgtcaactggaggaggaacttaggaataaggaaatgttaagagacgacagtttttctgagtcatcaacgtctaatgcagatgagttacagagaaaatgtgctgaccttgagctgaagctgctaaattttaggtctcaaac

SEQ ID NO: 187945 - DNA, 415 bp, Zea Mays
cgactgtcggcttagttggatggttttttttctggctgttaggtcagcagatctctttttggttagggttctaattactggggtcacaatgaggaaacttactaaatctggtaactgtgtgcaagtggacgcaaactgtctgcaagtggggtaacatttacactggctaatcgaaataatacttgacttagtggactcaaactgtgttactcttctagggcatgttgtgcagtagaaacgacaggagttcgaatgatacaagctacccgtttcaccttgaatgtcttgcgacagggcttggtcgagtgtttttggtgcaactaaaatgcggactaagacattaaatagttatgcaaaaatcagatgcttcaaggatagttttttgtgtgtatcagatgcaaaaatcagatgcttt

SEQ ID NO: 187946 - DNA, 362 bp, Zea Mays
gtgacataagatgcttccttgataaggaagactccataaggtgaatgttctgcaaatcagattcaaccaagggaagacccactccctcggagaggacatttacgtcctgcagattagattcaaccatgggaaaccgggctggagcatcagaaataatagcagcttccgaacagattccaccatccactggaataacctctggagagccagccaaagtatcttcagtaacgacagtagaactagtagcttccaaaaatgcatcatcaaccgcaaccgggagtggagacacaagagcagacgatgtcttaggaatccaaacagacacagatgactccaactttctcttgggaatccaaactcgc

SEQ ID NO: 187947 - DNA, 1332 bp, Zea Mays
acggtacatgtcatccacaaggcaaaagccatccaggtgaaggcagccaaagctcctgcaccctttgctactctccctccaaagcaacactcgcaaccaaacatagagtctgatgcttcaaggtaaatctgatgatgaatagcacttcattagttacattgtgtagctgtgaacataatatggttcccagtaatctgaaccctttcatacttatacataagtgtaaaatgcatggactttcttagtcaggtcactctttgccttcataacttgttaacatccatgttttaaggaagaacttgttaatatcggctaaaaggagtatccggttttttaaacagggcctcaagaggagactggaagaagactcctcctacatcgtctccattggcaagtagaaatgaaattcagtggaccggttatctgcctatgcaaaggccccgtcgagagataggcctcttaccggagctaggacagcaccccagaaggattttgacgactacatcgatttcatagcaccaccgaggccctcagtggcccgtagctccttttcagatgacattgatttcgcaatgagcatggagctgccatccatagactttggtgaatccatggagctctcctcagcgatgtccatggaaagcctgagttgtgccggggtaagtgcatcctcaataagtgtaacattaacattgagttcttttcggcaaatgacacaatctcttgttttgtttcacttggaaactggaaggatgtggaagctgaaatgagacgcctgagactagaactgaaacagacaatggagatgtataactctgcatgtaaggaagctgttgatgccaaacagaaggtgtgtttgcttccgatccgtattgctaaataccaggttctttgttcctaagcttacctaaagatattgaaacaatgaacaatgatctcactgcaggcagcacagatgcaccagatgaaggtggaggagtccaagaagtaccaagaactacggaattcagaagaggaagctcttgcgctagttgaaatggagaaagcgaagtgtagagctgcacttgaggcagcagaagctgcgcagaaaattgcagagctcgaggcgcagaagagattgagagcagagtggaaggcaaagagggaggctgaggataggaagaaagcaactgatgcactgaacaaaaatgatatccggtacaggagatactccatcgatgacatagaggctgctactcataagtttgataaggcgctcaagataggagaaggcggatatggaccagtatacaaagcagtactggatcataccaatgttgctatcaaaatctt

SEQ ID NO: 187948 - DNA, 354 bp, Zea Mays
gtgcatgcatgcatgcgaatctctgcggccactgcgcgtaagactagtgggatatatttttttctgccatcgccactcgtcagtaggcagcaaggcctctgcggttgtgggctgtgcccatgactccaggccaacatgtaattatatcgccgtgggtaacgaggtgagcgccggcgacgccgcggagatgctgctcgcctgctccgtatcatcctggctgctggccgagtgaggaggcacgggcgtgcatagaacaaagccacacttcgaatgtcgacgtgcgccgccctgacacagagcgcaaggagtccatcctcgctcccgtgtacgccatctatcttgtggtctgatggc

SEQ ID NO: 187949 - DNA, 331 bp, Zea Mays
gccgctgctgccggagatgcccaacatggcagacaccactcaccccatcacaacaggtaaagaagcagcactcctgggactgtgtggatagaccttagcagcaactatgtggctcgattttagcttccaggaggcgacagcacaaaagcagatgaacaagggaagagaggaggggaggagggaggccactatcatatatggcgtgagtcccgtgagaagataaagacaattgagaaaatgttaatcctcccccaccgcctctctcctcaaatcagatacataagtataacaatcgttgcggtgtgttacatttaagaatcacgattttgta

SEQ ID NO: 187950 - DNA, 291 bp, Zea Mays
attttcatgttcttgtttctttgtattacctaaacaaactctcctaaatactgaacatcgtcgtactagatatattacaaaataatttacgtgaactgatgtatttcttgtcacagtgtcggcttgcactccaaaggaaacacttgcaatactgaagttataaaaggatttttcagatcttgcctgcatactaccagatgctggaggtactgtgtttcagattcactgcttggagcgatcagcatatttatcagtgttatgagctctgtgctgtgacaagcccacctctca

SEQ ID NO: 187951 - DNA, 559 bp, Zea Mays
atgatcttcagatgcagcttatattaaaaatcaatttctaatattaatttcccatcttattcgagagcctcgtcgtccctcacgcgctgtgcccgtgacctaccgcgccaagtgcgcatcctttcacttcaccagaaaaaaaagcgacaccacccggccccaaacaacaatcacaaccctctctctccctctccttcacgtagccgcctctgaatccccacctctctgctctcccgtcggcctcctccgcgaccgatgtgtgtgccccgccgccggcccaaaacactagaggtacgcgcgcgcccagcctcccgccgcccgcgcttcccgaccctggtgggcggcggttggacctggcgtcctagggttttcgcgggatttttagcggtgattcttgtcctgtttacactgatgggttctggtggttttttttttctgcaggtgacgagcaggtaaggggttccgatcggagatggcggcggcggcggccgcacatagagccagcttcccgttgcgcctgcagcagatccttgctggaagccgcgctgtctcacctgcg

SEQ ID NO: 187952 - DNA, 383 bp, Zea Mays
ctagtattctccctgcttgtgctggcttgcaggcactaggcattggaaagcagctgcattcttatgttttgcggtgtggaatcaagatcaatgtgtatgttggagcatctttgattagcttgtactctgagtgcggagaatttgatgatgcgagagttgtcttttccaccattcaggagaagaatgtcaatgtgtggaatgagttagttcaatcatataccagagaggggaggatggacaaagcttgggatgtttttgacttgatgcaggaggatggattgaagcctgacattgtcacctataacactttaattgctgcatatgctaaagtgggtcagaatgaacaaacatatgaactgttttcacgcatggctgacgtcggc

SEQ ID NO: 187953 - DNA, 1039 bp, Zea Mays
cagctttcaccattttgcttgatagagacaaaaagtctatacttctattaattaggggaactcatagcatcagagatacattaacagctgccactggtgctgtggttccatttcaccataccattgtacaggaaggtggtgttagcgacttagtactaggatatgctcattttgggatggttgccgctgctaggtggattgcaaagctctcagggccttgtctggcacaagcattgcagatgtacccagacttcaaaataaaggtttgagttatttcatagccattttctttgtctttgatgctagagtatgagcattgctacaacataacctttttatgacttatgatgcatcataactatgtttacatgtttctttcaaagtgttgcaattgatgggtgttcatggcaattggcaaatctatttaggttgttggacattcactgggaggtggtacagctgctctgttgacatacgttctgagggaacagaaggagtttgcctctactacttgtctggcatttgctccaggtttctatgctatgctttttttctcttttagaaccttaatttctcaatcaaaccatgaaaacgatgtgtacatgacattttctctctcttttcattaccatatatatacttgcttgtcttatgtttttatactcacaggggcaggttggtatagtagatagtccagactgcttgtgaacttgtgattggttctggaattctattcataaaatccaaatgttagtacacagtagttaagtccttagctgatattatgattggaactgttataagtttcgcaacctaagttcaatgtttctatcatactagaatctttgataagcttaaattccatttaactatgtagaaatattaaggagtatatatttttcttagaaaatgttctgttctgcagctgcatgtatgacatggaaactggcagagtcaggagtgcattttatcactacagtcatcaatggagctgatctggttccaacattttctgctgcgtcagtagatgatcttcgtt

SEQ ID NO: 187954 - DNA, 421 bp, Zea Mays
tgtgttgttgatttgttagccagagctggtagaatacatgaggctgaggagttgattggaagaattgctgctgaggaaagagatggtgtggtttggacatccttgcttagggcatgtgctgctcgaggggcagaggaaactggaaagatagctgcagagaggatgatggaggcagagccatggggttcaggagcacatgtggtgatggccaacctctatgcaagcaaggggctgtggtgtgaggcagcacaggaacgccatttgatgaagcagaaaggtgttctaaaaggtgcagggtggtcatcagtcgaagttggaggggacgacaggggggttggagtgtttgtttcaggagatcggacaaatccccaagacagtgccatctacatgatgcttgagctgatgtactatggagccggaa

SEQ ID NO: 187955 - DNA, 331 bp, Zea Mays
ggtgattccctctattctccacgtcgtgtttcgctggtaggcatggaatagttcatcggtgcatcgggctgggactcgtcggtgcgttgccgcccagcatcgtttgctgctgctctacttcaagtgcaggtatggccccatgcgatgctccacgacctattaaaccatatagattgaagcttggtcgccgggtcgatgggtggggtagtcctagctatagcgccgccgtggggaggaagtgcgatcgccggggtagttagtgagtgggataagaaagagatagaaatgggtgctgctctggtgccgtcagtcttgagataaacggtcagga

SEQ ID NO: 187956 - DNA, 293 bp, Zea Mays
cttggaattccttcagtcacagggcaggaggatgagggagctgtccagttttttcagcacagagctgagcataatgagatgttgaaggccaatttggctagagctcaacagaggtataaacattttgcagataagaagcgggttcccagggagtttcaggtcggggaacaggttttgctcaagctccagccttatgctcaaaattctgtggtcaatagaccttgtcccaaatttgcattcaagtattttgggccttacacagtgactgagaaaattgggccagctgcttatcg

SEQ ID NO: 187957 - DNA, 800 bp, Zea Mays
tccagcatcaagtaacatggaagaaacacataatacattgaagtttgcaagcagagcaaaacgtgttgaaatttacgcctctcgcaaccgggtaaatagttaggcatacaaaactgatttcctgcaccactattatagaaaatgaaatgaaagacataatgatcttgactgcccagataattgatgagaaatcattgatcaagaagtatcagaaagaaatatcctctctaaagcaagaactcgatcagctaaggagaggaatgattggtggtgccagccgggaagaaattttgagtttacgtcagcaggtatgttcagtttgttttgtagaactacagaataaaactgttagccaactgttttgtgctccttgaaattgactctgtagaataccttttgtgttggtaagttgataactgcctcaaaagtacctttctttcttgtcttaagttggaggcgggtcaggtcaagatgcagtctcgtctggaggaggaagaggaggcgaaagctgctctaatgagcaggatacaacgtttgaccaagttaatacttgtttccaccaaaaacaatattcctgccttgacagatgggcatcagagtcacaattctctcagtgagcaagatgtaagtattaattgcccaactatttcacatttgtatatattccttctccatgcttctgtttcatttggaaatatgaattatctgtatatttcagaagttaatcacttcacaagatagttctacacttgtccaaactgagggcaccacaaaagaccccctatcatccgctttgccag

SEQ ID NO: 187958 - DNA, 696 bp, Zea Mays
aaggcgcagaacatcgccatcctgctgcgcgcactgaacgtcactctggaagaggtcacggatgcgctgctagacggtgagaaatccttcgattgatggatatttctaagctaacctcgactaatatctgtcttagactgaacattctgtgtaagttgctgggacattattgttaattagttatgatatggacatttgtaaggtaacctcaacaatagagtttgctaaaatatttgagtgtccaacagaactctgaatatccaatcaccctttacattctaatagtatcagactagtgtagttttggactgaatatttttagaaccaacatgtttggaagcttaataacttttaatgttcatatgaatgggtagtatgtttgagcactttgggttcaaattaaggcgaatatgcaaatacatactgttcacagaatgttcagtgacctacatctacatgacagcatccaaagctactcacaacgtctattgctactggcactgttaaaaacaggcaacgctgaatgcctgggggcggatctgttggaaaccttggcaaagatggctcctacaaaagaggaagagctcaaactccgcaacttcactggggatatatcgaagctcggttccgcggagcggtttctcagggcgctgcttgacatccctttctgcttcaaaagagtggacgccatgctct

SEQ ID NO: 187959 - DNA, 278 bp, Zea Mays
tggaatttcgacctaacctttcaggccttgtgatccaagtctcagaggagctgcatctttggagtttagctggggcaaagggtgattctcacctagctgcccgaactctggagttgggtgcttgatgtattggtcgttccttttggttagatttttgtctcagacacgtatgtccttgttctagggagggggtgtgtgttgggggttttcgggctttctttgtacccgcttttttcttaatataaatgatatgcagctctcctgcgtcttcgataaaa

SEQ ID NO: 187960 - DNA, 866 bp, Zea Mays
gccaggagttgctatccactcttttgaagaacctagggtctgttgccaaatcactggagccaaaagaactatgtaaactcctggaggcataccaaagcctgcaaaatggatcaaatgctggaacctctggaacagctaatgccacagaagaggctgcagggccatctaactctaagttgcctttcgtgaatggtagtcattgtggacatgcatcatcatctgttgtgccagtacagtcgaaggctaccatagtggtaactccaggtatgaagtacaaccactgctaaacattcagaaactggtttttatgatttacaatttcagcttaattccttcctgactgcacagagcccgcatcatgcaagcttaaggattttgatctgaatgacacttgcaatgatatggaaggctttgaggatggacaagaaggttcacctacacctgcctttaagacagctgactctcctaattgtgcatcatggatgcaacaagattctactcaaagtccaccgcagactagtggcaactcagattcaacatcaacacaatcattgtcaagctcaaatggagacgctcaggtttgttttttattccttgcaacagattcatataaagaaggaatgataaacggcagattgtgagcactcttatgacttatcaacttgtataataacagattatatattaatgagacagtttgatgtgctataatttttaatggaaaattgacaactcactatggtattggaatagtatatgtacatatgtatcaagctgttattggcagcaagtttatgtctataacattcaaggttggaattcgaattggaataagattttcagtgcaccttaatgacggagactga

SEQ ID NO: 187961 - DNA, 295 bp, Zea Mays
cagccggactagcacaacaagtgcgcaaaatcgaagtcttcctcaaaaagactatccgtgcaaaagccgcctaagggtgcagccggactagcacaacaagtgcgcaaaatcgaagtcttcctcaaaaagactatccgtgcaaaagctgcctaagggtgcagccggactagcacaacaagtgcgcaaaatcgaagtattcctcaaaagactatccgtgcaaaagtcgcctaagggtgtagccggactagcacaacaagtgcgcaaaatcgaagtcttcctcaaaagactatccgcg

SEQ ID NO: 187962 - DNA, 308 bp, Zea Mays
caggcatgctacagatgagcacaggcgcgccgtggggtagagcaaaccaccgtcgtcgttgctgatggggaggccggtggtcaccatgaccgcagggccggtgctggggagggcagggccacaacggggcctgtgggtccgacgaagaaggcctactggggacgttgttactgttgaatccccccgttccccaggccaggccacatggtgatgtgactgatctaggggttgtaggagggccaggcgggagcgggtgcctgttcggcttgggtgcgctgcgtctagagggaagcatcgccaaggttgac

SEQ ID NO: 187963 - DNA, 273 bp, Zea Mays
gaatatgttaacaactctaagggtggaccggaccaggaagggacaggagatgaagctgttggagatgaagggaagctggaagttgaagctgtccagaaattaagaagaggtatgcgagcaaggaagctgaatccaaaatacattggtgccaactggatgtaatagaattacagggttgttagactgtggttttgctttttgttctcaagtataaaaggaaagcatctgcaatattgtaaagtggcttttggcattagacacaactgaacttgg

SEQ ID NO: 187964 - DNA, 651 bp, Zea Mays
ggcagagcagcatacaagatactttaggacttaatggacccttttcctcgagagattgctaccgtcatacctaggatctttcctaggggtgatcctttcaaccctaagtgggaccagcctgagggtagagctctgatagggggtgatagtgagcagcagtacagtgacactgtagcctccagtgctatgtttgcagttatgcaactgtataacagctctgagcgcaacttggagatggtcaatggctctcttgccatggcttagaatgagttgcaccggactcgagaggcacatgctgtagagatagctcaagtctagatagagttagcccaggttaccttagacaaggatgaggcaattcaggttagggatgtggatgtacttgacaatgcgttgtggattgacaaatgccaggactaccaggccatggtagtagagatcatcagggagaggaatgtagcctggtccaagataacctagcttagggcaacacaggtcaatctgatgcagcagctgaacaatgtaaaggcttggaatgctaacctgcatgaagaggtttttcagttgcatggccagctaaacccagttaaccttccagaacctgaggaagcagatgcagccgcaatagacgacggaggggcagtctttgag

SEQ ID NO: 187965 - DNA, 368 bp, Zea Mays
ctggttcctccggtccccgaccatcgcgttggcatcttcgcaggtacagaattcgtcgcctccatcccgagccaccccgctccctcctttactgttgctagggttgggcctcaatcccgacccacgccgccccctcctctccagttaaatcaattcatcttcaagggtatggaacgtcgtactaacagagagatgtttgtgcattgtcgcctacagatttgcgtatcgagttgttcgtcttcggttccaagatcaagtgcatccaaggtactttcatacacaatttcttgcgcaatttactgtccacatggccacaaccaatttatatatgtgctgtcatttgtgcatattacttggagatacgagag

SEQ ID NO: 187966 - DNA, 863 bp, Zea Mays
tgcagttcatctggtactgtagtaaaagaaagtgtgtgtaccgaaccatctccagcaactgcaactcgtaagcaaccaaagagaacacgggggatgcctcgaaagtattcagacactatgattgacctggggaaagatacaactggtcatcctgttttatttggacgcagtatggatcacactgcttgcacagagtctaactctagttttagcattgttgcagttgatgcatcatcactgtttgcatcttcatctactgcaacttgtgatgataagtcaaaaggtcagagcattagagggaaagataagaagaaaacaatttctaatgctctatattgccctgtggtttctggtgttgaatcacagagcatttgttccacagaaattcttccaaatgatcctgcagtctctgttgagaatgctttgccatctgcacagaacacggtatcaatgaatgagctttgttcggctagcttgttaaaccgtgagggtaatgcgtgtaaaagtgctctttcagatgattctgaactgcctatccacatttcacctaaatcaagtaataaaagagagtcaagtggcaggaggggaagaggaaggcctaaaacgataccactttctgctggaactggtcattttgtggcttctgttgccagtctcccaaagacaacctgtgtactgactagttcaagcaatctcacgtcgttgaacaagagtggtggcaaatttatagtaagtagcgttagttcatgtggctgtgatgttgagaaatgcagtgttcattcaggtgttttgttgtctgatgatgcaccaccagcacatggcttacaaaatacaaattgtaaggaagaatcgaataccaaaat

SEQ ID NO: 187967 - DNA, 369 bp, Zea Mays
gagcaccacaacgatcggccgccccggttccaaaagatggacttcccgcgtttcaatggcaagtctgatccgctcatcttcatcaaccgttgtgagtcctatttccatcaacaacgtaccatggcagaggagaaggtttggatggcctcctacaacctcgaagatgtggcccagctgtggtacatccagctgcaggaggacgagggcacaccacgctggggccgtttcaaggacctcctcaacttgcggtttgggctgcccctccgctcggcgctgttgtttgaactcgccgagtgctggcgttcggggaccgtgaaggaatattcgaatcgtttccaggccctccttcctcgcgtgggccggcttgac

SEQ ID NO: 187968 - DNA, 445 bp, Zea Mays
gttatgattcatcttctcgtcgcatgcgtatttctcgagatgtgagctttaatgaaaaccgaccattcttttacaacccttccactcattcttctttttattccacagagtctacctccttcatgagccttcctcccatttctgaaaattcatcagtatcaccacctactgtttctaacccaaatgttcttattcccatcacaccacctttcacttccacaccatctcagtcttactcttccaaaccacctgtcactcagacttacatttgtcgtcctcgctctactcccacggccagtcctgatgatgatcctgttgctgatacttgtactaacaatgatgactctcatgttgtttttaatcaggggtatcatcttcgtgaccgtggcactattgcagctccagaacgttatgggttttcccgtgctggtgcagtcattgctga

SEQ ID NO: 187969 - DNA, 463 bp, Zea Mays
ccttcagcatttatcttcactgccttatcctcctaggattttttagcctccaccgctcaccccatttcttgattcctgctctaaatctttagccgtccgtcgttagcctagctcactggccgccgctacccttctctggtgctcgctcagcccgccagccgacgtccttcccctgctccggttcctcctcagcccagagctttgcctgtcgcttcctgttcagccaccatagccacggtcatcccaatcatctccggcagccgtgacatttcctgccggtgtgtcgccggccgatgcgagctttggttcaagctcgtctctatctgtcataggctagagcgccacccttcatcatcttgccggtccacccttcctcatcatgaacccctcggtgctaggcatcaacatcagttgtgcctccctggtatatgtacgatgttggtaaaggtccggctatgggttc

SEQ ID NO: 187970 - DNA, 443 bp, Zea Mays
cgcgaaccgtcggcctggtgccaaccaccgaaacaaacaaggctctccgaagagcagcttcctttcttgccagatcagcggagaactccaggacgcaggaaggtttccgaggcaaggtgatccggacagcatcaggaggattggggtgtggctgacttagccccgaattcagtcccgagctgcctttcccgcgctttgaacgtcttctcttcttcttcatacgtccctcagtcggatgcatgtccccctgtgctcctttctccactactaaggagttcactggaggggagagtcttcgccaaactgggggcttgcgctgaacggctggacgatccatcgtcggtggaccagaagtgtcctcaccagacagacgcagccacaccggagtacgatcgccactagagcccaaacgctgccacaccgactttcgcccagcttccggc

SEQ ID NO: 187971 - DNA, 609 bp, Zea Mays
ctaaatttacaaaatccccagccagtagtttttgagagtgctcccaatagtttgatgtcaagtccttcgagaagtccaagaccaatatgtcctgatcatattctgacttcagcattttgggcagtgaagcctcatgctgatgtaactttccttggatctggtcagtgctccagtccaggttcaggacaaacatctggacataattcagtgggtggtgatatgctatcccagctttttttgcagcccaccagaggtagtccagagtgttcaccagttcctagcccaagaatgacaagtcctggtcctagttctcgtgtgcacagtggaagtgtttccccattgcatccaaggtctggaggactggcacctgaatctcctacaagtcggcatgatggtggaaagaagaagcaaacccataaattgccccttccaccattgagcatcgctcacagtccattttttccgaataactcgacaccaagtagtcctatttcagtaccccgtagccctggcagaacagagaatccatcaagtcctgcatcgcgatggaagaagggcaagctgattggtcgtgggacatctggtcatgtatatgttggcttcaacagg

SEQ ID NO: 187972 - DNA, 543 bp, Zea Mays
ttcataaataaactaaccatttttatttacgtgactagtctgtactggtgacaatagatcaacatgaatggtatgcgtcacctcagttatatactcgaaatgatgcaactggcttgtggactggaaaaccagctataccaccagaatctccgtttttagctctagctcatcatgctagtcatgtggacacaaactcaaacgctgtttcatctttatccgaatctagtcctatggatctcaagtgccagtatgattctgagaacctggcagacggatgcatcaaaatgcaaactgatgatgagattgttgtggatggatctcattctaacgaagattctgttattgagaaaaaaaggcgacgtgtggtcgaggagatagctgccgacggaactttaccatcttatggagatctagaggatgtaaaaggtggttctttgaggcatccttctaatgcagatggatctgaacttgctcgaacaatatcaagcaatgcatcattggcagaacaagtaattgaaccagcccttgtgatgtttgaggtga

SEQ ID NO: 187973 - DNA, 464 bp, Zea Mays
atttccagacagccgcgcggcggcctgagcgacggcgtaagcaaggatgcggtggcgccattgccacaaccaccgacccaccacgctggacatacaccttcgaatcggatgaagctacgggcagcggagaggaaagcgaacccaacagagggacccttaccggaggattaacagcgcgattaccccgaccacgacgcgaggtggtgttgcggcggagagaaggttccggcgagaaatccccagagccccaatctgacctagacgtagtgcttggaatagataggggaacacgacaaacgcgaagacataggtcatacctcaaatctcgctggggaacgcactccctgcgacgcgcgatggccagacaatggcgagcttcgggtgcagccgattccggcactcgtgtccacagttctcaccagccgcaggcacgagaagttcccagagagcgccaccaagcgccc

SEQ ID NO: 187974 - DNA, 327 bp, Zea Mays
gaagcagcaagcgagaaagaaaaggaatttatggagtcattgagccaaataactgaagaaaagaagaaaagtgaagagctagctgcaaaatatgactgaggtgcacagtagaggtatagaactccaatccgcagctgaatcaaggaatgcggaaattgaagctcaattgcaggaagctcttgaggcagtaggacagaaagaggctgagtcgagaaacttgaatgaaaagctggttgcacttgagtccgaaattgaaagttcgatgcatgtaaatgaagcgttgaaacaggaaatcaatgctaagctggtaatggtggatgagctgca

SEQ ID NO: 187975 - DNA, 292 bp, Zea Mays
gctttcgcttttccccaaacctcatgcttggtcaaatttggcgctttgaccagctagtggcaactgtactattgtgatggggttagattacttctgaattctcacaactataagtgtaccacaacatctactctgaaattctgcttggacttgagtaactttatcgtgttcatggttgcctagtggctgcttaatcttaaatcaagatagatacctgtttaatgaacggcacatgagactaactaaatctatttcacaaagaatgaacccaattcagatccaactatccaag

SEQ ID NO: 187976 - DNA, 462 bp, Zea Mays
atggccatcactatcagatggtgaagcaagatcctgagatgcgttgaagactcctctagttattgcagatgctgcaaaatgctgagcccccacgagctttctattgcaagatccagatggaaaatcatttgtaacctcacaaatgccagagtagtgagcaggtactggataactatcagtcgatagatcatctgcaaagctagggtgggttggatctattcctgtgtcgatgaggccaatgacaacaccctgtcccgcgaattgtggaccaccttcttgaacccaggctccttgtggcagtccaagaaattcaggggtatgagttgttgctgtcctaactgagtaatccagcatcacattcgctacttcttttctcccggatagcttgtctgcctttcgtacaagcagaaaacaagtaatggcaataagaggtggataaatccaaataatcttctaatgaac

SEQ ID NO: 187977 - DNA, 516 bp, Zea Mays
gctacagctaaataaaataaatcgatattctagaaaataaaaaaatcaatgctaaaaggagaagcaaaatagggtgacgctcacgccagttacagtgtcatccacacgatacagtgtctagctagtttataccttccgtcccacgtctttttccacacaaaagcacaagcaccctcgggagtgagacacagaggcgggagccgagggaatgccgtgacgccgcgccggatcggtgggtcggttcccagtctggtttcacctaaaaactgagtccaacattgaataaccaagaactccttccgtttcgttttagttgtccctaaataatataaaattgaactaccgaaccaaacttttgaaaaaaaaacccgaacttttcgatcggtttggttcggtttacggctttcagtagaggatgtgcccatccctcgcatcgatgtagcgcatttgatgtgatttgtggacttgtgctacttcgatcttatgctgcggactgcggctatggcaggtgacgta

SEQ ID NO: 187978 - DNA, 647 bp, Zea Mays
acagataatggggctaacttcaaggctgctagaagacttttagaaagaaaaatccctcacttgttttggactccatgtgctgctcactgtttggacctcatgcttgaggacattgggaaaattggagagttcaagaaatgcatttcctatgctcgccaagtgacaaccttcatatataggcatggcaagcttcttgatgccacgagggagaagatagggggtgatttagtgagacctgcagttacaagatttgctacatctttccttactctccagtccatatataaacataagcaagttttgagatgcctctttgttagtgatgattgaactaggtccaagctatcaagcacagaagcaggaaagaaggtcacagagatacttctttctacaaatttttggaacttagtccaagattgtattcgtgcatcacaaccactcctcattgtgttgcgaattgttgatggtgatgaaaagccagccatgccagaggttgccgctgccatggatatggcaaaagcaaagatcacttcgggttttgaaggtagagagacaatgaagaggaagttgcttgtcattattaatcggaggtggcaagatcaaatggaggtgaagttgtatggggctgcattgctattaaatccaaa

SEQ ID NO: 187979 - DNA, 444 bp, Zea Mays
tgctgcctttgcctttcctgttgcccccgcccctggagcccttgggaggaacaccgatgggagcatcgtaggaggagcggcatcccgtggaggtgcaggtggagccagaggcagccaccatggcggaggctgcggtgatcttctcgtcattggcgagacgcaactctttaagggagagcatctcacgggccctggagaaggatggcaggacaacagaatttgcgatgtcgtcggcagtgccgctgaagcgtgggttgaggccgcagaggaggctgaggacgagtcgggcgtcttcgatggtttcgccgacgtcccgtagggcagcagccttgatcttgagtcgctggcagtactcatcgatcgtcgagtcgccctgcttcaaggagtgaaactcctcaagcaggaagacaacgcggggtgcacgagtggagcggggttcacaat

SEQ ID NO: 187980 - DNA, 340 bp, Zea Mays
cttgacccttactgggcaggtcgagacccagtgcgcagtaccagtctcgccccaactccagttgaagcagagttcttgtaggccgctgctcaaggtatactcaagaagaaaatgtggaacaactcagctgatggaaaggaccactgatcttcaggacagtgaggaacccagtcaaggcatttcggatgggataattaactcggccactgacatctcagaacaactgacgattccatcatcatccctcatcaacatgattagcagaaagccttcacacctcctccctgcacccgggactggactgaagaggcaaaaggacctatctgtgactatgcctcga

SEQ ID NO: 187981 - DNA, 278 bp, Zea Mays
tcctgcaagtccaagaaaactccatacttgtgtcactgtcgatggcgttggccaactctgaatagcatgctccttggcctcatcaacctcaataccctgtgtagtgacaacatagccaagaaacgatacgcatttggtgcaaaaggtgcatttgtcaaggttagcaaataagcgcgcggcgcgcaaagcatcaaaaacagcacgtagatggtcaagatgttcagataaacaagtgttgtagatcaagatatcatcaaaataaaccaccacaaattttc

SEQ ID NO: 187982 - DNA, 464 bp, Zea Mays
cttgctcagtatcttccaagattgtatctcatattccccttaacttatgaaattgtcaaagctactggagttgttgcaaagactgcttgggaaggagctgcatacaacatggtgctctatctgatagctagtcatgtatgacactcatatgtacttaagtggtttcatcattccgtatcttgatgtaactaattgttagatgtgatgcaaatcattcatctttccccccttttctttcaggtgctaggtgcactgtggtatttgctatctgttgatcgccagacattctgctggaagacgaactgcctgaatgaaactggttgtgatcttaagtacctagattgtgacacgacaccaaatgctacatgggcgaatacgactgctgtcttcagtaattgtaatgctagcgataccaatataagttttgattttggcatgttcgagcctgcattgtctaatcaagc

SEQ ID NO: 187983 - DNA, 577 bp, Zea Mays
gcaagtcagggtagtctagtgtttcaagtattacatgctctaaataatatcaggaaaatatcgtataactttgtgtaatatctggttacagtggccaattctactaccaatttctcccagctctatctaaaagccattacttcttagattgtatataattgattccttcctcttttgtcaaatccagttatgttaaaatttcttattttcacttcgatgtacttatttgtgtacaatatcatatatcattgttccaaactgaaacaggagctcttcaggacattcttcatttgcatgatgtccttgccagggtttaccttgcaaagttgtgtcattcgatatctagagcacgtgtattggaccgtaagtgaattgttttgtgcataacctgaatttatgtgtgatttgtgatgcaaatcagggtgcatgcatcaaatcgcggttctaatcatatacaatttatgcagagaggcctgacataaagtcacagtacagttccctcctttatcaacttcttctggatcccagtgacagggtctgctttgaggccataaattgtgtgttgggaaaagtcgac

SEQ ID NO: 187984 - DNA, 374 bp, Zea Mays
tgaaaataaccgaacaagtcctcagtcttatttcggagcaaaaataccaggggattaggattggaggggccaaaatcctattgctgttcaaaattgaatagctgcccctccaagtatctttagtgccaaacaagccagactatgtacaaccctgacaccatgctactctttttaagtaaaagacctgacaccatgctctttttaaagtaaaagacaatggtaacaatggggtttatgtaaacctggtcttaataaaaaaacgactcaattatgtggtttgtactagcaaagttatgtcttggacctagaaaaccgagctagaggtgtgtctagatgaaggtagtttatttgttttttacatttactctctagat

SEQ ID NO: 187985 - DNA, 465 bp, Zea Mays
atcgaaagaccgtggctcctggaaagataagaaggggttagcaaccaaactttatagctttaaacatgatccttcatatgtgtgctcaccagttaagtccaaggaagggctagatggttcaaaggtgaatggagagactgggccagcaaatcttgagacctaccttagtactagttctatactggataatgatttggatcagggtgttgatcttcaagatcaggtaacaactctgctagtatgttattttatttctgtgaacaatatgaaaagtatcatttttttctttgtgttaaaatatattagttaaactcctggttaaaaatctgccgattcataatggttccatgtcaatatcacaatcccttattctgtaagactgaatggttctgttcataatgttcatattttcttgcttagaattatatcctgacaactgacttatctttacaacccaaatatttg

SEQ ID NO: 187986 - DNA, 386 bp, Zea Mays
acgatcctcaagtcacatggtggaatcagtggaatatctaggaaaatcaaggcatcattggatgatggcatcaaggaaactgaaatagcaaccagacagaagctgtatggcagcaacaagcacaccgagaaacctcctagaagcttctggacgtttgtctgggatgcgttgcatgacctgacgttgattattctaatcgtttgtgccgttgtttctctaatggttggccttgccactgagggatggccgaagggcatctatgacggccttggcataataaccagcattttgttggtggtgctggtcacagcatccagtgattacaaacagtcacggaagttcatggagctggactacgagaaaaagaagatatacgcccttgtcac

SEQ ID NO: 187987 - DNA, 752 bp, Zea Mays
gtaagttccatggttgtgttcaggtgcaggagcttttgaagcattttcagaactgccaaagtaaagattgttcatacaggagctgcagtaagtcaaaaatgatgtctcaccattataaaacttgtgtcgatgaacaatgtcctgtgtgcagcgttgtaaggaagtttttgcgccaatcaactgaacaggcatctaagcaaaaagctctcgagtctagaaaacttgctcaacaaaatgtgcctcagagaatcatgaacgggatagaaggtgatagaatggatgttgacccaatgtcagttgaagcatttgatgatcaaccattcgttccaaaacgcttgaagacgcatcctccatcacccagtggcctagagaatgatatctctgtagtctccaattatcatgtaaactcaggctttgcattgcaggaaacacagcctgagcagcttgaccacaataacaggacatcatatctgaaacgagaggtagatgcaaaggctgacatgcgagctcctcaaaagcccataaaaattagttatggtattgatggaaatgtgactgcatcaaggcataatgtgattcctggtgttcccagtgagattaattctcatatcaagcaagaaaacttgttggttgacaaagagacaagtgaaaccgcccttgaggttaagaatgaaacaaatgatccaactgatgcgactgtgtctaaatcaggaaaaccaaaaataaaaggtgtttcaatgacggaattattc

SEQ ID NO: 187988 - DNA, 4158 bp, Zea Mays
tgagtttctctttcatcggccacgtattttgtttttcgaaagaaagcgactggggctagtctctctctggcgttttgctgacttttccgaccaataattcagagcagacaaaaaggggtttcggtaccaagaacgaggagtcgaggaccgtatgcgagtggtggtggtcgcctggtcggagcagttgttggcgttgactaaccggggactaactaactaacctcgtcgtgaatgaatctgcagacatctcgcagatactgcaggaggctcagaaccggtggctgcggcccaccgagatctgcgagatactgtccaactacaagctcttctccatcgccgccgagccgcccaacatgccgaggagtacggtttctctccctatgttttttgtgctctctttaggtgcatgctgtggcttctgaacactggcctcataaatatgcttattaaattccattagcaatcgtgatgtatttatgctgtgggctatggaagagttgttgtctgctggcagcttggcatgggcatttcggctgtgtatatttctttggagtagctagtgatacagcttatggtaaatttttcgcttgctttgcgggctcgacaggtcttcctctgcttgctatgaagccatcgaaaacatgttctcattctgaaacagaaatctggcacaacttgatgtgttgggggatctggtgggtaaattttatggtaaatagtttgtgattttcgctaggcaacacaaccacatggcggttttcctttcgagtcattgctgatgatacgtcagccacgcccagtgtcctctttcattagttttttaagaagaaacgtagttttgtttcggttagcacaaatagtacaacagttacattatagccctacagtttgattgctcgatttggtcaaagctattcttatagtagtattagctctacagtttgattgcttcatttggtcaaagctattcttatagttcggaatgctggccctctcattggcactgattctcattacttaacttccatctgatcgcaataggtggctctctttttctatttgatcgcaaagtactgaggtacttcagaaaggatggacacaactggagaaagaaaaaagatggcaagactgtcaaagaagctcatgagaaactgaaagtgagtaactattttattttgaaagaaaatcaatatctcgaatgctgcgcaaaaaagtttaactgtggatgctggaatgttctgtatcattttgggcatttgctacttgttattgtgcattctgtaacttctgtagcggtagtgataaatattttttgtgtgtatactgcctatccagtatagatggtgtccatgcttgtggagttttttttaaacaacttgcatatcgcaccgctatccatactcatagagctgttaacaatttccatcttatgctgccacattcaatttagaccttagcaatgagcattgcattgggggagaagctgttgcatgcagatgggaagtgttgcataccttaggctggggcataattccatcatctcactgactgagcatgttacctgttaactgatacttacatgaaagatgtgtttatgtcaaatttactgcaagcttaagtcctacttaattatctggtagtagtatagattgagtcctatttctttagtgccttcacttgttctctaaagcttgttattataggctggcagcattgatgtactccattgctactatgcccatggagaggagaacgaaaactttcaaaggcgaacatattggctgttggaagagtaagtgctgactgttgcattcatgtcattccacactcatttgggtggtagactggtagttaactcatactcagaggaaaagtgtgactgatatgactttcttatttttcagggatttcactcatattgttcttgtacattacctagaagtcaaggtacattcttttcatagtcgattaaccttctctctcatctttcccctttttgtgtatttccttgttgggtgacttgtcactggaaaatggcttgtgggagatcttatttgatgagtacacatcggatttatcacctgtgctaggaaatacgtctaaaacacctatattcaccagctgtagtaacaaatatatctgaaataccacatgagctaatgctcgctcacatacttgtgacatcactgacatgtaccaatgaccttgttagctatggtttacaactgcccttccatcctatacttggttttacatcccgcttgggatcctcttttgcattttgtggtgaccactttgctactgcagacaacacaccccattctcttcaggtagggtacacatttttttgatcaagaaacactgttggggaagcccctacaataaaattctattaattaaaaatgcactgtacaagagaaaggcgaaaaggaggggaaatagaaaacaataatttacaaagaagaaagccaacatgatatcaaagatctaagatctgagttcaatctaatcatttgaagcttcaacgtgtgattgaagcagagcctccaagaagagaatgatgggaatgcattttctgaagatagcatttgtttctttgtttccaaattttccaggccaaaatagctaatatcttcttaaaaaaacttctttccaaagagcacctttgcaaatgttatcattgtaaagaaatctaaagaatgatcctaatgaattatgacatagttccagcaagcatcactgaacgggcaatcaagtaggagatggtatgtagtctcttcacaattgagatcacacaaaatgcaactctaatcattgttagaaacgatacaccttttccttctgagcagacttctagtattgattctatttctgaagagcaaccaaataaacactttgatctttttttgtcactttcgatttccagatccatttgaatggaatgggggactgatgaattgaaagtttaatgaataaactttacttgactgaaaattgttattgacccaagaatagatccacttgtctttgccttgcatggtgccttgaattgtcgtgattgtaaatttaatatattcctcactggcttctgttgacaatggagtaggaaaattgtcaagaagattcaaattctgtaaaaacatagcaagagaacagctcttccttttggcaaacgaataaaggcaggggaaatccaacttgaacaacttattattctaaatgtcttgccacagcgaaagatttaccatcaccaacaatcggcatagcaattcccctataatgattagctaatcttaaaatgtctttccaccaaaaggatccccacttagaagagcaatgagggatctaacccgaattatagtgtgtattccaaattaattccacctagggaatatcaagccttccgtagaacttatgcaggtgtttcatgagcacagcctggttctgcaacctaagattaataatccctagaccgcctttattcttgggcgtgatgaccttttcccaagaaatcattggtttgcgatttgtattgatgtcatttcctttccaaagacagtctcttcttgcacgattaatagaattgatgactgaaatagggagtctcacagtacacatggtgtaggtctgcaaagcagataaagtagaattccctagagtcaatcttcctgccatcgaaagcagccataccctgaccatgttcaaccgtcattcaattttgttcatgagggggagaaaatccctgactttaggttcagtagggtacatgttttcgttatatacctttctaaagtgtgcgcacacaaatgactctgatttgcatttatttggaaatggtccacttttgtttcatatacaataaattctggactatgaatataactgtatggcatttcttgaatctaatgataacttaacatttttcgcttgtttatgtttaactttccagggatgcaagcaaagtttcaatcgtgtgaaagaagaacttatgcagctatcgaatgtcgacagtccttcatgttcaaattccatcactagtcagaatcagatgggcccacaaaacatggaggctgctgaaagcccaataagcggacagatttcagaatatgaagacactgaatcaggtattgcagtttctctatcttccttctgcatcat

SEQ ID NO: 187989 - DNA, 634 bp, Zea Mays
ctcttaagaagttagccgcgagacctacagcacaatccccttctccactcgcgcttgtacagccacagggtgccatgcatctccctcgcctctgtgccgccgtagttcgtcgcaccctcgttgttgtcgccgggtagtcgccgcgcacagagcctcgccagtaccctcgatcatgacgtcctgtcgccaaggtacttgctatgcttccctctctctcttgtctctcttctttggcgtagttggccacgaaggcctcatgcgcgtgtcccccgtgcgtcttccccctcgactctccctgcacgagttgcagcgttgctatcggtgaagcacgcagtgccagccagtctatccctgccaccatctgtccccacggccttgggctggtgtcccagcccggcgcgcgtgattccttcccctggccgaatcagtagccggtgaaacccctccgttgtcgcggcagcagcaccgcccctacgttgcagccccatcgtgccccttcttggcctcgtgctcggccccggcaagcggccagactgcctcgccaccagccgagctcacgcggtcacgctccctgtagtccccatgtcacgtccttccccgacccgaagcagaacctgccggcacccagccagcg

SEQ ID NO: 187990 - DNA, 1834 bp, Zea Mays
acaggtcaaggatgaggagtatgttaacaaccgggagcagaacatcgcggatgcgattgatcttctcccgtgcctcacgacaggcattgatgtgaacgtgatgttcaggaagtgcgtaagggttttaacttgttgaccagttgtttgtcatgcacactcgtgataatatgtttattttgatgcttactgagctgtgtgggatgcaggattgatgacttcgagttcacccgagaacgtgctatatttgatcttctggatatcccgctatatcatggatggattgtggaccctcaggtgtgctatccttccacttagcaaaaatgctatggcatgtgttgtgttatctggtgatgctgctgatttcagttagatttgtgcatgtcatttttgttccgagttttacactcactttatcattctaatcaatgacctaaaccatctaatatgagctagtttttcttgttgaaattacagtttttagtttaacggatacaactgattcttttagtcctagtagaaagccactatgtttccataattgcgttatgccattggcttggtaggtctttgtgtgtgcacgtgcatgtgcagacacacatgcttttccagtgctttgtaggtttactatcgtatgcaaagcggccgctaatctaggattcatacatagtctctgactacctgtctctgttattgattcacttcgggttcgttattgatgtctgcctaaaattgtgtagtctacacaatgatctcttttaggatactcacgtgcacagatctagactattcattttatgaattacctaatgcaattaaaaacataatttcatcaacacttaccataatttcataaaaaaaaagcacaaggtccaccacattatcttgataaaatgtatgtgaacacgacaagggttgaatttattatttttgtctactactgtcaattagtcttgttccttgtcacttctgccacattttatattacatatgacccccaaaagctttgttcatcaacacttacctgcaatatttatattgttttcacacagcccacctgtatgacatgttggatccattctgtgtgttagctctgcaattgttcactacacacagtagacacggaaaagtggtgatatgatcaaaagaacttagaccaaataaaatatatacatgttggatctgtttcgtaggttaccctatgtatgggcccacccatgtcacgttcatcgtgttagctgattatggtcgggaaacttgtatttctattttctgatcaaaatgatggtgttgtcattttggggaaaatgaatatgtacatgttacagatttgttgcttcctattactctaagctaccaaatagaaagtcactaagacacattcaataattatgaatgtcctattgttggtaggccatcttctttatttttagccatttgatcaaatagaatggacaacccttactaatttggcagttccctgtatttttctcaatgcaatagatacaaaaacagatcattttgcaacttgcaagccacctacctactgttgctgattcatattgtatttaggatactgaaactgctactgctattggatcgaagtcctacaatgctcttgcttccggacttgttgaattcaagtcaggtaaaccaacagaagaaaataaacctgtggaggaagaaactgttgattttgctgccgcaacagctgcagctttaaagattccgtctcccagtgtttctcttgggagatcatttgatgaacatagtctctcaaactcagttgaaccacataaaaggcgaggtgaccttgaggaagaagaggaattgatga

SEQ ID NO: 187991 - DNA, 371 bp, Zea Mays
gctccccgttctgctcgatgtgtgtttataggatactcccataaacacaagggatatcgttgccttcatctttccacaaatcgcgtcgtgatctcccaacacgtcattttttatgaggactatttcccctttgcagcctctccccctctaactaatgactttgattttttatttgagatggaaccggtgctttcacccatggtatacgtctccttgcaagtattctcgtgtgcccgctacagcaatggccacaccgcccccatgtgtccattgttgttgacactgaggtgcctctcccggttgtctcagcatctgccccgacaccctccacggcgctgccaccttattctgtggcaccagctgtcgcccct

SEQ ID NO: 187992 - DNA, 436 bp, Zea Mays
ctaaaatcctacggttccaactctcacggccattcgtccaatcgtgatcgttagttatgagatcaatggtacgtcgttcttcttcaacctccgattatcccgccatgacgtcgtctgcacgccgcgcggcgaacgcacccgcaccacgcaccatccaccacgaactctgtcggtgatgcctagacctcgcgcacacaccccactccgcccccactatgttcatcggcacggggaatcgcatcaacacgagggggcggcctggcggccaggcaccacaccgactggcaatcggccagaacccgcacaacacccaattccgctcaaattgaagcagggaaggtcatgaggaggaatgggggagttcttacaggtgattgatcagctccgagcgcagcacacgcggagcgcggattcccattgacgcagcgcttcttct

SEQ ID NO: 187993 - DNA, 534 bp, Zea Mays
aaagcttcgaaaattttatgaaactagcctctagttttagttttttaaagctagagctagctgagctgggcctgtttggatagaagctgaaataggcttgaaattcttgaagtgaagctctcccaaatagggtctatatataatatgagcataatgaatatttggcatatgcaaagagctagggcctacaaagcttgtatctataaataggtcccagttagataaaatcggttagggagcgcttatcacttcaagtcgaaagactataaaatgtacatttcatgataataataattataaggcagacattcacccaagaaacatgtgcttctcatctcacgcatcgtcgccccttgaccaagggtttcctaagataagtcccatgatgccatggctcaatctcttgtagatttcatcaagacaatatgatgttgtcaccttacctagtagatcttggactaatcgttgtggttggcaagatctgctagttatcttgtgtagtatcaatttatttcatgctgagcttaatgttat

SEQ ID NO: 187994 - DNA, 750 bp, Zea Mays
actttgttgtgcattagtgttcttgtactcacccctctgtccaaggaccaaaatgggaagctggtgtcgtaatggtttattgaaggaaaaaaacagattgatacctggttcttggttcatgttgctgggatgccttcacaccaatctgcaattttcatcatatttggctggtttttcctgctcctgatcagattttgaaagagctaaccattgcccacaatcaacttactgtcggttgggtcagggtgctgctagctcctcccaaaggtaaagtttttttttatcacgcctagtgtttcatatgaaatcatttgaattggaaaaaacttgtgtgctacatagtagttggttttgatagattagcctgattcataaaattccaaacgttttaatttgctggccttcttcaaactgttgcccaaatttgacattattttcacgcatttcagtttctctccaatatctatacaatttgtgccagtccatctaatcaccccgcgcccctagagaataggcattgaagaaactggtagcctgttcctcaagatcatatatagggggaaaaaagcacaaaataaagaacgaactcatctgctgttctttcaataattgtatggtcatcacggatacaatcaaaagtcagtagcaagactgggaagctagctgaggagatggtcatttgtcgtcaagtgcagagattagcaagaaaaaccgcaaaaattggtctcagtgcaatcagctcgttcaaga

SEQ ID NO: 187995 - DNA, 333 bp, Zea Mays
cctagcgatgctgacaatccccctccataagaaggcgtttgtccccaagcggctgccgaaggaaaacgctggcgcagagcagcctcgtcctcccaagtatcaagggcagcatcataaccagaccagcgcactcgaacttattggtcgacgttgtggccgccccaagaaaaggatcgtcggtcgagcacatgtataaggtaaagaagtgctgaccagaatagaagatttgacactgggcttcagctgggacacatggaatacgggatggattgacggagatgatggtaactgcagcctgtatgccacactgccgacacgttggagtaccttgta

SEQ ID NO: 187996 - DNA, 625 bp, Zea Mays
gcttgggtccgtattggagagttacgcttccggttattgttgagctcatacagtccagatcctacatttaagtctagatacaagcattcacatattttggaaaaaattacacttgtgaagcttgaggaaaaggtaaaacatctcttgttaccttggtgcatgtcttgaaatctgtattccgaattgtcagtttcatatacttaatgagatgcaaggaagaacatttttttcttgaatacgcatgcaaacaagaacatagatttacagtggcttgcatcatcaattgagctatgttttttcgataaccagttgagctatgcggcatgtatcatcaaattgatattcatctttttaagaaagaaagccaactcttgcgaagaaaagggaaaagactgtcaaatttatagcagctgtgtttttacaggttcgtcatgattgtgaggaattagctggttctaactcccctgaagatagccatgacaacgagttattgcaattgctggaaattaaagagaaagacacccgtgcaaaggtcttattacaattttacatcatgcacttaccgtttcttcttgttcatttctgcattcttgtatatcttcaatcaattaaatatgacgttcta

SEQ ID NO: 187997 - DNA, 408 bp, Zea Mays
gctagatgaaaatatttcttcagaaggggaaagttcggacgatgagtctgatggttttcactccgatgatgagatggacttgacacctgcccctcctggaacagaagaaaatatggagggttcatctgttgcaaacaaacatgatgccgatggagataccaaagaggaagatgacgcatctgatgatgaagatggtacggatcaagatgactccaacagtgatagtgatgaactagacgatgactctgatgtggatgtgggtactgatatatctgatgaagacgaaggtgacgacggtgaactgaaagaaagcataaatggttcagaggatgaagctttagaccagaatgaagacagcgaagaggaagacaagtcaaaaggcagtggctctaaagcgcagaagaggaa

SEQ ID NO: 187998 - DNA, 2647 bp, Zea Mays
ctgagctaaacgttggattcagtgttgatttcgtttggaagagtaccagttttgataggatgcaaggagcaatgaaaacttttgctgtggacgagacaagtgtcagtgggtgagtataatatgtgatactgtgcatagggttacgacatatcgttgtcattataatcgaacaaggctctttgatagaaaacaactccatcaaatcctaaaccacttcatatattattagtcggcgagatatttgattgtttctgttacacacactgtttcattggttaactatgtgcatactgaagaatattcttataataagatccattctatctcattctttataattttgttcttctgaagtgtttgtcatagttgtatcactattaacaaagttttactgtctgttctttcacacagatacatataccaccaccttttgggacatgaagttgagcatcaaataatacgtaacaccctaccaagacgctttggtgcacctggacttccagaactaaatgcttcccaggtacattatctctctctctctctctgtctctctctacactcacacatgtgtgtgtattctttgttctatatttcctcttttttttgcttttcatgtcttctaacatggtgcattcatgcctttgattaacatggttgtcttctgttctgggacaatctgtgtatattatatattttaaattttgggtgcagctttgcaaatttgctgctgttatggcctgtgtatgttgttattgattgtttgatctgatgttgtcttctgtattatttattgtgtattcaggttttagcagttaaaagtgtcctgcagaagccagttagtttgattcaaggtccacctggcactggaaaaactgtcacatctggtgcaattgtgtatcacatggccaaacaaggtcaaggacaggtatgggattattagaagtatgttgttcacttgtttgacatggtttagggagaattgtctgacctctaattttgtcaaatttgtaggttcttgtatgtgccccaagtaatgttgctgttgatcagctggcagagaagataagctcaaccggtctcaaggtatcgttgaaatcttatttaaatttctgcagttctccaacttgctttatatttagagttatatgccaaagctgtttggaggattaactgaacattttatgtatggttgaatgcagtactcaactgtgaacctgtcaccagtacttcagtagtatatgataatgatattcaactaagaatttatgaataatcatagcatgatgataaatgaaaaaaatccccattccacctgatgtgcccagtttttcagtatccaacttctgttggtgctgttatcctgatattcattcggtatttagtgttttctgttatttattttttattatgtgctacaggttgttaggctgtgtgcaaaatctagagaagctgtttcgtctcctgttgagcatctcacacttcattatcaggtacatcctattgttgcttttgtggaaattaatcttgctatgaatgtcactgatgcttatgttaactcttgcaggttaggcaccttgatacctctgaaaagagtgaatttcacaagttacagcaactgaaagatgaacaaggtaatccatgtttaactattgtgataccattatgccacaatcaagcattgtcgagggatgtgatgtgcaaagattattgatgagtattccgacaagcatattctactgttacaggtgaattgtccagcagtgatgagaagaagtacaaggcactaaagcgtgccactgaaagagagatactgcagagtgctgatgtcatttgttgcacctgtgtcggtgctggagatcctcgtctttcaaacttccgtttccgacaagtaattattgtcgcctcatgctgtctccggttagctatgattcctgttgtgtaatattctgatgcaacagtaaactttattgtcaggttcttattgatgagtccacacaggcaacagagcctgaatgtcttattcctttggtgcttggtgtcaagcaggtaaaatataaacttgtattttcttttcttttctttttatttatcctttattaatactcttgcaattataggttgtccttgtcggagatcattgccaattgggtcctgtcatcatgtgcaaaaaagcagcccgtgcaggattagcacaatctctctttgaacgccttgttatccttggagtgaagccattcaggctacaggtaatacctgcatatgatgtaccttggtgttattatcctttccctgcttcatcctgcaactttggcactccatgtataaaggctatagttttttcttgacttagttatagcagttacttacatttttatgtcatgataattactcctcattagacattttggaaactattgttttttgtacttcacataaatgagttcatgctgatgttatctggtttttcctgctgttatcgatctattaagttatgtcaaaacttgaaacaatggtattgccaggattaatagtcataattagaagtgagctgataactctataccatcagcaataattctaactcaaatcatctctgatttataggtccagtatagaatgcatccatgcctctcagagtttccatcca

SEQ ID NO: 187999 - DNA, 735 bp, Zea Mays
gctgcttttgcatcgccaccagttgcaatggcattggccatgatggctgctggtgcctcaggaacagaaacaagaacacctcctaggaataccttgaataggcgtgacaaagcattgcctgagcgcaaggcagcagcaaaactacagactttctcgagtttccagatgcctatggaaacagcatctaacaagcctgggtccaccctgaaggacaaggcagcagcaaaagctgccgcattggcagccgctcgtgaccttgaacgaactgctaagattggttcaagaaggggccttagtgctgtagcaatggcaacatcaggacaaaggaggagttcgggtgacatcgaacgagcaaagaggtggaatacgtcagaagctatgagtgctgcttgggtggagtgtctgcaatcagatgattccaaatcagttgtgggaagggatttttcagccctttcatacaaatatgtcgcagtacttgtttcttgtttggccttagcacgaaacttacaacgagctgaggtaaatccacttggaacacttaatttttgttatttatatatttttatgcctcataagattaggaaaatacagatggagaggcaaacactagttgatgtgttaattcggcatcgcgcctcaactgggcttcgagcatggcggcatcttcttcattgcctaacagagatgggtagactatatggaccttttgaacatctgtgcactcctgatcgtgta

SEQ ID NO: 188000 - DNA, 786 bp, Zea Mays
ggaagctggaggaggagaaggccgctgtccagtgtaagctcaagtggaaggatgagcagttcaggcacctcgaggaggcactcaagaaggttcaggatgacttcagggctgccaagaaggagtggggctcagatagatcaactttggttgatcggattgacactcttgaggctgatttggattccaagatcagggttgcagaggatttccggtccaggctggatatgtgcagccaggcattagcccatgaggaaggccgcaggaagcgagtggaaacagagatgtctgagttgcgccacatgtatggcaatgtgatctctgaatatcaaggggccaaatcaatggtcgagtcgttgagctccaagacagatggggatattgcatatttgagaagctcactggctgagaaggccacaatgctcaaggaaatagaatacagtaaggcacgtattgaacaagaaaatgaggatttgcggtcaaagctcaaggagtatcaggaggcacagattggtggtgcagatgctgttgtatcattgaaaagtctgcgggagaagttccgagccctggagcagacacatagaagttgcaccgagaagctaagaggtaaggaagaagaatggagactgcagatgacaaagcttgtgaatgacttggatggatgcttatcgcagttagaatccaaagatattcttatcgtgcaactgcagaatgagttgctgggtagtcataggtcccttgagctacaaacagtggataattgggaagcattgataatacttactgttg

SEQ ID NO: 188001 - DNA, 519 bp, Zea Mays
attagaggggccctgtcagtgcaagttctggtcgaaaatttgcaactttgggatcttgtatatgcgctggaactccaagccaacaatctaggcggtcaaacacataaaggctaattttctaatatgggtaacataccaaaacttagcactcaaggtttattttcaacatgtccatgtgaacttgattaggctaataaagggattttgggtctttcgtttgggtgaatttagaatgaggtggtcttggagtatttggcctacaattaagcatctttgtgtgagtttgtgctgttcatgggaggttttatttgattcctttggggattatggaactctgtattttgacatggggaagatttggattgagccatattgtttgaataatgattgtctaacatccatccttatcctctcctcctagttgcaggtacaaccgtgaataccgacatccctgttgtactcacaggcatctccatcaacctttgttttcttcgtgatgtgtgtgctaaatatttttgt

SEQ ID NO: 188002 - DNA, 570 bp, Zea Mays
cagaagcaaagcgacgtcaagaaacaagaagagagggaggttgatccgtccaaataatagatgggattccaatcaaatggcagcaatggcacagcctagttagccgacagatcatcacttgatttgtcagcaacagcatccgattctaacagacagcgagcccgaagacatgacggcggtggcgaacctgtcgtcgggggcgctggaggcgacggcgaagccgctggcggcggcgtgctacgacaacaacctggtgaactcgcagggcatgttcctgggcgaccagccgctgcgcttctcgctgccgctgctcctcgtgcaggtgtccgtcatcctagtcctctccgcggccgcccacgtcgtgctccgccgcctcggccagtcccgcttcgtcacccacatgctggtcggcatcttcctggggccctccgtgctgggccggaacgcctccttccgcgacctcctcttctccgagcggggcacctacatcctcgagagcgtctccctggtggcgctcatcctcttcctcttctccatgggcgtcaagaccgacctcagcctgctccgccg

SEQ ID NO: 188003 - DNA, 2113 bp, Zea Mays
gtcaggagcagtttgcatgctgaaattgcagaagtacgtgcagagaaggagacagctctatcagagttacatatgtctcagacttccatcaggaacttagagagtgtggtagaaaagcaaactgagaacattttaactctagaaaaagctaatgataagttaaacaataaaatatgtatcttgacagagcaagtagaacaagccaaggctgagctgcataaggaggtagcggcaatacaagaagagaaggatacagcactaacacaattaagacagtcagagttttcaatacaagatcttgagaatgaggtgacacgactgaaagacgaactttcaattcagctggaaaaaaattccaccttggacaagcaatttgaagaattcaagagcaagctgcatgctgaaattttagacctacgcgcagagaaggacacatctctattggagttacagacatctcaggattctgtaaggaatcttgagattctggttgaaaagcaaactgagaacatttcaactctgcaccaagctaatgatgagttacagaagaacatctacactttgactgagcaatcacaacaagccaaggaggagatgcaggatgagttgaaggcaatacaagaagagaaggatacagtgctaacacaactgaagcagtcagagacttcagtacaaaatctagaggatgaggtgacacgactgaaagaggaactttccgtccagctagaaaacaattccaccttggacaagcagtttgcagaagctaggagcaatctgcatgctgaaatttcagacctacgtgcagagaagggcacatctctactggagttacagatgtctcaggcttctgtcaggaatcttgagattttggtcggaaagcaaactgagaacatttcaactctacagcaagctaatgaagagttacaaaagaacatctacactttgactgagcaatcacaacaggtcaaggtggagatgcaaagtgatttgaaggcaatacaagaagagaagaatgcggtgctatcacaactgaagcagtcagaaacttcagtacaaaatcttgagaatgaggtgatacgactgaaagaggagctttctgtccagctagaaaacaattccaccttggacaagcagtttgaagaagccaggagcaatctgcatgctgaaatttcagagctacgtgcagataagaacacatctctattgaaattacagacgtctcaggattctgtcaggaatcttgagattgtggttgaaaagcaaactgagaacatttcaactctacagcaagctaatgatgagttacagaagaacatctacactttgacggagcaatcacaacgagacaaggcggagatgcaggatgagttgaaggcaatacaagaagataaggatgcagtgctaacacaactgaagcagtcagagacttcagtacaaaatctagaggatgagttgacacgactgaaagaggagctttccgtccagctagaaaacaattccaccttggacaagcagtttgcagaagccaggagcaatctgcatgctgaaatttcagacctacatacagagaaggacacatctctacgggaattacagacgtctcaggcttgtgtcaggaatcttgagattgtggttgaaaagcaaactgagaacatttcaactctacagcaagctaatgatgaattacagaagaatgtctatactttgactgagcaatcacagcaagccaaggtggagatgcaggatgagttgaagtcaatacaagaagagaaggatgcagcgctaacacaactgaagctgtcagagacttcagtacaaaatcttgagaatgaggtgacacgactgaaatgggagttctccgtccagctagaaaacaattccaccttggacaagcagttggaggaggcaatgttgaaagtgtctagcctacatgagaatcttgagaaggcccaagctgaagcagcttgtcaacttgatggcatgagtacaaaaaccaaagatctagaggagacaatcaatcaattgtcttctcaaaagactaagttggagaaggatgtgaaaattatgattgaagcatgcacagaaaacatgtcatgtttggcaggatttgaag

SEQ ID NO: 188004 - DNA, 344 bp, Zea Mays
gagaatagcccgcggggccttgttggcgcggaacagaccctcgatggcgacccaaaggttgcgggcggtctggttgtcgccgtcgacggcgaggctgaggatggagtcgtcgacggagccgaagatccagctgcgaacgcagcagtccgcttgatcccagatcaggtcttgcgggcgtggtggagcagagccgtcgatgtggtggcgaaggaggaacttggcgcacatcgatttgaagaaggatgcccaccgggagtagttggaggccttcatctccagcctggtcggtacatgagattgaaccgagacggtggcatatgagggcaccatgagctgctggatgg

SEQ ID NO: 188005 - DNA, 414 bp, Zea Mays
gtcataacatctctccccgtctcttcaaacaattcgatgaatgttcgggtagaggtctttgaagttgtgcagtagctcccaagtagcgtcatcggtggtcataccctgccactgtaccagcacatgccaagcgccatgatgtaaatgggcgagtagcacactctctggagtaggcaacaaccgaccatcctaaatagtggcccttgtggtggggtcatcagagggtccccctaagctctacatggaacacgtcattgacgtgtgccttctggaagctaaaggctgtaggccacctgcccaacacgctccaactcctgaacggggcctgcatagcgaggaccaagcttacccttggactagggctctagtgagtgcgtcgggcaatggagacggcgaagccacacctagtcgccc

SEQ ID NO: 188006 - DNA, 1481 bp, Zea Mays
tgtagctgcgtctgccctagttgaagggcggtccaatcgcagtttcacactgccgccgccacggcccacggcgccacgccctgttgcccgtttcgtctcccgtccccttcctagtctccccccaaaacaagaagcgggctggcggctgcagtttcccgcctgctcgcacattggcgcgaaatttgccgagctaccttgcgcgctcccttcccgcatcccagcaataacactatctacagtgtaagccaaagttcctagtccccctcccctccgctcccttctctctcctcctcacggacgtcagagctccttccccattccggcgttgccaagaaggccggtttccgggccctgtcttccgctacctcgccggccgcctttcaccgtcatacaaggtcagcacgtccagcttttcacgcccgctcgccgccgcggcgggcgacggccctctttggccgtcgataatctgcgcgctgtagtagatctatgtttatgttttattgttggaaaactatctttgtttatcttagcatttccctaccgaaatctgcgcgctgtagtagatctatgtttatttttttgttggaaaaccatctttgttttatcttagcatttcccgaaagttgcagatctgttaatcgatctgctcgaatgagccgtggctaggactctttcccttgtttccgtagctattgatttggggtgtgtggttggtggcactgtccactgggaattaggcgaagaaatgctcttctccggcaaagtgttcgtttcagggctttcagtattttttttgaggaaattggagaggcggaagccctacagatgtttcagggcttcagtattgccacccagtttttcaaggtgaatgccactgggggtttcttgacgagtacagggatgcgactactgtcctcttcctttataatccctgcagagttgattcatacgagcaaatgttaaaaatgcactcttcaaatgaaatatgcgcgcaagcttgtccattaaacatccatgtcactctattcctttttttaatccatgtgctgggtagtggaagtctgtctgatacttgactccttgatgtatagcagtttctcgtgtcttatttgtagtgatggtctgtggtttatggatcattcctgtacaacacatacatacaattcttattagtagaagattgcgtaggcacatttatgtactgtttccatgctgatttggtaagaggtttagggtttatgtactgatttggtcatggaactcatggacatgtgctaatgttgaagtttttcttttaatatgcaatatcttctgtgtttaacaaggcttactctaattgcttggaaaatagtataactgcctaggtgctaggcagagcctaaccgtttgctcctaaccacatgcacctgatcataacacttgattttctgcatttctacaggaaataggaaatatttttctgtctgtaccattgctttcca

SEQ ID NO: 188007 - DNA, 697 bp, Zea Mays
gccaactgcagcgggatgttgcctatattttgcctccgccaaatctttagtgccttagctgtccgacgcattttgacatggaaacgtagaatggcgtcgtctgaatgaactggttgttcccaagtgctttgcactatttccttgaagccgggcatggaggtccaatatgattcaaaacgaaaacccttgtagaaatccaaggtaacatccccctgtaggagcaaaggggcatgatctgaagtcatggatgccaaagcctggagatcggaattggggaaaaggtcctgccattctgtagagcagaacacatggtcgatgcgagacatagtaggcatgtcctgttcatttgaccaagtgtatcgacgccccctcattgctagttccaccaattgcaagccatctattactcgtttgaaacggttcatcatttgaatattaacccttgtgttgtttttgtcgctcatacggtaaattaaattgaagtcccctagaaggagccatttcgggtgcatgatctgtttaaggtgggtgatctcatcaagaaagagaatcttgtcctgatccgactgtggtccgtagacccctgtaatggaccaatctgtgccatcagccagtaatgtaatagaagcagatactgtgtgatcagaggtatgcggggagtggagttggaaaaaacggtcatgggctgccagcaaaa

SEQ ID NO: 188008 - DNA, 397 bp, Zea Mays
catccttccatttccttgtcttcatcctacaatgatatttctcctgcacagatataccatcattgcttgctctgagatccttccaaactttttccagtgccattgtcacctttgatgccccctgaatggcaaaaggcaaaagggtgaattcatctgtattaacataaaccagagcaattagttctttgtgctgcacacaccagtgttatgttctccagttgattttgaaccagtgttttaaggtgttggtctagttgttgcctaggtgagaaagtgctaagcctaagaagggagggactgcagaagaattaaatacgatgaggagaaccagcaggcaggcaactctcccttcgcatttcccatcctcgctggctccagtccagtccagtaccgacca

SEQ ID NO: 188009 - DNA, 849 bp, Zea Mays
gaacgtaagaaagtcttgaggcgaaagttcaatgatgatcaggttagtttttttatgttccaatttgtccttgcaatcatttgtttcttttactcttatatgcaactttagtgacttctatttttctgacgcagctagatgagcttaacatgtatttagcaagtgatgacagcgcgtcagataatgaaggtgtagacgattctgaggatgaatctctgccaaatgggggatccaaacggaagctaacaaaagaggagaggttggctcttctgctgcaaggagacaaatctgatgaggagcaaactgatgaccaggatatggagattacattcaacacggagcttgaggatcttagtaaacggatcctagagagaaagaacaatgaggagaagaccatctgggagaagcaccaagagaaaatgaaagagaaaaggaagggtaggaagaggggactaaaggacgaagatgatgataaccactacatcagcgatgatgagcctgagaatgatgatgatttctttgcagatgaacagtctgatgaagaacctaagccgagcaaaagcaagaaacacaaggcaaaggcaaaaggcgaagcaaagaggaaaggaaatgatgggaccacagatgagcatttggaacaagaagcaaccaaagatgagttggagctcttggttgctggtgaccaggatactgccaatggtgcaaagggttataacttgaagcgtaaaaagggcaagaagggcaaagaggaatctgctgatgacaaacttcctgacattgaccttagcaaggatgagaggttctcagcaatgtttacttcccacttgttcgcattggatccaactgatc

SEQ ID NO: 188010 - DNA, 357 bp, Zea Mays
ataatcaagaagcttagtaggagttctattgataagatgtgttgaggtgaggaacgcttggtcccaaaacttgagcggtatagacgcattagcgagtaaagagaggcccatctcaacaatgtgcatgtgcttacgctcgacgaccccattctgctgatgagcataggggcaggacacaagatgagtgatgccaacgatacgaaaaaaggaattaagccgctcatattcgccaccccaatcggtttgcatagcaatgatttttctattgagcaagcgctcaacaaggctttgaaattctttgaagaactgaaacacctcagacttatggcgaagaagatagatccaagtaaatttact

SEQ ID NO: 188011 - DNA, 603 bp, Zea Mays
agccaatcgactacccaacctggctcgtcaatgtagtcatgatcaagagtagtaggcaattttgatctagttcagtgtgatgtttgggcatcccccgttctcagcatttctggttataaatattacttgctcattctggatgatttctctgattttatgtggaattttcccttgcgcttgaagtctgacacgttccctacacctctcacttctttgctttgggtttccactcagcttggtcacaccatccaaagtgtttagtgtgacaacgggcgggagttcgataactccgcgtcccgcaacttcttcctttctcacagtgtcccgcaacttcttcctttctcacagtgttcgataactctgttgtttcaggcctgccttcacgcccgctactgggtcgagagactggccactgctacccatctgcgtaaccgccttcctaccaaggcagttcgtcaccccacccccttctttgctctctttggcacctcttcctcctacgaccacctttgagttttcgggtgcgcctgctatcctaatctttctgccactgcccccacaagcttgtgccccacttcatttgtgtcttccttgggtactctc

SEQ ID NO: 188012 - DNA, 273 bp, Zea Mays
ccggaccgccagggatcgccgggaacacgcaccattttcttcctcatccgcggttcacgtgggcagaaccggatagtttacttaatgagaaattaagttgggggaatcagttggggagggttcaatccggggtacgtcgctcgggggcaccggtcgttgcgtaaatccgccagtgcaacctcaccggagttcattctccgtgctaccgtcgtcgtggacttttccctgcgaagaaataggaatcggaggtcttttctgcaaacagtcagcgac

SEQ ID NO: 188013 - DNA, 284 bp, Zea Mays
tctcttttcctttctctaccattgtttgtgcagtcctctcccgtttcttttgtttatcttttaataaaatttgcaccgttgtaggagattacctacagatattattatatatgtacttttcaatgttagatggtttggacataacctgtgtgttatcctgcccgagaagaaaacgacaaagccatagatttccaataaatctaataaacccgtttgtgacctaccgtaatgaaccacacgttccaataaggtcccacacaaagtctcccgagaggctaattaag

SEQ ID NO: 188014 - DNA, 463 bp, Zea Mays
acgtgaaggtgccattgctgcatgatgaggtacgaggtcctgtcactcttctcattcaattagacgttgctctgtttcattgagtccgatgctcgctctgcgtttgtggattggtgtatgcaatggcttacgagatggtaagttcgatgttgaattcatccacttgagttggaagcggttagactattatgatggtgggattagtagcacatcgtcactgaaaagtggtcaatggatcgatttgtcgtggaagtgttgctgttctagacaattaaactgctattggcttgtgtgcctctctgttctcatagtgatgtgcaccagaattgtgaagctctgaattcaagctctgtgggtttagaaaaactgagaccttttctttgtgacttatttgttgggctttgtcaatgctccagggtgtggattccatgaaagcatatgactgaattgagcttcttctaag

SEQ ID NO: 188015 - DNA, 290 bp, Zea Mays
gtctgacatgtctagagattagctctataaatggcagtacctactctctcccttcttcccccacacaccacttcttctccctcttccccttttagccgatgcacatccactcctctctgttcttgggcgcatggagcagcagcagctcctccctcgacatcttccccatgagctcgctcctccttcctgtttttccatggcgcccaagcagcagcaaggagctccccatggcattcagcagcaagcatccctccccttctcagccgctgctcggcccccatggcgcccag

SEQ ID NO: 188016 - DNA, 1445 bp, Zea Mays
ctcgaggtcgccgcgccgccgccggcgcgctaccttcgcgttggctccctccccgtccccaccgactcctctgcctctctcccagtcctcctgccttctccgtccccgtaagccccacttccccactctcgcctctccgtatatgcctacgcgcgcgtgtttaagccctctggctactgtttgtcctattctcaatcaggaggggatgatgcttctagggtttaaagcgtctcgattgacctgtaggacttttgttaagggttgaggctgggagtttgagatggagttccatgggaatgaacaccatctatgttgtgcaattagaagtatttgtgtttgttatttggtagcgattagggaagaccctggggatagtacgcttcagttgagttctgcagataaactgccaattgcttattggatttacaaattgttatcataggaaatggtgatgaaactgctatggtgaaatgaatagaagtcttgtcctactattggctaggattggtctgatcgatggatgcaacctaccaaaattcagttgctatatcatgtaaaaatgaaacgaaatgaacacatattctggtggtggtatgctgatgggtactgtataccatttaccctcttttggttttatctcccatactgcaatgaataacaagcatgtgcacacagtcatattgaaagataaaaattataaaacgacacttagtcgttatggtcctaatcctgtagctggaactgaataatgcatgcaaatgcctcttccggagaattgctgtttaattctgttcttgatgtaggattggtgctccaaggtatcaaatgctgccattagagactgatctgaacacactccctatgattccaaacatcccagagaaggttttttcaagtgatgctaagagtactgaaggttatctctattaacccttgataattacaatctgatcagcataagaggaatactggcttgtagctaactttctctgcgaactgttcggcactgatgaattactgtaggtattgtgtgcgacagttcactttttattgtcacctttatgactctgttcatactcttcaggattacggtatgacagtggtcatatcaaccagaacttatcaaggaagtgtgaagcattagctgtgtcaggtttggcagaatatggtgatgaaatagatgtgattgccccagctgatatcatgaagcagattttcaaaattccatactccaaggcacaagtatctattgctgtaaaccgtataggagatacactcattctaaacacagggtatgtagctggttgcataatcatcatcatgctgagtatagttaatacacatgaatgtttaatcgtgtattcgtgttgtaggcctgatgttgatgaaggtgaaaagatattcagaagacaaggtaaccagcctaaaggatctgatccatcaat

SEQ ID NO: 188017 - DNA, 384 bp, Zea Mays
tcaattacctattttaaaaacgattatttatacttgcccctaatatatactccgtgcaatttctagcgaaaacgttttgggtgcacggtgaaatttctagccaaaataagtgcatcgccaatgcaaaaatgaaaaagatggtgtccatgcatatgtgtagtggtgtagaaagctttgcgtgatggttatgttgcggattcaattcctagctgtcgtgcagtacttgaaaaaaatgtcgtgacttataattcaaatacattttttactatttttaaaaccaattttatgtttcgtgaaagaaacggttctcaattacctattttaaaaacgattatttatacttgcccctaatatatactccgtgcaatttctagcgaaaacgtt

SEQ ID NO: 188018 - DNA, 423 bp, Zea Mays
caacctgaagattctaagtgggggtggtttgaagattgccttggatcactagatggtacacacgttgatgtttttgtacctttggctgattaagggaggtatagaaataggaagcaacaaatcaccaccaatgttttgggtgtttgagatcgacacaggaagtttgtttatgttctagctagatgggaagggacagcttcagatttacgtgtgctacatgatgccatatctcgggacgatgcatttgctattccaagtagaaaatattacctagtagatgctggatacactaatgaactaggctttcttgctccatatcgatccactcgctaccacttgaatgagtgggctgcccaagggaataacccatccaatgccaaggaattgttcaatttgcgccattcaacagctagaaatgtgata

SEQ ID NO: 188019 - DNA, 286 bp, Zea Mays
gccggatcttcaatcactggagatatccacagttctggagctgattcacccacggcttcgttcctataagaaccacccgatcccccatcgtcgatcacatgcatcggcaccctctcccgtgttctccttccttctgcccacgctcaccgtcaccaccgaaccgccattgctcgtggccgagcacccttggcgcttctccgcccacgccaaggctgttgtggtgatacccaaactcactgctggttctccacgtcttccctggctcggtccagccccacgtcattgc

SEQ ID NO: 188020 - DNA, 417 bp, Zea Mays
gttcagtgtgtcatcagcactcgataatgccgacaaaaatacatttcaagcaacaattatgggggggacaaagttatgctcacgacacttgcctcaggatattatttactgtgttggtggtgtctccgtatttttcccactcttcactcaattttttgatgctgcaagtgatattgagaaatgttgccatacatctgttgtcaatgataaattggtggctgaggtcattgagctagttgctactgttctggatggaaatgtgtcaaatcagcaacagatgtatcttctttctgggttatctattctaggcttcttgcttcaatcagctaccccacagctcttaaccaccaaaactctttctgcactgaagtatatgtttgacattctgaggaactgcagtaatctctctctccctcc

SEQ ID NO: 188021 - DNA, 425 bp, Zea Mays
ctagacttggctttggccataccttggactccccttccctctcctctccccgtctcccggcgtgcgtgcgtactacttactgcttgtccaatcgccgcgaccagagctcccgcgcacgctactggagaggattccagcgcccgtcgagcaacaggactctagcgcccgacccgacaaacgacagatagtagctactgcctccctacaccgtctcggcatctccgggggcacggcacgggaacggaggagcggagaaatccatccgccgaaccgcttgctttgcttggcaggcaccccgtacaattgggggttccggttcgaggaacgctcgggggggcgtgtgtgcggccgccttcgctcctcatccagaccacttgattacgccgcgctccctacgacaggaggtgcccaggccgaggtccttc

SEQ ID NO: 188022 - DNA, 276 bp, Zea Mays
gctgcatgtgttgctaacgtggacgacgaggaggaggaagatgaagttcctttgactcggaaaaacagtcggcagttcattgccagtggtgaaagtagtggagttccctctcctgctttgtctgccctcattggtctgcaagaactgtcactggccaactttgatcagactcttgaggatatggtcccagaggatttgttatcggagccagtagatgatggtgcaatggaagcctgcgctgacgtgcctgatgctgggttgaggtcatcccgtgcc

SEQ ID NO: 188023 - DNA, 272 bp, Zea Mays
atttttcatttttgctaggtgttctgcaaggcatataaacaagttgatccttctatacatcatagcatgaggcacctttttggaacatggaaaggagtgtttcctctacctccgctccaaatgattgagaaggaacttggttttcagtcatctgccaatggatcatctagtgctgcaccatcaaggactgattctcaatccccgcgcccatccaatagcatacatgtaaatccaaaatatttggaagcgagacaacaactcaatcaaccaac

SEQ ID NO: 188024 - DNA, 289 bp, Zea Mays
gggggtttatggatggatagaagcagcccaagatacgtacatgggaaattttttgcactgcaggacagaacttccattgttaaaagtctttcagcttctgaacattgaataggggccacagaactcttagataaattacattgtaagccagaagcttgcccaaacaggttgaggatggactttataaccatcaaatctgtccttaagggtctcaaaaatattactgcgtcatctgcgtaaaaggagatcctatgcctggcatgttggaccgcaaggggttgcagcagct

SEQ ID NO: 188025 - DNA, 318 bp, Zea Mays
caaccgcctcatgccttctggccgcctgacgatcgtccgcccgagcatcccgcatccacgatcaataaaccacccacgatcttgcctggctcactaccacgttgccctcctgcagcgcccagccacggaggtcgcagaccacaactcctccccatggtcgcacctccctagtgtcatgtagcagcagcggtggcaagcatcgctcaggctggccaaggatcccctgcgagttcttcacgtccgacaagcctcgtcgtccgtcgtcgtcacaaggtgagatcccgcccaccccttcttccttgccattcgtcatcgagg

SEQ ID NO: 188026 - DNA, 838 bp, Zea Mays
tgtctttgcaattcatgattttccaaagaacaaaaaggatatggaacaactgaggcgagagaggctagcaccatcaacactagaggattcccgtctcctctttgaggatgtcataaaatgcccaggcaatgatgatgttagcttctacaaacaggtgaggcgcctccatacaattctcacctccagggattctatgaacaatgtcccaaagaatcctgaggctcgacggcggataactttcttcagcaactctctattcatgaatatgcctcgcgctccaacagttgagaagatgatggcattcagtgttttaaccccatactacaatgaagatgtgatgtacaacaaggaccaacttcgccgtgagaatgaagatggtgtctcaattttgttttatcttcaaaagatatatgaagatgattggggaaactttttagaacgtatgcagagggatggaatgactgatgacagtgaaatttgggctgggaaatatcaggaactccgactctgggcctcgtatagaggacagaccttagcacggactgttaggggaatgatgtactaccacagagctctcaagatgcttgcttttcttgataccgcctccgaggtagacatcacagagggtactaaacatcttgcatcctttggttcagttaggcatgagaatgatgtgtatcccatgaatggtggtttccggcggcaaccacaaaggaggttagacagaggaaccagtactgtaagccaactgtttaaaggtcaggaagatggtgctgctctcatgaagtacacctacgttgtcacttgccagatatatggaaagcagaaaattgctaaa

SEQ ID NO: 188027 - DNA, 318 bp, Zea Mays
ggatgagactccacaacaggtgatgaaatttcagaaacagaattttcagcaggttcagcagatggtggagcatgatcatcaacatcccccccgtgctccacctgcacactgatagactcagaattctggttagtagcactggtaaatacaaccgaaggaaacatagcagattcattgaacacaacgtttctactaaaaaatgccttctgtgtatcaggattccacaatttatatgctttaacactagatccataacccaagaaaacacacttaattgctctaggctcaagtttaccattatcaacatgtgcatatgca

SEQ ID NO: 188028 - DNA, 451 bp, Zea Mays
tgatggcatatggatgggacagaacgagacatgggtggaggcagggagggcaacaccatgatgcgcatccggtgagtgttgcgatcagtgatgcgctgagcttgatgatgacatgatgatgacgagcgcggtaaccagagagatcgaccgcacaatgatagagatgagcatagcagattagatgttgcacatcctacgagggcgctgcccccggtggagatcgatctcctcggaggcggcgcgacggcgacatcggaagcctaggtctacgattagaaaccctagtctcgtgatgccatgagggaagagagattatgtataatgcatgtgatggtattgcaatgtgcttctagggtgaatatataggagtacatggattggagataaggaaggttatcccgggattacaatcaatgtaatcaatcctaaaccaaccatatcaagagtttcc

SEQ ID NO: 188029 - DNA, 614 bp, Zea Mays
gcgcttgctatcccaacctttccacggttgctccccacaaacttgcacctcgtttcgcttggcgtgtcttcctcggatactcttttgaccataagggataccaatgtcttgatgtctcttccaaccgcatcattatcttccatcatgttgtgtttgatgagacatatttccctttctttgcctcaccccatccaactcaccttgattttttattggagttagactctctgttcccaccattggggccccaccctttgcatgtacatctccatcggcacccctgatgcctgcaccactggtaccacttgggttttagcctcatgtggcctcagctctcgcgttgcgtgctcccctggtcctgcttggcttccaaacccgagtggccacgatgccttgctcctctgtgccacgcgtggccacgatactacccctctctgacatcgctctctcctatgccacacacgtcttggagatcatcatctacacgcaccacctactcccgactctagtagccacctcactccctctcggcgtcgagcccgtcaccccgcttgtcaatcaccactctatggtcatgcgggccaagcatgacttccaatagcccgtggaccagt

SEQ ID NO: 188030 - DNA, 285 bp, Zea Mays
cccggaccattgtttctgaccgaggagccccatttgttgccagattctgggaacaactgcaagagtctctaggaaccaagctaatcagaagttcggcttaccaccctcagactgatggtcagaccgagagggtaaaccaaattcttgaagatatgttgagggcttgtgcaatcgattgtggcaagaactgggataaaaacctctctttggcagagtttgcttataacaacagttatcaatctagcctaaagatggcacccttcgaatctctctatgggagaagat

SEQ ID NO: 188031 - DNA, 478 bp, Zea Mays
tatgaaagtcctccggcatgcttccctggcactctgcagatgtcatgaaacagatgccttagttggacttcagaagtgggctgcatcaacattctattcttactttgagcaagataatcaactagttcggggcgtatctgatcgcgacaatcgcttctcctggatatcaggattgatctatcaatcccaggggcagtatgaaaaggctgctgcacattattcacatctactgcagtcggaggaagcccttatctccatgaaatctgatggcattcagtacatcatagagcgtgttattgagtgctacacatccctttcagattggaaatgcttagagagttggcttgctgagttacaagtgctccgtgctgtacacgccggcaaacctttttcaggagctctaacaagtgctggcaacgaacttaatgctatccatgcaatggcgtgctttgatgagggggactttcattcagcttgg

SEQ ID NO: 188032 - DNA, 409 bp, Zea Mays
cgaagtccggcgagggtgattctgctcctccggtgaggcaatgcctcggctcaagcttggtgaagcttcacagggtcttggggaagctatccaagggcttggtggaggctgaaggcctctagaaatggctggccacggtgaccggcgctcgggtggcttgggcgggtggcacaggtactcgtcggagctaaggggggtgtctggccagcgagggtgagcgcggagtgtggttaggtgcatccatgggtggtcttaaaagcgcgagtaagcacgacctaggggtggctctgacatgtgctcggggtgtgcgcgggtgagcgccagtgcgcgctctggcgtctgggcacagcgtcgagcatgaggtagcgcagagagaggtcatgttcaagcgcggattggctccaaatct

SEQ ID NO: 188033 - DNA, 341 bp, Zea Mays
tgaacgtggcgtggcgatacatctcgatgcagggcacgcgttcgccattggcgaccgtgatggtcagcttgtcgcgatgttgggggtacaaatactgttgctggcatgctgtcttcggcgatgaagttgtgtgtggacctggagtcgagcaaggcgtagaggacaacgttgcccatggtgatgcgaaccttcatggtggtcgaggagcgaacgctggctatggcacgaagggagatgagcggtgcttcttcttgtggatcgggctccatgcagttgtcctcatcttcggcgtcatctaggtctagtaagaacaatcgggggcaaactttattgtgcctgcg

SEQ ID NO: 188034 - DNA, 289 bp, Zea Mays
tcgccacgacatcctggcccccgttcgttggaggctgggacccggcctctctcgccgccgtctacagcactatggcgttggctccaccaccctctgactgggtcatcgactccggcgcagcctaccacaccacccccaccgcaggcatgctctctcgctcacacccatcctctccacacaccctacattgatcgtcgttggaaacggttccactcttccagtcacctcggtaggtgcctcggtactccttggaccgttctatctcaacgacgttctcgtagcccctcac

SEQ ID NO: 188035 - DNA, 610 bp, Zea Mays
gaaacaacagggaccactgctgcaggtgtgaatggattatttgcttttcgttcggacttgttggggtttcatccgaattaactaacgaggcagaccacaaagaggtaacaatcgatgcctgagtttcttgatttggtttggttcaaaaacgaatttcatgaacagtctcctattacttttttttcagtggaaaagggggcactccgtactctatctaattcagggagatttgcatgagctgatccaaaacagaggatggccctgttcgatcggaaccagaggcagaggtcgtcgttctgctccacggcgaccttcgtcgtgttcgtcgcgctctgcctcctcggcatgtggatgatatcctcccccgagaacgtcccgtcggccatttccttgtcctcggagaaggtcgtcaagtccgacgtcaaagaggaggacagctccattgacgccaccaataccgtcaagcaggacagtgccaacgtcgtctcagaggcgaccacggacggtggcgctgccacggagagcgccgaggatgtcgacctcccgggcaagcccggtggcggtggagcatcagaaggcgatggcgggaaggcgtcgtccaaggaccagt

SEQ ID NO: 188036 - DNA, 600 bp, Zea Mays
cagggctcaggcacttaacttgaaataattcggacagttccgccacaacaaaaggtcattagctagcccaataacgtcttcatccactagttgtactctaataccctctcgtgcgaatacaatgccctcaatatcatagaaacactatttttagtttcaaaggcatacctaaattgtgtttatgtccactcaagtaaaacaccacacatcaatatgacacatcatttctcaaaataaaataaagactatggaaaatttagccaaattgagagagagaactatccaaacatatgttaaggttgtaaggcacctttttccactaggctagctaatgaccttttgtgatacctgggctagctaatgaccttttgtgatacctggtttccaataatcccctctattcaagggatacctagattgtgtttatgtccactcaagtaaaacaccacacatcaatatgacacatcatttctcaaaataaaataaagactatggaaaatttagccaaattgcgtgagtgaactgtccaaacataggttaaggttgtaaggcacctttttccaccatacagttgataaaaagttgtaatataaagaattc

SEQ ID NO: 188037 - DNA, 446 bp, Zea Mays
gtcgtttctatgatattgagggcattgtattcacacgagtgggttttagagtacaaccagtggatgaagacattattgggctagccaatgatcttttgtgataccaggtttcctataatcccctctattcaaggcatagatcaacttttaaactaaaaatgacgtttccgtgatgtcaatggcattgtattcacacgagagggtattagaatacaactactggatgaacacgttagtgggctagctaatgaccttttgtgataacaggtttcctataacccctctattcaaggcatacttagacggtgattatgtccactcaagtaaaacaccacacatgaatttgccacatcgtttctcaaaatcaaataaagaccattgaaaattttgccaaactacatgggagaactgtccaaacataagttaaggttgtaaggcaccttatt

SEQ ID NO: 188038 - DNA, 288 bp, Zea Mays
gttgctaaagatgttagcactggcattacatatatccgatatatcatcatctgtatacagggaagcctgcatggctattctttatcatacttttggtcagtgtgctgagaacttccagagcacaagcttgatccattcacatgatgctttgactagcattagcgatgtaccagcaaagaggaacaaggtaacattagccatctgttatcccccaccccctcattttcttcttttttccaaggtggcgactccttggataggaggttgttgaatggaaaccagcatcca

SEQ ID NO: 188039 - DNA, 389 bp, Zea Mays
aaagatgcaatgcaaaacatccctccaaagacagagcgaatggtacctgttgaactgacatcaatccaggctgaatactaccgtgctatgcttacaaagaactatcaagtactgcgcaacattggaaaaggtggcgctcaccagtctttattgaacatagtaatgcagcttcggaaagtctgcaaccatccttatcttattcatggaactgaacctgaatctggttcacctgaatttttgcatgagatgcgcataaaggcctcagcgaagctaactttgttgcactctatgctaaaaatattacacaaggaaggccaccgtgtccttatattctctcagatgacaaaacttcttgacatccttgaagattatctgactttagaatttgg

SEQ ID NO: 188040 - DNA, 537 bp, Zea Mays
tcgtaatcagaatcatggaaagcatatgattcctttctctgccattggttcatctgtgactgctatgtctcttcactcgggacctactgtccaaagttcacagactccacaggttggcggatacacttcaccagtgcagataccagaatctgctgtagaatcctccaagggtgcactgggccatggtgctcaaaaggagcatgctggtgcaactggtgttggtgactggaatccccacaaccagcaggttcaaaatctaggtaatggtgccacggacaaagctgtttctagcattggcagattgcgttctgaaggattacctgcaaatgatcagtctacatctgccagggatggtggtggttcccgaccaaacaagggtgagaaggagcgccgtaaaaagaattatgatcctaatgttttctttaaggtgaacgggaaactttatcagaaacttggtaaaataggatctgggggtagcagtgaagtacataaagttatatcatcagattgcataatatatgccttgaaaaagatcaa

SEQ ID NO: 188041 - DNA, 512 bp, Zea Mays
gatccctgatgaggagttcctcgtttgtccagctgatgggctgctgcaagcctcgtaatgtggattaccccacatggtcgtattctatctctcaatgaataattttgctatactggtttggaatgtgaggggtttgaatgaccctcatcgcagggatactctcagatcattaataaactgtgtgatgcctactattgtatgtattcaagaaaccaagctgaattctatctctcactgggatgttgcttcctgtcttggctcagagtttggggattttgttttcttaccttctagtggtactagaggaggtattttggtagcctggcgtagagggctcatttctgctatagactccaaaattcatgaccattcagtgtcagtccgttttatgaaagaaaacagcaccgcttggtggttctcgggtgtctacggaccccatagagatgaggagaaattggcttttttagaggagctttctctggtcagaaccagttgtcctggcccctgggtga

SEQ ID NO: 188042 - DNA, 502 bp, Zea Mays
caaagctcccaagtaacaagaacaaccaaagcattgaagcccttatgcgaaaccttaggaagagctcgagaggactggccccaccaagagttgagcctgctggaaatgtctgggggagtaacagcagctagattagtcttttggagcacacgaatccaaatctccctggttagcacacactgcataaggatatgttgtattgattcatcaacttggtcacagaaggggcagctaggttggtggggcaacccacgctttgccaaccgatcagaggtccaacaacgattattgatgacaaggcagatggaaaacttgtagttgggaggtgcccagctcttccaaaccctcttacaaggagagaacttgattgtccctacaaacagcatcataggctgacttgctgctgtagcaacctgaggagcataattttcagtagtgttgatcagggacatcaggccgcagtaccaaaccatccaccatttgtcagatggctaaatattcc

SEQ ID NO: 188043 - DNA, 303 bp, Zea Mays
cacccgcacccacgacgcgactgaaccgtctcactgcgatggggcccatttaccggagacagttcccacgcgaacgtctctggtcattatcgcgtggttccgctgcaccatcctcgtacgcgcccattgccacgtgggacctacgtatcatctcccacctccacgaaggtcagaaccacgctgccataccggcctcccccgcatgcatagggaatccgttcccaactccaaccccttgagtccatgcccgaccgccatattaaaccctgcgccaaccttcagtttcatccgccccatcctcac

SEQ ID NO: 188044 - DNA, 1507 bp, Zea Mays
ttggcgcagttgtacaaaagtatcaggctgccgcacagaactcaacgagtttgtctcctcaggacatgcagaataattgtaactcgtaagtggattggcccttaccgtgctacacacttcattccatcctcgattctttgctactgtcaaattgtttgtcaccattttgaacatgatatatcttggttctaaaacttagtatctgcctggtaaagaagtcgatataagggtggacatacttgtgacttcatttgtgtgtagttctagatgcactatcctacacaacaattgattcagattgtattcagcttgattataggatagataggttgtgggtgttggtgaaggacatgaagcaaatgagctagtgaggcaatttgtctttgtggcgtgtatgtgttggtgattattattccagcatccagaaattataacatcttggagtattataatatagtatagtttgatttgtaggcaaatttacatgtctaaacattaaactagcttcctgaacagattagtgttatagttgttaaacattgatagcccaattcccaagtattatcatactaatatctttgtttctggagttagcacggaatatttgtagttgttctagactattatggtactagtaaagcatttgaaatgccaagtggctgtagagatgttgcgatacgaaggtagctgtgcataatgtagaaatcatgcctaggtggctgtgcctgtcacggtgtcacccaaagcccgggtatgtaaatacaaatgcatgtgtgctgaaagtgtgcaacccttccaagcattaatggcattggcatacaattgggcaccacaccactttatgctgtaggagcatctccaagaatagtctcactcttcattaagtgtgcttcagaaaggatgaggcactcaacttaacccaagatcaaagggctcaccgtatagtctgtcactgataaatccttatgattgtcgatttccatggttaacttggtaccataatgacggacactagaaagtgattaacgattaccagagctcttgctagtctgttggaacagaatgactctggtggtgtcataaatgctgacaatcttctatataaacttggtcaaacttaagatagtttgactcaagacaaacctagaatatcaaaaaaaagtctgggatggaggtactagtaattacatgcaacagtaaagacgttactgtgtgccactaaacatttgttacaatatttggcttatatgcactatgaatatcttgctttgaattgattatgatttgatttgggcacattatcttttgcttgaacagtcaacttgtgtcttatctgggtagaggtatgcatgcttcttagtgtaactcatgaactgcatacatctttgctgacttttttcttggaccaagtcatcactgtttttgaacttttcaagtgcaaattctattaacctaatcttatgttttaggtttgttgcatgtgcccgacaattggcgaaagcactgg

SEQ ID NO: 188045 - DNA, 436 bp, Zea Mays
gcgatccatcgatcagagtggcgcctctcgtcttcgtccctagggtttatcggatctgatccctccccccgttgccctactcgctcgcagcaggaggacgaggagatgctcgtgccccgccaggaggcggtcgacaccgacgcagcgcagcccatggaaggtactggtacgctcttatctcattttgctgctttgcttcagtttgatttgtagcttggtttgacaatgtgccacattagaaacttagttctgtgtgctggcattatcctgattctccatacggacgcgtttcctggatattggcagtggtggcacagactgaggtggtgagcacggcggagagccagcctgtggaagatccgcagacatcacggttcacttggacaattgagaacttcaccaggttcagtgagaagaagcactatttagaggtttt

SEQ ID NO: 188046 - DNA, 636 bp, Zea Mays
cgccctgtccatcactctacaacccgtggaccgaccaaatcactgtggcccgccccaaccccgggtggctcgacgtcgcggttgcttccgcctcaccatgcgctccttaccactccaccatttgatggtcctaggtgtcttggcgctatcggtgatgcccccatcaccgcttcttcctcacccgtcgcctcacacggctctgtcctggccgtgggctagggtgtgggaccagcggtgtcttgctaactcgtttagcacgatgaccttgaccccctgctgtgcccatcactgactgggtggtcgtctccgatacctcgttccataccactatggacattggtatccttcttccaccattgttggcaatggttctgttcttccagtcacctccatcaacgactcaaatctttttggtccttttcgtcttcgcaatgttcttgttgctcctgacaacattcggaaccttctatctattcgtcaattgactactgacatttcctgttctacggagtttgaccctttcggtttgttcatgaaggatcttgccacttggagtcttctcgcacggtgtgacagctttggcccctatacacccttcaccttcctgggtccactacatctttggcagcctcacat

SEQ ID NO: 188047 - DNA, 727 bp, Zea Mays
tccaggagcagaggaaagatacaatttgttatgaaattgctgtacagatgatggagatatacaacgagcaagtgagagatctccttcagactggcggaaacaaaaaatatcctttcacactgagcttgatattaatcctgctcttagatatcttaacttttttttttttgcatatgttgaacatctatcttatttatgtgggcctccttaacgccaagaaacattggaaattcgaaataattctcaaaacggaattgcagttccagatgcaaatgtggtgccagtcagatcgaccgctgatgtaattgacttgatgaatctgggccaaaagaatcgaacagtttgctcaactgccatgaatgaccgaagtagtcgctcccataggtttgtttgttgcttttgcattagtgcctccagtaccaggcatgatgttgaacttgtttttagctgatgtttgagtaaaccaattgcagctgtctgactgttcatgttcaaggacgagatttaacatctggaacagtcctaagaggttgcatgcatcttgtggatctagctggcagtgaaagagtcgataaatctgaagtggtaggaataggattaaaggaggcacagcacataaacaagtcactggctgcactgggagatgtgattgcagctctagcccagaaaagcacacatgttccttacagaaacagcaaacttactcaactattgcaagactctcttg

SEQ ID NO: 188048 - DNA, 667 bp, Zea Mays
tgagatgaatcatcagtttgcagctggcattcaggttagtacgaattttttccttgcatgctggattattcactgacacaatgtttgcttctgcttttataataagttactgtgtgcagactattgcaattattcccgtgttaccacgaggtgtactgcagctaggtgcgacaagtgtggtaagatatccatgctttagcaactgggatcactatatagtatcttgaagttgttctctgttattattatatatgggccatgacgtactactttatgactgtgttacattgttgactggtcaaatgttatttttccttgatctctgtatataaaccatatgtggtgagatctgaggagacaaaaccttcttgtggacagtagtggaatcttgaaaagaaaaaaaaacacttgtgataattgtgctctatttttgcacttagaactgctgtgaaagaaataagaaaaaaagattctcaagtatctctttattctaactctgctaaccaggcttctgacgtgttagagcttatcaatgcttattttttggcaggtaatggaaaataccaaccttgtgctccagtataagaacctgtgttctcagctaaacaatcggtcgagtatggcttcatcgtcatctgttaaaaatgatttgaaccagaaaattcag

SEQ ID NO: 188049 - DNA, 365 bp, Zea Mays
gtgcgtggcgtgccgggccttgttagcggtactacatcttctgctactgggaccattgtggcgcaacgggttagcaggccgactaagaaatctacaaaggtgtatgagccggattgggtgaatgggctgcagctgtgctcgctttgcgaataagtagaacgagagttgcctggtgaagggcatgtaagaattattcactacaacttcttctccaagttctgctgctcgtccgccgccactcttcttcctccttaccttctgctactcctaatcgtcctctgctactcttaattgatgttctcttctactgctaccttgtatccataccgagttgttaacagtggtatcagattcaacgatccttg

SEQ ID NO: 188050 - DNA, 397 bp, Zea Mays
atggttcgagagaagatcaagacaccggtatcgtttgtggtgaggtgagtagccaagaaagacacacttagcagagcggtgatcaagtttgtggctagtggtggcgaataggttggtataacaagtgcaaccgaagacgcgaaggtgttcgtaggatggcactgttttgaagagggcgaagtgcggggtggagaaatgaagagtcttggtgggtagaatgttaagaagtgttgctgtgtggagagcttcaacccagaaggttggtggaatgttggcctgaaatagaagtgagcgaatggtgttattggtagtacgaatgatgcgctcagctttaccgttctgaggtgaggtgtaggggcaggacatacggaggacaccatgggtgaggaagaacgtg

SEQ ID NO: 188051 - DNA, 507 bp, Zea Mays
atctggtcaaggcagacctcctagtcagtcgttggcctctcatcagaactgcctctttttctgttatctgtaagcgttgggcaaggtttcttggcacctcgggagtcaccttgccattcttggttgatctggagattggaggcatccctgttcatgcctgggaaactagtacggtggaacatattcttagcccctatgcttggattcatcaggtgcatcaggagaccttggcactgcaagatttgtcctgctttcgatgctctgcttggtgtactgatccgtctactattcctgcttcacgtgacttgtggattgttgagtctgttcaggttgttgagggcaatgttgaagaaactatggctctgagctacccaatcactattagtttttccgttgccttccgaccgaatgattccaattcacagtctggtcttcctatggattctgtgaatgatggtgatcaaagtaatggctactatggacatgccaatcagggattgactcagg

SEQ ID NO: 188052 - DNA, 338 bp, Zea Mays
caacgttgatattttgcctcctagtccgcaccagctgatgggcaagttgttggtgggaccatggtgtcacctgtccctcgctaactcattagagttccaccacgccgttgcaacacgacaatgagtgtcgcttgccgtcaccgtcatctatcgctaccttgcttcctgcactcgctcctccaagatgtcgtcgtctcaccaacgccatctcacgacaatttcgatgactcgccagaacgacgcaccgatgcggctgctccgccctagtgcctcgtcctcagtcagtccacatattttctctctctagctctccttttggtagccaaaaaggttttttg

SEQ ID NO: 188053 - DNA, 598 bp, Zea Mays
gccggcggctgcgcagcatgcgcgatgtactgttcacgcaactctagtttgcgggccatgctcatggcgatgacgagagactgaggattatgcatctcaacgtcgaggctgagcggcggctgaagccctgcggtgaacgcctgcaccttctggtcctccgtgagcgcgccgacacggggcagtaaggcctcaaaacgatcctggtactcagcgacagtcccggtccgtttgcaggccatgagctcgccgagagggttggagcggatgggcggcccaaaacggaggttgaggagttctgaaaactggcgccaggacggtgttcctccctcgttctggatctggatgtaccacatctgggcgccgccttctagattatatgaagccatccagacttgttcctctgcggcaatccgctgttgatgaaaataggattcgcatcggttgaggaaggccagcggatcagacttgccatcaaattttggaaaatccaacttctgaaaacgcggaggtcgttcaccctgatggtcagtgaacctcgagcccgacggaatggtaccgcgctcacggcgcagctcccccacttcggcctggagggtgg

SEQ ID NO: 188054 - DNA, 385 bp, Zea Mays
ggggcattgccttgtttcttggagcaaagttcgtcgacctcttgatttgggtggtcttggtatttcaagcatcaaggagctgagttgggcgctgcggatgcgttggttatggccgcaaaaaacggaacctaaccaaccttggtcatccttgactatccaagttcctgacaaggttcaggccttcttcagtatggtgatgcaaacggaagttggaaacggtgccaatactctttttggaaggatcgatggattcaaggacagagggtggctgatattgcgccaagacttcttcaagttgttccgaaaagaaaaatcaatacaaggacagtgcaagaagctataactggaagagcatcgatgtcggatattcgaggggccctatctg

SEQ ID NO: 188055 - DNA, 288 bp, Zea Mays
cgacttataattgtagaggaagtgatgactacttacggcatgacatcacctctctaattaagccaagataattcccacctatattgaccaaacattcatgtcgagcacactctattgttgccatgcctcgcatacaactatattgtggcgtgcactcgagacacttcggttcaatttaacgcaatcactactactacgcatttcggcatacacgtttgacaacaccgtgctcaggcaaacccacactttctatccacttatcccatccaaccaacaccacgacgaatg

SEQ ID NO: 188056 - DNA, 428 bp, Zea Mays
aaaaattccagtgttcctatcagtgcattggatgatatgagacattctgaaatgttttcgagctgcctttcctctgagcattttgagaaatcaattatatctcctgctacagcttccagcttaaatatgcatcatctcaaagccaagtgtgagaacattcatcttgatctacaggtattcattttgtctgtactggtactggtacatcagggcttcttagtccatgcatcattttagtttcaccaagcttggtatttgatattttttcttgttgatatctgcagacttatccaaaaaatgtaaggctcaaggcatcaattgcccaaattaaacttgatgaatactaccacgccggaaacaatatttcagatgattcaaaccttggtaatcacttcttgaacaataacttgcggcaaggagttcaagct

SEQ ID NO: 188057 - DNA, 361 bp, Zea Mays
gttagtttccgtagcttttaactggagacacgatacgaagaagataaaaaccaaaacaaaatggataacatataagatatgataatgtggcagcttgttcgaggccgtcacaaaacagagaaatctgagcggcacggagaactgcagtttcgttgtggccaaccttcaatgcaaagattgccacttatctggcccctttgctctgcaaattggcttcatcacctgtttctttgagctttctaaccaacaaaccaattgaaagcaagagatcaaaaacaaagccgcactaattttcgctccatgacccattcgagggaagaaagaaatatgccaatgtcagaagggagataaactcgagaac

SEQ ID NO: 188058 - DNA, 1616 bp, Zea Mays
aaggacaaggggacactttctactagtgattatgatgatgtgtttgagaatgtcataagaaaagacttgaacattcgtgggtactatgatgatacacattggagcaatgaaactgattcacatgttcaatcagaggagaacaaaatgattagaagggacctagagcttgctatttctgggtttaggaacattagagcattcctagaaaaaagtttccagaagaggaattgctaagcacaattctagctactggatctggaagcactacagtaagtggctttgtcatttttgcagtatcaatttaatgcacactttggtaatctactgtcttccattactttccagcaggttgatactaaagacaatgaaaatgtctcattgcaatatgataatgtagaacgatccagttatgagaaatcaccttcaccatacaatgaacaggcaacccaaatttcctttcctgcaatataaatttaattttatatcatacttcataacagactggttgtagtattcttctccttatatattgctgttgcagatttatactagagattataatattgccaaggtgggttgctctgatcattcagtaccaaatgacaacatagctttcagggtaagtcaggaatattactaggtacttgattcatgaatttcacagtagacactgttatatattcagttcaaagggattgataagaatttctagtcttagctagaactattaattatttgtgccttctgtatttccaggaatcacaagttacaaggtctagtgacttgaaccaggaactcaacaatggatcactatctctagataaagaaatgtctgataaggttagtactaaacaacattgcattacttgaaatttagtatgatgttcattacagatgtgtcttctgtatttacaaagctcaatatcatgtgtcacaggaaactcaaagcaagcaacaacaacaaagcaaattgcaacaggtatctccatattgattatacttccatgcttcattctatttctttgaatatggatagatctacttgcagattttccagtatgtacataagcatttgtttggctactcttttattcttgtagaataaacagaagactgtcttgttgtactcaacaaggaaaagaaaactaggccaagtttttgctgttggtaatcttatatctagagatactactcatgaaattggaggaactgtacttggggatggatattatgctgttgcggttcattatcttaacaatgttgaagatgaaagattacctcgaccacacggagatcttaaaactttggaggatgctgtgggcatgtgtgttgcttggcctcgcacacatgtgagtgcggatttcatatttcatttgatctagatagtttattagtgtttatgacacatcctgttgcttatttgcagcttaaaagggtgaagccaactactgagaagcgcacttgaatggttagaagactgaagatgcaactaatgaatgagcaagtgttatagtggagagtagttctaggatcaaaagttctagttgtcaatctacttgtttaattgtgttaggaacctcattttattcactcttgtatgtctaatctacctcaag

SEQ ID NO: 188059 - DNA, 304 bp, Zea Mays
gcgccagctgccacgcggccgtgaaccccacgacgaagccggccacgaaggtggccatgtagtggatgaggttgcccagcttctcgctgatggcgtcctgcaccaccacggcgtccgcgttgatggcgtagatcacgtccgaggcccgcacgtcggtgtcgaagaaggacacgtcctgccgcagcgccgcgtccaggtaccggatccgcatccgcgtcgactgccgctcgccggtccacatccagcaagagatctctgcgagcggggcgaacgatttgaacatctcgtttgtagccacggcgat

SEQ ID NO: 188060 - DNA, 1051 bp, Zea Mays
gaagggaccagttgagccgcaattgcagtttgctattaagaccttgagcgctcagaaccaacacaatcaacaaaacccacaaatggcaaggcaaatagcatcatcctctagctatggtactatgattcctacccctggtatgacgcaaggcaccaatgcaagttctaggattccttatgtcacagaaaacaatggcctttcatcgtctggtgcaggcatggttcctcagaatgctaacatgggtgcctcgatgcaaggtgcatatatttttactagtcctttggcctgttttctattagctgaagatctctctagccatgatctagtgcctgtgtgctgaaaaaggacttacctctttgaggatctcacttacactaaaatttatgttggttacatatgtaaagaggaagcatgccttttggtgtctgtgttgtttgaaattaatttgatctttttacaaagtcaataagctgaaatttatgcactgcctaactggtccaccatacatttttagctttgtttgggcagtctctttatatgcccctgctcactcttaattcctccacacaggtccaatgtctaatggcttccaacatttaaatgccagcattccacaaaattctaccacaaataacatacaatctacaatgggttcagttggtgtccagcgacaactacctcatatgattccaactccaggatttagtaatcaacagaatgtaccttcaaatcctgactattcaaatggaactggatatttcaatggtgagccagctgtggcatcacatatgcagcaccagaaccaatttcctagcaaccaaattcagcatattgggggccacaataattctggaatacattcaagcatgctggacagctcatctgcatacggtttatcagatggacacatgaatggtggaataggagtgcatgggtcaaatatgcagctaacaaacaggaccacggcaccacaaacatatatgaacatatccccttacggcaattcgtccaaaccgatgcagcagcaattcaatcagcatcctcagcagag

SEQ ID NO: 188061 - DNA, 622 bp, Zea Mays
gggcgtgcgacaccaccgcagtaccggaccaagcggcacgggagcaggacgatggatcgcattttcggccgagctatctgcttgggagccacccattctctgcgccatggattcacagggaggaatcgaccaatgataggggggtttccggtccggtggccgaagaggaggaaaggttggacattcgtgatgcttctgatgatgaactgggcttggtggatgaggataaggaagagacggataatggtgaggagcttcttactgggggtttagaagatgaattttatgatgattatgccacaccaactatgaattcttcatatggagtggatttgtcagtggacaaagatgcttatggtagcaggttcgataggagtatgatgcagagcagtgtaaacaccatagttaaaacattgaggaattcgatggaggaaagtgacccgaatgccacggttgagttgtctaatgcagaagattttgtccagaaattgggccctgcactcctgccatgggaaagggaggaggaagatgatgaggcattcagcggtggcagggcggtgaggcgcagcaacacggagctggccgagaggtctattccagagcctgaactgcggaggcttag

SEQ ID NO: 188062 - DNA, 318 bp, Zea Mays
atagtacattaggagaaaaacaaatcttatctctgatttatatacttgcaggtatgtgctacccctgctgcttcaatacgattcgacagcagaagagaatgagacatgtgaagcacatggtgttggggcaagggtgcagattgccaaaaatctgcatgctgttcatgcaactcaagctttgtctaagctttgtggtctcagtggcgatgatatcctgtacccagataacaaacctgcatacaatgcactgaaggctcttcttactccaaagcttgctgacatgctgagaaaccacccacctaaagagttattatcaaa

SEQ ID NO: 188063 - DNA, 500 bp, Zea Mays
cgacaagttctggcgaggcaatttgatttgagtcacatccattttgatgcaggaaataccaggccatggatcgcacgggttgtttcctgcccacttcgcaagctgcaatgggtatccaaaacctaaagccacctcaagcagagtggtcaccagcggatcgcatggcccagagtcttctcgacagaacccgttccctgatttcaaatccacagtcttagctgtaaagtttggtttgggcccttgaagaaaattattggacagcgacacatcctgaaggcttgcgatccctgaaagagagggtggcaccggtccggtgagcttgttgtccctgacattgaagatctccagctgtgagtttgggtcaaactctgggatcgggccggtgaacaagttggactgaagccacagtgtcttcaagctcggcaacttcgccacgacgtcaattggccctgacagcttgccatccgacttctggttgtttagctgcagtgtctccagcg

SEQ ID NO: 188064 - DNA, 317 bp, Zea Mays
gggcaccaccaggcccacccatctgagaagcaaaactcatcattttctgtacgtcatcaggaggcatactagcaatcatgtcagatgccatcttaagcatatcaggagacatttctggcatattgggtcccagatttggaccagcggagctagtgctattcaatgaagaagcaacttcgaacattttctgaagctcctctggtttcattgagccaatcatatcagtggcagttttgacaagttcaggcgacattccttcaattccgaagtttgataagccttcaggatcgctcttggacacataattttgggatgac

SEQ ID NO: 188065 - DNA, 510 bp, Zea Mays
aaaatccccagcaacaacccaagggcctgcacacaattccctaacatctctcaattcttgaagaaaaaactgcttaagattgtcctgatgcgggccgtaaactccagtaaaccaccattgcaatccagattcctcctgaagctgaatggagactgagaaatcacgcacaataccgctggcggaggaaaaggctccatcccgccaggccaccaggatgccccccttgtcccatgagcaggacagaagacaaaattaccataaccaacacccaaaatagataggacatcaaaagcagagatggaactcagcttagtttcttgcaaacagactagcagaggcttggaactaaggacctcagacttcacacaatctcttctagatctatcattcagacctctaacattccaaattagaaaaattgactgatacatgactaacaatatagaagaaaacgaccaaacagcgtcaggctgagacctggatctctaccggcacttcccagccgaacaa

SEQ ID NO: 188066 - DNA, 333 bp, Zea Mays
ctgataaccacatttagctagcttagtaggagggagcatgctaactcataatgccttgtaattactgaatactgatgaaccagcggagccatacctcattgacatcctcaagtagctctgacaaacaaattaggggacatgacaaacaaattaggggacactacctctgcgtatctgcacaagggcccaagagaggtggggctcggccataggaatggagctctcagctcccacaccgtgcaccagtgaatgcgagcagctggtctggccttccagtaatccgatctgcatgcagtgtgatccaggattcacgtggataaggatgaaatcaag

SEQ ID NO: 188067 - DNA, 710 bp, Zea Mays
cgaggacccggtgctggagaacgacgcgaaggtcgatgccgccggcaaggagcagacgccgatcgacaccaaggatgcctccgggctggatcagagcgtcgagcagacagtcacggacacgaaggcgagcgcatcagagcaggcggcggcgactggcctcgacaaggtgagcagcgccgaggcaggcggtggcacgcccaagaaactgacgttcgatgacgagaacggcaagatggacggagtcgacctcgtgaaggatgacggcaacaagactcgcatctcggaggagagtgccaaggtcgaaggcgccgcgttgacggtgaagccatcggccaaagcggcgacagcgactgccaccgacgctgagaaacaggaggaggcgtcggcggttgctactgacgctgagaaacaggaggaggcgtcggcggtcgccactgacgccagcaccactgcatccaccacgacttccgaggacgagaggaaacaggacggtgtcgagcagcagctgcctgcaacggaggcgcagcctaacgtccaggcagagctactcacagagcgcgcggcacagaacggatcgttcacgacgcaggcggcggagtccaccgaggagaagaagaaccgcgccgagaagaaagggaagaaaggaaagaagaaggcggccggcgtggcggcggtggcatggaaactgtgcaactcgagcgccggcgccg

SEQ ID NO: 188068 - DNA, 960 bp, Zea Mays
cgcccgcgcgcatccgcgccctggctgttttgcacaaagggactcgaggtttttactatctgcgaacgggttttcttactgtttaataaggtcgctgacactttgcaagaaggtccctcgaattctatccctttacgtttcccggtccccgacggcgttcaagtgcggctgagcaccggcgagccactgcaccggccgattgaggctaagacaggcgctaagcttcggccgagaccaaatccgagtccccatgaatgtttcccccaacttaatttggctcatgattgactaaggagctctggccacggtggccgtgagcagcgcggcaggaccgacgcgttcccggcgaccagaggctactccgtgcaaattaagggtttggcaggcatcacaacgatgtgagagtgctcagacgagaaagcaggggacggggactgaccggaaaagggctaaccgcggtgaagccggtttcaggatgttcttcaaccggtttgggggaagtcccaaattcgcgttctctggtgggggtttcaggatgcaggtgggtgcagtaggtgcttggatgcatggcggagatgggggtacgctcaatttatagagcccgcaggcggtggtgctcaatttggccgagccgtgttggcggccggaggtaaagatgaaggcagcgcggtgaatacgtggctactgccgtggcaagctcaccggcgatgattagatggccgtagcgagtcacggtgttgcggtggaaatcaaaaccacgcggcgtgaggccgggaagcggcagttcaccggcgagcctatcgctccaccgcaaagtagagggggagacacgggaggggtcaccggagtggagcccagctcacggcggtgaagattcttactgggtgatgtttatctggtgtccacggcgcacgaatcacggcgagcggtaatcgacggcgatggaccaccggcggcgag

SEQ ID NO: 188069 - DNA, 352 bp, Zea Mays
gcttatttcccagtctattacacggcatatatagcctctggttcaaccaatctctcctatgattaaggcatatgaaaaggaaactaatcttaaccaatctctcctatgattaaggcatatgaaaaggaaactaatcttaaccaatccctcctatgattaaggcatgcaaaagggaaactaatccttatctttctaaacttagccactgattgtgtcgcctgccttggctgcgcgatcagcagctctcctggcgtcacgacggcgcctgtaagtgtggccgtacatgacatctctccccccctcgacgatcaactcgtcctcgagctgaaagtggggaaatttgtcgcggaag

SEQ ID NO: 188070 - DNA, 274 bp, Zea Mays
ttggcaccgactctaagaagtctaccgtaagcaaaatttatgggagtacacaggcaatgcctgagcatgatagccattcaagtgataatttggagagtgatgaacgtaggacagttcaattgcatagaggagcaaatgttaaaatggggaaatttgttagtagggatgctgaaactacagattttgatgatagagctgctttcaaaacttttgaggtatttactgatgtcaggaataggccacggatccttcgaatggaaatggaagagagaat

SEQ ID NO: 188071 - DNA, 550 bp, Zea Mays
aatgttagacctgtagtagtaagaaatcatgaggttaagctgaacactgtacggctgtacctggagtgtaatgaagtattgtttcaacaaatgtgttactggtgaggaaatgtttggttccatcaagcatggaagctttgatttgttcaaggccaaggattcttacttcgtaagaggtcaactggtttcagttcatgtagaggatgccaaatttagacctgcaagctaagtgtgttttcatggtggataaatactatgccagccattgtctgatactatgattcggagtaatgaccataccattaccagctctgaataggaaacatttgtgctgcctctatgatcaacactgaattttaagcaatttccgaatactgtaaagacggttgaactgaaagccaacacatatgtacttgcatgacggccacaaactagaatactacctacagttcagcatgctaaataagtcacctgcaccggttgggcaagcctaattatggccacttctaaagccaccatacaacatgtgtgcactagagatactgcaaca

SEQ ID NO: 188072 - DNA, 534 bp, Zea Mays
aacacaaggctgaaatgattgcgaatcagcacgtagtcggtcccggtgttgtgatggatggccactgtagaggagagcatcacacgtgggccgaactaccaggttgcagtaataaatggacagcaagagggctggttagagagtggattgatgaaggagaaaaaaatgtgttgattggtgtcgcccagaatgcaggtcctgttagtcaagcttcagctggtggtgtgctggacgcgaggggcagaaaaaatcatggttcagttgcgcccggtacaaaaccagcaccgagatggtgtccacctgggttaagccgtacgcaaaagcgtcgtgtccagcggttgaggactatggaaatgacagaaaagatgaaagaggaggagcgtgacaggtggtttaacgaggataggccaatggttatccctaagaaaacgtggagggagaaacgattggccagggaggaaaaagatgataatagcagcagtggttctgataaagaagaaagcgctgaagcacaaggggacatggatataaaca

SEQ ID NO: 188073 - DNA, 341 bp, Zea Mays
gagggatggtggctttattctataaaaatagaggggttcttatgctattctgccatggcgaaggggtatcgtgatcacagggtcgtcggatttgaagtgaacggtgaggattagcttcgtctcaccgtgaatcggtatgccaagccagtcgtccgatcgacggttgacgactcagatctaaaataccctgatcagccaccgagtcgcacgatctagatccgaccgctaggattaaatgagatgaaggggtacgcgacttttaatcctgaccgcacacccgcgatcaggcggtcctggtgcttcttccccagccatcgccgggtaatggcggtgcccaagct

SEQ ID NO: 188074 - DNA, 309 bp, Zea Mays
tcctctccattactttaatcaccacctccgaattaaaaaaaccccaattaacaatcaatcaggtaagccccagcacggcagcacgtaagcgctaatagtctaatcacaaaagagggattagccactaattaagtatgtcgctttgcttttggttggcatcgagggcacagtgaggcgccgtgtcgcatggacgggctgcctcctctcgttcctcgccattgtttaatcagcctcttctccgctggtacgcatagatccagcacatgctagctaaggcaggctttcatcagatcagatgagctgatgagc

SEQ ID NO: 188075 - DNA, 359 bp, Zea Mays
cgagtggatggcgggttggttttaactaaaccgaggggcttccatgcaaatttctcacacacagcgctagggtttcacagggccattggatcttgatcgggcggtcacggtttcatgaatcccagagttatgaccatcatccgatctcgatcggacggtcgtcacgcaaactgatcgaaccggtacacgcaatttaatcggagccgttccgttcaaatcaacggtccgggagccgtcttcctcccctggcgcgcagacttccacgcaatgccgccgcgccattagcgcacagacagagctcaccggagcacttgctaaatccctaccagcgacccaggattacccaacctccgtgtggc

SEQ ID NO: 188076 - DNA, 374 bp, Zea Mays
gtagtttttagggtttgaccaaatcttatcctaagcaacatgtttctgtggccggaaggggtagctaatccgtaggtactaacaaaagcattgaggaaacaattttctgatctagaaacaaactcattttaacatcatgcaatcgctaacctgtgaatatctggatgaccaagacgaccacctcgaccaaatccccatgtgtatagttcaccattagaactaactgctacactgtgaaactttgatgcagcaactgttttgatatatgatccatgcaaagcttctactttgcatggtagtttttgtatgtgggcgttgccagttcccagctgataatttgtcccacttccccaactgaagacttccgttgcaac

SEQ ID NO: 188077 - DNA, 312 bp, Zea Mays
ggcgccgcctcaacagcaacagtcgaaggcaggttgccggcatcaagaccggcagacacctactgctggaagccagactcaccagtgggggcagccttggagacaaaaggagaagaagccctgacaagcaaaggacgggttaatactcgtcaacacggtaactagaccgatggggtaatgagaaggggtacacttacttggggccctggaccttccaatgaccttcgaagcaagacgtccactggctttgctgctgttcccgttgtcgatgctgctgcccctgtggcggtggcaggccagatgatggtggtg

SEQ ID NO: 188078 - DNA, 448 bp, Zea Mays
tccggcgagctcctagaccggcgggatagggcaacgactagggttcccgagcgacggacacggaattggactcatcccaaacctttcccccaacttaatttcactaatgatcaacagggttgtgctggccacggtgaccgtgaaggttgcggatggatggggatgttcctggcgatgggtgggcttctagtgtaattggacggtttggtgagcatcaagggcacatgaggacgctagaacaagaaacagagggacgcgagctaaccggaattgagctggccgcagcgagctgttcttcacggcggcgggaactaatttggggcgaattcaaaattcgcggattctagcgaatggatgcggttgattcgtggtggctggatagtttactgccctacggagattgtggcgcactcaatttatagatcccatcgacggtggtgtccaattt

SEQ ID NO: 188079 - DNA, 315 bp, Zea Mays
taataggtcagtacaaacccccttaagaggcgaaaggttataatccacaattacatgacatcaaacataacccgacccatcaacagtttaaggccaaatccttctaagccctgatgccccagctaagcaccacagccccacatcctccttcatgcacgtgaggatgttgtggtcgcaagacgagccccctcgaagacacaggcattgtgatgcttccacaaccactaggcaactaatgcaatcaccgaatttagacctctaaactcctttggaactttaggaacagtcaaactccaccattcttggaaaactaga

SEQ ID NO: 188080 - DNA, 309 bp, Zea Mays
cagaaaatttaaggcttacattactacttgattatttatatgttgatgaatgctataacagcatgcaatgaggataacattagtttatgtatgtatgtaccattattttcatgcatatagcaaatgccaaggcagcagcttcaatgcatgacagcatgaggtttttgttctcaaaaaccatggttatgttggaattattttaagtaggtataggtaacactgttctgtcaagacaggataatgaatgctaccttttaaaattgagaatattaatcagataactagaggcaaccacaaagaggaaccaaa

SEQ ID NO: 188081 - DNA, 677 bp, Zea Mays
ttttgacccaagggagagtatgattaaattttagttcttccctacaaggtagaggcagactcttagttgaacgttgaactatattgtgttttcatttttacctctttttgatatttacatttgctttttttgaggatgatatttacatttgcttgtgtaggaggagtgcaaacgtttaaggcagagcatgaagtgtgatttaattagcagactaaaagtggtactgctacatgggactaaacacttgtgacctagttttgttttggcccatcagatatgtgtaggtttgattggtgtttgttttgtgttattaatgcagggtgatatcctagagaaagccaagatattgcaatatgtaagagtgaatgatgtaaggacaactcgatatgtatacaatgatatgtttttcttcaaaagatctcaaacttgacttactggtatttataatcgtgacagtggtttgaaaatgaaaagcagaggcttgggcatcttcgtgaccgtgcaagtgaaactgggcgcagaaaggaatatcctattgactatactatggtgtggtgatgcctttattatcacttatattgtttctcatcgactactatgccgctgaattgctatttcttgattttatatcattatttgctcgttcccaaaaattggatcattatttaacttaggca

SEQ ID NO: 188082 - DNA, 551 bp, Zea Mays
gattgtcttcgtcttaattggattggagctctgccgtgtgcagacagtacagtgtgcgtgacttgttgtggcagccagccggtgactgtcttcgcctcttccgctctttggcagacggcatctggaggctagagctgtatgctgtgtgcagacgggcgtgtcttcgcctcttcggtagacgacagctggaggctggagcctagagaacactgagaagacgggctggacgcctggacggaccgacggctacgacttcgacgctacaggctgtactcgtagtctcggacgcctatacttggtagcctacaccagacagcagttagcagacagcaggacggccttcggcctggacggcggtcggcgagcgggcggacgacgggtgagtgtcggtggacggccggacaggtgactagatgagtccgtgactccggacggcggccggctggaagatggacttaggtttcactttagcatggaggcctgttgttgggttgggcttggcagatttgggccttgactggtgactccgctccgggttaaatccggaataa

SEQ ID NO: 188083 - DNA, 375 bp, Zea Mays
cgcgcccagcccaaccccaccgttgccacgcccacctccggcgtccacctcgcggttctccgctgcacaatcctccggaagacttccccagtgcccctgcgacccgtctgcacacctccgcggctgctcgccctcctctacccaaaccctaaccctaggtccgcgcgccggtgaggtacgtgtcatcctccttcacacgccttttttaggcccaattcggcgccccagggtctcgcctgaggcgttgttggcctctgtgggcaatggttgtacgaggctggagcgtgccccactgactcggccactcctggcaggggaacctctggcttaggctggaggtgatgaccccgtgcttcatttttagtctcttcggtg

SEQ ID NO: 188084 - DNA, 303 bp, Zea Mays
gcagagtatgggttgcaacaaaaagagatagagaacgtagaaatggatgtgtccactttatgaacaggtagatgtttacactttgcagacaatgtcatcacttatagtgcatcactgtcaggtgtactggagtcaacagtaattatgaatcgctctcatggtaaggtgaggattaaaaactggtgagaaagctaatcacccagcaacgatggctcctatcactcctagttgaaaccactatctcacagttacatattactaccgattcaagccacgagccggcaatgatagctaagatatcat

SEQ ID NO: 188085 - DNA, 588 bp, Zea Mays
ccactcaattccccgcagcagcaggcacctgctgctctaggattttatccaatggggccatacttgccattaccaagcctaagtggcattgtggaaggggaaggcaataaggcagttgatgctggcactggcattcctgtcatcccaacagtggcagcaccagcatcagcatcatcgccagcgccgacagcggcaacaccagtggagttcttacatgtgaaggttggggcaaagaagcgagggcggcccaaaggcagcaagaacaaaaaagctgtggttgaggtaaattagggctatggaatgacacatgtgaaggttggggcaaagaagcgaggatgccctgactgcctgaaggcagcaagaacaagaaagtggtgattgagatcgattagggctatggcatgctgatcgctgcatcattcgacatctgcatcagttgtaaactacattgtgtatgtgtatgtgtatggttcttttcttgcttgcagatgacttgggcactgtaagatggtcgagggttagagcttcacctcgatagttggtcaagaatcagagcttcaccattcatgaattttggtgactaggttt

SEQ ID NO: 188086 - DNA, 417 bp, Zea Mays
gtaccgaaaaggttcgagggtgcgaattggacaatagatgggttgtcccttacaacccatacctccttcgtctcttcaactgtcacatcaatgttgaggcatgtgggagcatcaaggctgttaaatacctgttcaagtacatatacaaaggccatgatcgtgcttctgttgttatgagagatgcgagcaaggcagatgatgatgtagatgagatcaagcagtacagagatgcaaggtgggtgactcctctagaagccttatggaggatatacggctttgagcttagtcagatatctccacctgtgatgcagctgcaactccatcttccaaacatgcacatggtggcgtttcacgagcggcaaatggtcgagcgagtcgtcaaccgtccaggtgttgataggtcaatgctcacagcat

SEQ ID NO: 188087 - DNA, 431 bp, Zea Mays
atcctttctacattcacattgctctgttcctgtcccaataagtccctgccgctctccatcactttcttcggtccctccctcccgtctccttcctctcttcctgcatatatcctcgcacgtcgcccttgctgccatggggccgtccaatttctctgagaatcctaatgtcctgagagggattgcaggatcctcttggaccgccccccgcttcccgcacacgccatccaacagcataacaaacacacaggattgctccgcctctcggaatcagatagttcttggccgcctttgttgtgatcgtggccacaaggccccaagggatgcaggtcgcgtcgattgaatgagaagtaggtgagggagatagagcatggttgaggatggcgccgatcatacttcaccgtgcgttgtccttctccatcccgttgcttcat

SEQ ID NO: 188088 - DNA, 389 bp, Zea Mays
aactagtcataccaatctaatctagatcccatctaacctaatatgatctaatctaaagtgagttacttaacggactagttgatactagtgaaatagattagaccctgctggccatgttttaacttaaattagtacatcataccaaaccacccatgaacaaataacttaccagcatatttatggtgaccatccctcctagatgttgccataatacacttatcttatgccaccagcctgttaaccatttgtccttacccacaagttatcctaactacatgaacctaattcggataaaaacttcaagaatgaagatcgaagatgttcgacctcatcaaatcaaggaaggataagattcaagatagatcttcaaaggaattaggattcacaat

SEQ ID NO: 188089 - DNA, 380 bp, Zea Mays
taaaaaccctcatttccatctttagcaagaggatgtccagtgactagatttattgtgtttcagccctatgccctgatggcattgtcaatgggacttctccgcaatttctaccttgagttgcttcataacagatacagaaattggattcttccactacgtagtttcttcagccttaactagattcaggggttggtgtcatgttctttcctctgaaatttgggcagcaagcaaaatgacctatgcttttgacggccctttcatactcactgttggtttataagggttatgacaaacaacttcaagcttcgctttgtgacaacaatgaatggttcccatggcttttgagggcacacgctagataaagcctaaacaagtgaaat

SEQ ID NO: 188090 - DNA, 504 bp, Zea Mays
ctgacaatgccgtatatggatgtttaagaggtaagaaatttgcatacttagtgaagagatcaactatcaccaggatgcatgtatacgattgtgaacatggaagagcctcgataaaatccatactgatcacttgccataatgatgagggtacaggcagaggttgtaacaggccgggcaaacgagctcggtcagctttggattgttgacagatgaggcaatgagaaacgaactgatttactgcttttttcatacctttccaagcaaacagttgtttcaagcgagcatatgtgacgggaaacccggaatgaccaccaactgctgacgcatgcaatgctgtaattaggcgatcctgaagaggagctgactgtcccacccatattcttcctttataacgaaggagaccatcttgtaaggaataatgaggcacagccgatgcatcaactgctagtttgacaaggagatctttagcaattgggtcatgtgtatatgaatctgtaacttctg

SEQ ID NO: 188091 - DNA, 419 bp, Zea Mays
aggccgacaagaaggtgcaaggggctgcaagggccctaaggcggcctaggcagcaacttatagacgcgggacgctgaggctcatgcacaacacaaggtacggaggcctgccgagtggtagtgtagagtgatgaggtgcaaccaatgcactatccataccaccggcaaatgaataaatcaacgcatacgtggtggttaatggctaagctggtgaagaagaccgatgttggtacaccttgccattaaaacactgatcaaccgacactagggctgagggccaaagatggaaggtgaggctgaactagtcggtctagcccaaaggtgcagcaaggtagggctggaaatgagccaagtcgagctcggctcgctcgaaacgactcggtgcggctcggtgaaccaacgagctcggctcaataaatt

SEQ ID NO: 188092 - DNA, 546 bp, Zea Mays
ttttactccaacaatgtcaggagatggaagtggctggacaactttaaaagatggtggggacagtaaaacagtagcacttcctcaaacaaatgtgcaacagaaaattttcgctaatcagtatacagtgtgctctgctgaacaaacggagaagaatgttgatgtttgcaagcaagctctgtcagctcagaacaacatacataatgcacctagaaatggagcttctggaccatttgtggcatcccccgtttctcatcagaatggatccattggaacgggtatgtctaacatagcacaagcacagccagctcatagtatatatcgtccagacttatccactgtttctgcaaagtcagaatcatttcgttcatctttgcaaggtaaacttcaccttcagatgtgtactgaaagacctggaaacatgagttgtggcaaggcagcaaagttgtcttcttttaaaccacaagcttacatgaacctctacaatcatggcaacattgcagcatctgctgccgccaatctagctattattgcatccagtgaaggtaa

SEQ ID NO: 188093 - DNA, 410 bp, Zea Mays
tatcacccttagacggatggccagacagaggtggtcaatcgtactatcgagatgtaacttcgctgtttagccaccgagtgaccatccacttgggctcaatggttaccttgggctgaattttgttataattcctcgtatcacctgcacttcagttgactccttttgaattggtatatggtcgcaaaccccctccattggtcccttacagccaaggaactactattgtggatgcggttgatagttggttggtggatcgtgatgccttactagatcgagctcgtcatcatctgttgacagcccaataccggatgaaacaacgttatgatcttcatcaccgagaggtcacttatgctatgggtgattgggtctcgttgaagcttcaaagtcatcgccaactctcaattaggctg

SEQ ID NO: 188094 - DNA, 817 bp, Zea Mays
tgaaaaaccacttcaatttgtaaagaagggatctagcttgttgcctaagaagaaaaagaggacttacagtgagacagttcttgagcaatctcccaaagatactgtgaaaaggaaaagcaaggttcacatgctagaaagggaacaaaacaaacaagacaccagagaagtttctgcaaagagtttcactcaaaaccttgttgacacacctgtaaagaaaaaagccaagttgaaagagaaaatacagttgccgtatgtggccaaggatcattttataagcagtccaaaatctgtgaaagagcaagaacaagagttggtacctttgcccttatctgccatcaggaagagttcatttcctaaagtggacagtgaaactgaaaagaggtgagtcacttgtgtataaagtacttggggaatgaaatctccagatcatatggtatgtaactttatgtgcaaaaattgctagcattcatgaatttcctacaaccagacctgatgaggcattgaaattttgtttgtttgtcaggtctgatgaggcattggattttttttgtttatcatgttgcagaatcctctcctatactcatgttttaatcttaatgccatgtatccacattctgtatgataatgtaaacgatgtttgaagtccgcatactgttatatgactatatgagatcttctatttgcagggtgattaccatattgggaaataaagtgtcttcattgacaataaaagatgtaacgaggaattgcagtttgccatcaactcatgtatactctggcagattgactgacaagataccactgggaaagattgaac

SEQ ID NO: 188095 - DNA, 446 bp, Zea Mays
catcccgttcactctggggtctgctaaaagtctgtgaatgtgaacgctcgtttttaggatcagaagtcaaaagaggagatatgggtgagtcaggatctgaattcttagatgactgccgctgtatacgatggacatcaactttaggaaggtcaggtaacttcatttcaaaactatcttgtctcttaatggatggtgtcctttctgtttcaattgcaaccatcggtatcccgttgtctatagtttgttcagaaggtggacttggatcctttggtgaatcatgagagtttctgttggtatctgatcgccaaaattgaagcatgccgtgtgtcctttgtagtgaaggtgattttgccatcttaggagaggacgattcttgaaagtattggctcaccgatgtgtcctccgcttgaagcgacttacgctccctgctattcttggtaggcatc

SEQ ID NO: 188096 - DNA, 372 bp, Zea Mays
agctactgcaaagttcaagacctctccctcccgattcctactaccactaccatacccaaaacctccatgaaccgtctcaaaacctacacttgttgcacatgcatgcccattgaggtctcttatgaaaagcttcacgctaataggtatagttttaaccatgccatctaagtcttcctagaagtctcttagcactctcaccatgccctgcttaggggtatacgcactaattacgttcaagacgaaatcacccactacaagcttggctgagataatcatatcttattgccatctcacatccaccatgagtcatgtaattacaaaacacaaatggtacaacattcaagcacagctatcccacaactagaaagaaag

SEQ ID NO: 188097 - DNA, 668 bp, Zea Mays
gcaggctgctccgctcgctgcggttgttctccaattcattacacggttcaattccagcagggattggaaagctgaggaaactacaggtgttggacgtatcaagaaacagattaagtggcctggtgccaccggagctcggaaattgctcagatttgtcagtgctcgtattgtctagccagtccaattcagtaaagtcacatgagttcaatctgtttaaaggaggaattccagagagtgtgacagctttgccaagactccgggtgctatgggtgccaagggcgggcctggaaggaactctcccgagcaactggggaaggtgttctaatttagaaatggttaatctggggggaaattttctttctggagcaatcccaagggatctaggacagtgcagtaacctcaagtttctcaacctcagctcaaatagattatctggtttactggataaggatctatgtccgcattgtatgactgtattcgatgtcagcggaaatgaactttcaggatcaattccagcatgtgtgaataaagtctgtacttctcagctaatgctggatgaaatgtcatccagttattcttcattcctcatgtccaaaactctacaagaactgccatcagttttttgcaactccggggagtgttctgttgtgtatcataattttgcaaag

SEQ ID NO: 188098 - DNA, 554 bp, Zea Mays
attgggggtttctgatcgcacgatcaagaatgggcgcttaggattagatctaggctttgactgaatcagtatgccatacggccctttggatctagatccattggccagtgtttaatgaaacaaagaggtacacgattttctaatctgggctgcccattattgatccgacggtcacgatacagggccacaaggttatacctacagaccaaacctcctccacagatgtgccatccaacggtccctgagcgtcttcaccaaatcgcgcctagacacggcggcgccgtgccctgcaacggcgaaccccgccgggggtcaacgatttcgcccataactcgatcactcccgatcacaagcgatcccgaacacaacccccggtatggtgaatcgatcggagctatccccatgcgagcgggcaacgacaattccttctaccgagatgagcggcaatcagtggtggcacagccccgtcaggcaattccggtcaatagggtgaatgagcggggccaacttagacggtgcacgatcggaggaaggagaggaaggcatcggagttg

SEQ ID NO: 188099 - DNA, 331 bp, Zea Mays
cagcaagaggatttatataccgagagggttgtcacaaattcagtattgttccagcatcaacaacttacagttggaggccttgctgagaagggacgcagtcaaccaattattggaacttcaggttgtaactgatgacaagatgtctgaagtgcccaaggtgatcattgatttgattagaaaatttgaacatctgttccacaagccccaaggtttacctccaaagagaagcgttgattccaggttaaagcatattggggaggagatgtgggctatggccgtggcagttgaggatgacaatactaattcagatgatatggaacctaccaaagac

SEQ ID NO: 188100 - DNA, 365 bp, Zea Mays
gttcatcaagatgagcgggtttggcaggcatccttgcatttggaaggcgtcgcagcggagtggttttatgccatggagcgtgacattggtggcgtactcacttggtcaaggtttatagaattcctccagatgcgttttgggccaccactccgtttcaatggcatggctgacttgaaagcattgcagcgcaccagcaccatcgaagactacacttggcagtttttaacaatcctgtgccgctgtgatgacatgactcatcggcaacagatcaacatgtacacagcaggattgggggagcccctacgcactgatgtggagatggagatgccagagacacttcaacgggcaatgcatttggcccaagt

SEQ ID NO: 188101 - DNA, 324 bp, Zea Mays
gtggcttctcccagcgcgagggcgttgactacgacgagaccttcagcccagttgtcaaaccggctaccatacggtctgtacttagcatcgccgcatcccgcgcctggcccattcatcaactggacgtgaagaacgcctttcttcacggccacctcgaggagaccgtctactgccaacagccgccaggattcgtcgaccctggcgctccagatcacgtctgccatctacagaagtccttgtatggcctgaagcaggctccgcgggcatggtaccagcgcttcgccaccttcgtccggcacctcggcttcgtcgcctccatctccg

SEQ ID NO: 188102 - DNA, 283 bp, Zea Mays
ctgcccttgagcgtgagggtcaggtccttgaaggcgatctcgacggacaggcgcgtgctcacgtcgtggtcctgcgccatggagatgacgcccgagaaggtcatgttgtggttctcctgctgcatcgccttctccctctcgatctggccgtacgcgtacttgaagatctggctccgggtgtgcatctccttgcccgtcggcttcttcagcgccttgtcccctacctccaggttgaacccttcgtcgctctccgggttgtcgtcgatggaccgcaccatgtcgg

SEQ ID NO: 188103 - DNA, 820 bp, Zea Mays
gtcatcttcaaagagatgccatgattcccagaaagagaaccttattgagggctcagaaaataaggctgattcagattcagaagggtcacttgctgctaatgatgacgtggcagataaactgagtacagaagatcattttgatgatgctggtggtggtggtggtggtgatgatgataagctcacattggttggtcgtgttgaaatggatgttgatgatgctacctcagaccccaacatgcctagtgatgcaaatcacgatgataacctggttcattctgatacaaagcagaaacacatatctgtggttgagcaacctactgaacacaatagcagtgaacctgatgaattgaggaatactgaaaatagtaaagggaggtctggtagcagcaaagatcagcagaaacaccttgaatctggtgaagaagttcttcaagataagcaattaaggagagtaaataatgtaagaatgcatcatgacgcggaagaacacaaacttcgccaaaaagatgagcattcacgagatgcaaaatcagatttggaaagatcacgtttaccctccagaggcagggaagatatccaccaatcttatgcaaacagagatagggttgacatacagggcaggagttataataaggtaagagagactgaaattttgccaaggagagatgatggtgttcacagccgacgtgctaaagaggaagatttgaggctagagtacaatgttgaaggtggtgcaaggcatagaaataaggtgaggcccattgataggaatgatagagatgaagatcattcacggaagcgtttggatgatggcgatagg

SEQ ID NO: 188104 - DNA, 334 bp, Zea Mays
gcaaagtgttcttccccagactgattcgggggaggagcactgccagaaggatcctggggcgaagggtgagaagatgattggcccagatccccgtgatacggaggcgggacaaactgctcatgatcatcaaaataagcttcttcttcttcgtcgacgtcgtctgctgtcataaaaggcaccccgtatgcctgctggtaccactcgttgatctccggaggaggaggatggagaggcacgtcaggcgagcggggggcgaagggagtacccaaagaggaagcttgacgacgtaggttgtcgtcagtctcccgctgacgtcttgccacctcatggacat

SEQ ID NO: 188105 - DNA, 385 bp, Zea Mays
tggaggaccagttcaatccccaaaacaaatttgtggtatatactgttttgaacaattttagttgtatctaaattcatatatgtagctctaaaacactactacttccacaggtgaccattttaaccatgtttactctaataactctatactcaaccatcatcccaatttctctttatgtgtccattgaggtattttgttcaacttgttatttatttagaatggcctaacctgtgataggactatcagagcttatgtttcctttggctgccagatgatcaaattcatacagtgcacaaaattcattaataacgatcttcatatgtaccatgctgagagtaacacccctgctttggcgcggacttctaatcttaatgaggaacttggg

SEQ ID NO: 188106 - DNA, 336 bp, Zea Mays
tgcattaagaacctaggggggcagagttttgctagaagccttctagccgctgaatactataaactttctgttgccacgaagttgagggtgctgcaaatactctgtgatcatgtccttgaatcacaagaatacaaaactatactggaagatcgagtaggctacaatgaggagatggaatatgagatagattctagcacctttttggaggctggttccagagcagtcttgactagagcctcaaaggcctcagcttacaaaatgctgaatgatttacagaactttgaaagtggtccaaatgtaacaaattcagatgttgctgtagcagatgtttctcag

SEQ ID NO: 188107 - DNA, 325 bp, Zea Mays
tcttactgttagacttccttatctaggggtgactatccttcctcttcagttcaggcaggtaaaggatcctatggatatcatccgcatggtgataacatgtcaagcaggtgcataccttcattttgaagagatcattgatgtcgctaaacttctgggattaagaagtgaagaggaagtagcggatgtggaggaggctattgccagagaagctgtggtaaatggtgatcttcaacttgcccttgatatctgtttaaatttaacaaaaaagagtcatggtgcagtgtgggatttatgtgctgcaattgctagaggccctccacttgac

SEQ ID NO: 188108 - DNA, 587 bp, Zea Mays
tgcattagcccatgtaaggaggttgagatctctgatactactgatgaacaacttccaaatcttgggattactctggatttcgttaatagtaaagctggtagctcaggctttatgactgttgatggaggaaacagttcttctgcagtatcaattttgacatcttctgtgcatcatgaggcatataagcatacagaagcaagggtgggtttgctaaccctctattgagacatttttccaaccgctattgtcagttaatttaattcttgtttcttaggtccatgcaacacaatctaatcacatttattccattgcgaagcaggcaataaatacatcaatgaccaaaggaacttacactatggatgagagttcatccggcatagatggtgcttgtaatgaacacggttcatgtaatgcttcagccatggaatgcagtgataattcggattcggagtgtgaaatcttccgagtcaagcgcaggtccacctcatttgacaaacctacttctgaagctaagacatcaaccttgtctgaacagcaggtatgttatattttgatcatgtagaatttctgttggcagagagggaacc

SEQ ID NO: 188109 - DNA, 412 bp, Zea Mays
attacactacatcatgaagatttttacacgcaggaagaattcgtagacggaataccacagaactggtggtgcgaagacaccagggacaaggaagctgttctcagaataaatataacaggcagcagctcaaccgaaaccaagacgcacaccatcaacgtccaacatcgctgcccaccatcatcggcgccaccgccgatgatgaaccaaccggtagccaccgtgcctccgagcaatgtccttgccagcgaggggcactcgaagcgctcctccaagaagagccagtccaagcaccgggaacagcaacaacagcagcaggattacccgcagtttgggagctcggaggtacatgacctgtgccgcatgcggtgcccttgagacctgtacaagctactcctacatcacttcaaaggag

SEQ ID NO: 188110 - DNA, 303 bp, Zea Mays
ttagagttcatggggaagttcatgagcccattggagttcaggtcactctcaaacttgaggaggacggttcttctaccaactatctttctattgcaaggtatttcgacaataagccaccattcagtgtgttgtataatatatagtcaacactgttttatcactaaacagtttttactaggattttagcctcacaagaacgctgggaaaaggtggaaggttcgtttaatctaacaactctaccgagacgtttggtgttctaccttgaaggcccccctcctggtgtggatttgctcatagattcgg

SEQ ID NO: 188111 - DNA, 369 bp, Zea Mays
gtcagttcaacataataattaagaggtcgcttgcccctgagacggcttcatggtattttatttgttttttacaaagtattttttaagcgctaaacttacagtgcactttctctattcgttttggtgctgcttataagtcttttgtgttttagatccatcgaagatggcgcttaatctcgagagctagggagatgaaatgccttttgtacatgatggaaggaaacaaattacgtacatgtatatgtggatcgaattgactgttgcattctgcctgtatttaagcaacggtttccacccaaaacgtctataatttggtccttcctagatgtgtcaaatgtgtttactgcactgcgtttgcttttgtggcag

SEQ ID NO: 188112 - DNA, 290 bp, Zea Mays
gcaaaggctcctgcttccttggaggaaaacaagtcctctgctgatgaggatcttggcagagggcctgccttgactgggaagaaaaggagggactgcaggggttctgcggatgaggacagaaacgtgacaaaaagggtgttgagatccgacgcaatgaagctgcgggctgaggctgaggcagcttgtgtggtagctgtggaggttagtaaaactgacagtttggagaggaaacgctgtgaggctattgtggaggctgagccttgtaatagcaggctgctgatggaagttac

SEQ ID NO: 188113 - DNA, 406 bp, Zea Mays
tatcacacaacggattccacggagcgattcctacggatatccggaagctttcgagcctcaccatactcactctcaggggtaacttgctgacgggcagcatcccgccatcgatcggggagcttcacagcctaggagttctagacttgtccgagaacaacatctccgggggaatccctcctgcgctggggaacctgacaaacctctccatactttatctgttcaagaacagcctgcagggacccatacccacgagcctggggaagctgcagaacatcggtagcctggtcctgtcgctcaaccagcttaccggctcgataccagcggaggtcgtcagcctctcctctctgaccagctacctcggtctctcgtacaactccctcactggtcagatcccatcagaggtcgg

SEQ ID NO: 188114 - DNA, 380 bp, Zea Mays
catgtcgagcatcaattttataacataagtgactcaacctctatcacgcttgtccgaatctattggctaacatttccggaacaccctgtctatccttcacctttctaatcatattgcacgacataaaatatttcgatacgcattcaccccataagtaacatcatcacacttgactctgacttaaccgtagaggaagcgatgactacttcggcatgtcaccacctctctacaggccaaatcaatattaaccacatcgatcgagtcttatatcacgtaatacttataatttattatctcaaatacaaccatatcccggcatgtacttgggacacttcggttcaacttacgcaatcactactacaacgcacttcggcacacat

SEQ ID NO: 188115 - DNA, 1544 bp, Zea Mays
acagcaatttcctgccaggacaagctcagctcctccaaatttggatgaacaaaaacgtaatcaggtatcttgtcttctcttgtttatacaatattctgatgtatgtattcttatttgttggttcagtgcttgtttattggactgctagaacctacaaaaatattgatgtcccatgactaatttgccttccggagcacagccagttccttttgcatgtgttattggtattgatttgatacgcgttctaaatctgctagtgctctaaaaatattctattttgcttgtataccttattcaggcacttgtggaggaacttaaggttacacctgcccctgtgcaaccagctctgaaacagcagcagttgcagcagcagccacagctgccgccacagctgccgccgcagcaggttccccagcagccacagcagcagtcagcaagaaaggaagctgttggttccagccaacataactccatcaatccccatattacatcgcaattgaaaagagatgtgcacccatctccatctgtccctaatgttacatctcttagacctaccgttcaaattcctggtgttcagatgccgatccccttccatcaccagccggcacaagtttccttgcagtttggtggtcatggggcacaactgcagcctcaagtcgtgcctagctcatatcaaatgtcaatgggattgacaggcagtagtacacaagtcccacagcagctgtatgcccctactctgcagcatcatcaattgcaacagcaagcaatgatgcatcctggccagggtatgggttatgttccttccgttgctcaccaattcccacagttgggaaacattcctatgaacatcgcatcacaatatgctcagcaacagccaaacacgcatgctgctgcacgtaagactactgtaaaaattactcatccagacactcatgaagagttgaagctcgataagaggatggactcttctgggcagagagctgcaccgagcttgacacaacaatcccagcccgttggtaattatgctcctcatattggcttctttcatcagccacagagttcctacaatcagtcaggaatgtattaccctactacagctggtgtgaaccaggttgctactggatcttcaggtcctagatataattatcctgtcactcagtctgggcaagcgatgacatatatcagtccatctgcagtgcctccggtatctgctcagtcccaatatacagttaaaccgcaccctattgggttggtgactgaaaaatctagtactcatgtcacaataagtgctccaccagctaaatctgagcctcctaagttacgtgctgctgaggattctgcgtcaagtcggcaaaaggataatgaaattgtttctgggatcgctgtttctagtaaatcaatccttgagaaggaggagagtaacgatcctttagtcacagtgaagcattcgactgtaataagcccgtccttgccaattcatggtgcaaaatcacaaacttcagtgacatcatctcctgttgtgaattcagtctcacctgtggcag

SEQ ID NO: 188116 - DNA, 477 bp, Zea Mays
attagtgttaccatgtttaggcttgcctaaaataacagcaggccgatggctatatatgcggcacagggagacaggaataaaggcagcaaacaagttatctcttctccacctctctctctaccaactaagcctacggctgtgggggataaccacgccggagaagacgacgaaccgcggctacgaccttcgtagccgagggccccctgctctagacgcccaggcccttgacaacctggtatcacgagtcaggcgatcttcgtccactcgatcccacacctccgatcagtccctcgacgtcacccaaccaccacccagccctccaccatcaccgccatcgacctcctccattatgaccaccaaaaccatcgacgatttggctacgataatcgagaagctcgtgggcacgatgtctgtcctccaaaatgacgtcgagtcgttgaagaaggacaaggcgccatcctcctcgccgtccggcag

SEQ ID NO: 188117 - DNA, 272 bp, Zea Mays
caaagtcaactaggtgataaatgatgcaggtgctaaggcgaaatcgatatgggtgctcttaccgaggattacatcgcgtcgtcctccgcccatcgagaagtgcgttccgcagtggcgctcccgtcaccggcgacgaattgccatggctctgtggtcccgcacactccactgcttccccgagcacgcaccatacacctgacagaacgccttcagtcacattggggattctggatggtggcggaggcgaatgatgtcgacgacggctatccttc

SEQ ID NO: 188118 - DNA, 393 bp, Zea Mays
tggccaaactccctcactaacttttgtagcttaattagtatatttcaacttttataattggcccaagccatgattccatgtttttcatggtctttttaccaatttccccttttttacttaaatggcttaattagggttattctagggtttgggcatttttctcactttgaggtgcatgatataattaaggcatgatccttaagataaaaagacttagttgagtttttgctcctaagtttttggtgtcttttgctcaattggattcacatgtgataatgatcttgagttagcactgagaagaaccctaggtaacactggggtgttacatcgaggcaccatccttcgatcatgtcgttgttggagccgtcgccgaggaaagcgcgtgctttcgac

SEQ ID NO: 188119 - DNA, 551 bp, Zea Mays
gacaactccgcctctccatcctttctctcccaccgcatgcagttgcgaccctcgtgcccctacgcttccccccagaacggccgggccaaacagattattcgcaccaccaacaacatgatctattgcctcctctttgaggcatctcttcccgccaactattggacagaggccttgaacactactacccatctcctcaactatcttccctccagggcagtgagccaccccacccccagttcgtcttgtatggcacaaccccctcctatgcccaccttcgtgtctttggttgtacatgctatcccaatacctctgtcactgctcatcataagctctccccccgctccactcgctgcattttcctcggtaactcctctgaccacaagggataccgatgcgttgacctcctcacccatcgcatcatcatctctcgtcatgttgtctttgatgaggaggttttcccccttgctgactagtgactcctccccacccccgacctcgattccctcctcgatgtcgattgcgtcgatgttcctcttttgctgccctgtttc

SEQ ID NO: 188120 - DNA, 340 bp, Zea Mays
gatattgcagcttaaacaagcaggcctttagtcctctcaaagacgttctcttttttacttttactttgcatgggtttttgtctaaattgtggttacatgctgaactatgagtggtaatagctggagttccttgtttcactaacaggagctgattgagaaactgagcaagggtgaattacctctaaaagagtacccatctatgagtgaaccaagttctgcttctgcttctcaagatgccacacaaactgcatcatcaactgcacgaccagcacaaaatccacaaccgatgtctatgagatcaaggaggacaccaacatgggcaaaatctcgtaattcggat

SEQ ID NO: 188121 - DNA, 425 bp, Zea Mays
tcctcctcgcagttaacatcatctccgaccatttcggtcctatcgtatccgtaagcccgcttccatcccctccttctcccctccccgccgttcctcgcacgctctccctaacactcgccagcccaatcctttcttccacagaaagtgtgtggctgccttctgcgccacggcgcgctgtcgttgcaggatatcgtccgccgcctcgaactctcgcccgggcaggtgaagaactccctcctcattctcattcagcacaactgcgttcaggcctacacaagccccagaggcaagcctctctgcgaaccttgcttatagcatctgatttagtgcgctatcagaatttgatgccactattgggcggcttgcaggggctggcgataggacagtgacgctctacctggccatcttcgacaatgttctgcacc

SEQ ID NO: 188122 - DNA, 659 bp, Zea Mays
gttatagtgcagccgtgaccctctagagcttgatctgggttctaagtttaaacgtaggatcagagcagacccggacgcctggtttcaatatcagcacatgccatcataggctcacgacgacgaagaggtaaggcggttatttacgccgatattttttgagctgtcagtcatcacagtccctagtgcggctgtgttaatcagaagacactggattatatacgtatagattatataatagagagaccaagttcggtgtcgtagtttgtcaaatgctcccctttctgcttgcgtattgtaccccttcttttccgtactgaacaattcgtgctcggttgttcagtatggaacacacttgtcgacactggagcagggtttcgtttcatcatcctgcgtttgcattacatcagttgtgcagttccagttccatttccacgccaatctactaatcgctggtgcttccatcctttcgcggtgccatactgtcatgaaactgcagctgtcactttggccaccttcccccagcaaaaagaacgcgagcattacctctagggccaggcggacagcgaccactcagagtgaatatcaatcccctcatgagcatgaccgccacgcatcacgcatgctgtcattgtttttttcgctttgctgaccaaatattc

SEQ ID NO: 188123 - DNA, 369 bp, Zea Mays
cccgatgctgccacgtggccgactgcccgtgacgtaagccagcgggcggagcctgacgtaaggcctctaggccacatggtcactgcatttattgtcgatgaggcgcgccgcatgtctattccactggcaggcgatgtgccgcctcagcatttaatgcgtcctgtccatcccactggcaggcgatgtgccgcctcatcatttaatgtgccctgtccacaccgctgacgggcagtgaccagactatcctgcaggcgacgtgcctgtccattccattggaaggcaatacgtccgtgctgcggcatacactgtgctcatcatggctcggaaatcttaatactataccgaggaagcagccgcaagatattaata

SEQ ID NO: 188124 - DNA, 274 bp, Zea Mays
gcaggaaggcgaggtgcctggttattctgcttctgatactgattacctccttgctggctgttctgacgatactgctgctgttgtgggtactgcctctgaaactgctgctgatacggacgctgactctgatgctgatatccctgtgggtgaccaggcttgccttgctgagatgaacttcctgagaagcggggcggctgatgctcccggactgtggtccactcatcttgcgcttccgatcttccatatccttgcgcttcctctcggtcatgattgc

SEQ ID NO: 188125 - DNA, 340 bp, Zea Mays
caaaccctgtgtgacctcggtggacacgcaggccaagctctctagagatggcgctcctgtcagtgaccccattgcctaccgtagcctcgccgatgcagcgatgcttatcagtatctcaccttcaccaggctcgacatcgcatatgtcgttcaacaatcttcgtgagccacacttgggtgtggtcaagtagatccttcggtatctttggagtactatcaactacgacctccaccttcgacgctccacccatgagctaatcatctacactgatgccgactgggccaggtgcctggatacccatcagtctacttgtgtttcttgggaccaaactcatctcttg

SEQ ID NO: 188126 - DNA, 283 bp, Zea Mays
aaactgctggccaatagatgagtttgacatggactgagaagaagtcgcattgtttgatgggtccattctagtaagggtggacaggggacagattaagtgagatggtaataagagtaacatttcagcatatgcatttgaactaatgatttagaaatcaaacataataagcagtaacaattataataaaaggttcgcattaacggttacagtactaaaccaaacacattagagttgatactgagcaaagttcccagactacaattattccttacatcgaactaag

SEQ ID NO: 188127 - DNA, 434 bp, Zea Mays
gtatctgttgtttctggtctctgtttcgatgccagttttggttcggttctaggctgctagctgttgattctgctttctgtttcgcttctgtttacgacacctgaaccagtttttggtaccggtgggggagcactgtcccaatggctggccgccgttcgccgtcggcggatcccggtctcggtcactgcgaagctcccgaaatgagatccggtggcgctttagagccctcgtccgttccaatacgcagtcggatgctgggttacgctcgcctctaaatctaagcttattatttatgcctttgcttcgtattcgtcagatctgatttcgtatttctgtctcgaccgaaattttgcgcggtgcagtgattataaaaacattcctcgtactgatgggtcatcctcgtgaacgactcctatacacccatagaatctgag

SEQ ID NO: 188128 - DNA, 388 bp, Zea Mays
gaacaatggtttttcaggcctgacatggttaaagaaatagaagaaaaagttaaacggataagacacaacttgaaagaggctcaaactcgtcagaaaaaatatgaggataaacgacaccaacctttggtctttcaagttaatgatcatgtataccagaaagtatcaccaatgaagggtgttaaccgatttggggtaaaaggaaaattggcaccctagtgtattgccccgtttcttattcttgaacgatacggaccactggcatacagacttcaaatgcctgaatcattatctacggtacataatgtgttccatgtatctcaattaaagaagtgccttcggattcctgatcgaaccatcgatgtgatggatgttgctttggaaccagatt

SEQ ID NO: 188129 - DNA, 311 bp, Zea Mays
gtatggaagcccgtcttaaagactgaaggctagaagcagtataagtcggtatggattaaaaccaagtgaacgttcgagcagccgccaatttgctgtaggtcttctgcggaatgatctgacgaatggatgaatgattgccatgaaccgcttgcacgttttgctcttggtagtggtactgctaccctgtcctgtagttggctgtgtgttgttggttcttctcgttcagatccctgtacagtgactggctgacagttttgaattggggctgccatgccactgccaccttctacggcggatgcgtgctttctcac

SEQ ID NO: 188130 - DNA, 976 bp, Zea Mays
ggcggagatacatcagcttcgcatccaggcggtaagacactaggttttcagtagaatgatcactttgtttggtttggttgggtgcactgatcactcgatgtttgttgttgtagattgctaaggatggtgaggtggagaggttgaaaattgaaatctcggagctgcacaagtccaagtgccagtcgctggagttgattgagcagagagatgcagaaattaaagagaaggacggcatcatccagagctactacaataaaattgtgagcacttctgtttaagtacttctaataatatatatgctctaaccagtcaatttggccgccatattcatattgcatgtaggttatatggttacataaataatttttttgcctgctgcaactgaatagggatattctcataaattcgcgcatgtttgttagggaaaatgtggatactgtaggatggtaagttccacatgataggctgctagatcttatcttagattcttgtcagtattgaactttgtaatgtcaaagctcgctcagttatacgaccagcactatctaaactataaatgcataaactcttttgatcagtgacctatgaatattccattaagccctgccactactgttgtagccttgtggtccatagacacctatttacatgttctattctgcctaagctgtggtggacaatttctcttcctgaatttgcaagtcgcaagaagtatgacttgccacatgttccatatcatgtgtagcagacaaccaaaaaaggctcttagtttttcatttaatttttacacttatttacatgctctcttatcttggggatcgggtatatattctgcaaatttttatgtaagttcactgaaaacatgattgtcatcttttcaggtaaacctggcagaaacttctgctggtaaagaggccaggatacaagaggtcgaagcaaagtttacccattgtcaagcaatttgcaatcgcatgac

SEQ ID NO: 188131 - DNA, 335 bp, Zea Mays
ttaattttcaactctttaatctgtgacggtggctctagaccatcaagtacagcctgctccaactcagtgtccacctcacctgcctcaagtggcatccactcagagtccaagtccacctcacctgcttcaagtgccatcctttccaggtccaggtccacctcacctgcatcgtgtgccatccgttccaagtccatgttcgcctcacctgcctcatgtgccatccattccaggtccacctcacatgccttatgtgccatccattctaggtccaagctctgtaagcttgttttttgttgcaagcatgccatctgtgcatcgtctgggtccataccatg

SEQ ID NO: 188132 - DNA, 658 bp, Zea Mays
attagccatgggtgtcgctgatgatgaacttggagaggaaggagtgttagcagtggagtggtggtcggaggtggaagaggatcgccgggatcttgataccaagttgtcaagggcctcggtccctaagctgggaggtccctgactacgtagttcgtagttgggtagatgtggtgccagggctgtttcctggtcaccgaagcaagggggatgagattgaaggctagaacaggtgagaggtttagataatacttctttcttgatccctccttgcatactgcttacatatatatataggagatagagcctgctggctgttagtctccaagactcatgttcagaccacataatggtctaggctttcaaacttcctgctaaactcatgttcacaccccataatgatctagactttcacacttatggcccttcggtcacctcctgtcccttggcgccctggccacctgtgctggcctcttcttggtgtctttggcgccggctgtactgccggccccacatgacactttgtagttacagacttgtgtaattcggacttgtgtaatttcagacttgtgtaaattgtggcttctgtattttgaataaaaatactacttgaacaaatattatttagccaataaacacaaatagagggtggcaacttcac

SEQ ID NO: 188133 - DNA, 406 bp, Zea Mays
ctcctaagtaccaaaaaagagcggaagttgcagaagttgagaaaaataaagttgtcatggaattgtgtaacactaggagagccattgaagggttgaagctaaatttggagaagacacaaaatgaggcaatacaagcacaacaagattcagagcttgctgatgtacggttcaaagagattcaacagggaattgccttcagagagagtgccgcagcaagagcagagattgagcttgcaagatatcgctatgctagtgccatggcagaactacatttagtaaaggatgagattgaacaacttcagaaggagtatcaatccttaaacactatgaggtacaatgctgaaacaaaagcatgtgaatctaatgttgcatctcagaagattgaggaaactgtggatgaccttac

SEQ ID NO: 188134 - DNA, 674 bp, Zea Mays
ctagaactgaccagcacactggtaattgaatttcgtaatgaaatcgagaaggctatgtggatgaaagcacttgtccaggcaacataccgagcttctgtatgccttttttaacttaaaagtactcgacatatgacctaaagcttgtaatggtttgttttatatttcgtatcttgtttcttgtaggctcctcctgacgtgaacatattaggagatcctgttagccctcccccagaatcaagtacaccacggcttaatagcttgggattagtggatcttgttgtgaatggctctgttattgaaactaaactttcactgtatgggaaggtaaaacattacataaatttcggtaatttttctcaaatgagacctattatactcaagaagcatctgactttcatattgattactgtgtttccccatttatctcactatcgtagctggacagaaagagcagtgattcgcaagagcttctaatgctagagctccttgggaatggagggaaggtaattgttccattcttacttgaagtacctatttcactctgggcccttaaaacttttcatggattctcgtccaatgttatcagattgtatatttaaggctagtcgtaaggccaccaatcatacacctaattgcaattagtcatcaatttgggtcggttagttgaacctttt

SEQ ID NO: 188135 - DNA, 535 bp, Zea Mays
ctcagcttcgacatggccaaggccagcttcgacctcaactactccgccaagcgcaccagcgtcgcgtcctccgacttcagcgacatctacggcggcggccacggggcgctcgaccgagtctctactgctcatcagcagcctcggcactccatcttcggcgggcctggcagggagagcaagaaggcggaggacgaagcggacgccgtgacggcggagctcggggccaccatgcacatgcgctacggcgccgccgcaggacggacgcgcgggagggagttcgaggcggtgtgatcgagcgcgcgcatgggaacgagggggtcgatcgatcgagaagaagcaaattaaatgcccttctcagctcgattcgtgattcgtgaatgtgatttgcgcgtgtgctgtaggtacgtacgtgtaagtagcctcagtttcgtcctcctcatcctccttttatatgtttggaaacaggatgcctcatatcatagcattctacttcctgcatggtacactgtagttcaaggcttcatgtatatatagt

SEQ ID NO: 188136 - DNA, 378 bp, Zea Mays
caaggtcttccatatttgtgttgcagtacgcatggcttccaccctcttgctaacagtgggagacatggatgccaataaccatgcaactatcacagagtttgtcgcatgccagatcctccattccgcgccgagcttatcaatcggctcaacacatgtctcctccaaatagtgctccactcccttgcctcctaggagtacacgcactcttctagaccagcttagataattcttactaccttctaacttcacatcattaggcacaagttccaacttcaactcagatgtacctgtattggccttagcaccaatcaaccctaaccccatgagctcctggatcatacttctcatttcactcatcatctcactctttgtaatccc

SEQ ID NO: 188137 - DNA, 367 bp, Zea Mays
agtgagatgagaaacgagatgaggaatatgattcaggaactcatggggctaggtatgattggtcccaaggctttgcctatctcatccgaattaaagttggaactcgttccaaatgatgtgaagctagaagggagcaagaattacttgagttggtctaggagggtgcgagtgctcttgggaggtaaaggagtggagcactatttggaagagggttgtgttgaacccgttgataggctcagccctgaatggagggtttggtataccaccaactcgattattgtggcgtggttgttggcatccatttcttcgtctgtaagtaagatggttgaagccatgcgcactgctgcacaaatttggaagaccttga

SEQ ID NO: 188138 - DNA, 417 bp, Zea Mays
caaggaattacggagttttctgggccttgctggatactataggaagttcatccgtcactttgggatcatttgccatcccttgcatgggctgctcaagaagggagttgtatacgtttggacggacgatcattccacagcattccacaccttgaaagcagctctagcatcagctccggtgctggccttgcctgatttttcctctcagttcactattgaaactgacgctagttcttttggaattggtgctgtgcttatgcagaaagggcatccattatccttcttgagtaaagcactgggccctaaatgtcgcggactttcagcttatgagaaggaattcatggctattcttgtagcggttcagcagtggcgtcaatatttgcagcatggcgagtttattattctcactgatcaccagag

SEQ ID NO: 188139 - DNA, 360 bp, Zea Mays
gccggatactacagaaaatttgttcgtcactttgcagtcgtggcaaaaccccttaccaatttgttgaagaaaaatgctctattcatttggactagcgtgcatgaggatgcttttactgccttgaagtcggcattatcctccgccccagtcttacagctgccaaatttttctcttccctttgagttggaaactgatgcttcagctggagggattggggctgttctcagccaaaaggggcaccccattgcctttgtcagtaaagctttgggcatcaagaaccaaggtctttcaacatacgaaaaggagtacctgacgattttaatggctgtcgactagtggagggcatatcttcagcacgac

SEQ ID NO: 188140 - DNA, 644 bp, Zea Mays
ctcagatgcatgcaaaggattgacatcagcagtaaatgaagtgtttccaaatgctgaaaaaagagaatgcttccgccacctcatgcaaaactacattaagcacttcacaggttcagagcacatgtatcccgcagctagagcatataggaacaccattttcgagcaccacttcagtaatgctagggatataccaggtgtgaagcaatggatagatgagtggcaccctcttttatggtacagatgtggtttcaacacggctataaagtgtgactacataaccaacaacattgctgaggtatttaacaactggattaaagactacaaagacctaccagtttgtgaactagcggacaaaatcagatgtttggttatggatctcttttttagaaggaaaaggatcggggacaaattgggtggtaaaattcttccaatagtcatcaatctgttgaaggctagaacgaggggtttgggccatttatctatacaaaaaggtgactactatcatgctgagatccgtgataacaataacattcaatgcagacatgttgtgaaggcagaacagagatattgttcttgtctcgaatggcaacacacagggaaaccctgccagcacggcctaatggtcattatagcgcaacaaatgc

SEQ ID NO: 188141 - DNA, 350 bp, Zea Mays
tgggattcttgacaattatgatcaatgggattttcatggcgatccttcagtgcatattagtggtctagataaaaaaacacaaagcgatgaaaggcatgttaacattgggcaaatgattgaagatgccattgggcatatatatgatgacgcacctatggtagatggagatgcaccagtgatcggacccaattcagaagttgaacagttttacaaacgggtcgaagaatcaaaaaagcctttatgggaaggttgtgaactcacagaggtaaccttatttgtgttgttgtttaatgtgaaatcctcaaacaaatggtcagataaatcttttggtgatcttcttgaggttctgc

SEQ ID NO: 188142 - DNA, 398 bp, Zea Mays
gttgcttttcaagtacccaatctggacattcacttttcaccaaaaaggtactgcaagatagttgaactgcttggtgtgcttctccatatgaagggaaacaataatgaatattcaaataaccatgaaagtggtagcttggcgccttggtatcctgctgatctagctggcgatgctagaacattggtttggagggtatgaagttacacttttgttctgattattcaatcacattgtaccatgtgatgcatctattcaatttgctgataccatatttgtatgtgttgttttcggttcaagggcattggttattcgcaagctgaatggcatacttgctatgttgtattatctgggatgtatctatatattttggagtcagaattctccgcgaattaccaaag

SEQ ID NO: 188143 - DNA, 773 bp, Zea Mays
tcttctgattcagttgtcacaaatagattcaagcaagtatctgttgcaattcatgtaagtattggtccctctgcaattttgtgtttcagtgcaaaaatgcatgtaactagattattggctggaacgaaatttgcagttttggacttattttttatttacacattggagttcatgatgacagtgtacctgctgccatgtcgtcaccaccactgaggctgattattaggaacttgcttactgtcttatataatttgcatgcattaacaattatttacatgttcaatcatttgtacatgtaattgttttctctgttgaaagccattgcaatgcatgagcagttttggtagtatgtaaataatgaagcatttttccccaaaacaactgcagtcattgaatgtggatgaaaaatgggaaggggcttcaattgggacaattcttaggaggaacaagcttcaggatgctactctcgatgaaaatattcttcgtatgatctttgtactgaattcaactgactccagtgtcaaacaaatacagtattgtgccatcatcctacaggtaacttaaatggcgtgcttgctccttgctaacatctacaacagtatgttcttaggcttgctggtttggacattgttaactagtgcaatatcacaagaataataaattatctaatgacgatatgaacagcctgttgatcttaagattgatgaggaaacgttaatgaagctagtaccattttggagagcatctcttgcaccttcaggcacgacaagcac

SEQ ID NO: 188144 - DNA, 279 bp, Zea Mays
gcccaggccctcgtcgctgacggcgccgaccactgttttggcgaggagctctgcttcagcgaggagctcgacaccgatcagaccacggaattccagtactgcgacggcaaccacgtcggagccgagatccgtgcacacaggaccgaggcgtgcgagggttgggacatctgtcaggtggtcgaccacaacgtggacgctgcaccggtggccgacagcttcctcgcgctctcacctgcgaacaaactccgcttcgacatgcccgatgggatgcagggtggc

SEQ ID NO: 188145 - DNA, 362 bp, Zea Mays
gtctcaacaatttggaaccatcagaccaatgtcatcttcaagaatggctcctcccttacagaggatgtaagatgttcacctacaaagcattgctagtaccatgggttgtagtcattttttgtcatcttcaagaatgactccccctcattacagatgtaggctaactcgcctctgatgccttgatagtgtcatgggttgtggtcttttttattaaacactagaataaatctaatttggaaaactaactggttgtaacaaactttcttaatgcaatgacacacatttcacgcttgttcaagaaaaaattgtcacaagtttggcaagctagagagaaaggtctagctactcaataaggataggac

SEQ ID NO: 188146 - DNA, 492 bp, Zea Mays
atcggctgtcctgtccttccttgtttatccccacagcaataacttcctcttctgctgacactggcctgggaagtgggattctgatgccaatttaattggccaggtaggcgccctgaattgccacacctaccggcccgccccaacccaatcatacatccatacggctacgagcgacggagcgagcgagggaagttgatgttgtagatgccatccttcctctcctccttccggatcgtagtcgtggcttgactcagcgtagcggccagggcagcggccatgtcgtcgtcggtccggcacggctcgtcgaggggccaggcatggtgagttaagtagtgagcgccgctggctgtactatttgaattgcggccggtgtttcgattccatgcaggattccgttgctttcccctcgcgtgtccgtcgtgttgacgatgcgttccgtatctcgcgccaggttctgcaccacgggcctgcccagcgacgtcgtcttcgagg

SEQ ID NO: 188147 - DNA, 1260 bp, Zea Mays
cgacggacggcgagcagcaagagggcaagcccgtaccctatcgactcgaacctcggagcggcggatcggtactcgtaggcagtggtggacatggcttcggcggcggtgatggtgagctcggcgggctccctgctggcgatgctgcaagagccggcgccggagctcaagctccacgcgctcgccagcctcaattctctcgtccacgccttctggcacgagatctccaccagcgtctcctccatgtaagtcccctcctcctcgcgcccttccccgctcctccagcggccccctccactcccgcccggccgacccctcaatttgcccgctctaccgccgccacagccgacggcaggtgctgcatcgccccatcgccgcgcgtttccattagtttcggtgaatttctgttagcctaggttcgattcgggctcgcctgcagaggtccggctagatggcggcggcgccgccgcgtcgagttccattcagagggaaccctgtgtccgatctgttgggatggaggttttgggagggttaatgtgctaccgttggtaactggaaacctagaatttttagaatttagagcttgtcatgacatgtcctccaatttatggacactgtttgctgaaaaatttgaactttgttgctaagtttctagattgtttaaggcaacaaatcccgaacttctatattcgggttgtcatgatagggtatgaatcaaatgtggtaactttgttctttaaaataaaaacttgtaacctgtgacaaagtaatactgattatgtgtttatactgtttaatgtctctcttaatgtcggaactgcccttagcttattggttgctcctcagttcaatagaagctatccagtcatagcggagaaatgagtaaatgctatatgagaattggtgtttatttcctgggagttgcattcattttagaaggatccgtatgaataccaagattcttcatgactgatgcaattgatgtgcatgtggcaatatattttgtctctttattatcctggtcactggttgtaaaaagttttgacaatcagtttgtgcttaggtgctttgctttgtcctgtattcctatttcctcacaatttgttccctgctgcttgcagtgagagtttgtatgaagacgaggagtttgtccagaggcaacttgcagcactagttgcctctaaggtatttttctacttgggcgagctaaatgatgctctgtcatatgcacttggcgctggacccttgtttgatgtttctgac

SEQ ID NO: 188148 - DNA, 355 bp, Zea Mays
ggatagtctcttccccgcctaaatgaatcaaccccttatcggcttctctgaagtagcctaacttcgtcatcatagccatatcagcttcagacacagttgacttcccaaaatccaaatggctgggctttgatggcatagcagtgttatagtcaatctcttcaccagtatcgccctcttcaatatctgcctgctcggcttcagtagcaggggtgccttcgtcaggagcgccctccatcacaactagtcccgaccgcctcaacttcggagatcgaagtggttttagtagcttcggtttcctctctgtcgtgtgtaatcttagctgttgagcgcaccctggccatttgatgttgaattt

SEQ ID NO: 188149 - DNA, 419 bp, Zea Mays
cggaggaattgcgccggtgccgcgcgtccgccgttgaagcaggcctctccgtggtgcgggcgattgatcacaccgtcaaaggtaataaatctatcattcagttcatcgcgcagtaccggtcgatttgcatatctcgggcagagcaatgttagactaggaagcgggatggcttgccgccggcgggtgcgtcatcgggcaaacggaaggagcagggctggttctatcccgaggttgaggacggctccccttgcgttggatcggaaacgggtggccaagatccgttcacggttgagcgcatggaagaaatccaatcgtgaccggttagtggtgatcggagggctgggaattttgcgcatgcgtggttagatctcgggcatcaaactcggatccatcggccgggattggcccgtaccccttcg

SEQ ID NO: 188150 - DNA, 569 bp, Zea Mays
gcggcggccctggatccaagaggttcatcactactacttgcctttacaaagaaggaagcatcaagaacaggcaatttgaagttctcaagaggtatgagaactctggcagagtagtcccgatcaattctagttttgtgacaagcagcatccccgtctgaaattacttcttggtccacatccgtgtcatccaaatgcacagcaacatcaacataaaaaacgacatcagtaggattgaaaagctcaagttccagaaggcggagcccccagcttcctttatagggatcaaccttcaataagtttatgtctttgccactgacaggttttaagtgtgtttcagtaaatcgagcaggtatttccatggacaacaggcgtgctcttacaagacgcatgccctgcacaacacagatattcaagggaacaactaggcgtcttccaggtagaagagaaacatctccattctcaagattcgcagcaggacctgaagtgtgatatacaaatttagtcctcaaactacaaatgacaatatttttgcctatgtgccaaggggttcagtaaccaaagacaaacta

SEQ ID NO: 188151 - DNA, 533 bp, Zea Mays
tccatatccaccaggccactaggatcccaacggagttgaatccttttttcttcgttttctgcactctacattcagcattactccaccaatcttgggatagggcgctagatgttgcaatcccactttgctcaaaacccgaaaccagatgtctctagcaaagacacaagaaaccagtatgcgctgaactgtttcctgttcctggtcacatagaagacatctctctcggtgatccatacctcttcgagctaggcgatcagcaattctattcctggagtacactttatctatacttcacagaattgggctttataaagccaggagatacacttcttattgtgtgtttgattgtttggcctccatttcaggcattttcccagcacaaggagcttgcacttctattcctggagtacactttatctatacttcacaaagaacctgtcataataaacagttctgagaagggggagagtacctctgagtcattggctgatgactgtattctacaggcaactatgtttgctctcaatgcattt

SEQ ID NO: 188152 - DNA, 443 bp, Zea Mays
cagattgattatatcgttatagcaattattcgagaagttatactttgccttcattgccataagacgtgtaaccacctgcaacacggtcacagtggtgtcgtcatgcactttttcctctgacgcgtgaagaagcttataaaactcctgcacttcatttggtgtatcctgttctgaggccaatgttggatactctctactaatatcagccaccaagtcatccatctgatcctcctcatcatcatcaattatttctgactctgtgatattctgctctacttctccatgtgagcgccacacaagatagttacgcataaacccattcttgtaaaggtgatgctccagttcttcgatctttctcacatacttaaaattccgacacttggtacacggacacttcaccacacgaggtataccggaaaatgcgagatccacgaattgttttg

SEQ ID NO: 188153 - DNA, 376 bp, Zea Mays
ggtcagcagcagtcgggtcacacccattggggtcagcttcagcaaattcaggcactggcacttcctcagcaacaggaacagaaggacctgcatcctgatccaagctagacactcgacgaagacgtctctttttcttcttctgcccctcagcaggagaattgggttgatcggctcggcgagaacgtttcgggcgaacattgttagacctctgagcgtccaaagctttgccggcctcagggatgggcgccaccaccagtgtttcagcaggagcggcatcagaagaatcctcaactaacatatccagcatggcacttatctctgtgtcacttggattcaaaggcacctcaaaatgaacttgcctctcgtcgttaggaat

SEQ ID NO: 188154 - DNA, 831 bp, Zea Mays
aattttttgatgtcacattggagggtagtcagtctatggatattgccaaattggtacagcagggcctcagaaatatccaacaaagaccaaaatcttctcctattgagagtggcagctttgagaagctacaagcactactgtataccctagaccaggaatcaacactatgtaagatgattcttgaagaagacatgattaacagatctgagaggactggtgaacttcaaagaatggctgaggagattattgttctgaaaaatgagaaggtatcactgcagaaggaggttgaacgggtggaggagagatcagcattgcttagagagaagctgtcaatggctgtaaagaagggcaagggtctggtacatgagcgtgaaggactcaagcaagctctcgacgagaagagatctcaaatagagaatttgaaacaagttttggaagggaagagctctgagatagagaagttaaaacatgctctggatgaaaataagtctgtaacagagaatgtgaagcaagttttggacgggaaaaacactgagattgaaaggcttaaacatgctctgggtgatagttgcgtggaaacagaaaacttaaaacaagcttttgctgagaaaacctctgaagcatataaaataaaacaagaactggatgcaaagaacatggatattgagaatctaagaggtgcgatagagtcaagagaatctgccatgacagatctcagagagcatgttgaacatctattgtcgtcgcaggttgcacgtttggaaaagttgcaagtagatattgttacccttaatgatgaaaaggtgaaattagaaagcatgttggaagaag

SEQ ID NO: 188155 - DNA, 319 bp, Zea Mays
atctttccggccttgattcaccatttcttgaggacgaggtgtggaatactattaaaaccatacctttggataaagctctaggccccgatggttcgcaggacgtttctacaaatcgtgttggcctaccatgataccatcaaagttgacgttatggcagctatttcctgtgtttgggcgcataaattcagaaattttgggagattgaattcagcttatattactctattaccgaagatggagggggccgtccatgtgaaggattttcgtccgaccagccttgttcacagcttcgccaaattggtaacaaagctgttggctg

SEQ ID NO: 188156 - DNA, 302 bp, Zea Mays
tcccgctctggcacgatcgtcgccgtgcgacaggctgctggccaaacgcgcgcgcgatagccgaggggaggaggacgtagaggaggggtaagccggctgcggaattcaccatgaccaataacttcctcacgacgataaagagcctgaagctgatcgagggttgcaaagccgcacaattatacgccttaagctccgttggggcagcctccacgtccggctcgggggatgccggagggagcagcaacggcaagccccagcctcctccgccgccaaagaccatctcgatgcggtccggatcgctg

SEQ ID NO: 188157 - DNA, 335 bp, Zea Mays
tacaagtggttgggttggtgatggatttgctcgttgtggtatggttgctggtggtattgctgggggtgataagtatgtgcgacaactcgttggttgtcggctggctgagttctggccattatgtatttggtggatttggtttctaggcagtccctggtggggtgtgcgcagtcttcaccgtggaacaggcagtaaaatcttcgtgactgctgtgcctggcctctgcctcttcctcttgtgttgttgccgcagttttgctatgaggggtactcctgacgacgaactgtgtctcaggcggggtgttggttggtgatggtgtttacttgttgctggtt

SEQ ID NO: 188158 - DNA, 548 bp, Zea Mays
tgggggcctttgagaataagatcttcttatactagcatttgaatcatcaacatttctggaacttatagcagaatcaaacgatttgattctaatgggtgctataaccttctggtatgcaggattatccttcagactagcaggtatgaatgaaactgcctccatgctacttgatgaatcgttaacaagctgaccagaaccagtccatgctaagtcaattctatcagaaagattggaggcagaagattgtgatttctgcaaagtctttccagcttctagttcagccagcactccttcactctgcatttcatacgagcctggggcaaagctgataacagttgagacagaatgcatggatgcatcacccataatggtggtttccaatgccaaatgtgaaatgctagtgttggtttgttccgtcataggggatgatttcactgaaactgcagccacttccaacgtacttggttgattctgttctagagaactctcagcattcaaatgtttaccagatgtcacatcctttgattgttctaatgagctttcagtaa

SEQ ID NO: 188159 - DNA, 997 bp, Zea Mays
tggaaacgtgtagacaaagagcaggttttctttttgcccttacactctgctgaggcttattttaaatttatacctttttttttatttctcactccttttcattacctccgctgagttcaacatatatcctctcttaactgtccgcttgcatatacctcatctgtttggttcagtttagcaactgctttccctttagttgtcttcaaaacaagacacttaagattatgacacttaattcttttccgtctgcatcagtatgagttgaggaaaaaagaggaaaaagaagctgctgaagctttgaaacgggaagaggagctacgtgaagccaaaagacagcaacataggctaaattttctgctgtcccaaacagagctttatagtcatttcatgcagaacaagactggtggttcagcgccgcctgatgaggaagatgtccctgatgaagaagatcctgaggaagctcaattgaaaagagaggccttgagagcagctcagcatgccgtctctcaacaaaagatgaagacaaatgcatttgatagtgaaattgtgaggcttcgtcaaacttctgattctgctcttccaactgatgattcatctagcatggaccctagcaagattgatctattacacccgtaagttctgtttgaaaagttgtttattatttacaacattataaatgagtgtagaactgattgcggttggtactatcttatttgtagctcaacaatgcctgagacgtcttctgtgcagaccccggagttgtttaagggtgtattaaaagaatatcagttaaaaggcttacagtggctggttaattgttatgagcaggtaaattgttaatgttaaaagcatatacattttgaccatttagtttgagcactactcttcgattcactttaaattttggaattgcagggcttgaatggcattcttgctgatgagatgggtcttggcaaaactgttcaggctatggcattcctgtctcatttggctgagg

SEQ ID NO: 188160 - DNA, 570 bp, Zea Mays
catcagacaatatctcagacatatcctcagtagccactacatttagctgcagtgctccacgctttgcacatttggcaatatgaccaggctcaaacttttccccacaagcatagcataacccattaagtctcctgaaatccctaagttgtcgtgctcttgtgagatctgccccgggtccttggtcatctgttttctggccaaccacaggttgtttcacatgcatagacaaccctgaccgttgtccccaaaatttagtgcgctccaacacctcctgttgaagctgagccaagtgaatagcacggtccaccgtagaaggtgtttgaacctgcaccacatcctgcaattcatacttaaggcctcgcacaaaataggtaacaaagaatgtctcatcaaactccgagttatgaacagctaatccatatctggcctgttcaaattctgacacataagaatccagtgtaccagtttgcttcaaagccaacaacctcctcaatgctttaggataagcattagcaccaaacttagcaaccacagctgaagtaaactcctgccaaccaccgaacccatgcc

SEQ ID NO: 188161 - DNA, 668 bp, Zea Mays
acggcccagatttaatcctgaagacactacagcttgactatctctcatccacacatctgagaaccaacggaccgggatcatcttcaacctaagacttctccccatccattccgcccaggttagacgtcgcgctctccctggaactctctctttctccgatggttcaccagcgtgcactcagcccggacccgaacacgatgccgccgaacagatgcaccaaacaataccgtagtcgtccatctctaggtcaaggaacgtgctggcgccacctaccttgcgctagtgactaacggcggcgcaacacacacccgcggcggcagaccccgccggagcgcaccaaagcctcgccaggcgccccaaacctcaccggatcaactttatgcgcagaagagcatcaaacgagcatagcggggttgcttcttaccggaaatcgacgcacagagctccacggcgatgctccgatcgacgaattccacgcaaccctgccccgaggatcgctgggagaggacacagacacatccttgtgcacccgcgaatgtcccaggccaaacatcgtgggctcgttggcgctatacctgcgacgttaacacggcggcagccaaatccttccctgcgacgatgatatccttccctgcgacgatgatggggcgtggggcctggaggagctg

SEQ ID NO: 188162 - DNA, 849 bp, Zea Mays
cgaggtttaacttgcaaaagtctaccagactcagacttaacctgtggtggacagcgggttaattgctaataaacccagggactcttttacaaaacagactcggcgaaggggtatcctcaagtcttggtcgccgattaactttctacggttcagattagatttgtcacaaggctgaaacgacacgagccaatagccactggatccaagatccatgaccgagatccgactacaccaaattctcatctgaacccaccgatccaatctaacggccacgatttaatgcaccgaaacggtttacttgccgctaatcctagccgttcgggtgcacatcgacggacagcaaccgatcaccgcccgatccaccgatcagacggcggcgccgcccgcagcagtggtggcgcaacgccggcgagacccatggccacgccccgagggcccgaatctctcgtcctactgcggctacccaaccctggggtcgatgcgaacatgctagaagcgaaattaccgtggattacgccgcgacgttcactggtcacgggcggcggcggaggatgaagtccggtgagcaattcgaagtcgcgctagtggtcgaacccgcacgaggatctcacgtgtggactcccagtactacgacggagctccccgacacgatttatgggcttcagcggtgacagaattgaatatgggccgcggtggcgcacaggcagatcacacggcggcagaggtggctatgggtgtgctggtccagggttacgaaagtcaaggtggccgcgcagagcttcactttataccagaccaaccatcctccccacatcccccgtgagctgagcatcatggaaatccgttggt

SEQ ID NO: 188163 - DNA, 886 bp, Zea Mays
cgcagccatgatgctgtcgagaggataatgaatgcttccacatatggagttgttatcctcacaaagaagtcattcggcaacccttataccattgaggagctcaggaacttctttggcaagagaaatcttatccctatattttttgatttggatgcagctgattgccttgccagagatatcgtcgagaagcgaggagatttgtgggagaaacatggtggtgagctgtggatgttatatggtgggatggaacacgagtggatggaatcggttgatgctctttcccgggtggtagatgtgcaactagaagcgaatgatggcaactggagagattgcatactccaagcaatcattctcttggccacaaaattaggcagaaggagcgtggttgatagggtgtaccggggaaaagggaggttggagaaggaggaattccctttcgctcgtaacaatgattttgtcggtaggaaaaaagagctttccgaattggaactcattttgtttggtgatgtcatgggagatggagaaagagaatattttgagctcacgacaaagcagaggagaaaaggccttgcagttaggcggtctgctaacaatcatgagcacatgaatactgatgacagcaaaggtaaggagcctgttatttggaaggagactgagaaagatattgagatgcagaggctgggtagtccattgtggcatgggcgtccactgagagtgaagaatggcgtaaggtgtggaaggaaaaaaagatctaggaagatactttatggtaagggtattgcttgcatatcaggggagcctggaattggcaagacagacttggttttggagtatgcatatagattctttcagagatacaagatggttctgtgggtcagaggggaaa

SEQ ID NO: 188164 - DNA, 628 bp, Zea Mays
gtacttgaggtatatattatgatcctgctaaactactcttctatcttgtcattcctaattgggaaacaactgatcaagagtcttgcaggaacgtttggaattagcaaatgccttaaagaagcaaatgtgggcagaagtgcaacttgacaagaggcgtttcaaggaagaatttgctagcagagtacaatataactctggcatgagttttaagcctgatatatatcaagaaaacaacatgacagagattacttcaactcgagcctgtgatgcttacaaagaaaacgatggacatgttgggacaatcaacaattgtgagatgcttgatcagcatagtcagggtaatgctggtggtataacttatgatagaaatgtcgtaggccaggaaatccatgcaaccccagatacttcgtatgttcagcagtatgcttatgctgataaaacacgatctcagttgaaatcgtacattggtcaccgggcagagcagctctatgtttacagatccctgcccctaggtcaggatcggaggcgaaacaggtattggcagtttacaacttcagcatcaccaaatgaccctggctcaggaagaatcttttttgaatcggaagatggatgttggagagttatcgac

SEQ ID NO: 188165 - DNA, 402 bp, Zea Mays
gttcgtatgatttagttgaagtgtgaatatacgcgtaaatatgtatgtttataaaaaatgttgtagtgtatgttgtgtctcggattgcgataataatgggctagccgacgtgtatgttatttagcgggctatatcgttgctctagttagccgaattgttagacggctttggttaagctcgtgatcatgatgattggcttgttgtagtctaaatgtgcatggttatggtcgcggatgaaagatagtagtgttcatgtgatgtctaagttaaaatgcaaattagtgtgtgaaaggcgcatcgataaacatatatgtaccgggtaagattattgtggtagatgcgttgttaattgtgaatggaaattctaggcacgaaataacttggataaaaagttagtaagtc

SEQ ID NO: 188166 - DNA, 286 bp, Zea Mays
gaccaggcaaaagagctacgctggtaataggagaagaccaatggagtttgaggaaggtgatcatgtgtacctcaaggtgtcaccacttcgtgggatgaggagatttaaagttaaggacaaattgttccctcactttattggaccatttagagtttttaggcaagttggatagatggcctatcaactcgagctaactgataatctatccgatgtgcataatttattccatgcgtctcaacttaagaagtgtctccgtatacctgaggaacagttaccaatggaagag

SEQ ID NO: 188167 - DNA, 402 bp, Zea Mays
ttgggagaagtgtctttaaaaatgagaagattcttgttaaaagattttttgttcaaaccttttggagaaactttagtagatcttaaaattggattttgggtgttacaaatcctaccccccttaacagaaatctcgtcctcaagattttaggaggaacgagggaaaagatggggaaaatctacgcgaagctcttcttctctttcccaagttgcttcatcttctccatggtgactccattgcaatttacatatctttatcaccttatttctcgtagcccgagtcaatgtatctagaatcttgatcggatattccgtataagtcatatctccctgatcactaagctcttccattggtaactgttcctcagggacatgaagacacttcttaagttgagatacgtgg

SEQ ID NO: 188168 - DNA, 375 bp, Zea Mays
gtaggaatgacttagtttttaataatgtttcaagttttacttatctgcaggttctttttagaggtacacactggcttagattctgggctcagctacaaaaggatgaagctgatggagttttaataaagaatgtctgtcgtcgcctggaatcggtggccatgcaattttgtgttaattttgattggaggttttctaataggattgccttgtaatcatctcactggttttattaagtttaaagaacctttagtgtgttagtgtgtggctgtgtggaggggtatgtcccttcattgagcagtgtgatataacaatttgtgttggccctaacctcttttgaggggaaagccggaactttctctccattatcaaaaaaaa

SEQ ID NO: 188169 - DNA, 779 bp, Zea Mays
caggcaaaacaaggtactggtgaaccagctgagtcaaccagaaccaggaacatcagatctttatttccctacagagtactcacaatccacagtaggacagttcaaagcctgcctctggaagcaatggctgacctattggcgcagcccggattacaaccttgttagattttccttcactttgttagttgccttgctgctcggctccattttctggaggataggcaccaacatgtaaattttcttactttcttcgtgtttggttgctggtgccaaccttccaaatctgaaagtgttggtgtattctattgcaggggagattcaaccactctcaggatggttattggatcaatgtacactgctgtgatgtttgtcggcatcaacaattgttcaactgtgcagccaattgtttcaattgagaggacggtcttctacagagagagggctgctgggatgtactctgcaatgccatatgccattgctcaggtaaagaaatatcatagtatacagaatacagtggtgactaaggtgctatcttctctccgcagtcgctcagtttttatgcttcgcaggttgtcatagagataccatatgtgtttgtccaaacaacgtattacaccctcatcgtatacgccatgatgagtttccaatggacagctgccaagttcttctggttcttcttcatttcctacttctccttcctctacttcacctactatggcatgatgactgtctcaatctccccaaaccatgaggttgcatccatcttcgccgcagctttc

SEQ ID NO: 188170 - DNA, 299 bp, Zea Mays
ggaaaagtcatccatgataaccaaatagtactggtaacaggaaatactcggtatcgaggatgtccaaaggtcacaatggactagatcaaaggggtagcggtttgggacatggaagaggggaagggtaagcgagcgtggcatccaagctgacaagcatggcaaggcgaggcaacgctgccgcgggggcaggggatggccgatgtgctcgagaatctggagaggacgtcgtgaccagggtggctaagacgacgatgccaagtggaggcagaggcaacaacagtgagggtgtatggtgtggc

SEQ ID NO: 188171 - DNA, 349 bp, Zea Mays
cggtggactgcgtcgagacggacctggagaagcggccggagatgaaagaggcgttggtgagggtggaggaggtggtggcgacggctttagccacggtgagggagaggcaacaagatggtagcggcagcgaggggacgatgagcgcgcagtcggcagactcggccagcagaagttcgcacgcctcgtacgtgcgagaggggtcgatacagcggatggccagcgtcggcgagcggtcgttgcggcgaggaagcaacgacccctcgtacgggtacggcatctcgtaagacgacatgtgcaggacagctagttggccagtcagattttgtgtgtcaaccatttctcccttgtt

SEQ ID NO: 188172 - DNA, 362 bp, Zea Mays
accatcatcatagctcggcgcctcagtcttatcaggaatgctgattatatagcagtaatggaggaaggtcaacttgttgagatggggacacatgaagaattgttaaaccttgatggtctttatgcagaacttcttaggtgtgaagaagccgcaaaactcccaaagaggtttgtcaacccatcctcttgacagcaacttgctgagtccttagctctgttttttggttctcagtcagaacacgaccaacttttttcattctctctatcaatagctaatgcctttgtttagtgtaattttcaatgccaatgcaggcatgtactaaaataaaatctgcttaactgccaccatcattttttaattac

SEQ ID NO: 188173 - DNA, 401 bp, Zea Mays
ctttggctccttggtgcccttatttctcactcagagtttgatgttgtggattttctcatttgtgagatcgaggacaccgtactggatggtctacgtgctcgtcgacagctgccttatgctcactatctgtatcacatctttgctcaggtgattcggcccacacagttccagggtactcttgaggcctctcgcctcatctttgggtcataacgtccagctccagaggatcctgtgccggcacctgctctagtgattgatactcaggccgaggataccaccttccatcagtttgagactccgggcgcaacagtccatgatgatgatgatgatgatgactttggggttccaccttcgcctccgcctcctatgcctccacacactcatgatcatgagactgggag

SEQ ID NO: 188174 - DNA, 651 bp, Zea Mays
gttctttatcacactgataacaatgtactcttgggagctccaactgggagtggcaaaacaatttcggcagaacttgcaatgctccatcttttcagtacacaaccagacatgaaggtttgtttatcaacttccaaaaaatctgaaagtttttttttggcatgatggcaatttaatgccttcccaatacctgttttaggtagtttacattgctcctctaaaggcaatagtacgagaaagaatgaatgattggagaaaacgtcttgtaattcagcttgggaagaagatggtaaagagcactccatagcttttatttctctggtacattaaaagtaaacattcatcttaactgaagtaacacttctcataattgataggttgagatgactggtgacttcactccagatttgatggccctattgtcagctgacatcatcatttctacccctgaaaaatgggatgggattagtcgaaattggcatagcagaagttacgttatgaaggtctagacctgtctttcatatattagctatttagtttttccctcattccgtagatcatatataataggttaatttcattttagttgttgaatatattttacatgattattgacaggtcgggctcatgatattggatgagatacatcttctg

SEQ ID NO: 188175 - DNA, 943 bp, Zea Mays
cttaacaaggattatattagaatcacaaagaaacaactaaccagtatcatcatcgtttgcattccttgtcctatgttgatcacgatatgcgtctacttcggccatggaaacattggacttaggaatatttgcatgccatccaagttcacctttaggaaaaaacaatgggtatgatagtgcatcataacatccatggtatgaacggatcccgtggcttgacctatctttcccatgcagcataacactattactgaattgacctctacgttcactcccctcaatccaaactacagcgacctccgaagtgatgggtacaatatataacttctggttcagcgtttggtcaaggttcaaggcgatatggtagttttcaacgttatcaacgtgccccatactcctaaggtgctcagagtatgggtttcccttaaatatttcaaccaactgtttaataacggccttgtctttctcaagttgctcttgacgacatttacgatatctatgctcgagactgggatcatcatcatagaagtaaagttcaaggtgtttatgttccgccccatcttccctaccgaatgaccttacgttgtggtacatcatgccatgtgcacgaaacgtgtagataccacaatccatgtttgtagtcatactgtcaaggcaacaatatagagaagtgaacgagaaatggccgttaaaaaatcgaatgttatcacgaaaatgcctcgcatcagcatctgcacactcccacagcctcctaagctggggcggggtctccaatgcggctagattaatctgtccattacgacaacaaaatccaggtggttcatactgaaacttcttcgctttgcagtaatcgcagtcaggaacagtgctcagcaaatgtgtttcttcaggtatgttactatacaccttgtcgtacaagtcaggtacgtcagggttgacagta

SEQ ID NO: 188176 - DNA, 284 bp, Zea Mays
cacttagctctctgggctcgggccccgcttgtcaggaccgcgcctctccacaccgcgcggatcgcaatgatttcgcgcgagaagctcgccagcgatcacgcaaccacgtggaccatccgcgccggtctttgggcagggccataaatacataccccacgcaccccgtgcccacgtttgccattgccgcgcggagaaatcgagaggaaccgaacgccgtgtgccgccgcgagtgatcctcagaaagccatcgatccagtccttggtgggctgtcctcgggcttcat

SEQ ID NO: 188177 - DNA, 308 bp, Zea Mays
cgtgaacatgctaattattgcagaacttacaatttcctcctctcatcgatcttcctctctgatatatattagcaggcgtagccaagggacatagatatatacatccatttattacgccattacatcaactgtagcacgtcgtctttttaccactccattaagcattattattactggtcacgcgatttggttcagcttctgggacgacaaggtttctatcgcatcgcctagcggccatgctgcgtcgacgtagtattctccgtacttcacctttgtcaccagcgtgaactccttggtcggctccaaac

SEQ ID NO: 188178 - DNA, 485 bp, Zea Mays
tgcaggaatattacgatcaaagtttatccccatggagtgggatgtcatattcgaacaactcgagtccaatggccagccaaaaccggttagaagcatatggtctttggcttttgatgacttgccacactacctcaagtcatgtttcctatacttggcgtccgtttcagaaaatgttattctttacccagatcgtttggtgcgtctgtggattgctgaaggttttgttatgcccaagaaagcagaaacactggaggacgttgggtttgactatctaaaagaactggtcgcgagagggttagtccaggtcgtgcagaaggatgctggtggatccatcaagctggtagccatccacaatctgctccatgcttttgtggagtctgaagcacaggactctagtttccttgaaatccaccatcatgctaatgttgtaaacccaaatgcagtgcggcgccttgccatacaaaactatgtggatgcatatgtcc

SEQ ID NO: 188179 - DNA, 514 bp, Zea Mays
tgccacatgggtcaccttcggcggcggcgactgatctagaaggggtgaagtggttaacgatagagatctatctgagggagcagcacaacgaggagtgagtagcagcaggaaaaggagggaatgagcagagggcaggctggcacgcacgcaaacgagagcagtgtgagggagggagatgcggtgtgctgctcctgtgtgtgtgtgtgagagagagccaggtccaggcagtgtctgaatgcatgtgagcgtgtgttgggtctccatgacctatttacatgagaagggtggttctcatgtaacctgtaagctgcggagcaatataggttgtgtttgtttcagctccatgacctattatcatattatgggaatttttgggtggcaatgatttgcttgctctgttctgttctgaggctctgagcaatctgtaggcttatttgatgcattattatcatattatgggatattttggtggcaatggtttccttgttctatttccaaggttattaaaacgata

SEQ ID NO: 188180 - DNA, 424 bp, Zea Mays
ccttcatatccttcttccatcattgttggcaatggttttgttcttccagtcacctccatcagcgactcgattcttcctagtcctttttgtcttcgcaatgttcatgttgttcctgacattattcaaaaccttttgtttgttcatcagttcatgttgacaattcttgttccatgagtttaaccctttcggtttgtccgtgaaggattttgccactaaaagtcttctcgcgcggtgtgatagctctaggcactgtacaccctttatcttcttgtgccccttacttcgacatctttgtccccctcacctgctttgactactaccgcttcatccactacttggcatcaccggctcggacatccgggtcctgatgttatgtccaagttgtgtagtagttatgtcatcccttgtactcgagcccccatga

SEQ ID NO: 188181 - DNA, 368 bp, Zea Mays
gctcgaccacaacgccgggcaggcttggaatccaggacaacaacattggcaggggtggtgtttggggcgacgatgcattgaagatcggagctcggggcagtgttactcagggcagcagagttcaagttgatggtgtgtgtagcaccagtcaggaggccgggagcaaggtggcagtgtcctccaaacagccactgcccatggcaaagggcatctctctgtgtggtagtattgcagcgctgaccttggcggggacttgataccgaccttgctggggttgctgaggttgacgagggaggactggggtgtggttagtttgctgggggtggttccacatcacttttttagtgatgttctggctgctcgatgaa

SEQ ID NO: 188182 - DNA, 901 bp, Zea Mays
ctcgtcctcttgtagttgggtgtaccacagctgcgcgatgtcgtccatatggtacgaagctcgtcccacgcgttcctccgccatagtgcgatgctggcgaaagtaggcctcgcacttgttgaggaagagcattggatctgtcgtgccgtcaaagcggggaaaatcccactttttgtgttgcggcggcgggtccggatcacgcattccatccgaccgtcgtctgccgccgttatccgacgttgagtcggatttttccttcaaggcgatcacctctgccttcatgtattggagctccgaggtgagggatttcagcgatgcaagcacgtcggcgagggtaggtttggtcatggtggctggtgatgttgcggaggcagtggaagattgtggtgatggcggcggctaaaaatggcggctgttggaggctgcggaagaggtgttgagttgggatggtgaggatcgtctagatcacgataccaggttgtcaagggcgttaaacccttggctggctggaccgcggctacggagctcgtaaccgtcggccgtcttctccggtgaggttattcccctctaccgtaggcttagagaataagagagatgaggctaacaatctgcttgccttaattgtcctggttacaagaatatatagggccatagcccaactaactggagtaacaaactcctgaaattatggaactgataactcttaaagggaaactaataatatccttctgccttatctactcgatcagctcgagccagctgtgcgtgtgtcccccctggccgcgtgttcctctgctcggcgtacgtccctggcccggcgcctcctagtgtagacttgtccccacatgacaatttccaaaaggtgtaaggtcatcttggtcaaagcaagttgagaagaaac

SEQ ID NO: 188183 - DNA, 457 bp, Zea Mays
ccacctgtgatgttcctggatgatagggcagaagagcaggaggttctcggccatataccaccttaaatggagagcatcagagagcagtctggtaggaggtgttgtagtagaatttggcccatggaagccatttaagccactctcttggtctatcccctgctaggcaccgaagatacatggtgataattcgatttaccacttctgattgtccatcagattgggggtggaaagctgaactcatgtgcagcttaactcctgatagctggaactattctgaccagaatgtgctagtaaatattgtatctatcactgacaatggagcatggcaacccatggagatggacaatgttatcaaagaaggcttttgctaccaatgctgctgtgtaagggtgtcccagagcaataaagtgtgcaaacttggagaaacggtcaacaactgtgagaatcactgacttgc

SEQ ID NO: 188184 - DNA, 348 bp, Zea Mays
cacgcaccgacgccaggacctcagcagggtgcgccttggcccactttccaccacccgtggtcaggacgcatctccatgtggccgttccaggggcccggttctgaggctcgtcccccggcggccatgttcgctggtgcgcagccggggttcacctcgccaccagggtttgcattcgcctcctcatcaccctggacctcgcctgtcgcttcgtcatggcccacaccactgtctgctccaccgtccgggctagttggttgggacgcagccgccctggctgccttccagactcccactctgacaccgccgatgggtcctgagtggatcgcggacaccggtgctacctaccac

SEQ ID NO: 188185 - DNA, 640 bp, Zea Mays
ctagattctcatcaactagatgacatttgtggtagatgaacgacgtgagaaccaacccttgatacaggtatgtcgagcaactcgtatagcagtcatgcatatcattaatgagcaagataaggccatcatgtctgttgagctagcaagattgtttgtacaccagtacgacaccactgataactctagtgaggactagctagcggtcggttccacatgtctcctagagctcacgtttcaaaggtcgaaggatccctatgtttgagcagatgcgttaggaccagttttagtagcccttggttttcatggagcgcatgctacactatactagtgtgccattgatgattccatagtgactccaactttacacttccgtggacttcaaagttaggattagtctctatatttttgcttttctctcctttgttatagttcacataattgctcactacactggctcaagccagacacctgttacattgatagttcagcaatagatcatcatagctcaaactacactagtcagctactaggcactcgacagcagtccttggtcttcatggggcacatgcatgctacactatactggtgcgccaccgatggttcctcctgcagctacgacgactataatgactctagcttt

SEQ ID NO: 188186 - DNA, 512 bp, Zea Mays
ccctgcccgacggtggtggtggaggaggtggtggtggggtagccgatgacaactgtagggtcttcggtggaaggataccaatggagatcttataggataagaatctcttttcatgatcatcaatcccaacctccaagatgtgtaaatccattttcctaacaagtttttcaggatcaaaacaccatgctttcaccacaaaggatggaaaatcccttttttccatagtttctgaatgcaattcatcaactcaatatgagtccctgagcaagtgttcagctgtagatcgacaccaggcatgttcagggatgcctgttaatttaacatcaaccaactcggccatcgacgatgaggatgcatgagcaaatctggaccatctcttgagcatcaaagtgaaacgggtctccttagaggtcttccttcgttgagaaccttggctgccgtgtcttcatccggtagaaacaacaagaagtctttagggaaggtctgatgaatcttcatgtcctccagcttaa

SEQ ID NO: 188187 - DNA, 283 bp, Zea Mays
attagggctaatcatgtgattaaataaaagtatagggggctatccaaaataaaccaggtgcctacgcgataaaacagaggacagcgggttgatttcctaaaacccgggggtctcttaagtaaaacttacacgcgaaggggtacggggtaacctcggccatcagatcacagataaacgactaggattagaccgcgcgggcgcgactgacaggcagagacaaggcgtcagcgagccagggcgggctgaccggctgggcccaggggcaggggcataggtgaggcgg

SEQ ID NO: 188188 - DNA, 319 bp, Zea Mays
cttgacatggaggatgatttctctctaagcctatcttcagaggatggtgggagccaaggtgaagatgaggttcaggtggcacaagttcataatgcaaagagaggagtcaaaagggcaaagggtgatgttccattatctccttcaaagtgtaaggtcaagagggcgaagcgagccgattgctagaagtattttaaggtggtcgaagttcaatcaaagaagaagtttggggaaatggtgatgaaggccaagtgcaagttttgttacaaaatatatgtgtatcaacctgggggtccaacatcacaactgaatcgacatcttg

SEQ ID NO: 188189 - DNA, 522 bp, Zea Mays
atcgagaaccagtttctcggacaacatgaaacccgcatacttcacttggaggcacaatttcacatgttcatgcagggggacctcagcgtcagggactactattgaaagatgaagacaatggccgacgcccttcgagacctcagtcacgatgtctcggatcgtcactcgtcctcaacctccttcgcgggctgagcaaacgcttcgaccatctcaagacgtttgtcaagcgtacagtcccattccccacatttcaagctattcggaacgatcttctcctcgaataacttactctggttggggacaactcagagtcgacatccgtcttctacactcgtcagcaacagtagccgacgaccactcctacgccgacctcgacacccgtgacaaccctgctgcagcagcaacacccccctgcactctctagctctacccgtcccagtaagcgtaaagggaaggggaagggcagggggaaggcagagggccccagcgcctcacgactagtcgtccttctacaatccttgg

SEQ ID NO: 188190 - DNA, 276 bp, Zea Mays
cacctatcttaccttgattgttttctccacttcgccatttcgcgagtcttgccttaactctatcctttgttatgcctttcgttattatcaccttcgcctttgacacctctatatcttaccttgatgccaatattatacctgtgctccaaaaccttctctctttcgtctcaattttaaaagttgaaggttacctattttcccttagttgcattctattccttgtcgcttttgagtttttaactccaccctttgttatctgttactacctttaccttc

SEQ ID NO: 188191 - DNA, 332 bp, Zea Mays
caggtatttgtaaagttatgctctgttgatgagaaaccatttgagaacaatttgcggtcatgtgatatgtcaggcggatcatagcacataagcttggcgccgattaacttcgtgttgttcattattgaaactccaggagacagaagagaagctctcatttgtggcttgaaaaagaaagaaccttctatatcactatttgcagaatcattctgagaactgtgcatttcgtcgggatcatcactatgctcatcttttacagggattttacaaggcagcacaaatgtaaatgttgatccttcattctctttgctgaccactgtcagagtaccacc

SEQ ID NO: 188192 - DNA, 1555 bp, Zea Mays
gccagaccagagctgaagcagagcggagaggtctgctcgccggccatcgaatccaggctcctccaaggtgatctctctcgatcgcttccggcctcaccgtagcccgatccacgcaggctcggccacgacccgcggcctccgcacgacctggatctgacgcgcctccccctgcccccgccctccgcctcgtacttcctcgctgcggccgccgtgctcgcgctactcggcggactcctactctatatgcttccccggaagcggggggtcgacgccggcgaggaccaggacttgcacaacaaggcccttcgcgccgccgcagttgctcaggacaaggagaaggtggttgcggagatgggcggcagggcgccagagatcgatgaggacctccacagccgccagctcgccgtctacgggcgcgagaccatgaagcgcctcttcggctccaacgtcctcatctccggactgcagggactaggcgctgagatcggtatgcctgctcgtcacaaacttcgagcttatgtatgtgcggtaataaatttgtgagacaaaaaaaggccagctggtttacttcaattgtgcgcctgtaattccttggccgagctgatgtcgcaaaatctaactattgttgtgctactaccttttgtaaagcgattattcctttctttgtgtaagagcaagagtaagatgctgccaccagcgggtgtgctgtgctgtaggattttgatatgtgatcaccgcctcaatcagtcaattctcaccacacctcacttagttcattttcactagacgacatacttctcattgatttctttccatgtttgtataaacactttaatagcgttcgaacttgtataacataaatgataacttagtttcttatactagtgcatttttgtgattacacgtgaatacttgttctgagactagctgcgacttttattcttgtgaactgaaactgtctcaatgcagcgttgcccttaagtaactttcagaatgttggcctctatagatcttattatatcaaagctttctgcaccgcatttgcgcattaagctcactctgttttggtactccataccaaggccagaggattggacatgttttactggcaaatgtagctagccttgttgcttcctaaagttggatttatgatgtaatgctcatgtttgccctagtgtgtcagttatttacttctcttattatatcgatttcagtatatcatgtttaacttgtgaattataaattgcttatgaggattcagattattcagttttacaaggattttgatttatcttctgctctttctatgattggcttacggccacttaatttctgcagcaaaaaaccttgtccttgcgggtgtcaagtccgtaaccttgcatgatgatggcaaagttgagctatgggacttgtcaagcaactttttcctctcagagaaggatgttgggcaaaaccgtgctctagcttgcgttccaaagctacaagagcttaacaatgctgttatcatctctaccataactggtgatttgatcaaagagcagctttctaattttca

SEQ ID NO: 188193 - DNA, 543 bp, Zea Mays
gacgaaatgaatatgagatgcacaagctcttggccttaaatcagaggcagaagatggtaagtttcctcattttttcccctttcaggtttacgataacatgattgtcgcctacaccattctgcttgaaattgtaggtcttacagaggaaaactgaggaagcagctgctgctacaaaaagattgaaggagttgctggaagcaaagaagtcatcacgtgaaacatatggtaggaagctatggccaatggattaatattctttaccattaagtttcatgtgtgctcattattcatagctgatcatatttttactacttgttttggttacctgatttttcaggcagtgcaaatggttcggggatgcaggtatccttcgagaaacctttgttagggaatgggaaaactattccccatctgccttttatgctgtgtctgaaacattatttttatgtgtcactaggccttaatacgagctattgacgatgaactagaagtcactgtaagagcacacgaattacgctcatattacgagcgacaaatgcaaga

SEQ ID NO: 188194 - DNA, 650 bp, Zea Mays
gttcaggttttggcttctagagtggattcttactctgtttctggtagggttacctcgattccggagattatatgtgtggctgctggtatgtggttgggtggaagatgaccgtgcgggagccgtgctgggaattggagaagactccacgcccgactgggaacaagaggtaaggtggaggcaagagctatctcttctttatattaaacttgcttacaatctgatcacaaatgtggggcttatatcttgccctctctagcctaacagatttcctcaataatctctctctatctaatctaacaaactccctccttatttaaaggacttatctaactcctggatagctaccgccggcccccttaatgggcctgacgcttagcccttcttccataagctatacccgtcataacatctctcccccccccctccgaaaacagctcgtcctcgagctggacttggtggtaagaggccttgaactgctgtagcgtctcccaggtagcatcagtcacctgtaatccgttgcagtgaactagaacatgccattcacctcttcggagttgagccttgagtaccttttctggggatggtagcagccgaccattttccatagctggtagggtaggagaggtagtacaggtggaggccccctgtat

SEQ ID NO: 188195 - DNA, 402 bp, Zea Mays
ggaagaaaatggtgcgtgttcccggcgatccctggcggttcggttcaattgaagggatcggggagcatcaccatcaagtaaggatgctagaacagggacaaggagggaatgagcggacctggggaaagctggccacgacagggtgtgattcgcggcggcggaaagaggtttggggcgaatccaaaattcgcaagctctggcgagggacggctagcgattagcggtggctgagtgagtgatgatgttgcgaagctattcgcgggctcaatttatagggagcgacagcggcgacggtcaattcgagccggatgcgctggcggccggagacggagaagagcacggtggctgtaaccgtggcggtcaccggtgtaacagcacatggataacgctcccaagggtgcc

SEQ ID NO: 188196 - DNA, 577 bp, Zea Mays
gccatggtactatacagtcggatgattgaggcaggtttagctccaaatgtggtgacatacacaaccttaatccagggacagtgcagcgaggggcacttggaacatgcttttaggctgcttcattcaatggaggcttgtgggctggcccctaatgagtggacttgcttagtgctgattgatgctttgtgcaaacatgggagaattgaggaagctcagcagtttctcgggtctcttgttcagaagggaattaaggtgaatcaggttatctacaccagtatgatagatgcattgtgcaagtcgggaaagtttgatggtgctcataatctgatgcagaaaataatcacagaagggtttgtgccagacgcccacatgtacagttcgcttattgatggactatgcagggaaaacaagctgttggaagcaatatcactattgaatgatatgattgagagtggagtacaggccaatgctgttccatttaccattctaattgataaacatctcagggagtttagatctgattccccaaaaatgatatccgataggatggctgcggcaggtgttaagcctgatgtcg

SEQ ID NO: 188197 - DNA, 361 bp, Zea Mays
gactaataggcctaaagtctttgacctgctctgccccctcttttttcggtatcaaggtaataaaggccgtgttgagcttgtagaaattgttgaaattcctgctccaaactgccctaactgcagccataacctctgctttaatacttccccagcaatctttatagaatcgccctgtgaatccatccggccctggggccttatccaaaggcaagcctttaatggtttccaaaacctcttgttctgaaaaaggggagtctagatcctccagattatgtctaggcagtccaagggcatccaaatcaatagtcctttccctgtttccacattgtccaatgaggtttgtataaaactgatccactgc

SEQ ID NO: 188198 - DNA, 1017 bp, Zea Mays
tagggtggtcgactagtgactgggcatttcgatgtaagagacggagccacacccaatcatcaatgctgaactcgagctcacggtgtcgctcatcataaaacctgtgtgcgtgttcttgagcttgtagtagcctgtctctgacctccccaaggaataggtcacgttcatggagcatttggtccacaatttgagttgcagcagtcctaggttgatatggaacaagtggtggatgatctcttccataaactacacgaaatggagttgttttcagtgctgagtggtatgatgtattgtagcaatactcatcccaggctagccagtccacccaagccctaggtcgatcccccgtgatgcatctcaaatacattgcaatggttttgttgactacttcagactgaccatctgtttggggatgaaatgttgtactcatcttcaatttcacccctgcaagtttgaagagatctttccaaacgtttcctgtaaacaccggatcccgatcactgactatggaacttgggaagccgtgtagtcttactatgccctcaaagaatgctcgagctactgtggctgcggtgtatgggtgactcatggcaatgaagtgtgcatatttagagaaccgatcaaccactgtcaatattaccgattttccatggacctttggcagaccctcaatgaagtccattgcagtatctgcccatacttgtcgtggtacttctaaaggctgaagtaggcctgctggttgaagagcctcggttttattcttttggcagatgacacaggagcgcacccaaccaatcctttactagtgccctgtctctgtgcatgaagaagtctgatctgagcctatgtagtatcttttgtactccaccgtgtcttgcagaatgtgcgacctctagtattgctggaatgagtgtggaggaggctggaacaaacacctggttgccatgcattattagtccctcctgtgtatgccatggatcccccaagcttccttctttgatctgtgcactgagctgc

SEQ ID NO: 188199 - DNA, 327 bp, Zea Mays
gcctcgttaaagctcagcatcaggttaatgtctcccccagcagtatttctattttcaggcctacgcgtcaggttaaagtccccaacaatcaaccagcgcttgtcggagggcatgttaatattggaaaaccagtggaggaaatcaattttcccagttggggaacagggcgcatagacgttggtgataatccaagattcctccgacgaagtagcaaaaaattcatccgaaagagcatactcattttggaaaataacattgccaaccagcttcgaactattccaaacagtaatgaaaccccccgagtttcctatcgaagggacaaaagcg

SEQ ID NO: 188200 - DNA, 282 bp, Zea Mays
aggaagccaaaacgatgtttgctgtgggccctgatgcaggaagaggggggttcgtggaggtgttcgccgggtttggagtgaggtccggcgaggggttgaggtggtggacgttgacgccaaggagggaagtgacggggctggggttgggagatgatggtctagggctaggggctgagcgtgaagaggccattctctaccgagtgtctttcattgtctctggtaagtatttgaggactaaggatttcataacatcttccctataatcttgccatgtaatgaaat

SEQ ID NO: 188201 - DNA, 519 bp, Zea Mays
ggtgcaacggctggtctttagttaccgtgggaagaaagatacgcgttatggtcaaattgatatgtttggagatgctgatgggaatgaactccccaaaggccctggtgtggacagaaatactattgatataatatactcagtaaataatcatgctgctgtttggtggggaatccatgaagctgcccggcactgcattaaccttcggcttcgaactcatctaggtggtcccactcagacatttgcagctctagaacgcatgcttttggatgtaacaaatgtattaatggtggaagctaaggaagctgaaggaaggtatatagggccagctgacatttgcttattgccaatgcgtcttctattggattttgttgaggcattgaaaaaatatgcttacaatgcatatgaaggttcctttgttctatcacccccaccaaaagcaagttccgtgtttttccatgcaaacaaacgagtttgtgaagagtggttttcacgaatttgtgatccaatgttgaatgcagg

SEQ ID NO: 188202 - DNA, 397 bp, Zea Mays
gctgcttgaggatgtggtggatattgacgttggctatgatgcacctccaccatcgtttactgctggtttggagttgcagaagcagaggagagcacgtattgaagctgctaagcagcgaattgatgcaactaggaaggctcctgctgctccagctgcaaaagcaaataactcagaagacgttgtaagaaaaaaattgaccatgaagaatcgagggggaaagaagaaggatgatatcgatcatatccttcccagtgacaatatgacaggttgttcaggtgctaggaaaaagagacgaagaggttcctgtgacagtattgattgggaagattgcatcattgagctcctgctactgcatggtgcaaatgaagctgagattgaacaaggccagtacagaaga

SEQ ID NO: 188203 - DNA, 645 bp, Zea Mays
gtcgtgattagtccagaatcgcagtcaaggaaaagaaatcgttggattcttaacgaactcgttaaattgcacaagaattacttgaatgggcgactgcctgtttatgatggtagaaagggccttttcactgctggtccgctaccgttcaaaaccaaagaatttgttctggaactaaccaatcctgagagagcaaaccaggggtatggtgttgtattctgtttttcaagctcacgcttgttctttgtatgtgcttattcacgttgcattaatccttgccttactgcctgcagggcgaaagagtacagcgtgaccataaaagatgctgccaaattagatctttacagccttaggcagttcttggctggtaggcagagggaactgccacaggatactgtccaagccctcgatattgctatgcgagaatgcccaactgaaaagtactagttatgatgcatccatgcaaatttaatatccattgaattcatgtcgccctatatatatttgtttggcggactgactattgtatatgatccttctgcggttccatcagttctgactttttttcttttcaaactgtgacaggtatgtatccatctcaaggtcatttttctctcagtcatttggacatggtggtgatattggcag

SEQ ID NO: 188204 - DNA, 336 bp, Zea Mays
gtcttggccacaatgtcgtcttggattgttgctttcacttctcgacatctggtatgcggatggaggtagggttttgcaacataaagctgaaactgctgcatcagaggatgtggctcgacaacaatgatatgagactaaaccctcttatcaaggattggattgtttcgtaggttgggcaattgccgggagcgaggcggagaagcaaacttgttggtgaagaaccggagctgccttgcgtggagtgtattgaggcttggcatccttttgcgtcgatgtttgggtgtaggagtcgttaagttcctttagccatgtgcggcctgtctagtgaagtcagag

SEQ ID NO: 188205 - DNA, 408 bp, Zea Mays
ccgggacagtgaattggggcctctagatccctctattcattgcccggtcatgggtatgtgggatgttcactcttcaccttcatttgcgtttgctcagaccagcggttcccaccatcagagtccacacggtcgtcccctcgacggcctgcctaagcttagttttccctcctttgatgggactaacccgaagctgtggcagaagaggtgtgaagattatttcgatatgtatgatactgagcagattgtgtgggtgaaagcagccacaatgcacttgtcggggtggctgtgcgatggcttcagtcaattgagcctcgcctcccatcctggtcatggcagcgtttttgtcacgcagtgcacgaacgctttggtcgcgaacaacatgaactcctcatccgtaaactattccac

SEQ ID NO: 188206 - DNA, 506 bp, Zea Mays
cacacccattgggatcaatgtcatctaggtcacacccattgggatccgcagcagtcgggtcacacccattggggtcagtttcagcaaatgcaggcactggcacttcctcagcagcaggaacagaaggaccggcatcctgatccaagctagacactcgacgaagacgtctcttcttctttttcttcccctcagcaggagaagtgggctggttggctctgtgagaacgctttgggcgaacactgtcagacctctgaatatccaaagctttgccggcctcagggatggccaccaccaccagtgtttcagtaggagcgacatcagaagaatcctcagctaacatatccagcatggcacttatatctgcgtcacttggattcaaaggcacctcaaaatgaacctacctctcgtcgtcaggaatttcttcgagtgaagcaaccaaagcactaacttcttcgggagagggtcgcactctaaggcccaaaccgctatcaccagcaggaggattt

SEQ ID NO: 188207 - DNA, 296 bp, Zea Mays
tacaaccgtcggatcaccagtttgcggcccagattagatctaggtttttaaatgaagcagtaagcaacgctgacccttagatcagatatcaacggtcactcttctatctaactgagatcgtcccgcgtccatcggattcacgatctacggctgcggttagatgcggccgaattggtatgaaactctaatccgagccgtccaacgcacatccaacggtgcgcatcaggtcttcctccccctacctagctgagcgacggtgacaaaattttcccacggcggagtaactccggcgagcc

SEQ ID NO: 188208 - DNA, 413 bp, Zea Mays
gagctcttataatatttcggtaaaaggtgcaagtataaatgtgctgctatttgcggtttagataggtccaatagacagatttaaggttggaacataattgggtacagaactggctgatacctgttttcaaatggcaccatagttcatcagatgcttcagatggggagttggggacagagatagctagtaggcgtaaattcgatgaccaattcaacaagccatatgattcgaggtctttttgaatgttagaagctgaaaatgtgttgttaggagttagaaccatagacatctagataggaatcatcatggggattttattttgcactattcgcctttttagaacatcttccttctatattcgtgtaatgtacggacagacgtacacgcggcgtcacagggcacgagatgtgcgc

SEQ ID NO: 188209 - DNA, 343 bp, Zea Mays
gtagtatagtcctatactttttcgaaaatttattgtttattagtacatttgactgatctgcttctagcatattgggcgcaaggaaacactgaacttgtcatttaagctcatttcatatattctgattattgtcatggaggataacttcttggtaatagctattaaaggtctatcgattttgctgatatacctagcaatagttcagagattccaacctaatatgccctgttacatcttttgcatgaaaaccacataacctgctatctgcatgctgatggtgtggttttacttgatcacctgaagcagtagtagatcatgaattgtcttgtatggaggattttgg

SEQ ID NO: 188210 - DNA, 398 bp, Zea Mays
gctttatattcttgttcctattaagaactgagcaactagctaagctgagatcaagttacagtttactaaatactggtatgttaaaaaggaaccctcatgtagctgtgagagtaaatttcttcttcttgtgccagagtatattagcatttcttggttttcaattatatgtcagtttgcatttctcacaaacacatgcattcattctctggtgctatcaaactgatgcatattttgatgagcagcactaggactatggtcatacgattagtgctagatgctgagttactgacaacaataatctcatctgttgtttgatgtggtggttgtgtcaatcaaaaaaacatttttccatcaccaacagaggaactgcgatttagcaagcgctgcgcaatgttgat

SEQ ID NO: 188211 - DNA, 334 bp, Zea Mays
cgaggattatgcttggcctattccaggagattcccctcccaccctggcctggtttcgacctaatccgcatgagtcacagaacaactcccccatggaggtgagagcatatgtccttgcattgctgcagagggctcgcgacggcccaagcacttcaagggacacgtcggctacaagcgccacagggaagcgtcgccacggaggcaaggtacaacggcatctcgacagcaggtcacagttggtgattggggtatatgtggatgatttgataatcactggcaccaattgtgaagatatcaagcggttcaagcaggagatggcagctgttttcaagatg

SEQ ID NO: 188212 - DNA, 430 bp, Zea Mays
cattaacattggaagaacttactattgccaagactagatggaatgttcctagcacttctgctaggaaagaaaaagatgagtcgtctgatgacctgtatgacgctaataatgatgatgatgctggtactgactgctcctcaggaaaacgaaggcgaactaattcaaggaaaaagggtcaaaaatgccggaaggtaaataaagattgtagtgttcctgcaaaaaaggtcgagcttccaattacaaatactgagagcgttcccacagaagtgacaaatgaacgagtgccattgccagtagacacaaaagtaccaaatggatgggtacccttgccagtagacacaaaagtaccaaatgaatcagtgcccttgccagcaaacacaaaatgggcatcaccagagctactggagtttgtaggacatatgagagatgg

SEQ ID NO: 188213 - DNA, 491 bp, Zea Mays
tcattatgaaatctattacccgaggtcaagaacctttgcctcttatttccttcctgccacattccatttatttcttctgttctattaaggctattgctcgagtgaagaacctttacttttaccattcaaaagtcgccagtggaatgtgtatatactgtctataaccttcctaactagtaattgagagcctgtacttgttctaatataagttctcttccattttgtacccttccatttcctaaattttccattttgtaactccccctcgatatcctaggtaatttgtactttaatatagtaatgatgtttaggacagtttctctagcttttctaagaaagcagcttaagggagaagctagaggtcagtgtggagaactacatggttagggcaatacacgaaatgtggcaatgatttgtttgcagaccttccttgccttgtttattttctttacatattacttgctagctcactgaacagacccagtgctgcg

SEQ ID NO: 188214 - DNA, 400 bp, Zea Mays
gtggagtgtgaagtaagagaaggaagtggagtatcctatgaagaggcatgtgagctcggtggtggtagagtgaaagcctctggagttgcagtggatgttagtggtccagtgctaaacaaggaggcctgcaacacagaggaggcaagtacattttcaggatctagatctttgcagcactgtttggcacagctcctcctagttctgactcctgctacagtaggcccctagttcattttgggggtctagctcctgctgcagtgccatttccaggaggagacggagctggcatagaacttgccaaagggggcctaactatgattcattgtgatgaacttgttctacagttgcaggcaagggaggataagaagcgtcatggagttgggcatgtgaatgagaagag

SEQ ID NO: 188215 - DNA, 319 bp, Zea Mays
catgacacaaagaactcgaaggttctccacaaatccataagagaagggaagggaagaacacaagattgaaacaactccaaatttcagcaaggatgcaaaattgagatggagaagtgaccaaaacctgtggactgtactggcaaaccttcctcggattaaacctgtagatcacaaacacagtcgacagttacataatcgttgcggatcccttggctcaactggtgactacctagaggggaaactaggagttctaaacaagtgctccaaacaaaatggtagccaagagatggctctaacaacagctctatgcctctattta

SEQ ID NO: 188216 - DNA, 331 bp, Zea Mays
gggtagaacactcagttttaccacaacaaagtagctccttctcaaggaagctatcggtggccgacccccatcttggcatatataaggaggaggttagccaggagactagggagatacacactcgacaagaccagaagacctagatgtgcgggatggatatcccctgggtcaccacggaacaaatacacttcataggccgcctataaggcccatgatggatcgcctatcggacgagtcgtgggcctcaatagggtgcaaccaaagctgagtaaagcgatcacgcactgagtcaaggagatcctcgaaagcgtgtcgcatgcatgcagtcgtg

SEQ ID NO: 188217 - DNA, 695 bp, Zea Mays
accggggcactttaaggaaagaacatggtcatgggatagagggtgagcctgagagtgtaacgtggtgcccattccctgccccaaccaaaacttggtgacttggtcttggtcgacaggttttgcttgtgcatgaaaagaaaggagcaaaaaaagtagcaagggtagaatttccttagttgttcaatgttctaggtgttgaataggaggttgctgctattgtccttgagccggtaggttcccgtgcataggacttgggcgacaatgaacgacccctctcatggcggggagagtttgtgcttgtccttggtggtcatggcccttcttagcaccagatcgccgacgattaacgatctaccctggacctgtcggtcatggtagcatcgtaagtcctattggtacttggaagagcacacaacaaccatgttctgtgcttcgtcgaggaggtcactggagatttgggcgtccgtcgttccttgcctgttgctgaaggcttggacccttggggatccatactccaactctatggggagcatcgcctctacgccaaatgccagcaagaaagacgtgcagtctgttgccctagagggtgaagtacgtaggctccaaaggaaggttggtagctctatcgcccaatatctggtgagcttcttcaacttgtcaaagatccatggattaagccttgaagtattaggatg

SEQ ID NO: 188218 - DNA, 275 bp, Zea Mays
gaaagaagaacacattgaatctggaaatgaaatgatccatcctgcgaagaaagcaaaactggaagtgcaagaggacattaatgtaatcggaaactttgatttttcttcaatacatagtcatactactagtcctgcaaaagctattaccgacgacattatgtcagagtctgttgcacaacagaaatccattcctgatataatgagcattgttgacggtgaggtttacagaagggatcctggtagagagctggctaaacctgtaggaagaagagcag

SEQ ID NO: 188219 - DNA, 495 bp, Zea Mays
ctctgagaagcaaagcatctgccgagtttaacagtgcaacatccagcttcatacagacaaatgtcagcaacaaatcagatctcacccccaggtatgacatgagaaaaaaagaaattatgactgtaaggttatctagtgatattgatcatgaaatgtttgacagatccttaatggacaatgtgggagtttggaggcctgttgttacacctaaagggcctaaatctcttgagtctttgtctgctaacacattaactggtgcaagcccaagtctgtctatacaaagacaacctgttgtagatcttctctgtgccatgactctgcttgttcaacaatctacttcgtttgttgatatgtcacttgatatggatgacggggacggttcttttttctggctttccctggatgagcaaaagagacgtggattttcttgtgatccttctatggttcatgctggctgtggtggcctattaggaacatgccattcaaaggattgcg

SEQ ID NO: 188220 - DNA, 480 bp, Zea Mays
atctcctgaaaatgcaatgatatatgctccagaatcctcaatgtaccaggtcgatgaccgtgagacgaaaccaaactgcttgcaatcaaacagatctcatggatcactgaataatctatcaaattcggtcctggagctgaagaatgctgactcatactccacatccaactattccgccaaggatgccatgtttacgcagtgctcaccgaggcatgatctcagatgcttcaatgccttctcggccaaattcatcaagaaaagttccctgtccgatctagtctccagaggaagcatgagcaggaaattcaagacttccacagccagtgatgattggagtgatgtcagctcgcgctgggcgaaggacagccaggtagattttcttgagaggttcgagaaggcagtatcaaaactgctgatttcagatggactagaaagctgcctagatgctggctctgaggtcacaactatatggcaattact

SEQ ID NO: 188221 - DNA, 525 bp, Zea Mays
cgacgaccggctggtcttttcctccatcagcgtacatatgtacttgatatcattgaccgtgcaggcatgactggttgcaaaccttgttctacaccggttgatctccagtccaagctcgctgctgacagtggacctgctgttcaggatgctactcagtaccggagtctggctggtgctcttcagtatctaacattcaccagacctgatattacatacgcagttcaacagatttgtctccatatgcatgatccccgtgagtcccatctgactgctctgaaacgtattattcactaccttcaaggtacggctgatcatggtcttcttctaccacgctccacatctgtttccgagcttgtggtctatactgatgctgattgggctgggtgtccggacactcgtcgctccacttctggttatgcggtgtttcttggtgataatcttgtctcctggtcctccaagcgacaaaaggttgtctctcgctctagtgctgaagctgagtatcgtgctgttgccaatggtgttgcc

SEQ ID NO: 188222 - DNA, 281 bp, Zea Mays
aggcgcaaaatacactcaagtggctttctctcggttcgcccgacgccccttctagcttcgcctcgcctgatcccgggcttggtgcctcaggactattcgggatgggtccttccgggtagactcttcctgtgttgtcctgctgacttttgggcgaggggctcgaggatctttttcccgacaattctctggaccgatcgaagtagaacaagtaaacaatatctgacattactatgacaagaatatctaagtgcactattacattgatctatgtttgaataaat

SEQ ID NO: 188223 - DNA, 466 bp, Zea Mays
catttcctcttcgtctcaaatccgacacgttctccactattgctcactttttctcctacgttgccacgcaatttcgtactaccattaagagtgtgcaatgtgacaatggttgtgaatttgacaattcatcttcacatgccttctttctctcccatggtgttatccttcgcatgtcctgtccatacacgtcccaacagaatggcaaggctgagcgtgtcctccggactataaacaacattattcgttccctcctttttcatgcacatcttccccctgtcttctgggttgaggctcttcataccgccacctatcttttcaaccgtcaccccactaaaaccctctccttttccaccccttaccaggccttgcacggtactcctcccgactacacccacctccgtgtctttggctgtcgatgttatcccaatctctctgccaccacgcctcataaacttgctccccggtc

SEQ ID NO: 188224 - DNA, 306 bp, Zea Mays
aaaaaccctctcccccaactccacctgcttcgttcgcttcccttcatccccactccaccaaaccctcgcgtcgctgggactgggagcagagtagagcacagcggagcagattagcagaaggtgtcgagtggaagcaaatggccaatgagtggccgcggtggtggtagcatcctcctcgccttttctccccgtctcccgcgttctggttgttgcagcgagcgggagcgggaggacacgtgctacccccgtcgcttctcgggcacgcctccctcactcggatctgggccgcgcgcgcgagatcctgag

SEQ ID NO: 188225 - DNA, 695 bp, Zea Mays
cttgtggtggagaaaaagagatgatgtcccagaagctccaaatgggccaatgcaagtgattattctagattttgctgcttttcactgtatatatctgtaatttctaatattctgtaactttattttctccatcaggtatacattcacctccatagaatcacagatcagagtacttggtgatttcgccttcatgttacgggactacgagcttgccttgtcaaactacagactactcgctactgattataagcttgataaggcttggaagcgatttgctggtgtacaggtacaagaatttttttgactcgttttgctgaactttctctgtggatatacatattaatagtctgtttagcgtttttaattgtgttgtaaaagcaaaattatgattgctattctgaaggaatatcccggtatgtatgccaaacatgttggtcttgtttacactaaaagcaatgggcagttccattaccaacccagctttcctacaaatatggcgtttggcctagaaaacatcagatgatacatgtccactatgttgcagggtttctggattgtttttacttgagtctggaatcaccttaatgtgtttcacatattaacttcatgttgataattgatatacatatattctcttttgcaggagatgagtggactttgctatttcattttggatcagtcgaggaaggacgcgg

SEQ ID NO: 188226 - DNA, 350 bp, Zea Mays
ttcaatcatttgtttgcaggaaaccaaattaagtatcgtttcagattatgatatactctccatccttggggctggtttcagtaactttgtttttaaaccagctcagggttctagggggggagtgctgattgcttggcgtgatggtactttctcctcggttgcgtctattataaaagattattcgatctcagttcaattccaggatgagtctggtgctgcttggtggtttactggagtgtatgggcctcatcaggacagtttcaaactttctttcctgcaagaattacgagaaatcagagatgtttgtattggaccatggcttttatgtggtgattttaatttgattttca

SEQ ID NO: 188227 - DNA, 1462 bp, Zea Mays
cctggatgagcgccgccgtccccggcacgtacgtgcttcccctcccgacccctgtggaaactctcgcgctttggggatctgtgagtaaattgctgcgagcttcgtcatcgtcgctcggctgacatactgttgcgtgctccgggataatggtgcagcgtgctggggacgctgctcaagaacaagctgatccccgaccccttctacgggctgaacaaccaggccatcatcgacatcgccgacgccgggagggagtactacaccttttggttcttcaccacgttccagtgtgccctggtacgcagaactgcaccagttctccggatatttgttagtcatgttttcctgtaacgaagaatgcattatcaatccttactgtctcctccggttaaaaagggattgcctaacctttttgctgtaggcagtttttgattcagcatagttgtactgcattgttactgcgccaatgaatgtggctgctccctcaggcctcagcaggcagcaagcactttaagctgtcttctgctgaactgaactgtacaaactgatacacttctcttgttgtgtttcccatagtttattttcccttttggcagaataatatgtttatagcaagtataatttgggactaaaggtgaactttatgctggggtggagagagaagggaagtgggctgttgaagcacattaatcaagaaatcttgtgagagaagaaagtgggccatgtattaatgatgaagtatattcttactgatctactatatggatgggctgatagatgggctatatatttacataaagccagcagtggactgtattattaacttttttaagagtagagacgactatcacattatgtgtgtaggtagggtagagtactctagtgacctagcagtacaatataaaatatgtctttagcttacttcaactcaaatcaaatccgtgcaacctaaggacacatgttcagttgacaaacttttcattcacttctgcttggacggaagccttttggaagtgacgttgcagttgcagccatggtagcatagctgtttacttttttccttgatctcttcagttaatgctaaataatgagactgctcttaattgttgtaaaacatgatttcttgactttaaggactgacattttgtacatttccgcacatgtacttgttatggtgctaaacgacttaacatatcaatatcttcttggtacgtccatctttagtcaggaaatcagcatgcgactttaaacttccggggaataaactactcagctgaaatgtatttaaatgggcacaaggaggtactaccaaaaggaatgttccgaaggcacaacattgatattactgatatcctccatcctgatggtaacaatctgcttgctgtccttgttcatcctcctgatcaccctggcaaaattcctcctcaggggggccagggtggtgatcatgaggttagtctcatat

SEQ ID NO: 188228 - DNA, 676 bp, Zea Mays
ttccattcctgtcgttgaaccatcatcttctacatccacatctgatgttctcattcccataacaccaccttccacctccacatcatcctctacttactcttccaagccacctatcatccaaacctacattcgtcgttcccggtctattcctgcggctggtcctgatactgatcctgtacctgattcttgtactaacaattttgagtctaacgatgttttttatcaaggatatcgtcgtcgtgatcgtggtaccattgaacctccagatcgctatggtttcccacgagctggtgtggcaattgttgaacccactacttatcaggaagcttctgggattcttgagtggcagctagctatgatcgatgaattggctgctcttgaacgcactggtacatgggatatcgttcctttaccctcgaatgttgttcctatcacatgcaaatgggtcttcaaaattaagacaaaatcaaatagctccattgagaggtataaagctcgtcttgtggctcgtggtttccaacagactcaaggacttgattatgatgagacttttgctcctgttgcacatatgactactgtgcgaaccttgattgcagttgcagcctcatcttcttggactatcttccagatggatgtcaagaatgcttttctcaatggtgatctaggtgaagtttat

SEQ ID NO: 188229 - DNA, 338 bp, Zea Mays
caagaatgggtacgtagtatgttcgaagatagcacattggctggaccaaatcccaactgaaatgcatggagacacatgcagagtgataggtacagacaggtcttaaacaatagaaagcagttggctcatccacatgctgccacaataaataaatcaagaaatgctaaacggctcaatacaggacacgtacaactaaacatattgactctgtatgtaaacaacagtacgtggcagttaaaaatggaaaacattgataaaacagaaaactgtttgcacagacaaaaggaggccccctcatgcagggattgtgcatcaggcaatttgaaagcaaccaccca

SEQ ID NO: 188230 - DNA, 566 bp, Zea Mays
ggaggcttcggttgagggtggaggtgaggaggctgaggcaggaggtgagcagggagagggtggaggtggagatgagactgaggctgaggcaggaggtgcggctgaggcaggaggtgcggctgagggtggagatgaggctgaggcagctccagcaaggcgtccacgtaagtttagaaggccccatgccgtacaacctccacctgttccgagctccgaggcggggaagacggtgatgtcccccatcggagataggtaagtgttgtatcttttgatttgaatcagctgtattcatcaaatgtaagcatgtttgatgcttgcccgtctttttgcagggagtggttggactactctttcaccggccagggtcgtcaaaagcaggtgaactctgtgttgagttcgctcctgaagtttcactaccctggtctggtgaagacgtccgacgatgcagacgccgcgccggtcctcgtctcatgttgggacgattacaagctgaaggtcgatgtcacttatggcgatgcccaggggcttgttcgcgctgacttctgggtacgtaatcttgtgtgtgt

SEQ ID NO: 188231 - DNA, 674 bp, Zea Mays
ctactgggcttgatagcaacagcacatttcagattgtcaagtacatcagacagacggttcatgtgatgaattatacagtgatgatttcccttctccagcctccacctgagacctataatttgtttgacgacatcattttactgtcagaaggttacatagtctaccatgggccacgggaagacatccttgaattctttgagagtgttggtttccggtgccctgaacggaaaggagtggcggatttccttcaagaggtgacttccaggaaagatcaacagcagtactggtgccacaaccacgaagattaccattatgtgtcagtcccagagttcgtgcaacatttcaagacattccatgttggccagaaactccagaaagagttacaagttccttatgacaaatctaaaacacatcctgctgctttgactacccagaagtatgggctgtctagctgggagtctctcaaggcagtcttgtctagagaatggttgctgatgaagcgcaactccttcctctatatattcaagttttttcaattgtttgtcctggcagtcctcaccatgacagtgtttttcagaacaaagatgcccagtgggaagttttctgataacggaaaatttatgggtgctttggctacttctttgatcacaattatgttcattggaattactgag

SEQ ID NO: 188232 - DNA, 496 bp, Zea Mays
ccggtgcctcctaccacaccaccccggacacaggtattctgtcttccacctctccccccacccctcccttctgtcctccatcgtggttggaaacggctctgcccttcccgtcacctcagccggtgacgcggtccttcccggtcctttccatttatccaacgttcttgttgctcgccacattattcaaaatcttctttccgtccgttagtttactactgacaactcttgttccatggagtttgacccgtttggtctttctgtgaaggatcttgccaccaggacccttctcgctcggtgtgacagccccgggccactctacacacttcgcatgcctgcttccactacaccgacctctgccccacgtgttcttgcagccgtcgcctcttctgtgacttggcatcgtcgtctcggtcaccccggtcgtgatgtgatgtccaagctctccagcagcacctccgtttccggttgtaggggatcttttgagcacctctgtcat

SEQ ID NO: 188233 - DNA, 799 bp, Zea Mays
cgctaatttggataatggaaccatcaaggaggatgaaaagtcagtattacttgaaggaggacagttgaaatcaccatctacaaagttcaggaacttgtctaccaaagcgaatttgttacggtaccgtttcaagaccaacacaagcatttgaatataggtcgtacacttgtgatatgtgaaatattgatatctctctggttgtgaactgtaggtttataactatggacgagtcttttctgcttgaaaaccgtgctgtactgagagccatgtaagattatttactaacaataatggcatgcactctcagccttctggctatgtgatcatctgctgatacttctctgccctctaaccatttttttcagggctgaatttggcgttgttctggtttacttctatatctgtgaccgcacagacatatttccagaaagcaagaaggtaataaggttactcctgctagttactcttgacactcagcaccgcagtaagccacacatgtaaactacagtgggtgttgcttatctaaattttgactgtataatgtttctgatcactgaagctgctatttttatttcttattttatgatctattatggcctgtttcttatatgttctttatgtcttttacttgcattgtaatcctttttttttctttgacagagctacaatcgtgatctgttcctgtttctatacattcttctcatcatagcatcaacacttacttcactaaagaagcatcatgaaaaatcagcattttcaggaaagtctatactctatcttaatcgccaccaaactgagg

SEQ ID NO: 188234 - DNA, 276 bp, Zea Mays
agctgccatcaatggagagctggagacgtcatgtgcagctcacatcaggaagggatgagcgccatgctgctagcaagggtataggggatggtggcgagcagaggggctaggagatgagagggcacggtggaggggatgggggataggcggccatgggagaagccagggaagacaacggcagctgctgctccacaactgcaatcagagaaggagacaccgtgtgggggaagcaagggaggacggcatggtggaggtagccagggcagagcgccgtga

SEQ ID NO: 188235 - DNA, 383 bp, Zea Mays
gactatctttggcattactgaaggtgttcacatcatcattcagcataaaggctgcactcggaaaccttaaaataagtgatgatagccttcttagcagccacccttacttttgggtttgtgatatgcgaaatcctggaggtcgttcatttgtggaggtattccatgctgtttgatttaacttgcttaatgtaggtcataacttattatgctttacattgttggttttagaaaagaaaccttttgtgaatcactgaagaataatcaatttcaaaaccattgtgcagatcgactttagttcatacaatgttggtgatgaagactattgtggttatgactatagccttgtagggcagctttcagaagttagaattgtttacctcaac

SEQ ID NO: 188236 - DNA, 391 bp, Zea Mays
tgttccaacatgtcttgtaaaacctccccgtaaacccatcaaccccaagagctttatcagaagggaggcctgcaacagtatctcttacctctttctccaggaaaggattatctagcgcactaagatccaccgcatccctatgacagcttgatagatcaatagtaacacgcctctgaaaatcagcgcccagaaggttggaaaagaaaccatccagaacttcttgtatgtcatcatgatttgtaatcacccttccatcatcctctagttttgaaataaacttccgcttcttacggtaacaagcatgtcggtggaagaattgagtattggcatcaccttcttttaaaaattgaatacgtgacctcagacgtgcaattgtcctttgcaaagaagc

SEQ ID NO: 188237 - DNA, 288 bp, Zea Mays
gttcaaaataccactgggaaactatctgcaaaatctgtggggaactctgtaagttgtaccattttgagatcatttactcctgaatcttgaatctggatcagttatacactcaatgtactgagctgttgcactatttagactgtacgtgctgctgttttagcaaatggaggtatcttagtctgtgaagcttttggaagagttgaagtggatatcccagtggctatgacattgaatactcaaagtgaacgtctttgtattggctgtagcatgccagtttatccatctctg

SEQ ID NO: 188238 - DNA, 388 bp, Zea Mays
aacaggatcagctaggatgatcaacaaaaatgctatgatgttttaggagcaaggacttagcgcaactagacaccaacaacaaatatatttttttgacacaagtgcacaaggagacttgggttggtctagcggtcaagctgtgggggtctataagctgtgcaggtgtaacttcaagggtaagacactaagggctagaaaataccaacacaagcaggatttttcttttaaagaggtttcacttgctaaactcaaggttgtttggacggggggtctttttatgaacagaacaagcaacaattttttttttcaaaaagggttgaacaatttcaatactacctagatggcaaggcaagagaaacacataacacaacctaacaagacataccca

SEQ ID NO: 188239 - DNA, 654 bp, Zea Mays
ctgctccctggtgaggctccgccccctcccccttccgcggtgagctccccctccccctcagctgatctgctctctgcctctttatccagttcagttgtttagttgttcccaattacctttgtaggtcagtgatggagagcacaggctctgctctcgcttctgtgcctgtggattcaaacactgaccctatggcagatccaaagcgcagagcgaagtctaatgatcctagatggaactatggatattggatagagattgggaatcgagataaggtcacatgcaacctttgcaagaccgtgacaatgggaggaatcaagaggttaaaagaacatcttgctggtggttatgcggacacattaatgtgttctaagactacaactgagattagaaaagaagtgaaggcatatttggacaagaacaagaggactaggcctactttccttgatgatgatgatcatgatggtcaggggcagcaaggcgaagaggattccaccacatctatgcaacaacctagctcggggacaactgccaaaaggaagagagctgcatttcagtttagaacaactgcacagccacagacatcaaacaaggaaaagaaaaagggaaaattgcaaccatgcttcgaagaactactgaacaagttgtggatgagag

SEQ ID NO: 188240 - DNA, 319 bp, Zea Mays
tcctacagatgaagccttgtgatcccgggaggcagagcactccttcagatggatcacaacttatgcactaagcaaatagaaattttacagcataacagtatacttacaacaaggacacgtatgattatgcaagggttcctatacttcaacactactttacttctaccttgcccttgaatgtgtgtggatgggagtgggatggtatgtcatggcaagaggggggcacatccttatataggcacctaggagctatggatgagtgacacctcaccatgcatatgtcatctaccactttaatggggggacacttcaccatgca

SEQ ID NO: 188241 - DNA, 472 bp, Zea Mays
cggcgatcgacggccttgaaacctagatccgagcaccttctgcaaagcaaggcgcagaaacttttctcaccccacctcgtagcgtctgcccgcaccaaatgcctcgcagtcgctattataccccgcgtcgcggagcgagggggtggaaaaaggagaatcgatgtgcggctggatccccgtggcgaagaatacccagcaccgatggcttgaactgggaggaggaaaaggaataatgacaccaccaaaaacaattacttgaacaccacgaacaccgccgcagcggatggggtggtgggtgaggcgacgaagaagggaaaggataggggtgtggcggagattggcgaagccgcaagccaggaacagcagcaacgggcgtgtggcgactgctcgaactgggattattacccacgcgctgcggagatggggattgggttcggatcgctgctgccattgtgtgcagccaataaaaacc

SEQ ID NO: 188242 - DNA, 321 bp, Zea Mays
aagttcccaagcatgaattgggatgccacttagctcgaattccacagggataggcaaacttgcacctgaggatccaaaaaacctggaccatcttttacagtgcagagagaaagcgcctgcacgaatagtgttccatctcgatgtcagctggtcaacagagtggagggtggggagcatgagcagaaaatgtccatgagccaattgcctcaggattagcgaatcagaattgacttcaagcttttgagcaactgcatctgcgatatcggcgaccggcacaagcacatcactgaccacaaagatagacactgcgttcttcaaatc

SEQ ID NO: 188243 - DNA, 714 bp, Zea Mays
gggataccaatggagtacaccttttagtatcaatgctaatggagttatgtgtgtgctcatgaacagcacaacaggaaatgatcaggcttttgtcagggtaaatgtgagaagtggaacaaaaagttcacggcatgaagttgtatttcagcttgattgctggtccagcccatacaggtactgctcggttgttcttgtctatacagtctacttaaaaactgaacatttaattcagtaaaatcaaaactattctcagggtggagaatcgctccatgttcttgcctatacggtttcggcagtttggtggtgatgatcattcatggcgtaatctgcttccgaattcatcagcttccttctttttggaggacctgagcagaaggcatctattggaagttttggttgatggaactgaccctatgaactccatgacatatgacatcaatgtcgtaatggatcatcagccccttactaattcagatgcccttaagaaggccttacgtgtcactgtcttgaaggaggggaaattgaatgttattcaaattattgattggctgccagataatagaaatcgaggacagataactgaaaggatgttatcaccaatctttcagccatcagaggtcgactatgggcagtcatctcctgatctggatagtgaatttcatgttactttggaactaacggagcttggcatttctgtaattgaccatatgcctg

SEQ ID NO: 188244 - DNA, 410 bp, Zea Mays
gtggattcaaagcaatagtgctaaacaagttagcagactgctgatcccagctgtcgggccatggactccaacttggcagagtggatgcctatggtggaaatgctggagcctgcaggggttcagagccaaggatgtcgagcggcccaaacagtccaaatgtcgaatcatggcatggagcgcctgacattgttgttgttgctgctagctgccaagagccaagcctggtcacatggtgatgctgcatgtccacaggttatagaaggttgaccataccttgactgtgccctttcttcttgctagatcctaaggtgggagtgggatactaggcttccttccggtcccgaaggaacatactagagtagaggaaggagttggggcagtcagcgtgcgggcaaccagtggaggagtgg

SEQ ID NO: 188245 - DNA, 302 bp, Zea Mays
gaatcgtttgcggaggtggagaagcgaagcatcatggatggtgccctcctccaccccttcccccacaatggcgccagcagcaaccatcagcgcaacgggctcaaggaaggcagcctccacatctgctacaaacaaggcaggccccgtaccaatcccatcagaccagatttgagcagagaaggtcatatccaaggcaacagatggaatcgggatcaaggaaattacctgctggcgtagagagagccattcctctgtcctctggtgaccgtgttcatctgcaacagcaacaacaggttcagtcg

SEQ ID NO: 188246 - DNA, 310 bp, Zea Mays
ttgtactgtttattgtgccttggctcgatgccaaacgacacacggagctatatcattgttgtttcagaaaaatggcatgatgatatatcaatcttttccatggttgattggttcagaaagcagcaccccagttcacattttgttctgtgtgtccacccaactacttcagcagttcagccagccatccaatagaccaataccatcacactgaatgcctcatatatttgccaccaaattatagcctaatattacccaaaaaaacgaaagttgactccctttaaatgcaaaagacataaaatgaactacctga

SEQ ID NO: 188247 - DNA, 306 bp, Zea Mays
cacccctacaccgcagcttctgttgccaggatcttctttgcggaaattgttcgtcttcaaggaatcccctcatccattgtgagtgatcgggacccggtcttcactagccatctatggaaggacttattcaagctgactggcagcaaactccggttaagcactgtgttccacccccaaacagatggtcaatctgaagtcgtcaatcgcacaattgctatgtacttgcgatgcatcacaggagatcgacctcgttcctggctggactggcttccatgggcggaatattgctataatacatccttccac

SEQ ID NO: 188248 - DNA, 383 bp, Zea Mays
gtggacaccagacggaggagcactgtggcttcgctcacgttgatgcagccaaacagaggggcgcacaatcggatggagaagcaccgcgtatgtcacctcatgcagcgtcgcttacgcgcggacgtacgaagaagtcccgcatacaggcgcacgactggacggaggagtgcatcatctccgcgaaggagcattgcacctacccgtgtgtagatcaagaccagacggtggagcagtgcgtgtatacgccacacagaggggtggacgaccgtttggcgatgaagaccggacgaaggagcccacgcgcgtggtcggacgtagaggaggcgacgtcgatgcacatgaacagaccggagcagaggaggcacggagcggacgactccgac

SEQ ID NO: 188249 - DNA, 300 bp, Zea Mays
gaaaggtctcggttagctgcggcatgcgggtggagttggggattaagttgtccgtgtctacggcagcggcggcggcggccatgaggatgtacgccatgtcttcgtagaattgcgatagccttcgctgaaatcggaggtctacttttgcggccgtgcatgatctggaagcgggttctcgaagcgaggaagcatggacgtggtgcaggtcctcgcgtcggcgacccagctggtctccgcgatggtgtccgcggtcggggcactggagcaggcggcatccgacttggcggaggccccgaggag

SEQ ID NO: 188250 - DNA, 636 bp, Zea Mays
cttgtcgtgatgagctggtccgtgcacctcccttcccttgtgcatgcgttgtcccaatggcttgtcagcgagcctatccacctaaatttcgcgtgttgttttgaggagaaaaactttgctggagttggccgaccatcgtatggtggtgcgtactatatctttactatgtctatctccaacacactgtttatacgtctaatttcttattttaaactctaatctgtaaacagtgtaatctctgtacggtcatttattcagggtgctggaggtggcctaagcacacacacagatagaatccgtgcacggcagcggtacaaaatatacgtgcagaatccgtgaatccgaaggcagcatgcacgcatatgtgtgtggctaggtgaaactcagcagtcactttagcaggcactgcgctgggctgcgctagtggtgggcatatccccctttcgtgcgtgagcattggacgggggacactgggcgacgtgatgcctttttgcgcgaccccccggtcaagtacgagtcgtgtgtgtccagcaaaaacacgcggtgccgtggacgtggtcacttgggtggatcgggtcggcgacttgcacacacaccagctactaaagccaaggccacactgacctgtgttttttg

SEQ ID NO: 188251 - DNA, 1157 bp, Zea Mays
ctttaattactagtagtgattggaacagtgtagagcgtttatcaactgaaccattctgttgtaatgtccaggtaactgctgttggagtcaacactgaatgggggttgctaatggcaagcatatctgaagattcgggtgaagagacaccactccaggtttgattttgttgttgttgccagcctttgcgcgagtttatttcctttacatgcctttgttgttccggtgcaggttcgtttgaatggtgtcgctactttcattggaatggttggactttctgttgcccttgcagttctggttgtacttttggccaggtaaaattggcatattttagtgtgctaaccgtctactttgtttatctacatcaatctgtatcaccttgttttctcgtaggtacttcactgggcatacttataatcctgacggatctgtgcaatatgtgaaagggaagatgggtgtaggccagacgatacgtggagtagttagaatattcacagtggctgtaggtattctgttctctgtttatgcatactgctttagtgcttacagtttttggctcaccatcttgaggtgtaaataggtcactattgtggtcgtggctgttccagaaggactaccattagctgtcacactgacgtaagcatggtttgtgtgttattttctgccagccctttcgtcccttgccactcaacatactttatttttgtcaggcttgctttctcaatgcgcaaaatgatgaaggacaaggctctggtatgttcccaactttctataccttggttttgtcatactacttgatccgacattgaatgctttgcacgctcacttcctatggaatgtaggtcaggaggctttctgcatgtgaaacgatgggttctgccacaacaatctgcagtgacaagactggcaccttaactttaaatcaggtgcaatggtgtttattcactttatacatactgacatacatgtttcagataattctgtttgttgaatctgattggccctgatttttaaattctcttcttcctggttgattttaagatgactgttgttgaggcatattttggtggaaagaagatggactcaccagataatgcacaaatgttatctgctgatgtcacatcactgattgttgaaggaattgcacagaacacttctgg

SEQ ID NO: 188252 - DNA, 959 bp, Zea Mays
catggagcctggttatcctgcaaatgacatggataggcctgttcctgttgcgatatttattgttaattttgataaggtgaaaccctgtaccattcgtccattcctcttgattgtattgtccgtttcctgtttgtactttgtagtctgatgcatgcatgtaaattttagattatagagagtgcagtccttcatggctatataggagtcaagatgcaatatcttgttccatcgtactgtacttttataggaaacagtacttgagaagttgagaaaattattgaaatatgcataataacaactgtttttagatatttgtaataaaaaatccaccagaggggaaatgtatccttaataagaggtgaagctctcaccttttacagattaaagtctatagtaatttcctctattgaaactaatttgttctcaaaggacatttagatagtcctttcagctgccttactttttctaacatctgggaaatatctagagctgaatcttaaaagattttgattcgagctccacaatcctgactttactaaggacaaaactagtgctcttcatcttcgtcttcctttcttgttcttttgagatttgtaactaacatggtacatattttccttggcaggttagaatggatcctcgaaacaaagaagttaatctcgatagtttaatgtatggtacaattggtggactaacagaacaagaactaaaaaaacaagaagcagaatacatttaccgttaccgttacaatggtggtggggcaactcaagtttggctaagttctggaaggtgatacttgttctactctgctactgttttgttacaagttagtgaagctcatgtgcttctaagccacattttacttcttcaccactagaagtaaattaactctgttgtggctgcatggtcattacaggagtgattcaaagagtaatctcgggaaaacaaacaagcattgc

SEQ ID NO: 188253 - DNA, 502 bp, Zea Mays
ataggggaggaaacaaggatagaaagtattgattcgagtaaagttcatacatggttctccctaccccaagccaatagcatatatgcggctacgacttaggaacgtggcccaccaactggtggccgaaggacacaacccaacacgccagagacttacacccagacatgacaacaacaacacgactgcacttagttacacccgctcaggacccacgactcgatcattagtgtgacgcacgcttcttccacgctcaccgggatggagttcctcatatgtggagtatctgacaatggcgatgtaacattccctcctccttaaaactcgacttgccctcaagtcgatgcagaatcttagcacatccagaatcctgatgccctgagtgaagcagcatgtgttccaaggtcttgaactgtaccatcgacactcttttttctgaaactagaattcttgcttctgaattgtcctttgacagcgtgccgtggtcgaacacttgaagcttcag

SEQ ID NO: 188254 - DNA, 416 bp, Zea Mays
cacacgccgaggttgctgacgaggccccgcgctgcaccgagaggcgctgccacacagacccccttgcttgttgtttttccaatctctgccacactgtcttcttgctctgcacttctcgacggcctggacacctgacagcctgatgtccagtcttgaaacacttgaaacagcgcgtgggtcgacggcagacagcagcaaagtggtcggaggagaagcagttgaaacaccgaccccgaagatccacaggggactctcgacgaggccgatgatcacctcgacacctcctcttactctggaccacttgccaaccgtcgtcgtcacaccgaggggcagcccgccgactttgcacctccggttggatatcagtcaccaccttcacgcttggcgccaggggaggagccgcaggacgcgagggg

SEQ ID NO: 188255 - DNA, 502 bp, Zea Mays
cacggacacggaccaaccgtcgtcgtcaaagcctcgttgcttgtcacacactggctcgttttcttgtgcctgaaatggtgctatcgccgtgctctaacatgcactttggtcaccaccggtgccactgcccctgagcaagtacgtgaccaaaatcctctgtccttttcttttttacaacaaaaagctctctgatgcggagatcgctagattacgtccaccgaaacaaagggacatgatgccagatagtatagcatcccgtccaccgaaaatccgagagagtagagtgtagaggccatttgtatgacacggcaccgcactagcagcagaggcgtccaaacgcagtagcaccgcagcaccattgtccatcgcactgactttgtgcctgctgggccagatctccaaatacagagacatgtagaacacagtacacaccacagtggcttcccctgcgagcccagcacgactgcaccacgagccatgggcgcttgcttttgaccgggag

SEQ ID NO: 188256 - DNA, 580 bp, Zea Mays
cttgaaggagctccttggcatccaccgcgtcatcgagtccatcaagcacatgctagccatccggatggacctcggcgaccccgacttcgtggacgtgaccagcgacgtcgccgagatgctgtccacgacattcgccgacaaagtccggcagaggatcgtggacaacacgacgttccctcccggctactacttccccaagtacgtatgcctaatttggcgttgcggattctatcggtcgcagccttgcagccagcgggcatcactcattcctgttctggttattggcggcaatggcatcaggtggagccagctggacgaccacggcaccagccacctgtgcgtggtggacggcgaccggaacgcggtggcgatgacgacgaccgtcaacgcatacttcggcgccaaggtgctgtctccgtcgacgggcatcgtgctgaacgacgagatggacgacttctccgtccccgcgaagcgcacgccggaccgcctcccgcccgcgccggccaacttcatagcgcccgggaagcggcccctgtcctccatgacgccgctgatcatactcaaggtatctctattctat

SEQ ID NO: 188257 - DNA, 811 bp, Zea Mays
ttcaatgatatcagtgaagacgaagatggaggtatatagcaattgttttatactatattctactacagtgatgcaatataattaattatgtctagccttttaatttagttacttctcccttctgaaatctagctaaatgcagacacaagtattctggagtatccatccttgcaagatctctttttacaccacctagtgcaaagtcaaaggctattgttttctctcatgatttcaaagacagaagaaatacaacagggaataagcaagctacaatggatgctctacataagacattcatgactcgcaaaaagcgccacattaacataggtacgctacatagttaaactgtggcgttcttcactttgtccaattttttcgtagaatgacataatccaaactcttattgctctaagtatacaatcctattttagttattaacattaataatatatttgtttaactattatcttttcagagtcactgtatgcactagcactagcagactttattgagtaaagccaatatggtagtaactatatatcaatcaacttgcagatttatgttccattgtaattgggatatttcttttttgggggtgggtgagatggggtgtgtggatatattgtaattttgtaggatatggtctggcaatcctctcctcttacctttccttgctgcacacttgatattttgtttcattttcttatttattttcacagtaaaattaactggaacataactgcattatgttgatattgacagtgcctttcaagtttgatacaccatctcctgatgacatggtcactacagg

SEQ ID NO: 188258 - DNA, 578 bp, Zea Mays
ccgtggatggggagcacgctcgtgtggcaggcgagtgatcgaaccatgggcacgtaacaaaagcaaggaagccagcgagtgaagaaggacggaagatgtcaaacccgccgccaaagaaggcgatccggaatcccggcggcggcgctggggggccggcgggcggcccgcgggggccggcggggaacacggtgaagttcgcgcggcggacatcgagcgggcggtacgtgagtctgtcccgggaggacatcgacatggagggcgagctggcggcggattacaccaactacacggtgcagatcccgcccacgcccgacaaccaaccgatgatggacccggcgtccgtggccatgaaggccgaggagcagtacgtctccaactcgctcttcaccggcgggttcaacagcgtcacgcgcgcccacctcatggacaaggtcatcgagtccgaggtgacgcacccgcagatggccggctccaagggctcccgctgcgccatgcccgcctgcgacggcaaggtcatgcgcaatgagcgcggcgaggacatcgacccctgcgagtgcagattcaagatctgccgcgac

SEQ ID NO: 188259 - DNA, 341 bp, Zea Mays
cttgactgccaagagggtgaatttgcaaagaggctagtttgggagttgcctgattcttctcttgatagacaactagcacctggccaatctgccaggaggaaattagcactgggagagagtgcaagtaggcgtgtaagggataatcaactgcctgaacccactgggcagttctcacgaggtttaaatacatccaatgcttcttcgggacatacacgcagagacactttccgtcagcggaaacctaacacaagtagaccaccttcaatgcatgtagatgactatgttgcaagagagagaaacatagatggtgcaagtagtgcgtcaaatattgtgaactctac

SEQ ID NO: 188260 - DNA, 365 bp, Zea Mays
caacctgaaccacaagggacaagtcaaccttgtgttcgcaatctcccccttgatgagtgcattgtcaacaccaccatttgagcatatgtaaacaaaaataggtagaagaagagaaacacactcaaatgaccataagccagataaaagccagacaagtcatttagagtaagcaaaacttggtccccaaagaaatgggcagcgactcaacacgaccaagcaagaaaaggctagccctcaactagaggcaaaagcagggttcaacaccactagccagaagccaaaatctcatcagagcacaaaaggctttatcagagcataaaaaaccaattcagagcataagatcagcacaaaagctaaaatcaaag

SEQ ID NO: 188261 - DNA, 332 bp, Zea Mays
actcatacataatcaatctattaatttccatacaatacttgcttgaacttaaacttgaccggccatgttatcctagctttatcatcctggtatctgaactcccaaatgcagttttgatatataggtttcattgttggtccaattggcacatgacgtgctgacatggtttgccatgatggatccatcatggagcaccttctcgtcccatgtgttcttcccctttcctctgtcccaattgcagctgctacctctgttcagatggccactagcaacagcccatcccctccatgtacttcgtctccatggcagcagcgacactctgacccccttcc

SEQ ID NO: 188262 - DNA, 359 bp, Zea Mays
tagcctgcatgggcattgcggctgcgtttgatgggtgaggcgagagagggaaggtgcttcgagcggtggtttgtgtacgtacatgacatcgtttgggaggtgtttgaggctcctggagtcgatccgtgcgggcaccacagcggcgtttgaggggagaggggaaagggctaccggccatgtgaggccgatatctaaccgtctcaatgttcagttaactatctaggcatctcgtaaacagtgtaattttctgtgctcagtgaactctatgtttattgacctcagtacctcaatgttcagtttatctatttttttaaccgaaggcttaaggatggcctaattgctttcatatttgatttcag

SEQ ID NO: 188263 - DNA, 1474 bp, Zea Mays
ctttgttgttgaattctttggggaggtatgccttagtttttaatattcatccattctactcctagatcgagtggcagtagtatagccatgaatatgttgatttataaactttgcaggtctacccttcttggagatggtatgaaaagcaagatggtattaaacatatacaaaataacagtgaagatcaagctcctgagttttacaacattatgttagaaaggccaaaggttgtgttcagtctctgattttaatgagatgtaacttgtaactggtcatttcaattcatggtctttttatcctattaacattttagttctgtcatgatggaagggagaccgacatggatatgacttggtttttgttgatgcgatgcacaaggccaactacgcgagtagaatctgccactcctgcaaccctaactgcgaagcaaagtaagctccttttaaggttcaggttccaaccttgtgaatgttaactgtttcattgcttctgtggttatataatatcattctttgattattggtcagaatttatgtgtatgatgtgcatgaggtatttttttggagggagtaaccctcctctgtgtactacgtaataactatgtattaatgaaatgacacacaactcttctgtgttgttcaagaaaaaaaagaatttatacgtatgattatgcaaaagctgacatgagagctatgtaagcttgtctgttaacaattgtcgatagatgtaacattcagctttacttacaaaatttgctctgctctgttgttcctctaataaatccttttttgtggaattttgctgttggttgttagattattatgtactctttcaagatacttggcattccttaataatatttactatatttcgtcgatctggaaatcagtatgtctgagcattgagcaatataatgtagctagtctattttgcccccctttttttcttcttaatataatgaatgcgcagttctcaagaaaaaaataatgtagctgttctcacatatccagcttcatttaatggagtgcggtggtattcaacttgggatttacttatcaagttgctttgacaaacttcagtacacgtttgcttggttatggttatgcatttctatgctaattaaattgatactcaaccattgataatttgaatatatgtatgtgctaccatgtttgcatgtctcaaaatgcttggacttttttttctcttcctaaggctaatgtcgagtaatttatgctcctttattaaaaaaacagagtgacagcagtggatggtaaataccagattggagtttacacacttcgaccaattgcagaaggcgaggaaatcacttttgattacaattctgtaactgaggtgagcacatttcttgttcctttatgaaattatgtattacattgcaacgtttgatgtctgcatacttattttgctagagcaaagaagaacatgaagcatcagtctgcctctgtggaag

SEQ ID NO: 188264 - DNA, 333 bp, Zea Mays
tcagaggaggtcacggcgacacggtaaaagagttgagccacgcggcgcacggccgggaggcggcggtcgacggtgaacatatccacatccgccgcggtaacgatggtacggtggccggagttgtttaatggctgaagtttatccccggcggtgacctccaagcgttatccacacggtccgcacgaatcacagcaacggatcgaccatcggcgacgacttaccagcgacgagcccgccgcgctggcaacctgatccactcgggtctactgtaccatggcaagcgcttcatcagagcagctgacagagcaacttcagagctccttttctcccaat

SEQ ID NO: 188265 - DNA, 284 bp, Zea Mays
ggtaaagaactagctatgactcaattatatggtgactggagggagagttttgacaacctatataggttcaagaagcaaatagaagaatcttgccctggtagtttagttgttattgatcatcacaccatcaataagaagattaagttcaacaggctattttttgccatgaaaccttgcattgatggtttccttcaaggatgtagaccctatttagctattgatagtacatttctaactggaaagtttaggggtcagctatgtgtggcttgtgcagtagatggaca

SEQ ID NO: 188266 - DNA, 633 bp, Zea Mays
cgtgatagatctgttatagatttactcctacaagccgccagatttgactttgaatatcatggaaagatacctgaaggggaactatatccaaatattgctgaagatggcaagcgatctgtagaaatctcacctgaagctcttcagtttgctgatgctgtaactttggtccgaaagaaccaggctatgctgtgccactttattatgaagcaattccaaaggaaaggacacttgggtagtgaaattcttctccagagcttgttgttcctgttgcactcagcaactgatctattttgtccaccagagaatgtagttgatataattttgaagtctgctgaaagcctcaatgatcagcttacatgtctttacagtttttttagtgcagggaataagaaattggataggataaaaatacatggtctaagaagacgttggatgcttctccagaaactggttctggcttcatcaggcagtgatagtactagagaacttgccagaaataaaagagatggtttccattttagaagtttagtccctccatcaacatggatacaaaagatatctgatttctccatgttttctagcccactccctcgatttttcggatggatggcagtgtcttgctatgccaaggaa

SEQ ID NO: 188267 - DNA, 435 bp, Zea Mays
catatttacccatataaacctattcatgaagtatcggctcaattccacgtaatttcatgcctcaattcgaattccaaacctcctatggcactatttctcgttcaaacgtcgttttcgcgtcgtttgacctctcgattgccatatctctcgttttctgtgccataattctctgtgtatgtatttattcacatttcatatacttatgactatgtgactaatatgtgttcacctcttctatcatttcagtgaccttgcctgcccgtgagccgtctcctgtcctacctggattttcacctctcgtgtgagctttccaggtagacatccactcttctgatattctatcggcagttatcgacttgtgcttagcttctctctctcatttgcagtcatcaggtcaggatgccgcgcacgaagaatgtgtcggcgccaggggga

SEQ ID NO: 188268 - DNA, 283 bp, Zea Mays
ttagaagtgagtaacatagataaatttgtttctatgcaaatccgagaactttatagtgaggaaatgtatttacgcacttcaagttttgttttcttctaagttgtagatgccccaggttaataagtttaagttgtggtaaggttaaggagatttagtgcttaagcatggtttacgagtgcttaatgtttgaattagatccgattaaataagaagcgtaattattatagttagtcttatgacgaaagctagcgtttacttgtgattggttctaatgtcttgctag

SEQ ID NO: 188269 - DNA, 346 bp, Zea Mays
ggaccgccagttgtggcggagctgagggagcgcacagccatgggacggttgtacgcttcttgcgcgacggtttgcctctttgaccgctggatacggcgaagatgaaaggacgcttaatcgtggggcggttgcatgccccttgcacggcggtccgccttcctaactgctagttgccccgaaaatgaaggggcgcgtaaccgcagggcagtcgcacgctccctcttagggtcagtttgcatgacatgtggggcctggcccccatgtcataaggtgggatccttggtgcacactgggggagacttcactcgtgacgcttcaggggcgcgagcgggaagatctgccttta

SEQ ID NO: 188270 - DNA, 714 bp, Zea Mays
ggactgacaatataacttcagttgaagagaacacaccattgcatagtgataacacaataggtaaagcagaacaatcaaacaaaccatcaccaactggatcccaaaccacagctgcgacgtatgaagtaaaggagtccttcagtcaattccatgcatcatctaaagacgtgacaggtttgtttctctatagaacatgccatcatgtgcacccagctatgggataatgatattttttggttcacaaaacacaattttattggtatgtcagataatctatagctgcctagaggctgtgccagtaaagctaccatgttgttttgtcgtttgaaatttctacttgcaaaatgtggagtaattctaaatgtttttcgttaataacaaaaccaataatgctgtaatgctgccgaaatgctaagatattaccatgttacacggagaaaggagcttaatacttgtgcagtaacactcttttcgttttccattaggaaataaccagagattgagttaggaaatttaacctcactaactacccatgttggttacagtttgttcagaactagtttaatatatgctagtgtgtcaatgtgatgaaaaggagtaacgaaaagtataaatataaacctcttatgcaggatccacgcaaaaagaggcaggacatgtggtaactgtgcagcgaaacggagcacgccaagagcaaattcctctctcacggcc

SEQ ID NO: 188271 - DNA, 377 bp, Zea Mays
ctcacttcctcgaatcattctaagaagaaactcaagccgctaccattaggggcagattaattgctgcactttcagataatctaccatggccactgtgaacaactggctcgctttctccctctccccgcaggagctgccgccctcccagacgacggactccacgctcatctcggccgccaccgccgaccatgtctccggcgatgtctgcttcaacatcccccaaggtagcatctatctatctggcgacatacgtgcataaataagtgctcatatatatcttctgcagtttgtggtacgaatacttattgaggctagcatgaaatgtcgtttgttctttcagattggagcatgaggggatcagagctttcggcgctcgt

SEQ ID NO: 188272 - DNA, 281 bp, Zea Mays
acgtggtttctgacttctgttgtgatcatgtaactagcttgtcgcttagtttgggccccctttggtgctgaacgaggattgaactgctagggacctccagccaagggaaaggaccacgttctcgggggtggtccggagctaggtagccgcttagcctagttctgtaccgtaaggctacaccctccaccaccctaggacagctgtcctagtacctcggactgggtccctaaaggtccggacctcaaccaaacttaagggttggttcctaaaactctgcttgg

SEQ ID NO: 188273 - DNA, 553 bp, Zea Mays
aaaccagttatgcctagtaggaaagcagataaagctgtggacatggtccccacacttccttttgaagcacttacagcaagtgattatattaagttaccactggaacagatgaatgcattcaacagtcagatacttcagagtttaagtggaacctatcaggtttcagaaaaacaaaatactatcagatacctggagatgttaagcatgaattcagatgctgcgaacaaaataactaatggaccaattatgctgctactaataaaaatgcttcgactgtcaaaaacttcagtcttgcgtgtccaaattgcctcacttatggggttgctgatacgatattccactgctcttgatgtggagctggcaagttcaggaatttttaatgcactatcagatgggttaagggataaacatgataaactcaggcgattctgtatggcaacactaggagagttattattctatatttctacccagtctgatcaagataccaaggaaataaatacccaagaataccctttgaaggataacaggtctgcaacatcttggcaggtca

SEQ ID NO: 188274 - DNA, 485 bp, Zea Mays
tgaattgacatatctctcacattgacttcaaaactgcgagccacctcttccagaacatccgatccatgaacctcaggcctcgtccccgcaatggtaacgaacaaggctcgacataacttgatttcttcccgcgccagctcatcagagaaaactagtacccgagactcaatcaagggtggacgactataaccaagctcgaccagccgaggcacatgaagaatagcttcggcaccatcagctgagccaggggaagcaatccgagacgcgccaactcctatcttgcctccttttgatcttcttcgcttcttaagccggagaaatctctatgaatccaccaagccaatggagtccatcttggagtctggtaagggaggagaaatcctcacccaaaccgacttcttgcacagactgctgccttgacaaacactgcagcaccggttggcgagcatcgccagccgtcggcgccagatcctactgcccagaca

SEQ ID NO: 188275 - DNA, 273 bp, Zea Mays
cattcagttcagtatccagcagctctgcaaatgaccttgaacaaggtacaagtatcaggcccaataatgctgagaggttaacatcactagtccaagggccactaagaaaactgttcactgacatgttacgtcaccagaatatttacttacctgttacatcattgcaagaggcaaatgatattagtaaggaagtcagggctgaatcaagtcaagaaactgttattaatggtttccataggccagagatagaagagtctgtggtttcaattgaaa

SEQ ID NO: 188276 - DNA, 368 bp, Zea Mays
cagtgttgtgcctgtcccagctgctgaggaagaggaggtgaaccttgatcagcgtgtggggagtatactggaggagctcgagatggtctccattgaggaagctgagaagtatatgggcatatgcttcatgtttttccttgaacaaaggctttgtttcaggtgtctgagaaaaccagttgtaaccgctgccatgttgcaggtcgttcgagggtgcatgcgcacgactgcatacctgcttcgagaacctgaagcctctgttccaggaactggagaacgggagcccgatggctatccttgaacccctcatgcagcaggcgtttattggaattgacacactcaccactgtaaggcctacatcaaatgtttgt

SEQ ID NO: 188277 - DNA, 343 bp, Zea Mays
atcatgtcgatgtgcctgatagtttcagtgtatgctctatcagatttgcttcccgctcttcccagtcgcattaactttggcagcagcttcgacaaccttgactgctctgtctcattttgaccaccaacactcacatcgtgccggtcccacggaaccacagatcttgcattacgtgtatatcacttcagaatgtacttttcaggtatgttttggacttggaggtgggtgaatgcctttattatgtgcatgcagaacagacctgcatttttttgttgcaatttggatgtaaatatgcaggaacatcaatgtttaattttgttaatgtaacgaggttgcaattcat

SEQ ID NO: 188278 - DNA, 502 bp, Zea Mays
tgatacaggacatgcttcgtgttttcattgttcgtgttgccttagaaaagattgagtgtgcagttgttcttctacgccctatatttatgtggttagatgataaagttgacaaaacttccctgtcagagagagacacctttaaggtatgagaatttgcagtgattatgctagcataatatatgttctatcactttaattcagttgaatgaggcactttttttgttcgtcaaattcagttgtcagcatttatttggtaaaaactcagcattggcaagctaaagttctttatgcattttccaggtccatcagttgcttcagtttactgtaaaattgtctgagcatcctactggcaaggtgagaggttttttgctatctacgattcttggaagctgtttttcttgtggtcccttctcatttctcttaattcaggcattgctttggaggatggggttcacaaggattcttagcaagttactacagaattgtagccgagcatctttcc

SEQ ID NO: 188279 - DNA, 273 bp, Zea Mays
gtgcgctgaccgcaccgtaccgaccaggcgcgcacgcttttttggctgactgtaccacctagttacgtcaattataactacgcgttatgctaaatcttgttacgttttacgcacttttggtgtgcgcatgtttcgcggcatccgggcccacgaaaagatcgtgtccccgcaatctgggcaacttacgtctatcgggcccacgaatcaaggaaccgagcactcattttttcagctcatctctcccgtaactctcgcggcggccgaaccctagcg

SEQ ID NO: 188280 - DNA, 647 bp, Zea Mays
gtcaaaaggcctttatcgtacaaactagtgtggcaatctggttctccaagaacaaacatttttcatcagaaggacttggaggataagatctctaatattgaccagctctgctctgtttggttacctgtggcacctgcgggttatgttgcaatgggttgtgttgcttcatctggaactgctgaaccacctttgtcttcagctttctgtttaactgcttctttggtttcatcatgtaatctaagggattgcattgcactgaggtcaaatatatattacctgaacctgtttctgtatttgatgtatggctatagatatttgatatttcacactcatgcattatgtcctttaactgaatttttcagggataacactaacatgatattctggcgagttgataatgcttttggttcctttttacctggagatcctgcaagcatgagtgtggatgggaatgcttatgatcttcgacatatgctgttcgacagtgcagactcatcttccaagactgtctctagaaggcaagatagtagaaatgatttctctcaactagagagatcagaattgacctcaggtcggctatttgatgctgtggcaagctttaaactaatttggtcaaatagtgggacctcttcaccaaaaaagctctc

SEQ ID NO: 188281 - DNA, 428 bp, Zea Mays
ccgtgggtgaccaagaaccaatggtggtcatcgtctgaggcggattctatcacattgatggctcgacgctattgggttgggttagcctggcatgcatggcaggatctagcgtctgcaaccaaggaaggagagcaacgggaaactgtgacccgatcttgcaagcactggatacatctggccgccgtgatgacctcggcctttcctccatcggcgtggaagcagcaccggagcagggaaaccaggtcgggacaacatcgccggacggcgaccctgctcacaggatgaagaggaccttagtaagctgctcgccaacaaagcaaagctgaggaggaacaccggaccggcggaccccgacgaggaggagaaccggcggcggtgcgaggtggacagacagatccggggcggcggagaacggatcgcgaccgggg

SEQ ID NO: 188282 - DNA, 500 bp, Zea Mays
ggaatcgttcctccaggcattcttcccaaacatcctcaagaagacaaacaacgcgcagcaggacacgtactgcatctttaaaaaccaggtgctcaccttgttcgtttcctcgttatatctcgcagccatcctctccaatctggtatccggccactcgacgaggacgatgggccggaggaactccatgatgataggcggcatgtttttcttggccggcgccatcctcaacacctccgccgtccacatcagcatgctcatcatcggccgcatcctgcttggcttcgccgtcggcttcaccagcctggtgatcactgctcagccaacgcgctcggcatgctgatgtaagaaggcgcattgtgtgacacagtggcgcgttggttgcagtctgcacccgtgtacctggcggagatcgcaccggcacggtggcgaggcgcgttcacgacctgctaccacttcttcttcaacctgggcatgttcatggcggacatggtgaactacgg

SEQ ID NO: 188283 - DNA, 366 bp, Zea Mays
gcaccggccagtcatggatggcctggaccttggtcgcatccatagccacaccgtctgccgaaattgtgtgtccaaggtaggcgaccgaaggctccccgaacgcacacttggagcgcttgacgaagaggacatggcggcgtagctcactgaggaccgcgcggaggtgtcggaggtggtccgcccatgacttgctgtagatcaatatatcgtcaaagaaaacgagtacaaagcgacgaaggcaagggcgtagtacatcgttcattagggcctggaatgttgccgaggcattgcacaggccgaatggcatcactaagaactcgtagaggccatcgtgagtgcggaaggccgtcttgtggatgtcctcgg

SEQ ID NO: 188284 - DNA, 489 bp, Zea Mays
gaaaaagaccatctcatctggggagattgataacaagtcagatgttggaaatgatggtggtgtcaatatctctgccatgtttgatgagaaatcagatgttttgccattagcatctgcatccctgcctgctccagaacccattttaataaatgaacaatgggtgtgctgcgacaagtgtgagaattggcgccttttaccctatgggatgaatccagatatacttcccaaaaaatggcggtgtagcatgcagagttggctgtaagttcatccacctcgttcaattacttgtaagtgttgttaaatgctttatttggtttttaagtgtgattattttggtatttgcaattcattataggcctggaatgaatagctgcaaaataactgaagacgagaccacaaaagcccttcgggcactttatatggttcctgcacctgaaaataacattaaggatggtggtcatgataatgctatgtcaggcaaaggtacag

SEQ ID NO: 188285 - DNA, 1059 bp, Zea Mays
gttggcgcaggtgtttccatgtgggcaagattggagtcctcctggcagctcgcttggaggtctacaccgcaggtgccgcaagcccttgtctccactacctgttccatgcaaggtcctgtcgcgacagtggcagctcttgctccagccgagggcagtgtgcctgttcttgtgtttctgaacgatgccaggagggggctggagcaagctgagcttgtgcatcctcagcctgtttgtatgatccagtggagatcctgttcgttatacccccatgatctgtctgagatcaggagagagatcctcatgacttgctgctttgatgggactgtccggctatggagtaaggatgaggtgtctaggtcgaagaagcagcgtggtttgctaatatcattcagtgtcattgcagtaatagaggtgaacaacactctgaatggagtcctcggagttgatattattgtgagatggtccatggaatctggcagcgttgtgtcaagggacgaacaaggtagattcaagttgttttcaggtgatttgagggagagccaggttggtaaatgtgagtggcttgtaagtcttggccccgggccttgcattagcttttgggctatccattgtttggatgatgtatttccgccaaggtacccacggattactttatggaaacagagcaaacttcagggctggggggattcctatgttaaatcaggtcctctaaaatctatggaacagtcaatttttgttgaggctgtcatctcaagaaggctatgctctggtccacctgcaacatgttttttgcttcatttgctggtggatgattcgtttgcttggtcaaccgtatccaccaaactgttagctgattctgggaaccatgctttaagtgattctgctaaaaatatcttgtgttgtttgactaaacctgtcaaacaagatggacataagggtagcatcagacaagtgtctgtccatccatatagctgcgaaatagagttagctgtctccatggattcaaacagaatgatatttttctggtctctgtcaactttctcaactctcataccgaca

SEQ ID NO: 188286 - DNA, 357 bp, Zea Mays
atttggacttgatattgatctggatgcaccaaaagttaggattcctttgaatgctaatcaacctttgctgggcaatgagtactttgttcttgattttggccattttacattgcatacaagagtaagtttttggtcccaaaatatgtcataatgttgagctagctgttactaactgttctttcaactacaggatggtaagcatgatgaagaaagacagagtctgtattcaggcttttatattactgggagggatatggctgctttccttatttgtgatttagctcagaacatatactcaatacctgaaaatttagatcaagataccctcctaggtcatacctttgatgataatcagtt

SEQ ID NO: 188287 - DNA, 352 bp, Zea Mays
gggcgtgattggttgccggatgaagccaacctggctcggcccccagatccaggctcatgggagcctggttccagtggtgcaaggggggcgtgattggttgccggataagcagaaccaggctcaacccagcagttgattggttgcacagttgcattagcaaattcaaacacacagatgcaagtagagtgattggttgcagctgcttacaagtggtatggtcaccactgcatacaagtggtgaggttacccaaaccaaatgatcaacaagagcacaactatcagtacaaactgagagagaatcaaaccatctttccaactgaaaccaacacgatcagtcttaatgactgattgt

SEQ ID NO: 188288 - DNA, 1200 bp, Zea Mays
gccttcatctatcacaaatgattctgaaaatggagaaatatctactgatggccaagatgaggaaaaggttactctgggagatgcattgtccatgaatcggccttctgaagctcctccaacgtctgttgaagagcttcagaatcttgcaggtggagcagatattaaggtactgaaactggatctcttgttgctatcggaacttcaaaatatgtctcatgtattgcattggttccatctaattttaagagttcttttacaggggctggaagctgttctagataaggctgttgaacttgaagacgggaaaaaagtgtcacggttcgttaagcttgttttaagttgtgcttagtaatctgggtttttgcttgtcgaaggtgatgctttggggacttagatgtgacagtaactaactacctttgcccctccccctctgttttttccagtggaattgacctggacactgtgaatataatacagcgtgatgcactattgctctttcgaactctctgcaaggttggttgcttgagtaatgttactttagtgggagctatgagaaagtagcaattatatacttcctgcgttttgtcatccttttagatgagcatgaaagaagaaagtgatgaggttgctaccaagacaaggctgctatcacttgaactgctccaggttagcttacttctttggggttgctaatgttcatttttgtttgttttgatgttatttgtagtcattctctttagggattgctagagggagtcagcaatgtgttcatcaaaaattttcacttcattgattcagtcaaagcatatctttcgtatgctcttctgcgagcatctgtctcttcatctccagttgtttttcaggtaaacatttgaaattcattcagttttggttttcatcatacttggtgtgacagtatgatcatttctgtaataagagtgggctatcatgctaagttgacttttcttcttttattacagtatgcttgtggtatgttttcagttctgttgctccggtttagagagagtctgaaggtaaaattattattatgtatggaagtattgtttgttgtgttgcttttggtaacattgtattctttgaaattttaaaatattggcacagggggaaattggtgtcttctttcctttgatagttttaaggtctctggatagctctgatagccccctcagccagaaggct

SEQ ID NO: 188289 - DNA, 327 bp, Zea Mays
aggcaggtcgttaatggcgtcgtaggctcatggcggattggaagagggcaggaggcatcgtcgcactagtgtggaggcactgaggtaggtccgcaggtggcgggtcgtcggatcaaggaggcgcggtcgcgcgttcctgccgtcgggcagccaggggaaggagtgctagaggcagagaccagaggggaagcagccaagtgggtggcagagcgttggaggctgaaggtcgtattcacacttttgcagcaccgtgtgtgtggcatggagcgggtgcctgcagggcagatgactcacggttaggataaattgggagcttgctaacctagg

SEQ ID NO: 188290 - DNA, 2332 bp, Zea Mays
ctctcgagcctcgatccgcctccgccccacgcacccgacatcgctcgctacgcccacttcatcgccgcgggcgcaatgagcgcgggctggaggacgctgttgctgcgcatcggcgatagatgcgccgagtatgggggctccgccgaccacaaggaacacatcgtgagagccccttcctcttcccatactgtttcccccctctgctctccttgctctcggaaccctaggttatccgagcggcgatttatagttggggatatgagcttagcttggagcgcttggtgtttggttgccgttgctgttggtcagagtgggtggggagctaaaaaccgtagttactcgcacagccgcacaggagcctgagacctaggttttagtattattggactgctgcagtttgtgctggttaaaaaaaatgtttgtatgcttgtactaaatgctgccagaacaaaaatactggtagatcactttacttttagattttgatagaaactacgctttggaattgcgatgcagccattttcctgattgtttgtggtatccagaccttaccttgggttttgcttatttcttctaagtatcagaacctcaggcttgtgactctttgttggatgtggtatatgtaatattgctgtttgatctaactagattttatcatgtagacaaattatcacgttttaacggttctgtcaggaaataaaatctgaatggaaattattattattttgtgcttacccacctgaaagttcgcacatctgttagtgcagccagtgcagcatccccccccccccccccaaaaaaaaaaaacgaaatggaatagtttgtaaatcctagatatacaaatctggcttcatggtcatggattgttgtgcttctgttgaaacttttgtaagtgaatcagcgattttagtcgatggcaacaaatgtcccataaggtcttaacttttaagtgcaacaagtagagttcttatgatgtcatttttgttgtgcagtttaattaaatgatttcaccagcaaagaatggacatgatataagtagggtacaaaataaaggtgcataactaatttctgcacacatagttagaacagtgctccatattgtgtatttacacactatcatatatttgtttcaatgtatgaatatggatgatatggttatatgatttgtgtaatttatcttaaacatgttcttatcaaacatttgcttcataggaaacttgttatggtgtactatcccgagaatatgaacactccagagatgcaatatttgaggtaagtatgcagcagtcgagcctgttcatatattattgttcctatttgctaatctgggcatttttgcaaatattataacaagtaattctaactgggctgcttccagatgtagtccattagctaatccaaaatttgaattttacaaagtaactaagatcctggttgtccagattacgacaagcctgtagcttttcccttaatcgatcagatcatatcatatgattaagaatgtgcaacagaacccttttgctgtcgatgatataaatgagcttcaatttattttcacgtccataactatataccaagcctttttgccacatttgcaagccacaccgtcgctctgaaggctagcaactcacatgccacctgtaggttggtctgttgtgctggcatgatgacaccggttcctaacactggtgtgaaataaaagtaaacggcaaaagatatgtttatgtgaacgcaatcaatgcattgcttatacttagtattttctgcaaatgataccagtatacatggtatattgcgcaaacttattcttagtctgctggaatttgcaagtaattctttaaatagataaaaattaaagattaaccccatgtccccacatgcttattttatttcaatttgtctgcaataaaactcaattatatttatgaaagaaacaatttaactggtcaacataataaatgatatttggtcataagatatttcataatttagctgttcaacgatcagacattataaattaatataatagtatgagattcagtctggccttagaaccgaccccatgtcatgtcagttttgtgggattgtaacaccaatctgtatctcgatcatgacaccattgtgagtgagtgcattctattcttttctgccagtgaatatagataggaaaaatgtatgcaaaaaagtatattccagtaatccagttgctgcatgctttactttttatgggcctggaaggcatgtctttgtataaaactgaagtaccttgaggtgctgctaactgaaattttttctttgctcgagcagtttctccttcaatgcacagaacaat

SEQ ID NO: 188291 - DNA, 534 bp, Zea Mays
tgatggtttaattgaaaccttgttacttcagagtcgaaagagaaaccgacagatgatgatgatggtctcctttattggtatgtactctgccaattacatgtgtaaagctccaaggaggacagccactattactggttttcaatgggttcaagaaacactagaaaatggcatagcctgtttcaacatgtttaggatgagtgccacattattttatcgtcttcatgattcattggtggattcctacggattgaagtcaacatgtaatttgtcatctgtagagactttagggattttcctatggatggtgggtgcaccacagtcagttaggcaagctgagaatcgtttcatgagatcaacagcgacaataagccgcacatttcataaagtcttgaattgtcttgttaagctagcaacagataatattaagccattggatcctgaatttcaaacagtacatcctagattggcccagcgtcggtttgctccatttttcaacaattgtattggagcaatagatggtacccatgtacctgt

SEQ ID NO: 188292 - DNA, 363 bp, Zea Mays
attttggaaagttgcagtaggaccacaactgctcatacttcttgtcattcacctccactttcacagtttctttggtaaagtacttccacacaatagatgtgtgccacttttgtctctttcctattccagtcatctcctcttgcatgtcctcgtcatcgtcatcaaggctcgctatatcaacaacagctacagcatattacaagcattacttgtgcctgcgacaaccaattcatttgcatctttattttcagcttatggtgctgaagatgacgattgaccaattggcacacccatagagctttcactttctcttctcttgtttcctttcaaagaattaacaatacactgttagacacattccta

SEQ ID NO: 188293 - DNA, 505 bp, Zea Mays
cgactataaggtgtggttctattcctgttctcaatgatgtttgtccagagacagccccttccattctctcgaaacggattaacatcttcttgatgcacaagcaggctgttcagaagagagttcaatgggttagcactggtaaaaagagtgctatatggaagaaaacacatgagcgaaatgctcgccgtgtcctcaacctgatgatagagttagaaggtttatgggtgaaactgggccaatatttatccacaagagcagatgtacttcctgaaccctacataaatgtcctcaagcagttgcaggattcgcttcctccacgaccttttgaagaggtatgcatggttgtcctcgaatgaatggaaggattaaagattgataattcttgtctggtcctgacatagtattgtcttggaggtcatttaagcaattacttaacttagttcttgtctctgctatgcaggttcgtgaaacgatagagaaagaacttggagaacctatgagtgat

SEQ ID NO: 188294 - DNA, 573 bp, Zea Mays
tggcatgttcactccacttacttttgataaaagggctacacaggtattcaaagctcttcttgcttgcagaacttgatgtgcttgcagtctacttacactattttgttggtaccttgtgttcagaggaacgattgtgatgctgcccttgtcgctgcttttaggagggaacaagagaaggaagcacaattgaaggcagtaatagatgcaaagcagactgctgaacagctggtctgtagttcttcatgattttgcatctctaccttcaaagcacttaaagcaaaaatatacatggatagccatgtgtttgctgattttaatattctgttcctacgcaggtagctcaaaagacagaagaggtaagaagtttcaagatgaggcttaagtttcgtgaagaacggatcaaaagattggagcaggttgcttcagggaagttatctgctgaagcacatcttttgcaagagaaggaaaaccttgtaaaggaattagaggtcctgcggggtcaattagatcgtaatccagaaattacaaaatttgcaatggagaatctacaattaaaggaagagctacgaaggt

SEQ ID NO: 188295 - DNA, 889 bp, Zea Mays
ctgatacaaaaactgttgtctgtgaagaggccattggcagttccaaagtttcatcaaatggtgataccaagttgacgaattataataaaaaagcggaccataataaagtctctagcagttcagtgaaagacatcacagggactcaagctcccaagaaggcaccgaagctagataagaaaaacaaagcaaaagctgtgaaagaaataaatggccgagctgaaggtgtaactggcagagctagtactgatgaaagtgaaactatttcactggatcaagcactctttgctacaaaaatttcaaagtcatcaaaatctataagcttggatttccgactttcaagaggcattgcacaggtatcatccaattattcagcacaatggcatttgttattgtatctgaaggaactttgcttaaaaaatatttttagtaacatctaaaagcttgctgaggctgtattttgaatgcttgtttaggactgcagaaaacaaacattacaaccaattagctacatttgtttattcaaaatgattttactctcacaaaatatttggtaaggtgctgacaatatatagaaggagatgctattattattatattgatcataattggttgaattacatattttcaggtaaatgaaggaagatatgaccaggcgatatccatttttgatcaggttttgaccttttaccatgattttttctccattatgtatcctgatgcaaagagggaacctgataatttgctattgaccatttagatattgcgggaaactcctacgtatcctgaagcactgattggaaggggcacagcttatgcatttcaaagagaattggattctgctatttctgatttcaccaaggtagacctttagatattgagaacctccagt

SEQ ID NO: 188296 - DNA, 274 bp, Zea Mays
acgaagcttctgtccagactaaactaaggttttcacatggttagatttataaagataatatgtatcagtaattcagtatcatgtcatttccaaaatattctaacaaaatcccaatacaccttgagtcaagaaccaagggcaaactacagtcaaaaataaatctagagctcgcaactaggcatcataaaaagcatccaatgcgtgacacaaccattcacaatagctggcacttctccagaatctccactgataatagtatctaacagtgtcctag

SEQ ID NO: 188297 - DNA, 332 bp, Zea Mays
atctggagcaggggcagggacagagcgtttgtcagctgacagacaccccaacactaaaacagaaaaactaaaccacccgactttgagctaggaggtaagaaaaacccttagccccagccaaagaccacaagaaaacttcctcccgggccagccgaacggccaccaccaagtttggatgggaaccattgaagacaacaccatttctatgcttccacaacatccaagcgtctaaagcgaccaaggagtcaaagcccttcttactcagcccacccagccgagcactattgaaacaccaccagtgatcaaaatcatctatatcctgtcctagaagg

SEQ ID NO: 188298 - DNA, 285 bp, Zea Mays
ttgataccatgattcaagtcggatgcgcaccggatgtcatctcatacagcgtgctcatccaggggctttgtcgtgtaggggaatttggcaaggtggaaagaattttaggggagagtgaggcgaaggggtggacgccgaatgctgtcacctacaatatttacatgtctgccctgtgcagaatgggtttcttggatgaggcattccggcaagtagatgttatgcatagcagaggagtgtacatgaccattgagacagtgaatattctattcgattgcttgtgccgtg

SEQ ID NO: 188299 - DNA, 292 bp, Zea Mays
cggcgggttattttccataaaacgcaggggctctttaagaaaagtgcacggcgaaggggtaagatttattgtgagccgttggattagacactaagggcccagatgaaatcctcactttaccgaaccggtatgctacctaggccgttggatccatgatcgatgattcagatttaattatcccctgatccaggcccaactgtacgatgcgagataaacggctaggatcaaaacaaggtgaaacggtatcgccaatctaatccggactgtcgatcgctcatccaacggccgagag

SEQ ID NO: 188300 - DNA, 768 bp, Zea Mays
ggagcatgaatggtgcgacggtcgcgtcagctcccggaagcgatatgctgcccaagaaaaaagccgagaagctcaggcgaagcaattcagtgcagacggataggggagctccaccacctatggccacagctgtcgccccacctgtttccagctctattaactacacgtcctcgtttaaacaatgtgccaaccttctcaagtcccttatgagccatgtatgggcaagcccgtttcttgttccagttgacattgtgaagttgaacatccctgactactttcaaatagtcaagcagcccatggatttgggtacgatccagaaaaggatgaaggcaggcatgtactctacacctccggaatttgctgcagatgtgaggctcactttcagcaacgctatgaactataacccagctaacaatgatgttcatttaatggccaaaactttgagcaagaactttgagagccgatggaagcttattgagaagaagctccctaaaccagatgagaagcctcctcagccagatgagaagcctcctcaaccagttgagaagcctcctgtgaggaagcccacaaaaaagaattcaactaagagagtttccattgagaaagaagacctcactaagaaaaaaccctcaaagaaaagtgtacctaagcagtacatctttcggggagaagattcagctgacagtccagttctgcaaccaaagaaaaggaaaacctctcctttggtacaagatgctcctttggtaggggatattgttccaaccagaa

SEQ ID NO: 188301 - DNA, 519 bp, Zea Mays
tttactatgttacacccttggcttccgacgaggtggacgaggcgtgaggctgacggtggcgctggtagtccgcaaggaaccggatttggacgcgctctccctcgtcgctaggtaagagacccaggtaaggaacatataagtggttgttctgattttggatattagccaatttccccctccaatctgttactgatttatatgcccttctagggatcagcagatcccacacctattacatgatttgtccttctagaatagaatccgctttctatcttctgaaccggcactgccttcttcaatatcggccaccggtcggtccacctcttcaataatcgtccttcacttcagttgtgagttgtgacatactatttatattcggatctgatctattacaagtatacatgcatattatagggtgtgcgtctgtatacccatgttctttacaaggttcgtccctaggtgatatgagtagtaagtctaaacttgcttcttaccaagagttaggttgtatgtgtgtat

SEQ ID NO: 188302 - DNA, 314 bp, Zea Mays
atgataatagattgttagggtcactcatcaaatattactatgtgtcgtcgcaacgtacgggcactccactagggtttagggttttacctgttgtgcccagttagggtcactcatcaaatattacataggacaggatccatttatagttggagcagatacgcatgacgggggcacacatgaaacctctgtgatatcacctgttgtgccctatccccgtggactgccggtcgtcgacgcgtctatggttgaaatggacggctgggagagctccctctctttttttcttcacttttgttacgttaccttactctcta

SEQ ID NO: 188303 - DNA, 336 bp, Zea Mays
gtttgccttactttataccatgttacatgatgactacatgctcatttatatcatgtttgatctgcctctattgcatagtatggggagtgattggaaccaggtgatgtctcaatatggaagcttccttagccagattgacgagcagcctatcggaacacaacattctgaatttccagttgatgggcaacccgagggctcaagaacaccagctgttactaaaaagccaactcaaagaactaagctagcaaacttcactgctgaagaggacacaagggtatgccatgcatggcttgctgttagttgcgatcccattattaacacagggcagaaacgtca

SEQ ID NO: 188304 - DNA, 305 bp, Zea Mays
tggtggcaatgtaactgctgaccatctggttggggactatggtttcactagaggctgaccacatgagagtgttgaccaggatcattgtagcaaggaaggaggaagccatggtgtaaatgggcaagcaaggtatggctatctattgctccctgagtctctagcaggttgttttgttaccagattgtggtctccctgggttgggatgtggttggtacaactcttgcacgcttatttcatgtgtgaactactgcttttcatgttatcatcatatctagtattcagtgaattctccacgttgatagcac

SEQ ID NO: 188305 - DNA, 381 bp, Zea Mays
caaatattgattcttctgacaacgaaacggagagcgaaatggatactgaaaccgatgacgaagagtctgttactattgaaactacagaagaggatgttccagtattagcatttttgaaagatgctgagagctcatctgcgttgaaggcatcatttggagctttgtcgggaataccaaatgtgctggaaagtgtcgaggaattaagtgatgctaaatgtgaagaaaagaccagcacttcacttcgttgttttagtaaatgcacagaacataagcctgtttcacatggtagacttcgtgtcttgccactttatgcaaagttatcagcttcacaacagcttcaagtgtttgaagatgtcccagagggggaaagattagttgtgg

SEQ ID NO: 188306 - DNA, 359 bp, Zea Mays
atgatcctcagtatattgcctttgtgaaggcacatctgcgtaagcggtttcttatgtctgatcctagtcctcttcgttattttctaggaattgaggtctccacgcctgagaccttctatctgcctcaagaaaaatacaatcaaggtcttcttgactgtgcttctcttactggtcatcatacctttgggactcccatggagctcaatgttcatcttagtgacattgacggtgagcctcttttttatcctagttgctatcgtcacataatcagaagtgttgtttatcttggtatagtagaacaaacattgacggtgagcctctttttgatcctagtcgcctcttttccacacacaagttct

SEQ ID NO: 188307 - DNA, 529 bp, Zea Mays
ccaccttgatgttgcttttcgaactttctgcaagggaacctctctgtcaccgaatactgtcgtcaaatgaagcgcatggcagcctccctctctgacctcgaggagcccgtcttctgtcttcaatcacatgctcgtcctcaacctcctctgcggcctcaacaagcgctatgatcacttccttacttggatcactcgctcagtcccattctggtgcctgctaccacatcacgtataggcatgtctcgatccttattgacgttgtgtactacagaggaagagtatcaggcccttcttgccaatcacacctagtatctaattccctatcccccaagtggcaatgtagtgactggcaagtgggtttggacacataagcggaaggtggatggctctttggatcggtacaagacccattgggttctccaggggtttactcgacattctgatgttgactacaacgagatgttcaatcctgtcgtgaagcctactaccggtcgtaccgtcctcactttggtactctcctgtttttggc

SEQ ID NO: 188308 - DNA, 329 bp, Zea Mays
cttgaattcaaatcgaaaattggaataaggaaagaataaaaaaaaggggggggttaaaccgctacttgggccggcgtaacctcagattcagcccattcccactgcgtggcccatcctccttccgcggacgcgcacccggtgccatttcctggtgggtcccgcaggtcagggcgggtcttcttctcccccaactgaagcagcgaccgcggtggactggaatctcaacaaaccgagcgattctctcgcttctagccggacttgcctcaacaaaccccaccggccaactccctctcacccccttgctcttggcgcgaccgtgggtctgtagg

SEQ ID NO: 188309 - DNA, 808 bp, Zea Mays
tctgtcgggaagcaagatagcttctattgaccttggtgcccgtgttgttcgtatggcatatagccctacaactagtcatgttgtcattgctattcttgaggtatgtattagagcttcacttgttttttttcttctgaaaaagcatttccttttattgctagaaccgaagtgccttcaaagtaaggcaaatgcttatgatactgttcacagaaaatcataagagtgacgatgcttcgttcttgttagtaggaaactaggcatacttttagcacttttatctagtcatctgccatgcagagtgaataatattattctctagcagcctgaatgcatgcactgctattggctaatggctgcgagttttgcatcttttattaatagcttgttcaactgttgacccctttgttatctcttgttctgcaggatgctacaatcagatcctgtgatttcgccacggagcagacacttgtgctgcattcgcctgagaaaaaaacagatcatgtttcaatagatactgaagtccatcttgcattgacacctcttgagcctattgtattttttggtttccacaaaagaatgagtgtaacaggttactctcttagcttggcaggttaccttttgtgtttgcttgggaggcttaaagtgatcctccatttggttttgtttttacaggttgtatttccacgtgttaacctcttgttttgttctagttgtagggactgttgatggagggagaccgccaacaaaaataaagactgatcttaaaaaacccattgttaacctggcttgccatccccgcctccctgtc

SEQ ID NO: 188310 - DNA, 376 bp, Zea Mays
ctacgatgcttataagttaatgtaactccatttgcagcttcagttgtttcatgccatgcattccatccttctattgtagatacacggagattttgttctcatcagtggtgatacagtcagtaacatgagcttgaaggacgctctccaggaacatatggatcggaagaaaaaggacccacttgctgttatgactatggttataaagcattcaaaaccttctatcttgacgcaccaaacccgtcttggtaatgatgaaattgttatggcgatagatcctgagacaaaggagttactttattatgaagacagggcagataactcacacttgcatgttacaattgataaggatatactgaccaataatcctactctccag

SEQ ID NO: 188311 - DNA, 305 bp, Zea Mays
tctgaacaagagtttatttccaaagaagtgcagtctagcaagcatgagaagagcaacatcacattccaaagcggtgaagataagttcactgtccaggagctgctttcatcggcaccagaagttgctcctcctgtttcatcagcaccagaagctgctcattctattccagccacaaaaggaacactattggattcacccacttctcttcagtcatggaagaaacatgtagtttctcatttaaaccctccagttgatgatgctctacagactataagacacagcactttctgtctcagtgatgagca

SEQ ID NO: 188312 - DNA, 667 bp, Zea Mays
gccttttacggcactggatctaaagaggaggtaatctcttccgcgcgcctacccgcccgccacctcgcggattacttgccccggaacgactttagggtttacttcggttgctcgagcttcgagtctatccgagctcgacttgctaaatgccaatgctacctgttttgctaaacaaggctactctagtggttagggtttttcttgtgttggtgataaggtttagcgtgccatatgttgtccgtctgtgagatggcgatggcgacaccaccttagtttgctccgttcacacttacgctatctaggccttgccttcagaatgactaaatgttagtgcaaacctgaacagttggcggtctttcccactttgaactgactggtctttctcatgaccaggggctgagcattgttagttatgtgtctctgtttatagctttgtggctttggtaatgaacactaataactgtatcggctctttcattttagaggagcgccgctgatcagatactacgtgatctacaaaataatccagacatgtggctacaagttgtacatattctgcagaattcccagaatctcaacaccaagttctttgcactacaagtaagttcgtctactctgctgcctatcgttatacatggcaggtagcttgtgtggcaagggaggatgg

SEQ ID NO: 188313 - DNA, 321 bp, Zea Mays
cttggagataacctcgtctcctggtcctccaagcagcagcctacgatgtctagctccagtgcagaggctaaatacagggtggttgctaacggtgtcgctgaagcttcctggctgcgtcagttactataggagcttcacagtcccttgaccaagagctccttagtttattctgacaatgacagtgttgtctacttgaccaagagctccttagtctattgtgtcaatcagcgcacgaagcatatcgagattgatctccacttcgtccgcgagtgcgctgccattggtgatgttcgtgttcttcatgtcccaacgacgtctcag

SEQ ID NO: 188314 - DNA, 383 bp, Zea Mays
cttgcagcaccgcattctcaggactgatatcagtatacatgtccccatttacaggaggtgcaactggagtcccaagaactacagccccatcaggacctgattctgtaattgtttgtcttgtttgttcattatacgcatacttcccaggtgttcgtcctgcttgcaaatttgtggcagctgcatttgctgctgcatgattagcagcatttgttgtttcagcagcagcaagatcctcggccacaagaagatcatccagaagtacccctacgatatcaggtccattaagttagaaaccaataagcaatagcgggtcaaaccacatcatgcagcactagaaacattataaacatgatcattactattcaaaatgagaaactgaacag

SEQ ID NO: 188315 - DNA, 461 bp, Zea Mays
gtagacggacgccacgacgagattgcacgacgaatccgccacggacagtgaccggcgagaaattgcgcagttcccgactcggcttcggggctggggaggtcgctagcacccacgggcaggcccacgcgaccccaattgctaaggcaggggcgccacgatggttctctggtgacgagcagggacgacggctgggttatatagccagccgaggaccaagtccgcgacgcaaggattccgccatcgccgtattctgttggaatgccccttggcagggatgaacggactgggcacgcggtccacgcgccagagattcatcagcgcacacatcggaggtagttccgcggcagatagcgatggattcccaccggacttccgaggttcgcggcgaggagcgagagaaacgctcagtttgttgcgtgccgcccgcggattttgagtcgttcggggaagacgacccaccc

SEQ ID NO: 188316 - DNA, 439 bp, Zea Mays
agcatgtgcgtgtgggacctggctctcggacccacctgtactcacccggtataaaaagaaggtaggtactattgacccacgtcagccacgacaggccacgtcgtcaccaaactccatccggaccaatggcgcatcatacccaggcgggtgctgagaaatctccatcaacatgacaacgcatgaccacatacggtctttggcactccctgtctctgccttgtgggaccaaccaaccctagtcctagaggatctaagcatcggagtcgctacagtaacccacatattggataggacggggcaatacaccataccgagtgtatgcttacacactctagaagggtgacatagggtttttcgcaaagaggcatggccatgacacacacggcctcatggcatacccagacttttccctgtgggacctgccaaatgtcgctacaag

SEQ ID NO: 188317 - DNA, 351 bp, Zea Mays
taaaaacctgattttagtagagtagacaaacatgatccacacaaatgaccaagatgatggtgatattgggcaactgacgcaacagatgccaatgcaacagaaagcacatgagtcgaaaaggtagtggatgaaggcacaaggtacccaatatgtagagccgtagaggtgagggacaactctacgacgatggctagttccaatgacatgccctatgcgacgatcctatacaaaataagacgagtcatcaaatccaacaaagacgaggacgaagcactaacggatgtagcagcaacaactgagccctttggaggatgtctcgcaccacatcctcgagcagcacgacgtgctaaa

SEQ ID NO: 188318 - DNA, 541 bp, Zea Mays
cgtctcccccgtaccgtcctccgtccgtggcgcgcttgccgatcttcactggcggcgcgctatggaggagtacgaggcgcttctcgccaaccacacttgagacttggtgccacgtcccacctgtggtaacgtcgtcaccggcaagtgggtcttcactcataagaaggctaatggctctctagagcggtacaaggccagatgggttcttcggggtttcactcagtgaccacgtgttggctatgatgagacttttagctcggtggtgaaaccggcgactattcgcactgtcctggctctttcagtctcgtgctcttggcccattcaccagcaggatgtcaagtacgccttcatggtacctgacagagacagtgtattgcagccagcctactggttttgtgaatccagctcgcccagatctagtttgccgcctaaacaagtccttgtatgggcataagcagatgcctcgggcctggtacaaccatttcgccacctttctgctctctctagggtttgttgaggcccggtcagacacctctctgtt

SEQ ID NO: 188319 - DNA, 386 bp, Zea Mays
tatgcatctctcctacgtattcgagaaaaaaagagaaaaaacaatgcaaaatatctaaataaggaaaatgtttggcatttcgtctataactgctcggtgcctttagttgacctcagtcataacatatcttcccgtctcttcatagaactcgtccttgagtttgacgtcatgatagaggtccttcaattgctgaaatagctctcaagtggtttcattgttgggcagacaatgccattgaactaggacgttctaggagccctgacgtagttgggtgcgcaaaacacgctctgactcaggcaatggtcaccatcctgtatgggtggcatagatggagtcattgggggtccccgtggaatggcttgagcagccccatgtggaacacatca

SEQ ID NO: 188320 - DNA, 497 bp, Zea Mays
agtgagcttacactagccacaatacccaacaatccgcactcgactttggtctacgcttaattctacccttggcgctccactgggaatccccaatttggttggaacgccattctagagctcggtctacgcacaccgcggaacatgagacaaccccgacgtgttcccggtgacacagtacagcaacacacaaattgggagcatggtgagcttctgcaacgtaccaggacccaagaacagttgctaggaaggcgggtagaaggtcaggatagcgggtcgatggaggaggtgttcacggcggcgcggagagtggatttggggggattccaaattagggcgctacggtggatgatcggaggcaagggtgggagctctggcttcgtgacaacctaacggagctagcggcacactcaatttatagtgtccgagagcggtggctctgaattttgaaggagaaggctggtggccggagagagggggtgagtcaccggcgcaggtta

SEQ ID NO: 188321 - DNA, 404 bp, Zea Mays
ttggagagagatgaataaataaggcatggtcatgagcactaggtaaaaaacaagcaacctttatcatagagcaaagcactcaaaccaagcacgaggagcttgtttaagaccatacaaagcacgacaatgtttaagaccacacaaagaacgatgaatacgatagacataacctgaaggagcatcaacactgggaggtggttgcatatgaacttcatgtaaatcaccatgaaggcatttttaacatccatctgagagatagtccacaaagaagtagcaactattgcaatcaaagtacgaacaatagtcatatgtgcaacaagggcaaatgtgtcattataatcttgcattcttgtccttggctctgctgaatacctctggtgacaagacgagctttacatatcaca

SEQ ID NO: 188322 - DNA, 271 bp, Zea Mays
caggtcacagccgagctgatcttccactacatgcatctctctacggaattcacatagcatgtgcacccgtaaggaccgcatcccaggcagtattcttgtgaccagctgtttggaccggttgtccaggctaacaagataaaacatctatggcactttcctctcctccaactgggtgttgtaattcatcatgtagtccattttcctgtggagttcagtcaaaaggtgatactcatagtacctcaagcttgcgatttcctccttgaggtccctt

SEQ ID NO: 188323 - DNA, 345 bp, Zea Mays
cacagttctcccaagtcctcccagctcgaaagatttgccccactagccatgacattcaagttgggaataccaagtcctcctagcttgaaaggtgagtgaccttatcccaagccactagacagcaacccccattggcatgatttctgcctttccataagaacccttttctgattttatccactgccttgatgaaccatttgggaacattagtagcaattagcaattaaatagtatttgcagaaagaacatgtctaaccatggtggccctgccagccctgttcgttagagatgctttccaagatggaagcttgtctgcaattttctccacccaaggcaagaggtcaa

SEQ ID NO: 188324 - DNA, 288 bp, Zea Mays
ggtccagaatgtcgacgtgaacaccaggtcgcggtccgagacgatggattgcggcacaccatgaaggcggacgatgtcgctgaagaacgcttgggcgacggactcggcggtgtaggggtgtgctaacgggatgaagtggcagtacttgctgaagcggtcgacgacggagaggattactgtcttgccctgcacccggggcagtgcttcaatgaaatcgatgccgatgtcggcccacacgctggacggaatgggcagtggctggagcagcccggccggcctcaggtggtc

SEQ ID NO: 188325 - DNA, 449 bp, Zea Mays
tgggggaaatagaatagaaagaggctagatttgaggtcgctgcgttctcaccaccctctccacttctgaattgaagaacctacgatccgttccacaaccgggcagcggtttgttccgtgctgcaaattagatcgagaggccatcttcttcatctcagagtttcgccgtcggttggttcccggagccgcgccatttctcgacccaattttgtttcaggtttcattgacgacgttgcagtgctcaggtttccgcatttcgatttcgacttttgaatcgctctgaaactgcttgcgtgcgtgcgggcgtgcgtgtctgactctctgttcatgtgttcatcgcttgttcagattcctctctttctctgttttctctggacatcacggtttctgacgtctcggcatccttgttgcatgaatctgcaggcagtgtgatcccggactgtgcatgag

SEQ ID NO: 188326 - DNA, 455 bp, Zea Mays
gtggagtataccaacggcggtgcggatcccagcgcacatgctggaacttgcgacgacgaccgcaggaaggtcacctggtggatcggcacatctgccgaatgtgaggctgccggggtgcacatgagggccagtagcgatggcgtcgtcaaagccgcgacggtcgtggttgacgatggcagaggcggctgcggctgggagcccaacatgatggctttcatcgcggccacgtcggactgcaacgcgaacatgtcggactgcatggtgttcatgccggattgcatggtggtcacttgggcttgcaaggctcccaagttgttgaagtggacgagggacgccgtcagctgctcgttggtcatcatgggaagggcggtggtcacgccagaggtgggctgaatgggcgcgatggtggtgatgatgggcagcacggtggtggaggcgagtggcaacgatgacgg

SEQ ID NO: 188327 - DNA, 304 bp, Zea Mays
tctttaaaattctctactatattaaagtaccagttttaacaatttataaaaaaacccttacacttctttaaattctaacccgcggtacgttgcccccttctcgcgctcccaaacaatcgtccagcctcctccccttccattctcctccccacgccgccatccgctccgctccaaccacgcttatagcttatatccctcaccggttgttattcctctccctagataagctttatctcaccaaactaatctcgctataaacaaggacccaatttcatccagtaatcccgctataaacaaggacccg

SEQ ID NO: 188328 - DNA, 276 bp, Zea Mays
taattctatagcaatatcccctctaacatggtatcacaagtctgtcttgcttctgcttttcccctagctgctgaccctctaggggcacaacctctctagactccagggtagctggccccctaaggtcgccacctcccttgcgtcacattgctgcagcaatgcataagcatctcctccggaacccatggtagggacctcatcgactgtcgaggagcgctcccgcgccgaggaagccacaatcttccgcaagaagattgatgacatgctcaccgcagt

SEQ ID NO: 188329 - DNA, 717 bp, Zea Mays
agttatcgaactcctgcccgttgtcacactgaacaccccagatggtgcaaccgaactgagtcaacacccatgcgaagaagtgagataaggtggggaaggtgtcagacttacgacggaggggaagagtccagaggtagtgagagaagtcatccatgatgaccagatagtattggttaccggaaaagctcggtatcaaaggggtgagcattgtgggacatggaagaggtgaagggtaagtgattgtggtgaccaagctgacaagcatggcaaggcgaggtaacgttgccgcggggtggggaatgatcaaggtggacgagagtcgagaaaggacgtcatggctggggtggccaagacggtggttccaagtggaggcagaggcagtggtgacgtgggtggagggtgtggcaacacgtgatgtgggaggtatgtccggaaagtgaataggatagagagtgggaaagagttgtcgcagcgagcgaccacaacacgagtggtaagatcccagatggtgagcctccggggatcaaactctatggaacagtggttgtcagtggtgaagcgacgaaccaagagaaggttctatatgatgttgtggacaacaaggatgttgttgaggtacattggactaggaagaatcgtcgcttactgaggtgacaggcagagtcgacccattaccgacaatgatggaagaaggtaaagtggggctgtggggatggg

SEQ ID NO: 188330 - DNA, 393 bp, Zea Mays
aaggaaaagtccataagtagtgggagcaatcatcaagaacaactaagtaatatttgtagcctgagacacttaaaatgggggacatccacagatcacaatgaatgagatcgaaattgttaaccgcacgagaagtagacgtacggaatggaagacgaacatgacgactcaactgacagacatgacataaagtggagctagcatccttattacacatgcgaatggctgatgtgagcttggatagggtctcgtgaccagggtgaccaagacggcgatgccaaagtgatggagtggagcttgcgacgaagctgtgtgtagcagggaggcacagggggtatagtggtctggaactattgcacctgacgatcacgttccgagacagcagatccttcacag

SEQ ID NO: 188331 - DNA, 697 bp, Zea Mays
atttgcttgggactaataggctttcttcttgttgcatttctgttaatatttttatatcgatgcagctcataacgattactcttacagtgttcttgtccatagtggtggtgttcatggtggacattactatgctttcatacgacctacactttctgatcaatggtatgcctgctttatcttagaaacatcttgcacatacttgtttgacgattagttcatttgttcatgtcaagtattgactggagcaaaaaaattccaggttcaagtttgatgatgagcgtgtgacaaaagaagatgcaaagagggcactagaagagcaatatggtggtgaggaggaggtatgtttcactttctaaggctactattattgactttggtatcttataaacattgaacgtatcaatttcatgttgcagctacctcagacaaatcctggcttaaacaacaccccattcaagtttactaaatattcaaatgcatacatgcttgtgtacattcgtgaaagtgacaaggacaaaattatatgtaatgtggatgagaaagatatagcggagcatcttcgggtaatttgtccccctaagacttgagtttcatggtgtcttcttttgtaggctctaatgcctaaatctgctctcagattagattagaaaatgaccgtgaagagaaggaacgtcggaagaaggaaaaagcggaggca

SEQ ID NO: 188332 - DNA, 290 bp, Zea Mays
cggtcgactctcgtccgtgctcaggttttaggccttcaggtcgcaatgtctagtcggccagattatccactaagatatcatccacccgcgaccaggccaccagcaccatagttgattgcctgcgagctgccgctgcctctagtcttgactttctctgctataaagatcatcagaatttaagaccgaaagaagagacaaaatgagggtagagtggataaataatagcatgctatgctatattacgcgggatatgtttgcatacatgtttcttaaagatttgaatcatatcc

SEQ ID NO: 188333 - DNA, 336 bp, Zea Mays
cttggtgctagtactgatgaacttcttgacattatcaagcctctgtgtatcatcatctacacccttgtcacagtgtgcgggtacaagagtgtcatcagattcttccctcaccaggtttcagatcttgagctcgcagttgctcttcttgagaagtgtcatacaatgagttcagctactgctcttaggcaagagagcacaggagaaatggagactaaatgtgttgttctattgtggctttatatactggtcctgatcccatttgacatatccactgtggatacaagcattgctactgctgataacgtcgatgggcctgaggtcgttccactggtgaca

SEQ ID NO: 188334 - DNA, 296 bp, Zea Mays
actgaggacgacggtagatgtggtctctaaaaagcgaggagaggacgggcgtgtaggagaagcacttagtaaaatgggagaagtactgaccaagaacacggacgacgcccatgccgcggctctgttgaactgtggacgacgtgcgcagctgtgaggcgacggtatcgacgggccgcatcctctactcgctgcagctgcgcgtgggtccacgcggagccgctccccaccacagcagcggtagtttaatctgcgcagtgggtgaagacagcggtactcccgtgcgtcccccgacggca

SEQ ID NO: 188335 - DNA, 515 bp, Zea Mays
cttggatacagccctgaacataaaggctatcgatgttatgattcatcttctcgtcgcatgcgtatttctcgagatgtgagcttcaatgaaaatcgtcctttcttttacaattctttcactcattcttctttttattccacagagtctacctccttcatgagccttcctccaatttctgaaacttcatcagtatcaccacctactgtttctaccccagatgtccttattcccatcacaccaccttccacttccacaccatctcagtcttactcttgcaaaccacctgtctctcagacttacattcgtcgtcctcgctctactcccacggccagtcctgatgacgatcctgttgctgatacttgtactaacaatgatgactctcatgttgttttttatcaggggtatcatcttcgtgaccgtggcactatgcagctccagaacgttatgggttttcccgtgctggtgcagtcattgctgaaccatcatcttataaagaggcttctggtatacccgag

SEQ ID NO: 188336 - DNA, 271 bp, Zea Mays
atctgaagaagctagtgctctggtcataggagaggtagaagaaaaggttgccatagagggagctatttgtgttacagggatgaatccatcgggaaacaactcagcaactgtaatggaggcagatgaaagaaatgcagttccaaaagaatttggaagggctgccaaggaagtaattgaagctgtgccccagagccaacatgaagttaatgcaggtgttataaacaattctcatgatgtggtggctttacctgaggaggcccatccagttcag

SEQ ID NO: 188337 - DNA, 321 bp, Zea Mays
aagcagttgaggttgaattttttttatagcaaacaacagtagtggacggaggaggtgtggaagaggaatggacctcgccgtcgcagatgaactggcaccactcattgtaggtcgggtgggttgagtggcgcttgtggagatgaagaagtggtcgcattcttatatcccgagaggcagcaggccgaccagcgggtcagcggggcgtacgcgcggttgttacagaggctgttcgccgccggtggggacgcgtagcgagcacttattgtggagggaggctgttgtcggtgacataggggagggggtgcgaacgctcctattggc

SEQ ID NO: 188338 - DNA, 726 bp, Zea Mays
tttggcgcgaatgatgagacctcggaaagaagccaccaggacccaataggtgcagtccaattttcgattggcttacaacgtctcaaccacaaggattcagatagtgttatgatgttctgcagagaactagcaagtagtggtttcagcttcctcttcttgccaaggcttgcacatatcttctttatgcatggagcaacctctccatcacagatgcttttcagcaaatctagtgtcccttcagggaaaacttcctccaaggtgatgaaatcatcatctaagctcacattggcagcttggcagatcctgttaagcaccagttcaagaaacaagttttcacattcctcctggatgcttgtctcactatcaatcaccagtggaggcacagattgaagccactctttcatcactttctcatcaggaaatttcctaaacacctctgagatggcagcaagagcagccttgcggatgctgactaatggatcagagcatgcagcacccattgcacaaagaagagagtcatctatgggtctcccaatcaaaccaatcgcctttgtgatgagcacaagcgcagccttcctcacagcagccttatcatcggtgcagcgtcgtctcagcaattccccaagcttcatgtccccaatcctcatcacctcctgcaaccggtcaacctccacacctctctcagacaaaatatcaagcgcctgggctgcatttattaatgcccga

SEQ ID NO: 188339 - DNA, 325 bp, Zea Mays
ctgagctttatgattcatctgatgggtaaggactacatttccccctatcgttatgcatttatcttcacagtataagactttagattgcaatttctatttacttacatacttgtgtatgtttgtctgggcagttcaggtttagatgcaaattcaaaacttcctcccaacagatctgcttctaacttaatgacaagaacaatgtcaggtccagcaacgtccgagacttcactgccagttgatcgtcccatgaggttgtcagaaattcatgttgcagctgagcatgcactgaaacaaacgatatcagatcctgattttatgacatcac

SEQ ID NO: 188340 - DNA, 329 bp, Zea Mays
agaaaagggccaacttgtaaaaagttcggcaaaatgtccaggtctgtggccctgtcgtgtttcgggtctcctcgggttcgagtctgggtctagggctttcccagtaatataattcatgttttcgtcgggtctttaattcgagttttgggggcgggtctgcggacgctgcacctgactcgaacccacaccattgccaactctagaaagtgactaaggcttctgccaaaagtcacgatatgccgtttgaccaaggccgtgaggcgaaggaaaccataaaaaaaaccaagcaaactagaaaatgcgtgaatcaacgaacacgtaaactaccc

SEQ ID NO: 188341 - DNA, 649 bp, Zea Mays
ttctgatctgatgcaagtgtagtggagtcctggagtggtgaaactgacatgtgggataatagatttggtatatgtgccatgttgctaggaggcaggctcacttccacacactacatacactgtggtggccggtgggatattctgatggaatgttatggaccacaaatgatttgaatgagtatgatgtgtcggtggtcgagccaataggattttctcctttttgtttctttgtttttttcctggctgaaagcgacaggaaacaaaacaagatgtggatttgaataaatagaactgcaaattcactgtatttagctatttatccgatagtatcagatgttctattgaattgatgaacatgttcacagtttgcgatttgcacatttccctttctcagaagtaaaaataccatacttcactgaatgctagcagttttactgtggctatttttcaatactcttccgcagttgtttgaactagcaaggttaagaatatctaggttttcacaggtggcatgtccaaagattgttatgtgaaaatgaatttgcacgttgattttctaagttaattagcaccacaagttagtttagcagttactttttccataagtagatgctgtaaaaacattatgcatggtggctctcagtcaccc

SEQ ID NO: 188342 - DNA, 2066 bp, Zea Mays
gcttatattacagttgattaccatgatattgctgtgtgggtaatatcttagccgaaggtcatcttgagtgaatgttacaggcatatgaaccacttagatctgatataggacccctgaacacctatatgttggaccctcctttgaagttcttgtttttatctcttattgagtggcccgaagcttgatcttctcattattgggaatatgtgctttgctggtggaactaagttgttgacgtctgagctttgggctcttcccttctactgagctggctatgttctcgtatgtggcgtttttgtggaggttgattatataacattggatcatattgtgatgggtctggtagttgggggttgtaagcttcccactgttgtgactgatgttgcacaattgggcttgaggacgaagaatgtgagttctgcccttgatgctggatgtatgacacatcatagttagtcgagcattaagatgatgtatggcacacattcttcggctggccttcctgcttcacggttgccaattccttatgcttttggatggtgatgctacaatattttgttgtatgctctttattctccccgcaaaatacacaatactagtcaatggcgcgcgccagcgcttgcataggatttccctttttttactgggaaggtagagcggcacaacaacagtcgtcgcccacgcgtgcggctagatgtaccaacggccaagatttttcgcgcgacatggatagtgcgaatgtcgaggaagttgcatcggtttaataagaagaaatagctttcttgattgaccgttgttggagtacctgcctccaaaggtgtggccccccttctgtccctttgtgttgagccaccccagaaactactttgctggctttgctaaggtccgttcgaaggttggcttgttgttggagtttgcggaaactacttttctccatcaaactagggtgtagtctgaattgttcgggcttcccttgcatccttgttgaaaaccctcatgatctctctgtgtttctgttgttcttgtcaacgctgtcgaaagtcattgtgtgctctaatatattcatccatcttctgaaacagcttcttcaaggtttgcggaggctttcaggtgaagtattatgagcatgggtcaactttgagctccttgattgttgacttaatgacaattttaactagtactccttgtgcatgtactttgacttagacaaaccttcacatataactttgaagggattcatctacttcttgaaaacatggaacaatgcatgtgccatgactaggtttgtttgaaagccttggaaacttgcaatcgattgtttcttaagttgttcccatgtggttatcgatctggacaaagggatgagtactaggtttgagctatgccttttgttgacggagggatgagtaccaggtttgagctatgccttttgcggccataatatgatttggctaacattgttgtgtttctgccgaattatgcaatggttgcttcgtaactcatgaggaattgctttgatttcgactgcccatcattcagaggaagcatggacagtttatatgcagcttgccatggggctacctgcaaatcccttgagaacgaagatgcactatcatagatgaaattacatttttacctttccctatttcatagtcaccctttgcaattaagggagtacaataatgtcattttactgcgtagacgtgtcgcacacatcttctcttcgtagaagcttcttatgtctcctctccttcgaagtcctctttatcgacgacaaagctttgctttcaatgccttcggcttcatgcacctttggctcattcagatctaccgaagctttttcaaggagagcggtgatcttcctttggccttcattagctttctggacctgaaaaaccatctaaatattgatttcatcattttggaccttcgactagagacctccccaacaacaaccaaatagaaacaattgctggtttacaaatgccattaaaccctggttagagaagtgcaaatataattctaatgcagtcttagacatacttcacgcgagtgtgaaatgtaac

SEQ ID NO: 188343 - DNA, 582 bp, Zea Mays
actgcacaccattccaccgtacaagttgtgtcctttatctgaagacgacagttggaaaatattttctcaaaaggcttttgggaattgtgatggtgataacactgaccttaagaaaatcggaaaggaaatagtaaaaaggtgtgagggaataccattattgactcattctcttggtttagttgtacaaaatgaagtcacaaatgtgtggttagctgcaagggatgaagagatatggaaactagaaagaagagttgccactaaaatagaattgttttcaccattatatcaaatatacaatgacttctcctcaactattaaattgtgctttctatatttatccatatttcctaaagggtctacaatagataaggaaaaactgatccaacagtggattgcactcgagattattggatcaaaacatgactccttgcctccttatgtgaatggagagatgtgcatccaggactttttgtcaatatattttctccaagttcgagatacacactcagtaagttactacatacttattaacttgggagtcatccttttcatgtctagtatgccttcaagccttaaactaat

SEQ ID NO: 188344 - DNA, 799 bp, Zea Mays
ctgatggtaagctgcggcgacatggttcggttaagaagagcttggacggtgtcgctaggatgatactggaggataaggagaagatgggggatgtgtatttggagctgaatagtggtgagttccgacggcagaatgcagcactggatttgcttgctgcaattgtcaggcgtggagggggtctagcgtctgaggtcgctgagagatttgattttaagatacctattttgccgcagctggctgggacaatgaagaagaaggggagcagggatggaaggaatcggcggaagggtgccgactttgggtccacaaggcggtcgtttattgggtttgccatgtcatttttggaggttgggaatccaaggctgcttagatgggtccttcaacagaaggaggtatattcaggggtgcttcgtgggattggaaatgatgatgctgagactgtcatctatgtcctctcaactttgcgagacaatgtcctggtagatgagtctcttgtcccaccagggctcaggagtgtcctctttggaagtgtcacattggagcagctgagcttgatctcaggaaatcttgaatcaggggaagcagctgacattgctcatgaggtattggtcatggtgtgcactgatccaaaaaatggattgatgccaggatcaaatttgagaggtaatgagaaacgcttactagatctcatgaaaaagttgaaagctactgaggttgttcatcacaaaaaattgttactggccattgtgagtaatagactgtctctttgttcggcgtacatgaatgagtttccttacaa

SEQ ID NO: 188345 - DNA, 1255 bp, Zea Mays
cgggtttcaagtggcttcaacacatcggccttgcaccaaaggactttggatgtggagtgcgcctttgaagagaactggtctggatggaactgaatacagtcttgtgttgttggatactgaaggaattgatgcttatgatcaaaccgtatgtattagtggcttacctttgaattaatggcctacttttgcaattggttccacacctttcctggcgattttatttgtttttttgtcgtactacgtatatttgtaatttttgaaatgttgtgtcatatgtactttttccctcttggcaggggacctatagcatccaaatattttccttggctgttttgctgtcgagcatgttcatctacaaccaggtacatttctaaatgaacgaattagtcacatttggaagtttgaataaggagggtattgtagactacttagggtgcttcagtttttttgtctgaaggacgctaacctacgagcgtgctgctatttcttctagatgggaggtatagatgaatctgcgttggatcgtctctcgctggtcacagagatgacaaagcacatacgtgtccgggcctcaggtggaaggtccactgcatccgaacttgggcagttctcgcctgtctttgtttggttgttgcgagtaatatatttcatcccttttctcctatactaattatgtatactgaacgttgaacgctttgactgttccctagctgcacatcatcttataaaccgtcaaacataaacctcaggccctgttatgcatcagacacctttggtgtgcgacgagccgatgacaccgtgcttcctttactacaggacttttatctggatttggcagaagacaacagaaaaattactccacgggattacctagagctagcattgaggcctgttcaaggtggaggaagggacatatctgcaaagaatgcggtatggtagattttcatgggtgaacgtagctttgtacttgtgcttggtaactagacgtatggactatacttatacttcttttgttgttctggaagatacgggactccatccgtgcactttttccggacagggaatgttttacacttgtgcgacctgtgaacaatgagaaagatctccaacgtcttgatcaacttcctgtaagtatttcttcctttgaactacagctgctatttgtggccttgtacttaaaattctcagcaaatatcatatgttgcaggttagattcaaacttttcctaagctcatttgcgcaaatagcaaagtac

SEQ ID NO: 188346 - DNA, 620 bp, Zea Mays
tagggtttgaacggcggctggcgctggatgaccgaggcgagcatgccacaactctggagtaacgacagcaacatggcagcgaggcggcagacgatgtggaatggtgtagagatccccgttgctattgcaccgaaggaggactgttttggtttagagatccttaacagaaaaactagaagcgtcaaactcaatagaacagttattgtcgcgagtaagctgtcgaacagataacaaattacgagcaagctgaggagcgacaagaacattattaagatgaaaatagcgatcagctataggtaagagagatgtgccacggccagatgaagggatggactgcccgttcccgaccgtaacggagcacggtggggaaggtaacgggaaaggagtataccgtcgttggaggacatgtgggatgttgctccgctgtccataacccaagaaggagagtcctgcaccgccatttgattaagagcagcaatcaagttggccgtattccagccgcctgaagaagcacctgcggcgggaaactgcggcggaagaagaaacacaccgcacaccactaacaggtggggtgaccttcattatatagcccgtaggctagggttacattagggttacag

SEQ ID NO: 188347 - DNA, 354 bp, Zea Mays
acgagaaaagatgtacacattgggtaacacgacgcttaggtcgctgttgtataatcgaataaaggatgtattattgatttggagtcaaaatgtggggtactagtggtacgctaggcaggcggtgttccaaataaataaatcagtggatgtggtagtcgtcgtgcgtgatttatggttagtgagtagttgaattacaagttatgcgagaatcatgttagaaactaatgtgcggcgtgtaactgtgctcgggtggtaaaccataggtcggtaggtattattggtgtcgttggcaaatggggatgattcttgttgtgcgataaaattggaaaggcaaagaacatgggtagtgtgtcg

SEQ ID NO: 188348 - DNA, 439 bp, Zea Mays
gattataggaaacctggtatcacaaaatgtcatttgctagcccaatgacgtcttcatccactagttgtactctaataccctcacgtgcaattacaatgcccttgacatctaggaaacgtcttttgtggtataaaaggtgatctattgttttgaattctttatattccaactttttagcaattgtacggtggaaaaaaggtgccttacaaccttaacctatatttggacagttctctcacgcaatttggctaaatttcccatggtctttattttactttgagaaatagtgtggcataatgatgtatggtgttatatttgagtggacataaacaccatctaggtatgccttgaatagaggggattattggaaacctggtatcacaaaagtcattagctagcccaataacgtcttcatccactagttgcactctaataccct

SEQ ID NO: 188349 - DNA, 349 bp, Zea Mays
tccatccggccatcctgatccctatgtaccatcccctccacaactcccctgctccaccacacggccacaacaaggcaagaattcgtcagccactgacatccagcaaggcagcaagccgatttctagcaaggcggcaagcctccgcctccagcaaggcaagttgttggtcgccggccatcagtccaagaccagaggccaccctgactcgtttcctcatgcatgtgatgttgttggctgttactattggccgcatatagcacatagttgtttcttgtgatgcagttggttgttacggttgacaccatattatgtgcaaagacatttgtgtttgttgttgttgtgatgccca

SEQ ID NO: 188350 - DNA, 303 bp, Zea Mays
ggtcatatcatttctcaagatggtgtgtccacagatccttctaagacggatgctatgaaaaagtggcctacacctaccagtgtgactgagttaaggggttttttggggttgactggatactacaggagatttgtgaaacattatggcatcattgctaaacctcttaccaatctactcaaacataaggcatttcattggagtccagaagctgacgcagctttccaacagttgaaacaagctatgtgtgatactccagtattagccttacctaatttcgaagaactgtttgtggtggaaacggat

SEQ ID NO: 188351 - DNA, 518 bp, Zea Mays
gcccaaaagagttcggctctcccgctcaagacttcgttcacgggtcacgggtacggcgggagcctctaacccttgctgttcgctcgctgttcgccccccagccgccaccgccagttcttccattcctccgcgctctttgagccttcgtctcccagtctcctcaactcaggtacgttgtccgcccgccgcacaccctcgccactgttcatcgttgcacgctggtgcttccctcatctccacagaacatctgattcggccagttgagttcctctcggacgctggttgtctccttcgacctccgtttccttgtcatttctgtgcctgacagcaacccgcgctcccgccgcatctattcatggcggagccgacccccaagtcgaagcgcaccaagaaagcgaagaagccctcggcccgggaaggtgatggagaggacatggatacgctcaagtctgacgtcgccacattcgcctcctccctcggcctcctccctggcgctggcgactccaacggcggcttcg

SEQ ID NO: 188352 - DNA, 486 bp, Zea Mays
atgaagagttcgctggatgccctcgtggccgtcattgtggatgtcgcccactatctcttggagaagggcggaggacggcagaatgtatggcccatggcgtcgcacggtgccctctactgatgtcgtcgctgagagcgaccagttctggatcgtttctgtgtgtttggtgcaggttgtcgatgaaggagaaccgaggtgtcgccatggtgaatgccgaagatgccttcatgtcacgacgggagagggcgttggcgacgatgttggtgttgcccgatttgtactcgacctcgaagtcgaatcccagcagcttgcccacccaatgatgttgagggatggttgctatgcattggtcgaggaggaacttgaggctgtagtggtcggtgtggacgcggaaatacctgccccacatgtatggcctccaatggcaacaacctgtacgcggccaatgagttccctctcgtatgccgcaagggaagcatgtcgagg

SEQ ID NO: 188353 - DNA, 369 bp, Zea Mays
gagatctgtggtgaggatttaattaaagcgagatctaaccgtgcccgcacgatgtggatccaacggtcaagactccaagccgcaaggggtatgccatgatctattctacaccgaccatttccagatcaccggtctaagaagcgtctccttccttgagtcacgccgcggcctagcgagcacccggtaggggcgttcaacaccgccggcgcgcccgatcgctgcatctgcgcccacggactcaattgcgcagcccgcaaatggatcgagaacttgactaccctgatttcgaccgccctcttcccccgcgatgatcctgcccccaagcctgatggcacatgctacgcgcggtaagggcggaggttcagaggg

SEQ ID NO: 188354 - DNA, 409 bp, Zea Mays
gccggcaggcctcgcgcagtgcgagggcttgcagtcgctggacctctcgtacaacaacctcaccggccccgtcccgggggatgtgttcgcgctgcagaacctgaccaagctgctgcttctgaacaacgacctctccgggttcataccgccggagatcggcaactgcaccaatctctaccggctccggctcaacgacaaccggctttccgggacgatacctgcggagatcggcaagctgaagaacctcaatttcctcgacctgggcagcaaccgccttgtcgggccgttgccggcggcgctgtccggctgcgacaacctagaattcatggacctgcactcgaatgccctgtctggcgctttgccggacgagctgccccgcagtctacagttcgtcgacatctccgacaac

SEQ ID NO: 188355 - DNA, 654 bp, Zea Mays
ccagacattgtgaccacaagatccacctgaaactaggcactgcaccagtagctgttcgtccatatcgttaccccaattgcaaaaggatgagttagaagctcaatgtgcggatatgcttcgtcgtggtataatccgacacagtacatctgcattctcagccccggtcctcctagtgaagaagcttgacaatacatggcgtttttgcattgattacagagccctcaatgaacacactatcaaggataaatatcctataccagtggttgacgagttgctagatgaactccatggggctcgattctacactaagttggacctccgttcagggtaccatcaggtccatatgcacacaaggatgacattgagaagacatgctttcgtacacaccatggtcattttgaatttttggtcatgccgtttggtcttaccaccagcgatgtttcagagcttgatgaattatgtactgcagcccctgttgcgacgttgcgtgttggttttcttcgatgacatcttgatatacagtccgtcgtggtcaacccaccttcaacatgtcagagcagtgatgactttacttcgcgccaacagtttatttgtcaagaaatctaaatgcagctttggagccacttctattgtatacctgggacatgtcatctc

SEQ ID NO: 188356 - DNA, 334 bp, Zea Mays
agttgtcagccatgattcatgattgttttttgttcacatgtcactttaacagctgtcaactatcatgcccactgcatttagaagtcatcacattttcaaatcatttatggtggatgcactgcatatatcaggccgaatgttgttccttgtaggcacctttgttcttgtggtagcctccccctccccttttttgtgaagtagtagttgtgctgttgtgaatgcgctcataggcaagacctacagccagtcagccgctggcccaggccagagaaggcccagccggcccagctggcacctttttttcatcgaacatgcaggagagttgtgtatcatt

SEQ ID NO: 188357 - DNA, 435 bp, Zea Mays
cacaaacccctcgccccctctgtgtcaaccacacccaagcccatttgaagctgatttctatcctacatggcactagttttgccgtgttagcatccacgtcatccattctgcatcatgggcacacacgttagcaacattcttctctcgtgttctcttcctccccattccaacccttccatatccttctaaactgctgtttggccatgcctagaccacaacaccaggcttcctgctgcccgcagctgtgccgaaaccagtgtccatactctgttgtttttccatcctctagttctcgtctttgctttctgtgttcccttcccttctttgtccacttcagtttatgctagcaccagcaaggtcattgagaaggaattaggaaagcaaccaaatagagtgaagccagagtatgagccctagcagtacaccccattgctg

SEQ ID NO: 188358 - DNA, 936 bp, Zea Mays
gttccattgaatttgatccctctggttgctctgtgaaggatctactatctcggaacgtgatcgtcaggtgcaatagctccgggcccctataccccctgtgcctccctgctgcacacagcttcatcgccagctccactccgtcactttggcatcgccgtcttggtcaccctggccacgagtccctctccaagctcgcatcaatcgttcccatgtgtaataaagatgctagctctcctttatgccatgcttgtcagttgagtcgtcatgttcgccttccgttccgcacgtccacttctcgtgcggttaacaattttgatcttattcactgtgacctgtgcacatctcccgttttaagcgtctcgggcttcaaatattacttagtcgttcttgatgattgctcacattacttatggactttccctttacgactaaagtctgatgcttttccaactctcactcagtttttcgcctatgtgaaaacccagtttggtgtcacgattaaagctgtgcaatgtgacaacgggcgtgagtttgacaactccagctcccgaacgttcttcctcacccacggtgtcctcctccgcatgtcctgcccctacacctcatctcagaatggtaaagctgagcgcatcatccgtactaccaataacaccattcgctctcttctctttcaggccagcatccctccaaccttctgggttgaagcgcttcacacagcaacactacttctcaatattctacccaccaaaacccttcatttttccactcctcatttcgccctcttcaaaactgtaccctcctacgaacatcttcgcgtgttcgggtgcacctgctatcccaacctatctgccaccactacccacaaacttgctccccgttccgctaagtgtgtttttcttggctactcgtcacaccacaaagggtaccgatgcctcg

SEQ ID NO: 188359 - DNA, 1198 bp, Zea Mays
cgaaagcaaaatccgctatccaatggtcatggtggaacggacacaatagcaggattattagcatcactgatggaagttgtgcggacaacagtagcatgcgagtgtgtatatgttcgagcaatggtcatcaaagctttgatatggatgcaaaatccacatgaatcttttgaagagctaaaatctatcattgcatgcgagttgtctgacccagcctggccttcctcgctcctgaatgatgtcctactaaccttacatgctaggttcaaggtattggatcccttttagtgtttatactatatatgtagtgctaaatttgttacattattctcagtacattgttcatttttccattttaatttgttcattatctgcttgtgtctcaaatagtcaaatcatatttgagattgcaaccattgaacatgattagtggcattgagtgtttaatgattaaaagtaacgttgttctttttaaacatgacggtgcctttttatgttgctttttttaatcggaacataggatttatttcttttcagaaatttgtttgtcatttttttctagctccttttcatgcacccattgttttttatggttcatgcacttatccttctgatttttattagcatgtgtccctttatctgatttcatgattgacttattattctgtttgtcttacatgataggcaacccctgatatggctgtgactctgcttgagattgcaagaatttttgccactaaagttcctggaaagattgatgctgatgttctacagttgttatggaaggtagagcgatagacttttttcgtgaagcaatttcaatatcatcggaccatctataattctgttacgcaaagcttcatgtatttgcatctatgcttataaccccagaccccactcatgtgggagccgctggcactaagtctgcatctatgcttataaccattagcacatttgatgttatgttagtttgctgtggttttattttttttttctagaatgatgtgcaaatagtaattagaaaaaaaacaaaatttgcctttccagacatgccttgtaggagcaggaccagatgggaaacatacagccttggaagctgtaactatagttcttgatctgccaccacctcagcctggttcaatgtctggactcacttctgttgatatggtatctgcctctgatccaaaatctgcaatggcac

SEQ ID NO: 188360 - DNA, 312 bp, Zea Mays
catctattcttttatgaggatgatcttcagggagaacaccttaggttcttggtttaccattgaagactgagttgaccgcatacagtttcacatataaagatcaatattttcgccagtttccgtatgagcagtcttctactgttggtaatgatacattgttgatagacagctattgttcatgtcttgtatattagccccttgtttatgccgtacatattcagatattatggtgcaagtggaaagattcatatcagtatttgccatggcatatatatatagctacaaactgttctcagattgcggctgtaactc

SEQ ID NO: 188361 - DNA, 599 bp, Zea Mays
catatttctctggatacaccgtttgaggtgctttattttcgctggagctatgtgcatgcacataataaaagtggacctgtgaaatgtgtttcatggattccaagagtaagttttattattgttggttttaatatgtttccttcgagaagcatttaactaaagctattttttttttttgtgcagaaaccttcaatgttggcagtagctggtaatgacggggtagtcattgtgtgggaactggtggatgctgattttgataaccctcacaatcgaaattacatgaaagaaatcaattacttctaccccggacgtagaagctctgtaggagatgaagttttatgctatgatgtggcttcaatcgaatcaatcccagactttggtagcacctcaagtttcaaaagtgaggacacatctgatgttgatgttgatgatgatcgtgatgaggtggaggatgagcaagacgaggagcaggaccagactgatgctacatcaactgcagtacggttgaaagttcaacatgttctagagaagcaggtggatcttgaatcaacagtatctgaagtgtttaacaatgttcaagatgttttagaaaaattgag

SEQ ID NO: 188362 - DNA, 371 bp, Zea Mays
gtattttcgagaggtttggtcagcaggtaaggaaattctccatcaagcaacacagctatggttgcagtgtatgtggcttggaaggattgagctttcttttcgcatgggattactcaaggttgcactacttctattctacttgcactgcaccaggtgtcaagccgggaactactggtgtggccgtgtggcgtagtttagttataggagagagaagaactgggtttagtgatccttgcaagggaactggccggctatgtggttgcagctgctagcttgtgttgagcacaagatgggtctttgcactagaaagaagaaagctttaaggaattgtcaagttttggagagagactacgactgtgtatatagtacga

SEQ ID NO: 188363 - DNA, 698 bp, Zea Mays
ttctcaaccctcaccaccaccctcgggcagatcgtcgtcgcctccgcaacggtcgtcagaaggctcctcaccttcgcctcagtcttcgtcctctaaccaggcccctcccgcaccgtcaggctggtcgccttcgccgtcgagagaatctcctcctcagtcgtcatctcaatctccgccacctcagagcgatgttgaccagccaaactcccagccttcgaatactccacaaagtccaccaccaccaccatctcctccgtcgtcgtcgccgcccgcgccgccgacgaaccaatcggtagtcataatccccgtccccgtgccgtctaataatagcccgccgggagcgctgccgccgcccgggctcgtgcccaccgcgcctggcgccaccgtgatgtcgagtaccagcgtcccgggttctgctgcgtcgtcgtcatcccaagaagccagtaccggcgcgtccaacggcggtggtgggagcacatcaacaagagtagtaggcagtagccatgttgccgcggccattgccggtgcggcgatcacgggcttgatgtttgctctgctggctgttttcctggtgtctaagaggaggaagaagaaaactggtgggctagtttatcacaacggtacggtaaccacaccatatatatatatatatatatatatgctgagctcagctcatgaatcatgatcatgcatggaaa

SEQ ID NO: 188364 - DNA, 349 bp, Zea Mays
cgcaaatcgaggtgatgagaggccgccattgatgagttcgtggagatgtgaaggaaccactggcgccaatggatttggggcgtgtgcttcgtctcggtatcctggatgcagacggatggtgctggccattgtgtggcggtctggaatggggaatgtcgcggtggggcgcgtggattccacgatggcgtgctgtcaccgtggttgaggaccgcagacacgcgcaggcgctatcagcggggccttcaagaccggctcgggagcttcacctggaatccgggagggcgtccgaggtctcgcctggcgcgtgtggtgcgcggaacagtcggcgatttttcaccggagttgggga

SEQ ID NO: 188365 - DNA, 464 bp, Zea Mays
atatctgaactccatgtaattagcaaactaataagaagaaaggcggctttcgggaagggaacgaaccaatggtgcgaggccggtgttgtagattcctgtaatagcccccgagacacctaccttctttagcaaccagctcgccgcagacgcgcctgggggtctcgtttgggagctaaaacccaagtcccggaaccaatcacaaggacggctactgccgacagagccttctttgcctaaataccactcggcaggtcctagaacccgaagcagtcgacaaagatcaaacttttgcaggtttggagtggttccgcgatccaagaaaaggtttggagcagttccgcgatccaagaaccgggagcaagaaacaagcggagggttctactggtgggatcgaggaggattggaaatttggaactgggagggaggagtcgggtcgggtgggcttcgggcaacaccaatgttgg

SEQ ID NO: 188366 - DNA, 716 bp, Zea Mays
cgcatctttgtattaatagaagaaaagaaaggggggagagaaccccaatacaacacacacaccactagagactaactacggatcaccgactaaaacatggaagaaacacgacccacaccgctgttttaagccaacaactcatcgacttggaggaaggacaaggccttggcaccagtcatggaccagagcaccgcctcttccctagccatcctaagggccatgaccaagctgggattacaaccatcaaaaacacacctattcctatgcttccaaatggtccaagcacctagaatcactaaagaattgaaaccttttctcacaagatccgatgcccgggagctgctagacttccaccacgactcaaaggattcctcatgagctggatacagatcccgcagccccactgaattaagaaaatcaaaccagaactgcttagcaaaaacacacttgaccagcaaatgatttatggtttcagcctcttggtcgcacaaggggcactgctctggtcggtctagccctctttttctgagcctgtcagcagtccagcacctattatgttccacaagccaaataaagatcttgcacttcccaggagcccaagatttccacacccgctctgctggttcgaactgaactgaaccaaggaatagagcattataagcagaactagatgaataatcacctgaagcgctgaatttccataaatgacgatacct

SEQ ID NO: 188367 - DNA, 474 bp, Zea Mays
gcaacaacaggtgagaaccaatgttaatggagggcgacagggtaggtcatcaagaggtgtcttttggttacacatgcaacatggcccacatgtgggctcaccatgcggattagacaaatctcgtcgacgcgggagggagcggtagtgtagactgtagagacgacatggatcggcggtggggcaggttggcgactgtggaggacgccgaagcgcatggttggggcgtgacctggctcggccgccaacatgacagcacaaggacagttcacaactaagcgtggccgcaccacgatagcacggggacgaggcgtggtctgacaacggagaaggccgccgaaggataggaggtagacgatctgctgctatgatccacgctagaacgaagatgagggcgcaaatcaataggatctagcacccaaacagtggcactgcccctgatggagattgatctctctccgagggcttgcaatgcag

SEQ ID NO: 188368 - DNA, 968 bp, Zea Mays
ctccgaggggttggcgactggagcgccctcggaggcagacaacttggtccgggcatccaccggagtagctgtcgggtggcattcagacatgctagcgcgctggagaagatcaacggcgtactgccgctgggagaggaacatcccactgctgtcccgtgtcaccgagatgccgaggaagtggtgaagatccccgaggtccgtcatggcaaattccgacgataggcgggaggtgacgtgctggagaagagccggcgatgatgcagtgatgatgatgtcgtcgacgtagaggagaaggtaggccatggtgtctccattcttgtagatgaacaaggaggcatccgttttggaggtggtgaagccaatactgcgaatgaagctggagaagcgctgattccaagcgcgtggtgcctgcttaagcccatacagggacttctgcaacagatagagttaggtgtagcggggtcgacgaatcctttcggctgctcgcagtagacagtctcctcgaggttgccgtggaggaaggcattcttcacgtcgagctgccggatgggccagtctcgggacacaacaatgctgaggacggtgcggatcgtggccggcttgacgaccgggctgaatgtttcgtcgtagtcgacgccttcctcctgggagaagccacgaacgacccagcgtgccttgtgccgggcgagggagccgtcggagtggagcttgtgtttgaacaaccacttgccagtgacaatgttcgcaccaggcggccggggtacgaggcgccaagtgccgtcgtcgatcaatgccttgtactcgtccgccatcgcagcacgccaatttggatcgaccagggcactgcgatagttcgccgggattggcgaggcgacggaggcggagaagccgaagcgctggacagtgcgaagggagccggtctgtgagcgtgtcacaggccggttcgctgcagtagagaggagccgagc

SEQ ID NO: 188369 - DNA, 360 bp, Zea Mays
aaattgccaccatctagcgaactctagtcctttggtattgacatgcttgtacccctttaatgcccttgtttcaaatacttgcctctaaatttctactacctacttagacatttcagtttatatgttcctgaccttcctgtcttttgagagcctttcctcttctattgttaagtcgctatcttttagtaattcgtactcccttggtcttggtatgctcgcaccttcggaatcttgcatactcttactttttatataaatgctaacctttgtacccccaatgtctgtttaagacatttcagtttacatgctcttgaccacctttgtttcttcatgatccatgagcgatcgttctattcctca

SEQ ID NO: 188370 - DNA, 1252 bp, Zea Mays
gacgagttttatgagttggtgttttgtaaattcttgtccgacacctcctactctgttgctgtacaagccgctgctgctaggctgctcttgagctgtcactctgcctggacggttggcttctcctctatacatttgtgccatgcactctttttgttgtctcctctcaatctattcaaactgtgctaaacttttcgttacgccttccttttccttttcctcagcctccgtatcctcatgtctttgaagactctatcatagataatattaaaaagtgggtaatgaaggatcctgaagcatctaatgaatgtgagtggaagtatctaggaaaaaataaacccacagatgctgagatgctgagaacatatgcgattgggttgcttgctatggcattgtgcaggtactattagtgtcctcattgatttatcatctggtgtgataatgttataattttactaccgaatacatcatgatattcatccaattcttgcacgtttcattttttcacctcagtggtgggcaattggtagaggatgtcttgactttgggggtgccagcaaagctcatgcactttctgcgcataagagtccttggtgatgcctcatcttctcaaagagatgctaatcatccacaagacaccaaatatcctcgaggcagagacgataataggggtaaatcacgtctggcccaagatggttctcggttggatggaacaagggttgggtatggaatattgaccaacccaacagcagagaaggacaatgaacctggtgttgtaatgaggcaagcatatggagaaaggtcattggatggcacttttgcctcatcagataattctgacgtccctgaggttgattggaccaatgataactcttatggcacaattgtttgtgacacaaagtcaaaatatggggaaaagacttctgtgacaagggctcttaaagatgaagagatcagcgaaaatggtgaactgttgaagagaaagctgagtcgagccccctctcgacttagagtgaagggaaaagcaggagacaacttgcctgaatgtgaaatgacacctttatcaccaacctctggattgagaatcggaggtcgggcttccagagacaggaatgtggtgagggttgatgacccaaagaaggcaactgatgtgaacaatagttctgcaggcctcgagttgtttagcgctatttccaaagaagaatatgaagatcgtttgagggattgcattattggcttgaaggatatatctgac

SEQ ID NO: 188371 - DNA, 410 bp, Zea Mays
tgctgccggcggtggtggatctccttgctgaagagccgatggtctgtggagaggatgggagctgggttcctagcacgttggtgttccctgtttctgtggtggtgcttcattctgatgggagttcagcttccggtgtggatcctcctgcgccatccccttcgggctttgtcgacgaagatagtgatcatgagcatcatatggaacggccagggcgccctacgtcttctgttcgggtcccaattcatttgcgtctgggtcagcgcagtcgttctgggctgatggatgatatgtctgttatggctgttcatcaggatttggtggaggggggatcagttgatgctccggctctcccgattgtttcggttgaggagcgggaggcgcctggtcaccctccagatttgggatcagtt

SEQ ID NO: 188372 - DNA, 303 bp, Zea Mays
caacgtttggctgcccggctgcccgctgatttcctttcaacccttctcgagctcaattggagaggacagttttatcgggccttccaattgccagcgagttgccttgtcttaccggaatgaccagccagctagccagccatacgaaatgcattccattgacgggactgccagatcttgtttgcaccccgcgcaattggggaccgctctttgttcgtagcagcgtctgggttttgttcccctgcagttattattattagtacagcgctactcctccgctgaccgctacagaattcgctactgcct

SEQ ID NO: 188373 - DNA, 530 bp, Zea Mays
acaattttactggtccagttacatccttacctcttgctactgaaaagttggggatgcaggggtcctatgcattcttggctgatgggaatcatcttggtggtcagcttcaacctagtctatttgacaagtgcaacagctcaaggggcctcgtcgtggaaatcagtaacaacttgataagtggagctattcccacagacattggctcgctttgcagttctcttcttgttcttggtgttgctggtaatcagctttcaggtatgataccatcaagtatcggggagttaagttaccttatcagcttggatttgagtaggaatcgccttggtggtgtaattcctacttctgtgaagaacttgctgcatttacagcgcctctctttggctcagaaccttctgaatggcacaattccacctgatattaatcagttgcatgctctcaaggttttggacctgtcatcaaacctcctcatggggatgatccctgatgcccttgctgacttgagaaatctcactgctctcctccttgataac

SEQ ID NO: 188374 - DNA, 543 bp, Zea Mays
aatggatcgatgcccacaagcgaatggttcggttaccctcactaccactgactgctgccactgaaatagccaggatgctttcatcgaccccttgctctgctgactctccctcctctgtacccaggttctcctcctcatcggccactgccattgcccacatttcttcgaccaggtgtagtggtacactgttggagcacttatgggtgtgaccccaacgctccccacatttgaagcacaaccccttcgcccgcctgtatgctttcaaggctgtcagcttgttatcctcagctcggttgccactgttaactgaacctcgcctttcttcagaagagttatagaccctggtagcggtcacagccgagggcacaccggaggagtaatgtggcttcatatttggcttcagggttgcaccatgctccatctttcttccatcgcgccttcccatgtgcagcaacacgtcctcctgcaacaaggcgagcgagcaagcagtatcgaggtcgggaggacgttgaatcacaacaacagatttaatttcatctctaa

SEQ ID NO: 188375 - DNA, 429 bp, Zea Mays
tgacgaagacgaagaagaggtggcgtgcggaagccgaagggtgtagaggggtccggtgctgtcacatatgaggagggggcgccgagttgctgagtccttcacagtaagaccagaagagtcaaactcgacagaacaagaattatcaacggtaaaacgacgaatagaaagaagattgtggaccaaagaaggagcgacaagaacatcgggaatgcgaaaagagccgggagggccggcggcacccacagatgtgacaggaagacacgagccatttgccaccatgatggacgaagggagagaggaaggagggcgaacagaggtgagtataccagggtcgggagtggtgtggtaggtagcaccggtgtccgtgatccactcgggacccatcagtagagtcagagtgggagtctggaaggcagccagggcgatcgt

SEQ ID NO: 188376 - DNA, 335 bp, Zea Mays
ttaatgcactctgcacttgtacctcaaaggttagctgttctggaggcctttcaaaggatgtatggtgtacatcttgatcgtgacctggatactctgttacatatgcctaatgatggagacacgtggtctgtgatgcaaagttgggttttgcctacacggtcattcctagaatttgttatgttctcaaggtatgggttttgtttttaggaatcttactgacaatcaagcaagtgttattacatgtataactagataaaatatgtatgcactggtttattatctgatgttatatgcatatatcaaacatactgtgaatgagcacttggatatagctg

SEQ ID NO: 188377 - DNA, 704 bp, Zea Mays
gtggcttcgggagttgggaggcactggcctgtgcaagaagggcttccgagaagaaacggtagaagagaagttggggatacgaatgttttttatcgagtccttgtttatccggtaggagagggattcggagatttcaagaatctggctcttaattttttcttgtaatctctctctttatccctaccgtttggaagacatcgtgattttttaatcgcgattttcagaatccacagggattcaaagttcaaacggggtccaaaccttcccgacttccagtacagtcttcctcagacgaggccgcaagacaggaggagacaacgccgaggcagccagctagggcgcggtcaaccgcaggtacacgcgcttcttccgattggtcgagcctcagaattcccgcctgatcgttctggcctgctaagtttcttggttagaacattttctgtaataagccaataagcaagaaccttttctgcagtaagccaataagcaatgcagtagtgggcgcagctccggaggagtggaatgacggcgccaccgaatgctagcatgggaccgctcagtttgggtggctgcggggctctcctctccactcctcagcctaattcgtggcattgccgcgggttctcgattcctgagaggagcgtctttatgttgccactgcgccggggtttgtcaaggaagaggggctgggttcttgattcaag

SEQ ID NO: 188378 - DNA, 562 bp, Zea Mays
ctcagtttttcgcctatgtgaaaacacagtttggtgtcacgattaaagttgtgcaatgtgacaacgggcgcaagtttgacaactccagctcccgaacattcttcctcacccacggtgtcctcctacgcatgttctgcccctacacctcatctcagaatggtaaagctgagcgcatcatccgtactaccaataacaccattcgctctcttctctttcaggccagcatcccaccaaccttctgggttgaagcactccacacggcaacacttcttctcaacgttctacccaccaagacccttcatttttctactcctcacttcgccctcttcaaaactgtaccctcctatgaacaccttcgcgtgttcggttgcacttgctatcccaacctatctgccaccactagccacaaacttgatccccgttccgctaagtgtgtttttcttggctactcgtcgcatcacaaagggtactggtgtcttgacctcctatccaaccgtgtcatcctttcccatcacgttgttttcgatgagtccacttttccctttgctgaacagcaacccac

SEQ ID NO: 188379 - DNA, 355 bp, Zea Mays
cacacgagtttgcacctctattaagtgcaacatggagtggggttgtattttgagcatttcttatattaacatcgactcctgcttccagtataatctgccaataaaaaggtaacagaaggcaaaatcaagtcatactactatgatatggtgagcagaaacaacacagaaatatggaggaaagaatcaagccaccagatgggatttaccttaacaagctccacgtcattgatcattgctgcagtatgtaatgcagttctacagtgtggatcatcttgtgctgtaggatcagcaccagcagcaagcaatattcttactaactctcgaccctctgcaagtgcaagtaattttactatta

SEQ ID NO: 188380 - DNA, 637 bp, Zea Mays
gaggacaaccacgagggcgttcagaggacgctgcaccgactccgccgagatttccatttccctaacatgaaacaattggtgcaggatttcgttcgggagtgcagcgtttgccagcgttacaagtcggaacacatgaatccggcgggacttctcatacctctgcctgtgccgaacagtgtctggaccgacatagcgctggatttcatcgaggcgctgcccaaagtgcgcggcaagtccgtcattttgacagtggtggaccgtttcagcaagtactgtcactttataccactggcgcacccgtactcggcagagtctgtcgcagaagctttcttcatcaacattgttcgtctgcatggcgtaccacagtcgatggtgtcggatcgcgatccggtcttcacatcaatattctggcgcgagctcatgcgcctgacggggaccaagctccacatgactacagcatttcaccctcagtcgaaaggacaatccgaggcggctaaccgggtcatcattatgtatctccgctgccttacaggggacaggccgcgacaatggctgcgttggcttccgtgggcggagttcatcttcaatacggcgtaccaaacatccctgcacgacacgccattccgtgtcgtctacg

SEQ ID NO: 188381 - DNA, 479 bp, Zea Mays
tgaacgacaagcaggcgctgctgttcaagcacatgtcccggcaggcttcgaacgggacggactcgttggaggacaggtcgaagccgtagtagtcagcgtgaggctgctcaacgaaggtgaactcctttccgtcgtcggtcgtcaagaacatgggcttgcatcctctgttccagttcgtcggatcgaccatctcgtagtccggggggcatctgcatctgaggccacccaggtagtcgcagagcccgttcctcccacacagtccatgcacatagcacatctgtatgacagcctgccccgtgacgcgccacgcccccgtcgacgcgttcaagctgtacatcctgaagttgccgtcgtagccaatcgtgatcctcctcttgacccctggaccagaatccgaagcctctatcctgaacccgtcgctggatacgaaagtacccaggtcgtccaggaccgctaccctggtgctgttgaacctgttg

SEQ ID NO: 188382 - DNA, 698 bp, Zea Mays
gatttgtggtgggtgtgcgtgagtggtggaggcggtaggcagtgcgtgtgctgcggtggcgtggcaatggtgcggcgaggccaggaacaacaccaacacagaggtgattgagagcacgtggtggcggtgcgaagttggcatggcgaagacacgaaacccacacatgggcaatggtggcaatgaggccgtgggtagtgaaagtgagcaggtggcagtggcacaacagcataggggccgcacatgctatggagggcgcaatggctgtgtgatctatagtggagtagcaacatgtggttgcatgggctgtggcgacttggaggctcaagagttgtcatcctcgtcgttgctattatgactgatggtttgccgacgatggtccaactcgactagatgtgaatcattggtttctctgcctcccctctgctatgatcgtgctatcaggtgctctattttggccgacaaagctaggatggttgtggtcagggcgaaatcctagatggcgacaattgtagatgtcgcttcctcttaggagacgtccactctgtcctatatgatagtttcattgtgtgaaaacactgtctatttgtgggccgacaatagcaccaccaattggtgttgcaccttcttgaaggtgttgtcttttgtgtctagcgccccatgattggtggtggcaaccacttgtggcctattagaagttg

SEQ ID NO: 188383 - DNA, 904 bp, Zea Mays
atcatataatacccaagtaatcgaagtagaagaccacactttggagaaacatgcaaaaattgagagtggtggccttttgcagccacatctgtttttcttgacaatacctcaggtatatactctggtctccccactccctggtaccttgtttttgataattggaagtgctatcatgctttgctgattcgctagtattgttaatgaaggttgagggaggagcagatatttgtgctacatttcaatggtctcagaagttactttatgatagcgggcgtttctctgttgacatacctttccgttttccgtactttgtgaatccattaccaaaagtgttcatgaagaaggaaaaaattcagttgactgtgcacagtggtttcagtaaagagattttgctgcaaggaacaagccacccgttgaaggtgatctaattttattaactgtcctgatgtgtgtttggagcattaggaactctacataggtttgatcttccatattttatttttatttcaggaaaagagtaggcaaggagataaattgtttttccatcatgaagccattgttgagaattggtcgatcaaagatttcaatttttcatacaatgtgagcttttctgcaatgatgttccctacaggccgatgctgaactaccttgtgaatctagctaatcatgatattcagctgataaaagtttataatcttgcagaatattcttttctttgtctaatttaaattttatgttgctatgtgtaggtttactcgggtgatttgtctggtggtgtgcttgtgcaaccagcaacattatgtgactatgatgatagagatatgttctgcatttttcttctacctggaagtggcaacagaaaggttagttgctgctacttgcaacattaccttgattgatatcc

SEQ ID NO: 188384 - DNA, 416 bp, Zea Mays
ttcgatactgcaattggctacataaccttccaaatggaataggtaaactgcaatatttgcgatatctggatcttcgaggaaccaaattgcatcaggtcctaccaagtttggtcaacctgaagcagctctccacgctacatggtttcgtagtaaaccgtagacccaagcgtgaggatgatccaactgggtggcctttggaagacctaaaatctctagaagcattgagaagcctgcagattctgaagttggaaagagtctcagatcctttgagggtgcaagaagccatgctggaaacgaagtcacacctcaaggaacttgaactatgttggagcaatgatgatagacagtccgaagtacaagaagaaaatgctggaacacttaagaacgtatctgattccctttctcctccacactgc

SEQ ID NO: 188385 - DNA, 384 bp, Zea Mays
cctttgcaacacagagtgtccttgtatgctgatgatgtgatcatgtttttgcatccaaaagaatctgatattcaactggttctaaaaaatttagagatttttagagaagcttcagggctgaaaaccaacatccaaaaaagcagtgtgtacccaattagatgtggggaagaggaagtggcgacccttcaggaatgtctcccttgtgagatctcttctttcccctgtaaataccttggcctgcctctgtctttgagcaagctttccagaaatcaaactcaatacataatcgacaatatttctgaccagctccctgggtggaaagctgacttgatgactagagctggaagaaaagtgcaagttcaatatgttatgacaggaatgatc

SEQ ID NO: 188386 - DNA, 546 bp, Zea Mays
caatttcacatccttcgaaaaggttggattcaatatagttgctgtggcattttttcccttctttgatttcacatccttcagtgagtcccacctactatgaaccaccatctttcttaactggtccttcttctcttgtatgctgtccaaagttagatagtttgaagcaaacctagtcactcctggccttactatctctttcccctcagtgaagtatctcatgcactctagtgttcttgtgtgcccatagacaaatatggtgaatgcctttgcttggtcaatcaccttcttgaactgaggcatgttgccaattccttggagcatcaagttaattgtgtgagttgcacaagaggtccaaaagatatgtggtctcttcacatgcagtagcttctttgctcccatgttgttagaagcattgtcagtcacaacttgcaccacatcatctggaccaatgtcttcgattgctttgtccactagttcaaagatcacttcacttgtgtgtgacacatctgacatctcttttgaggaaataaaactagttccatcagc

SEQ ID NO: 188387 - DNA, 293 bp, Zea Mays
acgacgatgtactctgtaaaatggaaatatgtcatcaataaaaaaagggggcttcaaagatactcagtttgttcatgattaacttgcattcttacttaactcgaggtgaccactatgccctgctaacggagcaatcggcttaagtcggcaacgacttaaaccggtgcaacatgctcacgcttacttaactcggggtgaccactatgccctgctaacggagcaatcggcttaagtcggcaacgacttaaaccggtgcaacatgctcacgcttacttaactcggggtgaccacta

SEQ ID NO: 188388 - DNA, 486 bp, Zea Mays
ggagagcagcaagttgttagaatctaagaaggaagatgtagttaaacttgttacagacaaggaaacgaatgacaacataattttgcaactcaggcaagaacttgaggcaacaaaaaagttgcatgaggcagagactcagcaattagagaccaaagctgccaaagtaaataaggagtttgaacagaggataaaagaaatagaactcatgttagaagattctacaaagaggagaagagaacttgaggaatctactgaatctagaatccaattttggaagcagaaggaaatagtggtaaacaaatttgtgggtttgcaagtaaagaatgctcaggtattggtcaacccactctgtcccctggccttttttttatctctacggtgaatatttgtgaactcaagtgtatagtgctctttttcttcaggaattgaggctctcttctgtttcagttagacttgaaatacaaaattgtcaaaaaagatggtttg

SEQ ID NO: 188389 - DNA, 621 bp, Zea Mays
gaaaaattgaaaatcaaggactggaggtactcattaccagttttgacactttcagaattcatgataaggttttatgtggtatctcgtgggaacttgtggttgttgatgaggcacatcgtctcaagaatgaaaagtccaagttatatacagcatgcttggggataacaactcaaaagcggtttggtctcacggggaccataatgcagaataagatcatggaattatttaatctatttgactgggtcgtgcctggctgcttaggggaccgagaacactttcgagcttattatgatgagcctctaaaacagggtcagaggctaagtgctcctgagagatttgttcaagttgctgatgcgcgcaagaagcaccttgtttccattcttagggaattcttattgagaaggacaaaagaggagacaattggacatcttatgcttgggaaggaggataatattgttttctgcaaaatgagtgacgttcaaaaacgtgtttatagaagaatgctgcaacaacctgatatacaaatccttattaataaggatgtccgctgtagctgtggaagtcctttacctcaggttgaatgttgcaagagaactgaaccagatggtgttatatggtctt

SEQ ID NO: 188390 - DNA, 437 bp, Zea Mays
gcaccctggtgtcgcccggctcataggatctgatcgagggtgggtcgcgcccgtacaccacgcggaacggagtgtcgcgcagggaggactggaacggtgtgttgaagaggtactcagcccaaggtagccacctgacccattggcgtggtcgatcccccgtcaaacaccgtaggtacatgacgatgacgcggttggccgactcggactggccgtcagactgagggtggaacgccgtcgtcatgtgtagctttgtacccatcaggcgcatgagttcgcgccaaaatgcggaggtgaagaccgtgtcccgatcagagacgatggactgagggacaccatgtagacgaacgatgtcggtgaagaaagcctgggcgacggattcagcggagtacgggtgtgccaggggaatgaagtggcagtacttgctgaaccgatccacc

SEQ ID NO: 188391 - DNA, 614 bp, Zea Mays
tctaagcttgaagtcttccagctgctcccaagaagtatccgtctctgctcggcctgtccacttgatcagaacttcccacacccccaattcagccttgcatggaggactttttctggtgtagggatgactctgccgatgaggagctcgggcagtggtataacttgggttggagcctcccctatgaatttcttaagtagagaaatgtggaacacatcatgtattctggccctaggaggaagctggagcttgtaagagacagtgcccaccctcgatagcacttgataaggcccaaagaactttgagccaagcttgtgaggtgtagcagaagtgacaccaactgttgtgcgctgctgtaagcgtagccatacccaatcgccctcatggaactccacttcacgtcggtgcttgtcctggtagcttttcattgtaacctgtgacatcaatcggtcacgaatatccgccaagaattcatcgcgagcatgtagttgtttgtcaatatcagccacctgtgatgttcctggatggtagggcagaagagcaggaggttctcggccatataccaccttgaatggagagcatcgaagagcagtttggaaggaagtgttgtagcagaa

SEQ ID NO: 188392 - DNA, 508 bp, Zea Mays
atttttccccttcaaaactttctttgttccactgatggcatgtacttgaaataaaaacaaaggcggaccaaggtggttgtttaacttccaatagtctgtccgtgatgtagcatcatagtacagttgtcacgtccctgaggatgtagctgtgggagctcgctggccaccggtttcctgcccgtggtggatggtggcaaggtagatagcagggagatgagataacagagaaaggaagtgaaaatgggattggctgtaattgcttgtttattgctgaaccagacattcctgattgatcccaaatacccctccttttgcctaattagcccctgttacgagcgcctataaatgttcccgaccgtaacaatagctcaaggttacacctggaaactggggagataaggaagatgtaattcagtctgagttttataatatgttatttaggtgatcattaagatagatggaaatcacaacttgcttgtcagatcatttcaaattcaaatgtgcattt

SEQ ID NO: 188393 - DNA, 312 bp, Zea Mays
gaaccagtggaggtaacgggaatggagttcctgttaccgacaataattgaagaaggaaagggatgatgtgaaggaaataaatgggagagagtaccagcatcagaggacatatgtgtggtggcgccggagtcaaagaaccactcgttttggcgtggtggttgaagtatcatggtgctgaagttggagaggagcgcctgctgatcccaggatagagtggtggtagtcggaaatcctagcggcggtggtgtagaccatggttgttgtggcgcccctggctagggaccttcaatgccagcgatcaaggattgagac

SEQ ID NO: 188394 - DNA, 475 bp, Zea Mays
ttcataacaaacgcgtaatccttggtgatgagatgggtcttggtaagagatgcttgtattgtaaggacaaagttttttgttcaaatgttgttttgggatttgagaaaatgatgacaattgcagggaaaacgatacaaagtattgcttttcttgcctcactctttgaagacaagtttggtccgcatctggtcgttgctcccctctcaaccctgcggaattgggagcgtgaatttgcaacttgggcacctcaaatgaatgttgtatgtggatcaaactattttgagaccaaaattgtgtgtaatttggacagacttatatccccttaatactttttccttattgtggacaggtaatgtattttggagctgctgcttctcgtgacattattaggaagtacgagttttactacccaaaagagaaactgaagaagctgaagaaaaagaaatcttctccatctaatgaagataagaagcag

SEQ ID NO: 188395 - DNA, 355 bp, Zea Mays
caaggaggtcattgcttcagaagggcaagaaacgtgagaatttgaccaaaaagttgtatggaacatctacaggaagaagaagaagcgattggcatcgtgattgggaagttgaattctggaaataccgttgctccccaggaataaatcctgaaaagattgagacattgcaatcagtacttcagctactaaagaaatcctctgaaatggacaaggaaagtgctaaggggaaaagggaagagaacaacaacagttccattttgtctaggttgtatttagctgatgcatcagttgttcccaggaaggatgatattaggcctctctctgcccttgcaggatgtgcgccattagaaaaaag

SEQ ID NO: 188396 - DNA, 391 bp, Zea Mays
tgggagcccatccaaatctggcccaacaacagggagcagccagcagggaagggaagagagaagaaggcatagggaggaccaggtttcagatgacctgttgggtttaaatggtatgacatgatgttgtaacggcacaaagatggggagcaaatcaaatcatgagagcctagcccaatctcgcccaacaacctgaagcagtcagtagggaagagaagttaacattggggagcacaaggtctgctctgagctgttggatttgaattgtatggcatagtactgtaacagcacaaagataaggaacaaaccagtgataaaatagtaatccagatcagacctggtgcagtgttgagagctgtctcaccgagtcaccaagttgtgggttcgaagcagc

SEQ ID NO: 188397 - DNA, 458 bp, Zea Mays
atgagcatgttaaggagatatgccagcaggctgagagcgccgtcgcagggaggtgtggtggctatggagtttgcagccagtatcagttcggtgagctcatgagctcgtgttggcaacctgttacgcggcaggatccttgttccgagtccgagtcggattctagtgaaagctcttcggatgcgtcgatcagtgacatcataccgatgctcgacgagctgaacccgcctgtggacttgggtgctggccacccttcctcagccttcagagagaagttgagcgccggctcatcggatgatgaagatggctcggaggaggacaataaccttagctcagatgaagatggagaagaggaagaggaggaggaagagaaaggtgatggaaacaactggaagggctctgtggatccaaactctctggaagctgaagaaaagaacgggagctcggagagtctgatggcg

SEQ ID NO: 188398 - DNA, 638 bp, Zea Mays
tggccgtgaacaagctgccaataaaccacttctaaagactgtatttcaggtaccgaggttaaatctgtctttcagggataccttatgcacatatgatatacatatagtcctgatcatctgatgtatagtaacacttggacatctgagtatgtaggtcatgatgcgtttgtttagtcctcggaagacaacactactatttgttatacgtgataaaaccagggtttgcctctcctttattatattgcattcttgaatatttgttccattcacttaagcaaatcttagacacgtcattgttttcatgtagactccacttgaacatctagaaccagttctaagggaggatattcaaaaggtgctggcattctttctttttctttcatattttcttactagctttagcttgctggcttcctccagttctaatattttcatagatttgatcagatatggaattctgttgccaagccagaggcacacaaagacacccctatcagtgaatttttcaatgtaagctatatatttttgttgtacaaacttttaaaagaatatcatgattttactagaacatcatttgtcaatatgaaggtacaagttactgcattgtccagttttgaagaaaaagaggagcagtttag

SEQ ID NO: 188399 - DNA, 532 bp, Zea Mays
ttctgttctaagacttcttcagacgccaattccagtaagtaacataattctattagttctgtacattctgtacatgtcatggttgttaacaattctggtctgaaaacagggagtgacagatccaatgctttatattgggatgctcttcagcatgtttgcgtggcacgtggaagaccattacttgtacaggtaaaaatcttgagtcttatgagaatggttagctacttatctttttaaggttgttgatgctgattttgataatttgaccagcatcaattaccatcactgtggggcatttaaaacatggtatgggataccaggcgatgcggctcctgggtttgaaagggttgctagccagtacgtatataacaaggacattttgattggtgatggagaggatgcagcatttgatgtcctactagggaaaacaacaatgttccctccaaatgtcttgctagatcacaatgttcctgtctataaagctgtacaaagacctggagaatttgttattacttttcctcgttcttaccat

SEQ ID NO: 188400 - DNA, 375 bp, Zea Mays
atcattgttagtacaagtatcagcaacaggatcatcatcaagactggccgtgggagtagagcgaggacgacgaatgtaagtctgagtgacaagtggtttggaagagtaagactgagatggtgtggaagtggaaggtggtgtgatgggaataagaacatctggggtagaaacagtagatggtggtactgatgaagtttgagaaatgggaggaaggctcatgaaggaggtagactctgtggaataaaaagaagaatgggtggaagagttgtaaaagaagggtcagttttcattaaagctcacatctcgagaaatacgcatgcgacaagaagatgaatcataacatcgataacctttatgttcagggctgtatccaag

SEQ ID NO: 188401 - DNA, 1606 bp, Zea Mays
gccggctggaggtgcccccgaatatagacggggacctagcgcatgtgtggacaactctggcgaggttgcaagatatgctggttagcctggagatccgtccggagctgcaagaatggatgggggatatcaagcaggtcgcgtacgatgttgaggatctggtcgatgaattggaagaccacaatagcatggaatctcagatgagcggctgcgttgcagttggagaggtttggttcatagatccttaaaattattgccgatgcaagtccttcttccattattttagaattgatatttatataaaatttttagtgcgaattacttgagcttgtttgattgtcgagcccctccaatccctccattttccttgctgccacaagcccttatcgtacctccctccttccgtcgagccgcacaacagtggtctaataaaattagtttgagaagatatgagttatgcaaatatttatgacaaaagagtagtatctgcacatgaatatcgttttcacgtaatcgctatgtctaacatttcatcaaataatttatatgctatcgtaaccaacggacattgtaatagtaaatactacagcctaaggttggcaagttttaaccttttcgggccctacattttgaacctagttttatgattgaatatccgttaaaaacactgactattgcaaatgcgtgcaaagttggtgtagatgttttaaagttttcttaaaatttattactgacacataagtcgatgcataatgcaaaaatgaatctcaaggggttatctgtcttcctcatctccagaacctttcttttccctctgtcctgcctctcaataaactccgtggagctccagcgggtaaggggacttgctcctgcagccccgagtcggatctgcccctgctgatccgaagggccaccttctctacctacacaaaataatatcaaaagaacacttaattcgaaaagtatgagaaaactatctttttttctatctatttctgtagttaattactaaacctttgtctaaacgaggattaaccttcaagatatgatctgaatgtaaactaatctaggaggttgtggacctaatccgctctgcccatgaaatcctaaatgtgtagtaaacatgttaactattaaacttattgtgaaactatcattcaaatttgaatgtaggcagtatttttttcatacttcatttagcagttctttgtgaaagatatgctcatcatgacacataactagaagctgatcgtctttgtggtcattttaaataaaattacaggaaacaagatggtgctgttcatgttcgtttctcatgcatagtacaagagcggacagaatgaagacaatcaaaagaaggttggactttttagtaaaagattctgtcatcttcagtttgatgcagtacccttttcctgatgttgagagatttgataatgaagcatttgatagagctgcagtcgttggaagagataatgacaaagcaaagataaaggacatgatcttgcaaagtaatgcacaaaagttctcaatcattcccattcttggcctcgtggggttggggaaaacaactcttgctagattaattttccttgaccagggagaaggt

SEQ ID NO: 188402 - DNA, 285 bp, Zea Mays
cgggaccagaggacgttcttgccctcctcacggccgtggtgccggacgtggaggagcacgagggtgtcgcccctgcggaccaggttgtcgatcgcccaacgcagcgccttcttgctgctcggcgagaagtccatcgccacgccgatcttccgctccgccatgctgctgccctgccgctccgcagtaatataatcgcggtgtccgctttctttcgctccggctagctattgctttggcatcgatctcccgtgacaagcctgtggtttcgtggggtgcgtgcgtgcg

SEQ ID NO: 188403 - DNA, 448 bp, Zea Mays
caagccacagtatggatattgctttctcttctctgaccgcaacccgtcgaccagccatcaatcttgagtgctcagactgcatccatctgtttcttcggctcgattctggatcaccccatcgtaaatcctctctgtgattccgatgatgaatcaccaaatcctctgagtccatgtcttgagccatttgctccaatctcagttacacaaccaccttccccgtctgatccagttgctgtaccaactggattctctcctccacggccttctaggctacgatcacggccatgtccgcttgccctaacagctgctgctggatgtcttccatgtctgcaaccttctctgtcaatacctccaacttcgccatcaacttctcccatcaatcaccttcctccttcgacttgcccgccatcacctccagtaggaactgggtctgcaccgatggtttcgc

SEQ ID NO: 188404 - DNA, 391 bp, Zea Mays
ggaccaggatggccacttgagatttatgacaaattctagagctgtagacatttccgtaagtgcttcaataggaaaggagatagatcattgtggaaagaatgataagatagatgtcctcagccctctcgagagaagggttatgaactggcactttgcacatttagagtatggttgtgctgcaacgctgaaatctgtatcccttccatactggaaccaggacgatgtatacggaggattcggaggtgctcattgcatgatcaaaggtggctatgacactgttctacggagccttgctaaaggacttgatattaggttaaatcatgttgtcactgaagtactgtatggatctgaggagttaggtgatagctgtaaggatgggaaatatgtcaag

SEQ ID NO: 188405 - DNA, 712 bp, Zea Mays
atcgggtggtcctacgccgtcttctggaaggccatcggtgctgcagaccccgtgtaagctgccgcctccactgtttcctcagattttctttggtttttttgtgttcgagctcgtcctcccgctgaatcttacaaaaaatctaagacttctgccattgtgctcatttttcttcgctggtatcctgctcgttctcgtaacaaaagttattttttggtctttgtgctcattcaaccattctttttccaaccgtcaagttttcgttgctaatctgttctgaaaattcgctcgaagtttcgaagatgggaatatctgagctaaaaaagccgaacaatttcctccaaatttcatactcctcatcgcctcatggttatggttcctctgtctcatttccccccctggaaatgcacaggcatttggtgcaggaggacggctactgtggccacacgtcatgtcctgtcggatctgagccttccgaatctctgcccagcgacgccgggtgctctgttcctgctgctaacaccatctgctcgcttgttcacagcgttatggcgtcgcaggtccatgtcgtcggacaagggtaagcaaaagcagccgcagcgatttcttggtttggccatcgtctctcttgtttagaacgcgatgcgcctgtgttttttgttttggcaggaccgtaggccgtgctgcgttcagtggcaaccaccaatggatcgtc

SEQ ID NO: 188406 - DNA, 434 bp, Zea Mays
gctgggactcagattcatggtgctcctaatgcacggaagcaaagtctccaggctgcaaagtctgcgaactcaggccatgggggaaaaatcatacaaaatcctcatagccacagaacatcactaaatggagatgagatgtcatgtaagtagaaatggtgcaggatagcagcctgttagcgttcattttgttcaatggagagccttctcacgcccaaacctagggaacttctctcgatgtttcaacatgtatacgttgtgaattcatggtgtgatacattaggtacataagttttcattgaccttctgttgtgttttgtttactgcttgtttcaatcagacttgatttttctatctgaaacaagaattctggacaagaaaacgttctttaagtctgttatttggtatttacaggtataggtacaatatttctgaca

SEQ ID NO: 188407 - DNA, 414 bp, Zea Mays
ctttctatcctcgtccccatctgatgcttcttcagcatagttggttgaccccacctcctttctgttctttcctgatgcccctgcttctattgtactggtttcacactcgttgtagtcttcttctgtatctttttggagctttcttctttgcttcctgattattccatgaagccttccgtaacacaagtttacacacactacacgatgattccttttgatgcgccatcttcgtctgatgagctatcttattctgttgatccatcttctcctgatgtgttggcgtctcctagtgcgccttctattcctattgacttgtcctctcgcattgagccggtttcctatcctgtttctacattagagccgtctcttagatgtagccagtgtcttcgtcagcctattgatcggtactctcct

SEQ ID NO: 188408 - DNA, 398 bp, Zea Mays
caacgactggtgaaggcgcgaggaagagaactcgccgtggacagaggaagaggaggtcgggcgctggggagcagttgcctcctccgcctgccttcggcctggataagccggtgagctttgtcgggcgctgtggaagaattgatcgggctgaggaggaactccgtcgtgcactgatcgtcagtgttgtaggcagggaggattctggctgcgccgtggaggtgcgtgacgcgatcgcctcgaggttttgccttgaagcagggtcgctccgcatacgtcgtgctgcgcctaattctttcctagtcttcttcccctcggttgccgtggctgatcgggtgattggggaggggcaatctcttcatgtccctccgctcaggttgcatattcgaaggtggtctcgc

SEQ ID NO: 188409 - DNA, 307 bp, Zea Mays
gcaccaccgcgctagtcatccacttcgtcgtcccccagcacacacacacccttcctccgctgcctcagctatggcagcgccgagctggatccggctccggcaggcgcgtgcaaccctcctcatcctgctgctcctcgccctcaacatctccctttcctccgccgccaacttcgagggcttcgactccgacgaccttccctccgcggccggtggcctcgatgctgacgatgacgaggaaggtctcgacggcgtcgacctcccgccccctccgcccatctccctctccacctctgcgccatcacctccc

SEQ ID NO: 188410 - DNA, 324 bp, Zea Mays
attctggagtcaaacattttacattgcatgcatactcaactaaaaagtctttatttaaaaagacatgcagagttcagaaagatttctgctttatagcctctacccttgacgaggccattttgtgggtgacatgctttgctgaacaaagtatatatgttaacttactacctcgccttggagcatctagtatcaatcaagactcagaaaatcccctcagtgagtctttatttgaccagccaccgattaaatgcaaatctccgcaaagagtacttgttatattgaaccctcgatctggacatggtagatcaagtaaagttttccatg

SEQ ID NO: 188411 - DNA, 300 bp, Zea Mays
cttgcacatttgtcattgtcgcgtatatatatgtatgtgaatatgttgtatgcgaattaaaattcatggaggagatagatgtctagatatgttctatttatgcgaaatgcaatgtactggttaggcgaagaatatggtggtagacgaatatgcgatgtatagtcaagcaacgattgaagtgcaactcatgcgtcatgtgattaaaaagtagaacatatatgcgttgtatggccgtgattgaattgtagtgcgaaggataggttttactattttaaacggttagtcggcagactcgatcag

SEQ ID NO: 188412 - DNA, 629 bp, Zea Mays
catctcctcgaacaggagaaggccgccgccctcgagtagaaggctagcgccgcttgacatgatttgttcctacaacaccccacgatcgcagcttacggggctgccgtcattgccaacctctacgtctaggcagctactgtttccaacgttcgagtgttggtgatggttgtccccgtgtcctcctttgacaattatgccggttggcttgattaggtgttgcttgctctcaagtgatacgcctttgtcaaccacatcttgtttgacccttcgttggacaccggtttgtgctgggatcgaatggacatcatctgttggatctccgacaccatctctctaggttgtgtcaggtggctagggagcgcaatggcacgacatgccatctttggctcactctcaagaatcagtttcttgggaatcgtgagatcgacaccctctagctcgacactaacttccacaccttcatccagggcgacctactcgtgggtgactactgttgcaagatgaagatgtttgactttcttgccgacttgggcgcccccgtcaacaaatggatcctcatcctcaatattctttgaggcctaaacaagaagtttgagtgcattggggccatcatccgacgctactccccc

SEQ ID NO: 188413 - DNA, 583 bp, Zea Mays
agtatgtgaagcaagtctacacagcaactgatgatcttctgctgaagaaacagttctcttatctcattgcgcgccatgtaagcagacaccccattttcatttacatatgtatctgctttgactgatactttgcattcattcatgcacacagtcctgagatacatcttatactttatttgctctcgccctcaccataaagttctttccccttgtctgaacaattgtctgttttcttaagggtttggctatggagattgatgacgagatctctactgatgataatgataaggaggctttacaagaaatagtaaataatactaagttgagtgagggatatcttactcttgctcgcgatattgaggtcatggagcctaaatccccagaggatatatacaaggtgatgtatattttactgcttatcatatttttaatagcatgattaaatcctctataataattatgatcatgttttacaatatgtaggtccatttgattgatggccgtggtgccagctccagtcttgattccgcaagacagaatttagctgcaacatttgtaaatgcatttgtgaatgctgggtttg

SEQ ID NO: 188414 - DNA, 500 bp, Zea Mays
cacacctccgcgtcgctagcctgcaacgggcacggcaggcagtcgtctaatcaggttcagaacaagatccacgtcgtgagggaaccaggatcgtgcatgtgtaatcgtacattgatttgggtggcggtgctttgaataatgctgagggctcatatggattggcacggttgctcagatgtgcgggaaatgaggccgattgagcaagtgggtgcgcacattgctatgctgcccccgtttgacaacatgtgctaggcttggcattaccgataagcgcagtgttaaaatagtgccagaagccagtagcaatagccatcacgctgacagctgctggttaagcttccttagtatacacatcaccttttgattgaaggtgtcatttgttctctcgggtcaagaaggatgcttatttatagtgccagtacgtgttggagcaagtgactctgttgtgaaactctaaaacgtccagtgcaggtgacacttgggatttgactaagttcagt

SEQ ID NO: 188415 - DNA, 352 bp, Zea Mays
cgtgagaccactaaatttgctgttgtccagctcatcccatcgcaggaccaacagataaagcctcccagctcactcgtccccaaaacagtccacacttgattttcttttcagtagagctgaggagaatctagatccttcactgtgtacctcgtccataattccctttacacacacaagtgagatcagcagggagaggatcttcttcagttactcaaacccaacactgaatcagctttatcaaccatttctgccctattgcacagctctttgtttgatcccctttatctcacaaattcacttagcaacaaactcatcatccttaactaaatttagtcaccaactacagccctac

SEQ ID NO: 188416 - DNA, 337 bp, Zea Mays
ggttattctaaatggctgccccgggaaaagaattcagcatagaaggggactaagacagggagatcccctatccccaatgcttttcattcttgtcatggatgttctaggtgtccttttctccagggctgaggaggctggtttacttcaacagctttacttggggaaaaatcttcacagaatttcaatttatgcagatgatgtagtcttgttcctgcaccccactcagtcggatatctccattactctggatattcttgaactctttggagatgcctctgggcttcataacaatactcataaatccaatatttaccctataaggtgctctgaggagact

SEQ ID NO: 188417 - DNA, 2200 bp, Zea Mays
ctgaagtcagccttggagaaagacaaaaatgcccttgattcagatcgtctccagaattacactggtatcttccttctcattgggatcttgttaggtttaagagttccttcattagcattttctgaacttctgcttctggttcaagggaatgcttctcagcttctatgataaactgtcgttttctggaaatgtcatttaactgtgtaggttgtggtaccagatgaatgaacagttacaagttgtgcttaactggatgttatctgatcctctcagtctgagtacccttttcatccctttattcttctgttgatagtgaaagggcctttaactgagttggtttctgttgataataataagctactcattttctaattttcttgctgtgcttctaattgagaaataattacttgcatctctgctatggatcctcataaaaactgctaatttggaaggacatttgcaaaatgtagggccccagctccgccaacttctgaactggccacgaccactgccaattgaggaggaaagagtacgccttctccacgaggtaaaactctgtctgtaattgctccgttgaacatctcaggctctgaactttgataatacacaagttatgtggtaccatgagcttttacactgcaacccagtttgttttgactaaatttagttgtctgcttgatttctagaattatctttgttggtaggatttagtttttttctccactgtgctttactttttccagtagaactgtcttacgattaacatatttccaaccagttttttctccaccatgctttactttttattcctttccaacattactttgttttgaatcatttttttcattgtcatggcacctgtgtcaaggttgggcaggaacttaaaagaagctttggaggtcaggctgctaatctagtgaagtctgctggaaactctgctgcgactcttattgaactgattactcgacattttcctggtaaatccacttggtattatgtttatcgtctttggtcaaaagtaggcaaagtccagtttgtcattgtattgcacaaataagttcatcagctgatagtctccttttgtcccctttctgcccatatgctatagcttgctatctgatattagtttcctgtattgggaagcacagcggtgttataaattattggtccaaaaaaatatttcgttcatttgtcaaatggttatggtggtccctgttggctgtaggcacctacagtgaaagtgaaactggaatggcccatccacccactactactgtttgtctgcatatggatttatgttctgcctgctactttggatctgagagtcaggaaacagtgatgattgatgaactggtgcctcatctaggcatatgaacttcgtatgagctgggccattcaaaaccagatgattgtgaatatttgatgcttacacttacacccttacattttttcatttctcgtgcaaaacgttagtggttttcattttttagcagttggccaagaaatctgttcacatgatttcacttgaagttaacatttattctcggtgttggtgctttcgttggatctccattgatttgagacattgaacatggagtttatttcctcaaagaagaacatgaaactgttcccgtagtgtttaactgattatacttgttcgacaaatatgtccagacatgagctaatcatctgaaattccagtgatttaggagtaattgatttcaggcttccagcacattattctatcatatatggacatatttgattgcacagataggttcactgacaaacatgtacaaatcttaactattcaaccggttagtctgaattcagaaacaaggaaggatgctagttttacccctgatctggccatagccaacttcagaatatttcacaattcgttcttcgatcattgaatttaaattgtaccttgcgctcttgcagggaattttagcatgtattgaatcttttgttaataggatagcgttgtgcaacttgatggtaccttttgctaacgttctatgaacacgtacatctgcatgcattcaaaaccaggttatattttttcttgttttgtactgtcctgagtcatgacatgactcatgaccaagtgtacatccatccaccaaatagtattttaagtttccattttggcaggtttccgggaccattcactctacaaggggcaccaggttttcct

SEQ ID NO: 188418 - DNA, 1102 bp, Zea Mays
caggaatcaatgagaagcaaagtggaaaaccaccattaccaattaatgcagtagcagagcttcgaaaaggttcttactatgcttcgttggaacttgttcaggctttatgtgatacatcgtatggcctggtagacatatttcctattgaggatcgtaagattgccctccgggaggtaggtcaaacacattaccatgtaacttcatggctattcatttcacaacccttcagtcatcctgtgccaatcattgcactctctttgttcttttcacattttaacttgtaccctgcactgcaatgatatcttcttttgtgtggcagtctcttacagagatcaatagccagattgcttctgctgaaaaaaacggaggtgatttctgctgtcatattcaggatatctcctgaacttttgttctatatatagttttgttaagccttttgatatttgcattgctggtagtattacattagcatcttccattggtagttagaggatgtacatttatattttttgccttgtccatttgtgtctgaggtttgtattatggaaaatgtttttgatgagcaatctttaaaaaacagtttcagtcatctgcatagattacttgaatagatttttgatagaacttgttctgtcatatttttcgttcatcagttgccatcaccattgtaaggactggagttagtttctttgtttctgctgaactgagcacctaggtaatttacagactgtggtgtactgaattaaatgcataaggcatcagagcaatatgcctagccagtgtttgtgttaaagaagagcactctcttcttgacttgaagctctgaaccaatgtgtttttaagtttatttacataccatattaccatagcattgagttaatgctccattaatatctacttattgcaaagcaccagctagaataacatcataatattttctttattcttctatggctaggagtatgctttccgatgggaaagggcatatatcgagtggttcatatacctgaagacgagtctgttcttctgaattctagggagaaagctccttaccttatatgtgttgaagttttaaaagcagaagctcctaggtatgctggtt

SEQ ID NO: 188419 - DNA, 495 bp, Zea Mays
cttaaggctagcggtctttaaactatatatgatcagctgcctgagtttagttctcatttatttcttttacttacatgatgatttgactattttcttatttttttccttgcaggtatattgtgcctgccaagtctgcagtcaaaaacgtgtcaccagctggagagggctcagtaaatatttaccccataatgctaagagtttcagccagcagagatacatatacactaaccgtgaagatcggcaaaaaggtgcacacaaagtacttgtattcttgtagtttgcaagagttctctctttttttttaaagaaagtttgtttacttaatgatcttaaccattcccttttaagcaatgtatcttaactttgtgttttcccctcattttgatacactcaggacaactcaactgagaactttaagagagcatgcaagatcctgactgcagactctgagccggtattcctatgagaattcttttgcccacttactagtaatgg

SEQ ID NO: 188420 - DNA, 717 bp, Zea Mays
gccagccagcagctaaaaacctcctcattctcatccacttcctcccgcgcaaccgctcttccccaacttcgccgccgccatgggctcctcctacgacccctacccgtccccggccgccgacgacctcttcctctacctctccgacctcggccccgcctcgccctccgcgtacctcgacctcccgcccaccccgcagcctcagccgtacccgcagtcccagcagcagcagcaggggagcaaaggccccacgcaggacatgttgctcccctacatctccagcatgctcatggaggacgacatcgacgacaccttcttctacgactacccggacaaccccgcgctcctccaggcgcagcagtccttccttgacatcctctccgacgacgcctcgtccccgaccaccaccactggcaccaccaacagcagcgccagcgtcaaccactcctcctccgacgcgtccgccagcgcgccgctcaccccagccgcggtcgactcctactccccggcccccgccgtccagttcgacggcttcgacctcgaccccgcggccttcttcagcaacggggccaactccgacctcatgagctccgccttcctcaagggcatggaggaggccaacaagttcctgccctcagaggacaagctcgtcatcgacctcgatccgccagacgaccccaagcggtttgtcctccccacccgcgccgcagaaaacctcgc

SEQ ID NO: 188421 - DNA, 586 bp, Zea Mays
cccattcaggtccgtgtacacgagtattagctcggcgagtacgtcgaccacgcccgagcaggtgctggccagcatcttgtggctgtagatcctcctgtgacacctcgggtaatactgctgtgttgacattccctgcccctttgaagcctgcttgcccccaagcaggagcaccagggaaacattgtttgagagcttcgcgatcttcccaggtagccagctctgacggtagaccagaccactccacaaggacctgttgaaccaatctattgcccttggtgacacctcgagtctgcaggatgtttaatggaacactgagctcaagaacagacgatggcagggtaggtgaaacagtgcctttgaacccggtagctagcttgagttgagaaacatgtatgacgagatgaatacggctggacgtcggaaggtccaggcgatatgcgacagctcccactttggataggacgcggtatggtccaaattacctgaagttcagcttctgatgggcacgaggtagtatcgaggattgagcatacggttgaagcttcatatagacccaatcaccaattgcaaacaccctttctgagcg

SEQ ID NO: 188422 - DNA, 653 bp, Zea Mays
caatacttcaactccctcccttactgcaccttcttccattattgtcggtgacggctcgcttcttcctgtcatttccactggctccactactttaaatggttctttacatctcaacaatgttcttgtgtcacctaaacttattaagaacctcatttccgttcgccagtttactaccgataataactgttccattgaatttgatccctctggttgctctgtgaaggatctactatctcggaacgtgatcgtcaggtgcaatagctccgggcccctataccccctgtgcctccctgctgcacacagcttcatctccagctccactccgtcactttggcatcgtcgtcttggtcaccctggccacgagtccctctccaagctcgcatcaatcgttccgatgtgtaataaagatgctagctctcctttatgccatgcttgtcagttgagtcgtcatgttcgccttccgttccatacggccacttctcgtgcagttaacaattttgatcttattcactgtgacttgtggacatctcccattttaagtgtctcgggcttcaaatattacttagtcgttcttgatgattgctcacattacttatggactttccctttacgactaaagtctgatgcttttccaactctcactcagtttttcg

SEQ ID NO: 188423 - DNA, 500 bp, Zea Mays
ttcggagctgatttattgtgatgaagaagattctagagtgaaccaatatgttaacacacgcaaagttgaacttgtgcaggtatgtgtgatttttttttggcaattcgttgttcctctgtgatgtaaaagtcgctggttccagtgtaggtcccttttggcagtgatgctactcaagtcgctgatatgcttttggatattatacgcccacatattaatcggttgcgtgatgctggtgtgattgaccatcgggactattcaaatgtatgtttatcatacctttaaaatcacaatcatccattccatgcatttgattataagaatgtttatccacttgtgacctgattatcgttagttgctcacatgatttcaccagtggacccaatttgaactgctgaaatttaaggataaattcaaggaagtacccccaccaaacatccatgaaatcgagagaggggaaattgaaagatcttttgtaattcttggcccactttgtcacacaa

SEQ ID NO: 188424 - DNA, 343 bp, Zea Mays
ccaattcataccgcacgatggaaaaatgatttttgctgatagcaaatatatggccctttgcttcgaatatatgcataatggaagccttgacaagttcattattggtattattgcgctcttcttattctcgtatgatcaattgaattcacttgaagtaaccattcttcaaattcacattttgagagactgtttgctccaacagatgaaaatagtgtccatgactggtccacacgctatgcaataatcaaggggatctgtgagggcttgaaataccttcacgaggaattgaatcctcctatttatcatttggatttaaaaccagctaatattttgttggatgaca

SEQ ID NO: 188425 - DNA, 582 bp, Zea Mays
ccagccacacgcaccagttcgcagaactccatcaccgcacgactcttcgtcccttctccactgccacgctactgtctcttccttctccgtcgcggccagcctcatcccttccgtctgactgtcgctgcctctgccgctgccagcctcctctcaaccatgcctatcatatccgctgcattgcagctgcatttcccatctccatcaccgcccatagactgcctttgctgctcgacgtccacatctccctggcacccaccatacatgcctcctcccccgccgccacccactgttccaaccttctcccatgccgctcagcatccggatctgcacataagggcaccagggatagcatgtccaaccaccgtggccgacaggagccacctagataacacctacccccctaggctccacggtaccccaacacatagcacataagcgtgcctaggtggcaggggaatgacaccttttggaacaaggagtatacactaactgaataatctttctctgtttcagggttaatgttcaacctatgcaattgaaagcgattaagtgaacaccaagtttatgctggatatttttaag

SEQ ID NO: 188426 - DNA, 590 bp, Zea Mays
gaaaaatagaaaaaattaccattttaagccaacaaagactatacctcacaaacaaattcactattatggaaaaatgaaatgatataacaaaaacagctagagacacgagtggtggtggtcaaggcccccattccacttccttgaaggggagaccacgtggttgccgcatcgcgccgggggatcttgggtgaacgccgatctgggagccagggtcggggcgatttccaacgtcgatgatgggggtgaggcgagggaggcactgacgacgcgaggcggctagggccagggggtggaggcatggtgtggacgtcctctagatatgtgccctcacacatctctaggaattatagccaccacctgactaccctatcatagtcaccaatcaatttttgacatatgacaatgcagagaacactgaaatcattaaatagtttggcagtgataacatattaacaaaacaaacagatcatccacaaattcataactacctatcaactagtgcagttgttagtatttcaatccattattagtccacatatgatcaaacaagcatacctaaacaacacaaccttcaacggacccatccaagc

SEQ ID NO: 188427 - DNA, 311 bp, Zea Mays
aaaagaatggggtgactacattatgtcagagttcatatgttctgaaaatacttgagcaggcagggatgaaaggctgtaatgcttgctgtgttccaatggagaataggctaaaattaagcaagaaagatgattcgccgcctgttgacaagacaaaatacagaagcattattggaagcctgagatacttagtgaatacaaggccggatatagcctttgctgttgggattgttagcagattcatggaagatccaagagcaaaacactgggcagcagtcaagcaaattctcagatatctggcagggacagtgaac

SEQ ID NO: 188428 - DNA, 402 bp, Zea Mays
gaaacgtcaaccttcatccgcttccaccagaagttttgcttcagatctcggtacatcttggtttcgccagggtgaatggtgtaaggcgttttatgagcttctctcaatatatccatcttcacctctgatttctgaggcacacaaaggcgacccctaaaacgaaccaaatcattctcatcgatggagaactcccggggtttaccatcgccaaccctctttcgagcttcctgcaataaacgatccttctgcagagccgcacgcactctctccatgagggaagattgaataagcatacgagtctcctcactagcggtgccgacatagcacaaagcgatccccaaacggtccagatcagcaatcaactgcaaggccacttttggaaccccggacctgttaagggca

SEQ ID NO: 188429 - DNA, 358 bp, Zea Mays
gtccagatactaggaggtctacttctggttatgatgtcttcctcggtgctaacctcgtctcttggtcctccaagcgccagaacacggtctcacgctccactgtcgaagctgagtgccgcgctgttgccaatgcagttgctgaagtatcctggttacgtcagttgttgacagaacttcatgttcctctccccaagacctcattggtatattgtgacaacatcagtgttgtttatatgtcctctaatcctgttcagcatcagcgtaccaagcatgtggaaattgatcttcacttcgtccgagacaaggttgccctcggtgttgttcgcgtgctacatgtcccaacgacttcccagtttgc

SEQ ID NO: 188430 - DNA, 364 bp, Zea Mays
attccacctcaccatggtgccagcccttgcctcacgacagccacattcaaccaccactgccaccaccaccaccaccacactccttcctctcccccgtcgagcgaggagctcatgcttattcttgccatctcacactcagttccccactctcccaaccttcctcaccttcctcgacaataataaggtgagtgtagcatacgacatggtaggcattacatggcctagcgtggcaatttgggtgcagcaccacatcgacgatgcaacgtaggcaagcatgaggtagtagagtgagcatggtgcagcactacgcgactacacaggtaaggtgagcatgtgcagtgtggcgaaggtgaggacgatggtg

SEQ ID NO: 188431 - DNA, 315 bp, Zea Mays
acaatggaatacatgagggaaatgcctatctgctcgaacaggtctgattttagccctgattcataatgttaacactattacattgcctgttccgccattacaaaaaagaactgttcccagggagtgcatcaaggagcacatggacattctggagtgagatttgttagtggaataatattaaagtcgaaggcacttgcttttgagcggatgctttttcgagctacaagaggaaacatgttattcaatcaggcatctgcaggggaacctgtaactgatcccatatctggtgaagaggtctgatcatcatggtttgcc

SEQ ID NO: 188432 - DNA, 342 bp, Zea Mays
tgcactaccagttatgtgatgcgaggaatgaaaggctacttgcagaaaataagccagaatgcttgctacctacagcgtcagattgccaaccttctacagcttgcgattgtacaagggaagaggtaagttatcttcaaattcaaagttcaaatctatttttaaaatcacaccttttttactatgaaaattgtgactgtttctttgtcaattttctatttaagcctgaacaaacattaagatattcgagattcaaagattatcaccaagtggaggacggtttgtcaactgaacctgaagatcaacaagatgacgaaaaagacgccgaagatggagaacatgtat

SEQ ID NO: 188433 - DNA, 529 bp, Zea Mays
accatctggccaaaagcctgcagagccttattaggcatcccacatcgtaggtatccagaaattattgtgttccaagaaactgtgtcacaagctccttggggagcagaatcgagaacttgtcttgcagttgttggatagctacaagacgagtacatgttgataagagaattaaggacaaatgtatctgaaaccaagccaagtttgacagaaagggaatgaagctgggcaccaacagaaacagatgggaggcgggcagtggcatagaaagcaatgttgagggagtagctatcgagggtcatacatccagaatggcgtagcagggcgagtaaatcgagggatagagatgggaaatgccccaaagagagagatcggaggacagagtggacaagggggagctttgaggagaagacctgaaacaattgactgggagaggaggaggggaatatggcaatgggagagtcgtgggattaaaattgaaagggcatatttgtgttcaggaaaagagcttttggcaatgcagaaggctttt

SEQ ID NO: 188434 - DNA, 1177 bp, Zea Mays
gttcagggagactagccttgaggtgaaccgcgaacagttgactcccaaggagaacgacaaactcaacaagtctatctccacctaccttcgccttctagctggctatttgcatcttccctctgccctcaagacccttgaataccttatccgcagatacctgtatgaatttagctcagctaattttgccgatggccctacgagctctagcttattctcttgtttctggtgggaaccttcatgtagggtgcatgtatacaattcggatgagttgctgctgagcgcactgccataccatgatacacatgcgtttgttcggatcgtgcagttggtcaacttagggtgagtgtggctctggtctggatagatacttattttctccatttgtcttcaatatcaacttgtgctggttgatgtgctttcaggaatagtaactgggcatttcttggcggtgtcaagtcctcaggtgcaccgccacccaggagtgttctagtgcaacagtgcatccgtgataaggctgtgctggagaccctatgcaactatgtaacgccgaaattaataatccttttaacagtaggattctgtcatgatttttgatatttttttgttgataattcattttactttcaggctacaccaacaaaggaattcagtcactcgaagacagtcgtctgcttttgcactgctgtgattgttgagtgtttgggtgctgtccctaagcttgacacagatgtagtgcagagggtgttgggatttgtgtttgactctcttaatcctgcagtgacgcgagaccaggaatataaggttacctcaaatgatttgcagtttttttggccccttttcaatggtcatatttgttatattttttctttcccttttactttgcaaccctcaactggatactgtgtgtacactatttcgaacattatgaatcttttattgtgctatatgggtttacttcccattgaagaactattgacatcctgctttcttagcaatgttataactacagttatgttgtatctttatgaccaggctggcgctcttatgattgttggagtacttggaacccgtgcgactctagcgcctaaacttgttcaaaatttgattcttttcgttgcaaggactgcacaacatgatgcattcgagtcagttgacttgccatggcttcgtgtttcag

SEQ ID NO: 188435 - DNA, 405 bp, Zea Mays
ctcgggactactaacgtgttgcagccctcacctgggagcacgagtgcaccacggcacatgccctcgcttctcagctggctgagcttgagcatcacctcctcggctccttcgtcgttgatcctcctccgtcggccccagtgccactgcctgcttcgaaatttgaggtcgcggttatcgtcaaccttcacgcttaggtggccggtgtccagaacattcagacggtcgtctccctcgtcctagacctcgtgtccactcactacacccactggcgcgaccagatgctcctcactcttcgcgctatgccctcgatgaccatgtcctcgtcgacaccaattcccacctgctcccatcctgacatcggatggataatgtggtcctctcgtggattctcggcacgctcactgt

SEQ ID NO: 188436 - DNA, 320 bp, Zea Mays
cctgaaccactccactaggatagtcagggacagggaagggcgtgctccataaaaaacacatctgtttctatgtttccatagactccaagcttcaaggatgacaacactattaaatccctttcttatccctttgtggattttagaggaagcttctctccaccagtcatcaaaacagacatcactgcacttgggtagtacatcagtaaggccaattggggagaggatagtgtgccagaattgtcctgcaaaaacacaattagagagaatatgttgcactgtttcatcatcttgatcacagaggacacaactctcagggaagt

SEQ ID NO: 188437 - DNA, 408 bp, Zea Mays
ctgagagtagatattgatgatgatcatgatgatgataggaacaggaccaggtatatagggtaggggagagaggaagccagtgattaggggggtagatagagagagagacaggacgctctactgcactagctgcgcaactcagagaagatactccaataccctcttggcgtgggcggagaaccagcagcaagttcagctcagctcagctgggaggtgccgcaggaggaagaggaggaggagatttttattcggaccggatccactgcgcgtagcgtagcctccttttcactcctacctgctgccggccgctgcctgccgctgctgccgtaacgaaatctacagcggcgcaagcagcgaaattttaaatctttgcggctgctccgaccgcagcgaagcagctccccactc

SEQ ID NO: 188438 - DNA, 512 bp, Zea Mays
cccagtgtttcttatatccaatgtatccaagtactggagttttaccacttgctttgggagctctgtgatttctgtttctctaaggttcaagtatttcaggtggattagcctctctatattttccaggtggtggttttctaatcccttacaaccttctaggtcaagcacgcgaagagccttcatgtttgaaagagatggcagttgcttcccatgcccaaagatagtcactgatctgacatgagatagcgatgttgactcttctagcaccaaagctggtggttctccgtcaccacattggatagataatcttcgtatcttgttctgtggacttgatgtaagttctcgagagtctaacaaagtaacaaagttctcctctacagactttgttatgattaaatcaagaatcatgtcatgaactcgacaagtcaccacactcccactgtcatgatcgataaaccatggttggaccagtcttctattgataagctcattaaagtaactttcacctatat

SEQ ID NO: 188439 - DNA, 1523 bp, Zea Mays
gtcggcaccttctccagcaacaagcacccaacaaatggtatgcccgcctcttttcttcccttcctgctgcgcgaaaccgagcagcacccaaagcgtaacctaagctatttggcccgccccttcgattcactttctgctgctcggtttaaacctaacctaagctagttgattatttgtaatgggacctgaactacttggaagcgtatacatgaattatacctactaactttgattctttttgcctaaaaaaactcatgagctgcttgctagctgcaggaagtctgggttttatttcggcacatttcagggcatttaattggttgtagcaatttggttcagataaaaatattctattcttgctacaaaacgagtaaacgttaatttaacccgtgaaactccgatagccagggtagaattgctctagggcaccctggattttaagatactattcattccctcattaaacttttgagtaaataatttatataggaattgattttttgaatgcagcaagttcttttgttcctgcatttcattctcttttgggaggacggaaccttgtttgaaggggctagtttatgttctggaggcaaggcacctaccccatatgttctttattctgcagtccaacagaaatacgcacataagagcccatacttgaaagtagaggactagaggtgtatgagattcaaatcatgacaaacctttgtttgtgtgtgcgcggctgcgtgcacaactcgtctgtgagcttaagtaactgtagcattttttcttcttcttttgtaccccccatttagcagtttccatggcgtcaattatagtttagcggctacgaaatacaagtatttttttggtatttgagtgagccccatgtggcctcaaatcaagtgataaaatgttgtctatatggagtaaatttttgatattagttgctgaaaagactatttctgttgggccgttggcagaatgctttggagcagttggcatccattgatctcattgagctatgcaaggaggccagaattgagcgctgccgtgcaactagagacttgagtagctgtggccgctatgtgcatcatgtgcttaactcatgtggccatgcctcattatgtgctgaatgcagccaaagatgcgacgtctgcccaatttgcaggagtccaataccggacaatggaaacagggttcagctacgtctttactacaagtgcctggaagagggccttatttctaagcagcacgatgaaaggtttcaggaaaaggaagaccatggcaatccagttagcatggatgtccagcagctgcattcattgttcgatgttgcagtacagaacaatcttacttcccttatttgccactgtatcctcttcaggaggctgcttatgcatttctatatcacatcttctttctgttattttcttaacatattcaccagatatcacagatgtttgtttggatgagaatgctgtgtcaagtgatccacttctggcttttcttttggatgaggtggtcatcaaggactggtg

SEQ ID NO: 188440 - DNA, 928 bp, Zea Mays
ctttccaccacaaaccaaggggcacatgcatgcttcagcaatgaaatgttttcagcagtggtttatgaaggttcttcagtctttccttctggcctggagggagaatataccacgtgcatttctgtaatgccgctgaataatactgtactgcctatacaacaacatgacccttacagaactgttccaggctatcatattgctactggttgctctgatggcactgtaaaactttggaagatgacttgtgcagaggactctttgcagactaagaaagaaagacacatctgggagctagtaggcatgtttggtgctcatcaaggaccaattgacatagtttcattgtcaggctgtggtagagttattactgttggcagaaatttgaagaaaaatagcacctccattcatatctgggaagcaacaaaaatcaggggagacgggaattttctgctaggagatacactaatgttgcaagaccatattgttggtttagatggactatccttaggtgatggacgatttctacttgcagtttatctagctaatgagttacgtatatattctcataagcacccgtccttccagaatgtactacacactaagaattcaaaagaagagcatctttggagctgtattgtattatcccattctcatcatgatattgttggctttctttggggaccaaaggcaactgttgtgcttgttcatgagaaccatctttcactcttcagttcatggctagtaactggagataatgagtacatgacccagatacattcttgtcctgtagttcatgagatgttgccatgtactaacaattttaacgaagctacttttggtaaactcaagttaccagaaaatttcaacagtggaaacattgatagcaataatgtcctgctaacagaccaacatagccactattctcatggtt

SEQ ID NO: 188441 - DNA, 1212 bp, Zea Mays
tagggtcggaaaaggacccgaatacaggacctccttatggaggccagaaacaagcataaaggaaacaatccatacacaattataagatacaacttaactcaggcattggtactgggagcagctaaaaaggaaagacccttagctcctgcaaccatccatttctccctttcctcagcagtggcctctaatagtgtagtgatattgggggggacccgtcaaacaccactctatttctgaacttccagatcatctaggctcccagaatcaaaagtgaatttacccccttcttggtcatgcctgacacaatatcagcaatatgtttccaccactgcaggaagtttgtgtcatcttggataggggcaagaatgtggagcccgaatttccgaagagtgatgtaccaatataatctggaaaagctacaagaaaccaaaagatggttgatggtttcaggctcttggtcacaaagagggcatctaggaggatgatttagtcctcttttttcaagtctgtctgcagtccagcacctattatgagccaccagccaaaggaagaactgacacttaggaggtgcccaagatttccagaccattttgtaatgctcaaaaccaacagagccagtgaagaaacccttataagccgagcatgtagaatactgcccattagaagcgattgaaaatatatgcttatcctcagagttaggttgcaatacaacatcagatattgcattccagagatgtaggtaatctaccagaactccccaggtcaaggcaccattaatatcagagacccatcttctattagttagagcctcgcgaacagttcttttagaaacaattctttttggaacagtcaagaggagccttggagcaatatcagaaacacttctggcattaatccacttgtcactccaaaagaaggtgttagcaccatcaccaatttctgtgacaagcacagaagagaagatggctttagcattgctggggacatggacaggaagattattctaggggcgggtagggtcggtcctttgcagccatagccatctcatccgaagtgcccaacagagttcagggaggctggaaattcccaaacctccaaagttcaaggatctacacactttgccccaagccaccatacaatgccctcctttaacctctcttctgcctctccataagaaacctttccttatcttatcaatttccttaatgaccc

SEQ ID NO: 188442 - DNA, 555 bp, Zea Mays
gtgaaatggatactagattgttgcatcaacgaaacaaaggtgtaataacgtagcgaagcaattgcccacgagattcaaccacagtgtttgttgcacaaagaacaaactccttcagtatatatagaacaaaatagcttaatggtcttggattcagaaaccagctccaacaggtttgtcaacacaaatatatacagaacagatagaaggaaatggaaatgctctacgcatacaggtgaggtactactcctttccatgcagatattgcagtttcacagtatgaataaaaagatagtgtgtttcaaattcagaatacctatttggatgcacactcctatctccaatggcagtccagtcaaaaatggtggcccaaaaaaacatggttggagcaacctgctttgagtactgaaccattttttaacaaaaggttaaaaatgtggatcaaaatcagtaatccaaccctaaaggttaaaaatgtgggtccaaattatcacaccattaactcaagtgccctactgaaggttttatgtcaagggtgatggatcttgacctgacaca

SEQ ID NO: 188443 - DNA, 465 bp, Zea Mays
tttaagaaaaactggtgctctctcagcttggccaacaccatcctaatatgttgataatgcacttccaaactagggctgtaaatgagaatatcatccaagaaaaccataacaaattttctgagaaaagtctccaacactgagttcatggcacactggaaactagctggtgcattagtgagaccaaaaggcatcactcgaaactgataatggccatgatgtgttttaaaagcagtcttgtattcatcctcagttcccattcgaatttgatgatatcctgctgtcatgtcaagactggtaaaatactgagcaccagctaattcatccaggatctcatccaccataggcataggaaacctgttctttatagtcattccatttaacttcctgtaatctatacagaacctccagctgccatcttttttttgcacaagtaaaactggagaagcaaacggacttacactaggg

SEQ ID NO: 188444 - DNA, 379 bp, Zea Mays
gcatctatagagtaatttaatgactacattacaccctccctacttgatagatcaagccaagtggcatgcttagaacccactaacaacctcttgcaattagaagcagtcggagccacaacaaagagagatgaccacaataccaatgcatctcttgtctccttgtgtgtcgactgtgttgacgataaaccatagttttcccatgatgagacatgtcaggcacacccgatgagacatcgacatcgaccactgcatcagtcaatttacatccgctcagcgacatcggctcatcttcattgacttatctacatcggctcattctcgtcaacatgacccaagcaaggaaggagattcctagctacagcgacgggattaaatgttg

SEQ ID NO: 188445 - DNA, 293 bp, Zea Mays
gctcaagatacttaattaattgcatactatagttaggctgtatataccaatgcaatggtcactagcaagataatgcagcctcacagtcttatgacatcagccaatatataaattagaccatttttgttgctgcaactgcaactaatactatgttgaagtgtttttcgttaactctgctctgaaaatgctttttgcttcactctttgacatatctatatgactatatagccgatgcctgtttttactatatgcttatcatgaatctcatgttttccatatgaataatgctagct

SEQ ID NO: 188446 - DNA, 279 bp, Zea Mays
tgggggaaggggtgagtccgcgccaaggaagtcggtagcaggtcggcgcagaatctccagggattcggtggaggtggttgcaatcgggcgttgatacggtgttgtgcagagctcggaagagataaggaagaagggatacatgctgacatgccagtcccacacctcagacaccatcgtcagataccgcgcgcaggggaacgacctgccatgaggaccccacatgacagcgattgagacagcggggatggggagtagtggatgatgatgcgggcccaccag

SEQ ID NO: 188447 - DNA, 1711 bp, Zea Mays
cgaggtcagtcagtctacgttccacatgccacaacctaaatatatttgctttacagtaattcaatctgcagggcaccgtctagaaaacaaatacgacccacacctgctactctggccacgtgacaggactgattgctgccgccgattacctacagcaaggagacgatggcgcaggatcgtcttcgtcggccacttgggatcccttggcggcgcatgcaagacagaaatagagccccagagacccatatttgaccagttcaacaggttttagggaaaaaatgggatctcttttcgtttgtgtagctcttgttgctgtcttcttgctgctaattgcatccaatgttaggttaattgtgcatatgatctcagtcgctatagggtctgattgtttgcttgcattagccttagcctgcacttgaccttatgcagcacgaatgcaatgtcttggtgtttggttgttctgcactggcaagccacatttgataaaatagtatttggctgtttgcatgttgttgcatgtagtcacatttatattctagttgaggtctcatgtttctattagaggtatggggaacgggaacatttcattttttgtgtatgcatcggcttgtgcaacctgtattgtcttcataggaccaaatctggcatactagctaatgcaccattgggcctgctgtgagcacaaacacgagcaaactgcactgcaaaagcctggatatgcaaccaatcaggcatactattttgtccttaatcacatgggatgttcatcagacagatcttgaggatcctatcttgaaacaatcgtttgtgtttgtgttactaaccaaatgtgtactgtatcacacacgctgttagcagttacaggtctaaatgaccttcctaacaaggatttgggcactttgacacaatttgtggctagatttttagaaggacaaacaacccaatatttttatgaccctttcttttaaggcttcttgtttggtgcatgtgtataaactatcagttgctccctcttttctgtatatacgacccgttctcctctgatcttgtttctgaacataaggcccctggcttaaactgggtgtagctactagctaatgaagtaccttgcaggcttgcacccttacctaaggcactaccgcactacagctacgaccattgttttttctcgaaaacacgcaggacctactacgaccattgttaccttgcacttttgccttccaaccaacatggtgcaatatcatgaaatgaagtacttttagtttagttgctttaacgtagttcaaaactacatgctttgaaacccctttcagttgctgtccaacctaatggtttttgcaaacatgtagctttgagatagtatggccgaagtttgtttagttctttttttttgaaggaaaaaaagtttgtttagttctacaaaataagttccaaaaagtgtggtttcggtatcatttaaatcccacaggtgtactcttaatttttactcttacagagttttgttctgttccatcgttgctgcatggtcacttggattttgtgaccacctaatattctgctctatggcaacttaaaatgattgtggctttactcttctcccttttctctcttgaatttatacaaaatacatagctctcttgtgtccagagcaaaaatgaatatagctttctatgataactttacagatgctctactttcatgttccttctcg

SEQ ID NO: 188448 - DNA, 3755 bp, Zea Mays
gtcgtcttcctcgccccctccgccacctccgccccggcctctccgctcccacccccgcggaaaccctaactccctcttggcacaggaggcctatgacggagattcgccgcgcgcaaggagggagtggattcgcgactgcgcagccgctgccgtcgtcctagggcgcgtcgagcactgccaccccattgacgggcccatccccacgacatccgccatgttcgagggccacgtatgatctcttacccttcctccatgttttcccattccttcagcacctttgatcgtgaccatttttgatgcgcgatatggaggaaggccgcgtgattgcctagtggaccgatgtgttggtttagtcgtggcgttgttctgtccgggttaccaaatctctgtgcagatcatgttcgtatttggggatagtttggagggttagaattcggtgcgttgatgattgacccttggtcgtttgcgttatgatcttcccttgaggaagaattgcatgttgatttatggaggagcctctaaacgggcaagttgtggacttttggtgcttatgtatacgtttgttcacaattttatagttcgactgaattccaactattgaggaatctgtttactttggttgagcaaaatgccttatttcatttggcctacgatcatttaagtagctcatgacacattgtctgtgatggttgcatatggtgatctggcagcaatgtgaaagttcatagctgcggcatttctttctttttaaattgaaatctcctagcccctgttacctcccgacaatatgcacttgttgccctttaaatttggatattcttctttcgtgattgcatcttattctcaccagtgaatgcagttttgagcatccacactattatggtgagagctatgttttgtgccatcctactgcactgcttgggatttcattgtgtcttttcttttgcgtcattatgtaagaaacaatcatgctggtaaatagtggagtcgtgagtaattcatgaggttttacagcaactttgctcattcatggcaatagacacgtaccacttaaatggtgaatcatgttatgcactctttcgctatctataatttcatatcgaatttctattttttgttttcctttttttgactctttcatcattcatcatttgtgttaagttctgagccatgacatagttgtaacttttttctacaggtgctgtatctgctacgcaaatatttgggtgaatatgttgaagggctttctgttgaagctctcagaataagtgtatggaaaggtatatttctttcataataatgttcttttctattgcttaaccttcatctcctgcaatccgattccaattatttcatgttgttatatatgctttctattctgctgttgtttgaccaagcacactctttccttatttagacaaaaaaatatcaaatctcaactttattgtattgtttatttgatactaccctgaagttagatgaagtgaacaagttgtaacttctttgttgtatgaagtgggaatgtgggataggtgttataaagcttgccgattacgtgcatacagagaaacagtcttattcaggaactcgaggattgcctcccacattttactcatgtacatcccttgcttggctctaagttgagtcatataatggattactgctctcctgcgctttcgaaaaaaaaataatggattactggattctcaggcctgatttggccatgcagtgtctctgtcactcttgcatgtatgctcatggatcctgtttctagagatgaaatacccaatggtgttctatctccatcttgcttttttaaccgtaattttgagaaatcaccaaaatgttttccctctaacagtaattgtagagcttagtaagatttacaactttgtagctttaaagttttttgatttgaaattatttagagtgccaaaaattatttttaaatccttgatttcaaaattcaaaatttagaattttgaaacgaccatggatgatgatatggtctatgcaaaagttgcagttatcaatgatgtataacttcgtagtcgataatttttttatctgtaatcatttcatttagagtcctaaatatttgttttgttttcttagatttggaaattcaatttttagaaattttaaatggcttcagtttagccatagaatagtatagatcgtgtcaacatctgaagctgtttaaaaattctaaattttgaaatctaagaaaagaaaacgaagatttagaatcaatttaagaaaacaaaaatgtatatttagaattccaaatgacttaaggtaaaaaatttatgaactgcaaaattatactaccacttttgtatggaccacatctaaggctgtttgaaaattctaaattttgatttccaaaatctgaaaattttaaaagattttttgcattataaataatttcaaataaaaacttgtcaactaagaagttgtacatctcattgagctctagcatttttgatatataattccatctttattcgacttcattcaaaagttatgaatctttttagataataacaattaagggttgcttgcgcgttcgagaaaaaaaagggttgtggtataatagtcatgcacataacggtcaactatattttctcactctcatccacttcttaaaattatcattttagcagtcaaagtgtcgaagagtcaattgctatggttgaagagcgtcctctagcaaagacaacattgagtaatgttcataagcgaacactaacattgaacgatatcgtatatcaaatttagcctaatatttaccacttgaaagtttcagcagtaacagtactgctcatgtagattttacattttgtaatttgtgtactaaattacctggccttcagcttcaaaaaatattacctggctttcattttcttctgttaaggtgacgttgttctaaaagacttaaaacttaaggctgaagccctgaattctctcgggtttccagtgacagtgaaagctgggtttgttggcaccataacattaaaggtacatttcttattgcaccatatatgattgtttctgttttcagttttgtggttgcattcttacatcacaatatctaacattgtgtaaacagttgcttactaaagctgttatcatgtagcttgtttctgagtgagttgtattttgaaagggtagtttacttctttcagcatggcaatatattatcatgaggaatactactatcatattattcgttacatgtatgcacaagatccatctggataagaatcacttaaatatgcattcctctaatacgcataccgccgccagcagtcaccatttatcttattttatcccattgtgagcagttcagcacttcttgttgcctgttggcctttgttgtctagttttgtttgtggatttgaaatgctaatatttgatgctctgataggtcccatggaagtgccttggtaaagaaccagttattgtcctcattgatcgtctatttgttcttgctcatcctgctcctgatggacagactctcaaggtatttatttattaatagtattttagatcgaagtgggaacaatgtttctatgaatgacactatttcttctggtttctgattatatttttgtatctcaccgttcttttcaatttcaggaagaagatagacaaaaactttttgaagccaagcttcagcagattgaggtttgctttcctgctatcttaccattgcttgtacatttgttcaatgactttaggaccagtcttgg

SEQ ID NO: 188449 - DNA, 538 bp, Zea Mays
cgctgtcttgctggggatcggcctaaatcgtggttgaagtggcttccatgggctgaatattgctataattcatcatatcagtcggctctaaagtgctcgccattcaaagtagtgtatggcagggaccctcctcctatggtttcctaccagccagggaactccaaggtagcagccgttgatgtccagctgcaggacagagatgcatttcttgaggaaatcaaagcacgtctagtgcaagctcaagtcactatgaaaagctaccaggatcagcgtcgcagagaagtggaattcagtgtgggagattgggtctggctacggctacaacagcgaacgactgtaggggtcactacagcttctccctccaagttgggaccaaaattttatggtccatatcaaatcacacaaaagataggggacgtgtcctataagctgcaactaccaccaaatgcacacattcatgacgttttccatgttgctctcctgaagaagttcgaaggcaccgtgccaacacagctggttcccttaccacccttgttac

SEQ ID NO: 188450 - DNA, 405 bp, Zea Mays
tccttatctccggccgccaccgcgccatcgtcaattcaagcgccaccgcccgtcctccctataaattgagcccatgactagctccgtgaggtcgtcagctaactagccaccgctaatcggccacaatcatccaccagtgaccgcgaattcggagtttcccccaaatccgatttccgccaccgtgaaacaagcttcgccgtggtcagccatactccggttagctcctcccctctgctcccttgtttaagcactcttatgcgtctacgatgcttaccgagccattgaattgaactaagagtcctctggtcgccgggaacacggctgtcttgccgcgatgctcacggccaccgtggccagagctccatatttgatcaatagcgcaattaagttaggggaaatgatcat

SEQ ID NO: 188451 - DNA, 972 bp, Zea Mays
gttataatattttatcatggaaagagaaaaaaaaacattcctactttttagtggacaatgaatccagctgtattcacatcataatcgaagtggttactgaaagatttccggtggctatactgacatgggtgatttgattggtcccattatctgatccccacagatttcatctacttcagagaacagcacggaggatgctggtccaactgacagcgtggagatatggaccaagttgtctgcaatggaacttaacacttctcagaacgatgctgtcttgaactgcatttccaaaatgcactccaagagcagcacatttacccttatctggggtcctcctggcacagggaagacaaaaacaatcagtgtgctgctttggttaatgagagaaatgaagcatggtacgctcgtatgcgcaccaacaaaccttgccatcaaacaggttgcttcacgtttcttgaagctggtccaagagcactctggcgacacaaggtgcttgggagatgtcctattgattggcaacaaagagcgcatgtgtgttgatggtgacctcaaacaaatatatttatatgaccgtgtaaggaggctttttggctgctttgcaccattgaccggatggaaacatcacctatcttccctgtctgattttcttgagaatggctactcacagtacctccaacatctacaagacagtcaggaaggtgatacgccttcctttttctcttacgccagaaaaagatttgccgttatttatatggagctcagaagatgtttcaatgatttgttgttacatgtcccaaaatccagtattctggaagtgaattacaacagtatccttttacttcttgaaatgcttgaagagttcaaccacatgattcagtgcaggtattttggggatgaaattaggaaagttttcttgtacagtaatgatgaacctgatcagacaaactcgagtgtagtcactcttggcaaaat

SEQ ID NO: 188452 - DNA, 544 bp, Zea Mays
attgtagttggggatcgaattcgaattgagtagtcactccccagctgcttgcaggaaccgtgcctcctctcccacatccgcatctacaacaaatccgtcctcgagtgggagctcactgccggactgcgatacaagcccgatgcattcgtcaagttgcgcccccgctgcgaggcccccaagcgcgacgtcgtctaccccgccaaccacaccccttgccgctaccttcgcatttcctgcctgcgcggcaaccccatcgccatcttcttcatccaactctttggcatccccgtgcctggcctcgaacctgagctccagccactgctcagctatttactcccgcaaatcacatcctccaaacaacccctttctcacaacatgcacctccaggttctcttctcttactacttcgtttcttctttcatattcgacccttctgcttcggggttcaccatttcatgagttcctgatgcatttctgctctatccattctagttgcttaaagatatctccaccaggctacctccatttcttccccaaattgagg

SEQ ID NO: 188453 - DNA, 377 bp, Zea Mays
acttatccaccctagtttaacaaccatgatctaatgtaaattaattagatcttatctagtcaaactagtcacaccaatctaacctagatctgatctaatctaaagtgacttatcaaacatgttagataatactaatgaaatagtttagactctactcctatagaacatgtcttaacttagttcaccttgcactaaattaagaatgacagatcgacttagccatatgcaactaccttaaccatccgatagttgcataacccctcaattttaacctagcaagtgattctaacctacctgcaccatataatccatcctactcacatatatcctaaccatatgtccttaactcggatggcaactccaagatgaaaggccaa

SEQ ID NO: 188454 - DNA, 347 bp, Zea Mays
ccccctgcctgcctagctgtctcaggctgccgcccgcccagccccaaaacattcggcagccgagtcaaccgagaacacgagccatccacccaccctgtcccttccccggctttcccccgtcctcggctccaccaattgctctcgcgtcagtggaaggaaaaaccaagggcgagggagggaggagcgcatctccgccccgcccgcgttcccgtaccccgatccgccacatgatctgacaccgcattgccgccgaggtgacccctcccgcccccagaatggaggcgctcaacgagctctgcgacctggtggccgcgcacccggatctcctcctcgccgacaagcttgca

SEQ ID NO: 188455 - DNA, 283 bp, Zea Mays
tgctgtgctttcagacagagacgatcctatgttgaggggggaaaacgatgtgcgttattccagttgtgcaaccaagattcgattttgattgtgtgaagggcatggactgtcgatccatgatccatatcgcaatcagctatagactgactggcagtgtgcattttcgaaacatatagatgttggggcgtcgaggatgttacctgaatgaaggaaatgaataaatgtcaccgacgtgaatggcggagggaagcggcgagctcagatttcatagttgcattgcggc

SEQ ID NO: 188456 - DNA, 788 bp, Zea Mays
ctcatatccacatttttcttgtggtttgtccttgcgatatactttgacaacatacttccaaatgtaaacggcgttcggaagtcagttttctactttcttatgccttcatactggacgggtaaaggaggcaagatggaaggttagatattgaagtatttgatagctactcacattgtttccgctgtcgtatcttacactgcccattaatctttattccagagggaggcctctttagcttttttggttcaagccgtcctgcagatgatgctacccctactgacgaggatgtccttgcggagcaaaacctagtaaaggaacaagctgcaaacaatgcggtagatcctaatgttgcagttcaaatacatggtctacgtaagacatatccaggaactttcagcattggatgttgttgcaaatgctctaaatctaagccgtttcattcggttaaagtaagttttcaattagtttttgacataaaatacatgcaactatgcttgtcatcatctgattattcattgcctaaaactttattcagggcttatgggtgaaccttgagaaggaccagctattttgtcttcttggtcccaatggagctggaaaaacaactacaatcagttgtctgactggaatcacaccaattacaggaggtgatggtaagtatcgttcattgaagcagcattcttgtttctttgtctcaaaacaacaacttccatactaataatacatactaaacatctcatagcattcatttatggtcactctgttcgaagcactgtgggaatgtcaaa

SEQ ID NO: 188457 - DNA, 1712 bp, Zea Mays
gccagccatatccagcccagaaaactcgccagaaacaaatccgtttccctttttctgtgttcctaccccgcccaccaagaaccctgcgcgtgcgaacaagccgacgattcatcaatcgccgtcgccacctcccgctgcccctcggcctccgatcccgagacccgttgccgccgctgagctgccgcatttgctttgggggtggagggtctgagatggcgccgtagcggtgggacggggagcagcagcagctggatctcttctgggttgcagctgccgccgccgccgccgccgccgccctccctgcaagcaacccttcgcgctctcgccttgctcgtgctcgtggtatgtgtgtgtgtacgtgccttttccttgatttcgtttaccacacccttttcttctctccgtgctcatgatctgcttcgatggtgttctgctcgtcccttttgtggcaagattgcctttttatagtcctttttgttcgcacgttgtgcctcgcaccatcagtttcagcacccttgttttacttcaaaggttgtgcctcctgcatctgtcgacggcggcgtctctttgctccaaaggttctagggggcatagttccttcctgcattcagcccatgcttcttggcctcatcacagcgtgttactcttcttcattatctgaagaagaagaatagataacatgagttgctcttcattatctcaagaaaaaaaataaacaaacagcagaattgatcggccgacgaacgaagtaaccaccaatcaatgcggctcctttctcgctggtttggaattccacctgcatttcgtggaggtagacgggggctgggaagtggttggcggcatctttttatgtgggttgttggcttttcttgtcgctgcccaccgtcacccctgtccatttcctttcctttattattgctgcccgatgctctgtttcctagttctgcaagcaacatccaatcttttcatgcttttttagtccagcggtgatttccgagcgaattggtgaaggaccttgatttcctcaacttttggagtagccactagtccacttacagcatcgttttggtttgcttctcttgcactgttcgaatacattcctttttttttgcatcctcctgtcccctcaatctctcttgattgatcaaaccattggtcattcttcagatgatttctctgaatttgtgctccgactctgtaattaaaacagtcgcaaactatggtacactttttggatgttgggatgcttagttttgctgctcccaatcatggttactggcttttaccattcactgttttttcccctattggaaccaaactgggttttatgctttaagaaactgaaccatcgtgtgtaactgcttagtaacaaatgccaaactggaatattgatctgtagcaatagattattacgcacacgtgaacctgaaaataggagagggattgaaactttgtgtgtactgtgtattttgttggtcgtctcttcatgctaacaatgctaaattgtgtgctggatgctcattgtaggtaatttgactgctgttagattgtgatttcttcttgctgctttcgcccttcactgttgctggaattacagaagatcaggctctttctttgtcagaagttaggaacattgcttctctttggcttctggtaatatggcagcgacgtcgccaaacaacataaggcgcaagtactcgtggtggtgggac

SEQ ID NO: 188458 - DNA, 430 bp, Zea Mays
ggcggaccggcgcgacagagcttcgacaagctctaattcgccgcaaagggaaaggaatcggggcaaaaaaggcacgggaacggttcctcacctcgggacagtgctcgtggagggcttggcgcaatgtctggagctccgggtagacggcgcgacgggcgtggatcaacggcgagctcgggcggcggcgactgtgcacgagagaggttgggagcgagtgaagtgaggcaggggagagagagcgggtgcgcggggctcaaaagggagctggggaacttggggcgcgacgaggccgactttcttagcgtgcatgcgcatcggggatcaccgcggttacggggaggacggagctgacagggcgggtccacggtgcagcgactctggcgcgctggggcgaacgagtaacgacgctgacgaggcaggccccaccggt

SEQ ID NO: 188459 - DNA, 365 bp, Zea Mays
gaactgtccaaacataggttaaggttgtaaggcaacttttttccaccaaacagttgctaaaaagttggaatataaagaattcaaaacaatatatcaccttttaaacctcaaatgacgtttctatgatattgtgggcattgtattcacactagagggtattagagtacaactagtggatgaagacgttattgggctagctaatgaccttttgtgatacctggtttccaccatactgttgctaaaaagttggaatataaagaattcaaaacaatagatcaccttttaaacctcaaatgacgtttctatgatattgtgggcattgtattcacactagagggtattagagtataactagtggatgaaga

SEQ ID NO: 188460 - DNA, 302 bp, Zea Mays
acccaatgcagttttttgtttcctattattgtctttttatattccctattgcagcccagcaacatattctagcttctaggcttctagctcaacaagagcctaccatcgtcgcagccaaaaggcccccaacctggcaacctccagccacatgacatgatagtatgagacacacatttcctatccccagcctcacaccattgaccgccagtgccaggcagcatgtatatctgactctcctctgtcctctcatctggccaaccgctaggacctggagccatgttgcccgctcgtccaggtggcag

SEQ ID NO: 188461 - DNA, 396 bp, Zea Mays
ctagaatcgagttcactgtcgataagtgcatctccgatagatgtttggctttcttttatgcgcttcatgagcaacgcgtacatgtctggttctttctgggagagtgcaatagtggcatacaacttggccattattatctgatctttcatgagccttagtgttgagtctgtattaacaaggcggaactcctgcctccatatgttgtagcttcctctaactttattgttaaagttccttgagctatttattgctgcattccgcatctgaagttcaatcttcttatccatctgaagcagctcctgaaccctccgctcctttcttctacggcgaaatacctgcagggagcaatagcagcacacaaacactcagatgggcacgattaacacatctcatagt

SEQ ID NO: 188462 - DNA, 599 bp, Zea Mays
cctctgtgccagcccgccgctcttcgtcgacctccgttccggcgctctggtcgagggccgtgctcgccgcggtgcacagggacgacaccgcgttctgcattggcgagggggaggcgactagctgctccatggaggagaaggcatacatgcaggaggcaatggcagccttgcgagtggctaaggaggtgcttgggatgcaggaggggtggaggaaggaggcaattagggagatgaacagaactgggcgattctcgcgctcattggccaattcggctactgactggccgtgcctgttgctggatgttctgtcacgtgcggcagaggaggaattcttccaggtagatctgatgttatttcagttgggtttgtggtggctttgtggcagggttagtgtaacttgacattattgtcttgatgctgctgtcgtttttgtacagccaaagctgatcctgaacaatgtggatgtgttgaggaaggcaatttgtgaggatgagacgatggtgcctgcagcgatgtaccatgatagcttcatttggagggtgattgcacttggcgccaatgaaaagtgcttgccagttattatgtcgacttcagatggg

SEQ ID NO: 188463 - DNA, 370 bp, Zea Mays
gccaacaacgacgacgagtttctaggtctcctccctgcctagagtcaccacgtgcgctccgtctacacggccaccaataacgacaccgaccatcgacgtttccacgctggccctatttgcctgctgcagcatcccttctgcatcatcgccgccgagaagctccccggccttttcttctatgcccggtacatatgatctgtagtgcgcgaagcattaattaacactcggctgacatgcagtttactccaccctaaacaacatggagattctgctcgttggtggggagattgtggtggatggccacagccccaccgctgctgccattgacgacaccaagcttcgatgtcgcgtgcgctcctttacctaccgc

SEQ ID NO: 188464 - DNA, 583 bp, Zea Mays
catcttttgtcgtcccaggggttccagcaatagttcaacatgaaataatgaataatagaaggcatgtactgacaaaggtgagatttcttttacttatcttttattactaaactgcaaggagtggcatattgatgtgtgcactcatatcctttaattcaggataccactggttcagtcaaattgtgggagatcacccggggtgctgttattgaagactttggcaaggttatttgtttctcaatttcgtagatgtttttcccttggatatatatctgctatttgtatcccgtttttgtaatgacactggttcttacttgatgacctttcgaactaacaagatgtttgtagaatgctaaactgattcgttttgattatgcaggtttcatttgaggataagaaaaaggagttgtttgagatggtattattgaaatgtcatgatttcagagttttatttaaaaaatcgctacccatgtactgtttaatttatcaattgattattaggtaagcatacctgcttggttcaccatggatgctcgattaggatgcttgtctgtccacctggatactccacaatgcttttctg

SEQ ID NO: 188465 - DNA, 339 bp, Zea Mays
gtttatacaggttggaagtcagatttcacaaatgaaaatggaatgggctggaggattcacatggcaatcatacaatgaggatataaactccttgggtgacgaatcatttgcaacagttggattactggaacagataaatgtgacaagggataacacagactacttatggtatacaacatagtgagtactccaagtccctaactcctcaaaaaatctaataataacttttacattttgaagatgctaaaggttttactttcagcgttgatattgctcaggatgagcagtttctcagcaatgggaagaatcctatgctaactgttatgtcagctggtcatg

SEQ ID NO: 188466 - DNA, 315 bp, Zea Mays
aggttcttgatcacacaatggacaactgctaggatgattgagccccctttttgctaatctgtcagcagtccagcacctgttatgggccaccagccagaggaagaaacgacattttgatggagcccaagttttccaaaccctcttatagtgtccaaatgcacaggatcccaggaagagacccttgtaagctgccttcgctgaatattttccatctcgggctatactaaagatgtgtctgtcttcaatgagagggtgcagctcaaaaccagagagacagtcccagagcttaaagtaatctgccagaactccaacagt

SEQ ID NO: 188467 - DNA, 318 bp, Zea Mays
ttttgttgaatagataccatctgaggcaatactgaaaacatgtttgtcttcaatagtaggctgcagcactatcacagacataaggttccaaatctgaaggtaatccaccaaaactcccaccgagagggcccccttaatatctgagatccatcttctatttagtagagcctcttgcacagttcttctttttgtgatcctcttgggaatacactgaaaaaatccttggagcaatatcacaaattctctgccctgagatccatttatcagtccagaaaagggtgttggcaccattgccaacttctgaaactagaacagtgg

SEQ ID NO: 188468 - DNA, 316 bp, Zea Mays
accttttcagagtggagccttttacaacactgtctatacaactgcaagacggcaaatttgaccacgctgatcgcatgttttctgatctttctggtacatgggatagtgttcttgaagacatgagtgatgtaaaagagctagtaagtctaccaacaagtatttgcagtagttcccatcgatctttactggttcatggcgaaaccaagtctaggttgcagcaatctgattatttgatggtaattcatctaggtacccgagatgttttacctccctgaggtatttaccaacataaatggcattgactttgggacaactc

SEQ ID NO: 188469 - DNA, 407 bp, Zea Mays
gtccagccgaacaaggcagagagggcctccacctgaacctggttcaagcagcgattaaataatgtagcatattcttgtaaggcttcgttgttgattccttcgttttctgatatgcatttaagggccaccatagctttcctgaccggcttggatttctctttgtgcaagttggatttctctttgtgcaagtcgaactcgacaccaataccagcaagccgcctgctgcgtctaggggcctgcactccagatatgggtgtagccaccaggggggttcttggagttggtagtagggcatccgacttcttgcagattttgctgaaaaacttggcaatgggtggactgtcctgttccggaacaggttggacatgttcctcagttggaagcagcggagtagtatttttccttct

SEQ ID NO: 188470 - DNA, 361 bp, Zea Mays
gtgggaagcctccctgtgaccgtctccaacccaggtgagctgtccattttcttgggtgtacctgtggcatggtctgggacgctggtattatgagttgagggcttggctcgggttttggtagaactccggcgatggcccgccgcaaacctgggcggcgccgccgttctactcgggtgcgcgggggagaggaaggcgtggccgctggatacagagtcgacggctgcgattagttggggataacggttcggcttagggttgctgtagccgttcgatccagatcgtgtgggcgagatttggtttggggcttttaaatcaggagcgtcagattttgatccggtggtggaaatcggatcgggatttc

SEQ ID NO: 188471 - DNA, 457 bp, Zea Mays
gagaagacacaacccactaaaaggtgatggatggtttcttcttcctgatcacaaagaggacaggtcttaggatgagatagcccccttttagctagcctatctgctgtccagcagcggtttttgaatatcagccagatgaagaatttgcagcgtagtggagcccaactcttccaaggtgcaaaacgtatggaaccaaaaaaagaacgcagcataagcagacttgctactatactctccagactgagttaaattccacttatgcatgtcaggcacaccttgttgcaggatgatcccctctacttgatcccatatctggatgtattcttccagcacttgaactgttaattcccctctaatgtcagccacccattgcctattatttagtgcagctgctactgttcttctattagccactctccttggtatgatctgaagcagattgggggcaatttcagca

SEQ ID NO: 188472 - DNA, 471 bp, Zea Mays
tacttggcctgatgtagcctttctccaacaactcatcgatttgcttcttgagttccaccaactctggtccggacactcgataggctctcttggaaataggggcagtacctaggataagctctatagcaaattcaactttcctttcaggtggcatgcctggtaactcctcagggaatacatcggggaattctgacacaatcctatttgcctcaatcggattggactccttgtcatctactgataaatggtgacaagctccttcttctagttcaggtaagtacagttagttactacttcctttccggatggggacaccaacttaactgttctcttgtcacaactaacagtggcttgatttctatgtagccaattcatccctaggatgacatctaacccttgagttcccatgactactaagctagcggggaaatctatcccccttatttcaatccttagattcggacaaatcct

SEQ ID NO: 188473 - DNA, 1155 bp, Zea Mays
tagaccccaaatccaatcccttaaccctaaccttaaacaccgacactaaaaggttttagtgtccaaaccatagtaaaatgaagtttgagtctccaaaccatagtaatcttgcaggcatggtagaattttagtgtccaaaccatagtacacgttttagtccccggcagcccgtaaggctattttggcctcccgtgacacatgtttttgtcgtcgaacaacgatttcgtgcctcccgaccgccacccatgatttgaacatagagactggtaaggttgttttgtcctcccgtgagctataacacacgttttcatggccgagcgaccatttttatgtccgtgttcctccacacgtgtttttgtccccggagcaccttaaagcggttcttggcctcccgcgagctatatcacacatttccgtggccaaactgccagttttatgtatccgacctgccaccttcgttttagaccgggcaggccgttatggcatttttttgccactcatgagctatagcacacgattttatggaaacctagaccctaatccctatccctaaaccctaaacctaaacatcgacactaaaggatctaagtgttgaaagcatggtaaaatgaaattggagtctctcaaccttatcaactttgctgacatagtagaattttagtgtccaaaccatagtacacgttttggtccccggaggccggtaaggctatttttggcctcccgtaacacatgttttcatcgtcaaacaacgatttcatgcctcccgtccgccacccatgatttggccacagagactgctaaggctatttatggcctcccgtaagctatagcacatgttttcatggtcgagcgactatttttaagtacgtgttccaccaccagcgttttggtccccagagcaccttaaagttgttcttggcctcccacaagctgtagggtttaggttttagggcgtcccgtgacacatgtttttgtcgtcgaacagcgatttcgtgcctcccgtccgccacccatgatttgaccattgagactggtaaggctgttttggcctcccgtgagctatagcacacgttttcatggcccagcgaccatttttatgtccgcgttccaccgcacgtgtttttgtccccggagcaccttaaagcggttcttggc

SEQ ID NO: 188474 - DNA, 625 bp, Zea Mays
cttgctttagtttttcattcctaagcgcgagcttcggatcagacatcatgttcaggccaaggtctgctgcggcttcctcatctaatccgtcgaagctagacgtgacctatgaccttgcccagctgatcgtactatcgttcccctgtagatgcttcaggacctaggatttggtatggggaggagaagaaaatcaccttgagggcctatccgtatgcggtggaagggagtaggcaaacgaagggaaatgggatggagaagaagccgttcaacatcttctgctctggttatctcacctccgcctctgcacatcccactccatggctgaccgctcccatcttcgtcgttgcggcagcgccatcttccactggtaccttttctccttccccaccacacaaccctgggacaaagcgcgcaggggagcagggacattgaggaaccacagtcgctgctcccgacggcgatggtgccatgacttagcggacgtcggtgggctttgctcccgcgccgggagaaggacgacgcggagggagcgagtaggaagaaagatgaggcagaagggtaaagaagcgaggggagacgtccactcgccaagcgtcgtatcaaacggaagtatccagagcaagct

SEQ ID NO: 188475 - DNA, 378 bp, Zea Mays
ctggagagagaaaagagagaagggagagaaccggtgatgaagaagacgcccgacatcacttgatcatgcgttggacggtaaggattaaagggataaggatgaagaaaccgggaccgtaggatggtgattggagggggtagatttatctcgcgtacccgccgttcatcacgaatcgcacggctttgattagaagcaggaaataccccttcatcccaaccgttatccaccgtagaccggcaatctgacgactaaagcgaaatagtggggatcgtgcgctgtgagtcgtcgatctcagatccgacgatgactcgggaatcaggatttatacccatcgccggtctaatctgggcgctcggggttggatcggacggtccaaac

SEQ ID NO: 188476 - DNA, 660 bp, Zea Mays
tggatggcctattccttggctaggtccatggtgatgctcctcttggagatgacgtggccgaggtacgagatcgaggcgatgccgaaggcgcacttcgttcgcttgatgaagagctggtgctagcgcggcatggagaagatggcgcggaggtggtcagccaaagacttgttgtatatcagaatgtagtcaaagaaaacaaggacaaaccgatggaggaagggtcgcaagacgtcattcttgagtgcttgaaatgtcgccggggcgttgcatagcctgaatgacatcaccgagaatttgtagaggccctcgtgtgtgcggaacgccgtcttgtggacatcgccgggtcacatgcggacttggtggtacccggatcgtaggtccaactcggagaagaattgggcaatgtggagttcgtccaacagttcatccaccacaagaatggggaacacgtccttgacagtgagggtgttcagggcgcggtagtcgacgcataaacgccaggatccgtccaccttcttgacgagaaggatcggtgaagagaatgccgacacgctgctacgaacgatgccctgctccatcatggcggcgcattgtcgctccaactcgtccttgtgggctgctgggcacctatgttaccctgacacggggatacagatacgg

SEQ ID NO: 188477 - DNA, 656 bp, Zea Mays
tgagggctttccaaaggtgggtggcaagtcaatagtgcttacggttgtagaccgattctcgaagtatggccatttcattatcgtgggccacccctacatggcagtctcagtggcgaaggctttcttcgatgatattgtcaaactccatggtctaccatgttccattgtaagtgatcgtgacactgttttcactagccagttttggactgaactgtttcacatggccgaggttaagttacagatgagctcagccttccacccacaattagatggtcaatcagaagtggtgaaccggattataactatgtacctctgttgtctcgctagggatcgacctaaatcgtggttgaagtggctcccatgggctgaatattgctataattcatcatatcagtctgctctaaagtgctcgccattcaaagtagtgtatggcagggacccccctcctatggtttcctaccagccagggaactccaaggtagcagccattgatgtccagctgcaggacagagatgcatttcttgaggaaatcaaagcacgtctagtgcaagctcaagtcactatgaaaagttaccaggatcagcgtcacagagaagtggaattcagtgtgggagattgggtctggctacgactacaacagcgaacggctgtagggg

SEQ ID NO: 188478 - DNA, 322 bp, Zea Mays
aggtagagaaagggaagtcggactcgtcgaagatgacgtgacaggagataaggactctatgtgtggagaggtcgaggcacttgtatcccttgtgatcagggagtacaaaaaagacacaaacaagtggagtggggtggaagctttgtgggggcactggtagagataatatgatagcaggcgcacttgaacacacgaagatggttgtaagaaggagaggtaccaaagattgcaaagaagggggtagggtgatgaaccgccttggtaatgaagcgattgagtagataggtggcatttgtcagcccctcagtttagtactaagtaa

SEQ ID NO: 188479 - DNA, 864 bp, Zea Mays
ccacatcatgggatgcttccctcatccatgaagccaccatctcggaggcctcttcctttagatgctgacgatactattaagccagagcaacaaaagccaaaggtccctgtcttggaggaacatctagttggccaactaagcaaggaggaacaagatacactggatgcaaagtttaatgaagcttcagtcgctgataagaaagtatatccctctcttgtattgtttcaactttcaagggccttcatgtcttatgaattatgattcgtaaagcagacggaaatagaacatatattggacatttcattactgtcctcactcctcactttgacctaacttcattttgccccaaacatgcagcttgggatcaaagttcaggcatagttgtaaatggtccaaatatatttgaagcaattttgcgcaactggtctagttttgtgtctattagtagttgacaaaaatatatggctaaactaatacataaaaaaactatcgtttctgttgtaccagtatggcaccaaatctttcaaaatgctcctgtgacatgattgtatttcttgaatttctcatttgcaaaaatgtttaaaaatgtagaaactagaacaagatagaattattcggtacacaaactaatgttcagaacattgtttaacatatttgaatccattttctaaatgtcaaattgaaatggtaggctggtagcagtgtttgatctctatagattgtgttgacgaacagaactcaaggttgtgagtgacttcatacaattttactcatcttggctatgttattataacatgatattctgaatcttctatgaaggtccaagagttggagaaggagatccttgattctagagagaagacc

SEQ ID NO: 188480 - DNA, 412 bp, Zea Mays
cagttgcttcgtccgtctcgatggacacatacatagaggcgattgtctcttgaagctatcgtgatccccatccagatccagccaccgatagattcacctaccaacagatatagctgcagcgtttctctgtgttgcttgagcgagtttgctagcttatcggctaatcccgtgtctagcacggacgaacgcaagagatgagagtattgggcgggacgacacgtgcacctccgccggcggtaggtgaggtatcgtcgcgcaaaatgagcaacccaaccggccgcccgagatcccaaatctgacgttcgccgtgcctctgtgttgtcggatcggagctgctgtgatcagtttaaaaggcaaccagaaggtagctaggcaccatcacgtcgctctaagtgcaaataccgtacctgcc

SEQ ID NO: 188481 - DNA, 420 bp, Zea Mays
gacaaatcctacctggtcccagggacctaatgacccatctggatatacatttcgtacaccatggaacccatattttggtatgacaactcctgggggtcctcctacacaaccatgtttcggtccagcacaattgtatccacacaatccatgtccaccggtgcccacccatgttcccaaccagactgaccctacaccatttgaatccgaagcagaacacagcgtccaggaagttaacagccctagcaagccgtcagatacaccagggacatttaggaggacgaaggaacagaacttcaaacctgatgaagacctgttgctttgcaaaacatggttagagattagtagtgacccagtgattagcacagggcagaggaaggagggtttgtgggctagaatagagaaaaggtacaacgaacttag

SEQ ID NO: 188482 - DNA, 716 bp, Zea Mays
caataacctccactatagctgcagtgtgccacacaccacatgccacagcaattgttttcaaccctgatagtgactctacctcccttgggtaagaaacacttttcagatctccgtgacctaatacaccaaatgaaccgtccccaaaggtaaataactggcccatggatgttatcaaggctgtatgccaggtcccacatgaaacataagcaacttgaagaccttccagtgctccagaaatcctcttaggtatccagtgtcctacatcattgccatgtccgagaaggccaacattgtaagttccatctccccatgtataaagctcacccgttgttgtaacagcacatgtatgaaattcaccacaggcaacaaaatctacattggaaactgtcaaagactcaaccagacgtggacgaacacaatcttctcgtgttccatggccaaggcggcctccagaatcttcaccccatgtaaaaacctcaccatttttcatgaccaatgcagcatgcttaaccccacaatctacatgatacacatcaagaactaaattggactccaatggcttcgggaggagaatgtcaatcctgccagttgaactaataacagtatcagaaccagttcgtactgaagtatcgcagacaacctcaccccatacatacacatcccctaatgaatcacattcatcttgtgcagaaccatggctagatgtacttggggcg

SEQ ID NO: 188483 - DNA, 368 bp, Zea Mays
gttaatttctgcatctacggcagtttaacaaaagataacatcctgtgctatgaccacacaggctgacttatgaactggactacaaagggaacgtttgtggcgataagcatggcaacccaaatttgcaggagctggatgttagatactggatgaatccgaatcaagtctaccaaagtggactcaagaacagcaaggttaacctggctgatgccaaagccatctgcctgatggagtgcccaaatccagctgtagatggattgaactatatttgtgattatccagaagggaacatagacctctctgttgatgattggatcaatagggactatgactattatgagtttctcacaccagacatgaagaatagc

SEQ ID NO: 188484 - DNA, 625 bp, Zea Mays
gggggggaattgcgatgctcatcacaatatatacacattatggactttaattttcgtaataatgcttctgtgttttctttgaactatttttgtgttacagaaaagatatatggagcttactaaaggtgcagctgacaattaccaccgatcttggtggaaaagacatggagttgttcttgatggagagatcgcagctctgttctttaagcatggaaattatgacctggctgtgaaatcctatgagaaagtttgtgctctctattctgcagaaggctgggaagagctgttggcagatgttcttcctgatcttgcagaatgccagaagattcttaatgatgaagctggttatttggcttcttgtgtaaagttactatcgctggacagtggcttgttttcatctaaagagcggcaaggtttccagtcagaagttgttcgacttgctcacagtgaaatgaaacatcttgtgcccctagatgtctcgtcactaattacatttgctggaaatgctggtccaccactagaattatgtgatggagatcctggtacactatctgtagcagtttggaatggcttcccagatgacatcacactggagtctctcagtttaaggttgtcagcttcttct

SEQ ID NO: 188485 - DNA, 819 bp, Zea Mays
ttcatccttaagacctctgacacagtctccaataataaagccagtaatttctaactgtaactcatgctcccactgaaaatcatgaattgaagaattaaccagtgtgagcatctctctaatttgtcggaacaccacaaccagcagcaacttcaagctgttgaacccctcgtctatctcagtcagcttcccaacatggcctagtgtagagcacgggtcatttaggtcacatttatgagccacgttatagctcttgaggacccttatatcctcgatgagcttattaagctgctgatcgacttccactttcatcaaatccaagtattctgcgtaagtaacttctacatttgcatccaagaagtgttgatgcagccctgacactacagttgcaaatggtttgaagttgcttgcgacactagagcaattatgacacgacaatcctggcgatggcgcagttgcatcgttgaactcgattaaaccattgttaagctctgcagaagtcttagtgtcactggaagccggtctgttgagcaaggacagatcaccctgggcggtaaaccatgattggtcaatggtgactggtctagccaatctaccaagaaatgggtccattctttcatccaacacctgcaacatcgatcatataagattcaacagttgattgcacattcagaacactaactagctaaaccattatgaatctaaaactcgatgcctggcatgaaagcaggagatacttaatttcataggaaatgaaagtttaacaacaacaagtatcgactcacatgcattactgttctgaaattcactaaccggtagcgg

SEQ ID NO: 188486 - DNA, 391 bp, Zea Mays
tttacatctagggacttgtacccagcaaacaaacgctgcagtgctttgctggctacgttttcaaaggacagttgcttgtaactgcaaccaaaagtctgatgggggtaccttttcaaaggaccattggttgcttgcttgatcaggttaacataattgcattgcatgcaaggaaactgtcacaggcagccaagactgattgtcagtcagtaacctcagctaccttttagtccaagggtaccttttcaaagaacagttgcttgtaactgcaaccaaaagtctgatgggggtaccttttcaaaggaccattggttgcttgcttgatcaggttaacataattgcaatgcatgcaaggaaactgtcacaggcagccaagactgactgtcagtcagta

SEQ ID NO: 188487 - DNA, 314 bp, Zea Mays
ccaaaacctgtactcaacagtggatcaagtatttcctcttttggaattttttgtaactacagacgtggaatgaacctatcgaattctttttgcgataatacggttgaacccattttgatcatgcactttatagtcgatggatctccatgccatggagtatttggctgtttatttgcaactgtccctaactatttcactgaacgacaatacattgttccttcccgtcatatcacacacggagaaggttggtggcattcgctacatccactagcctagtctggcagcactaacaacttagtagtagtcatcgtagt

SEQ ID NO: 188488 - DNA, 308 bp, Zea Mays
tcggttcctcggcttcggtggctgcggcggcaggtgacggggcagactttgatctcaggaggagcacggcggatttcttgtcccattcctgcaggtgagcgcgcacagtgtgaaacataaggggagttatagtattggttccaataactgttcttttgcaagttacgggtctaattttgttgttccagtgctatcctgcctttgaggggtgactgtgattacagcgagcagtgccagatgaagcagaagcggagtgcgtcccagtcattcttggttccttgtgacaacgactatgtcaagaagcagcg

SEQ ID NO: 188489 - DNA, 393 bp, Zea Mays
attgtgctgtattcttagttgtagttgtcttttgattatgtcatcaggggaagccaccagattggcaggactttgtcggtatcataactctgcttgtcatcaactcaacaatcagttttatcgaggaaaacaatgctggtaatgctgcagcagccctcatggctcgcctcgcacctaaagccaaggtttgtcacagacaacctctatgcagtttcactgtgttcccaaggaaagcttcatgcgtttgctgagcccttccaaaaagtttgaactgactttcctttcttcaggttcttcgtgatggccgatggaccgaggaagacgcagccattcttgtaccaggagacattgttagtattaaactcggagatattatacctgcagatgcacgcc

SEQ ID NO: 188490 - DNA, 521 bp, Zea Mays
cttctccttgcttgtcagctcgcacccatggaaccctcgtcgccggccaccacggccaccttccctgctgccgtagaagaacatgagacgtaccctcccatggtgtcatcctctctattcccacttttccccttcgccgcctccacctcctctgctccccccgccgaatcccaatggctttcaaaccctagcttctccttcgatgcctcctccctgaacatcccggctaccacctcatcgtcgctcccgtcgccgcagagccactcgtccgatgaggacacgccgctgcaggccgctcctgcgaaatacgagctggtgccttcttcgccgtcctccgacgaggagagggggtcgcggaggaagagaagtgggaggaggaaacggaagcgcgagaaggagcgctatgatggggcagcgacatcgcggaaggctgggattcgtgcctgggctggattggagacgaagccagccaaggattactatgtcgacgcgaagggcgaccatgataacctggcttttgg

SEQ ID NO: 188491 - DNA, 417 bp, Zea Mays
gttttggctgagtacacaccatttgaggcaatactgaaagtatgcttgtcgtcaacctccggctgtagctcgatgccagatatcatgcaatgcccccctttaacctctcttctgcctctccataagaaacctttccttattttgtaaatttccttaatgacccacatagggaaatcaatggccatagcagtatgaacagacatcctagtgagaacttgttgtactagaattcttatccctgccctatttaacaagtcagccttccagttaggtaatctattagcaatcttatccaccaagtgccagagttgttggttggataatctgtgcagagatagagggaggcccaaatatttgcaggggaaggaggcaatgtcacaaggcaacatatgctggacatccaagataatctcatca

SEQ ID NO: 188492 - DNA, 520 bp, Zea Mays
agacattgagtctgccattaggacgtaccatctgatgtcccagcgctggtttacacatgcatcaccaacacttttcaacgctggcacaccgaggccccaagtactgtcttgcttcctgccagacgatgtcattgtgggttgaaattgtttacttactgtttcttttctgtgatgcagttaagcagctgttttcttatatgcatgaaagatgacagcattgagggaatctatgaaaccctgaaggagtgtgctgtaataagcaaatcagctggaggaattggtgtctcagttcataatattcgtgctactgggagttacatacgaggaacaaatggaacatcaaatggaattgtgcctatgttacgagtctttaatgatactgctcgttatgttgatcagggtggtgggaaaagaaagggtatgctttttttcattatttccacttttagtaacatcgtcttcagaaattcttatgagcttctaaaacttaggtgcatttgctgtatacttggagccttgg

SEQ ID NO: 188493 - DNA, 292 bp, Zea Mays
gtttgaaccacccactcttggcattcttttcaagtgtgacacagttgtttctgagaagcctgtacagtttactaaagtgacacaaattgacagaaaaggccttgaggaaatattcttctggtatccagtgccacctcccggttacgcttctcttggatgtatcgtaacaaaaacagatgaaatgccaagcaaggattccatttgctgccctaaactgagtctagtgagccaagcgaatatgtcagaggatcctatctccatgtcttctagctcaaaaggtccttgctgctgg

SEQ ID NO: 188494 - DNA, 429 bp, Zea Mays
cactacgtggcttctaatcaggaccgcacgatacggatccgatggcgccgattagaagagatgtagggttacactaggatctcatctgcaccgcacataagcgatccaacagccacgatctacattgcccactcccaatcttggccacacacccaagatcccatggcccacgataagccataccacgatcggccctgatccctccatcggtcgatcgacggtaaagatcaccgcaaccagaagcggtaccccagaccaatctccaccgtagatcgaggagtcaatggtcccgacttcgtcttcatccctggcggctgcgcacgatggcgcccttagccgtgcggctgctctcgccggcgagtagtgcgcctggagctacgaagcccagtttctcctaccagtagcgagctacgcatagagaagacacag

SEQ ID NO: 188495 - DNA, 1079 bp, Zea Mays
ggtgaggaggccctatataaactgggctgtcaaaagagtcacccgttgcctgcaggttctgtggcctcgctcccgtacaaatctatttggctcaaatgccactggtctggctcttccaactagtgatgttgatcttgtggttagtcttcctcctgtccgaaacctggtgagttgcatgactgataacattgtgtaacgagttattcaagtgcatctgttctccatattattgttgtcaccaatgtttacaagtcgggcgaccagctggtcgagtgagaggggcgaccaggcgactaatcgcgattagggcgacgattagtcgacctaatcggtcctggtcgacctctggtcgtccgttagtcgtcctatagatttaaggacatatgtatatgtatataactatatattaactatataaacactgtatttctgcaataatataggcataattagtagcagactagcagtaattcagtaaaagtgtaaaacagaatccatccaaagtccaaactgaaagtaatattggcataattacttgcagtaattcagtaaaaagtacagcaggaacctgctggctgctacctagagcagatcagcatccaaacaaatcgcgctagagcatccaaactgcattacctgctggctggagcacttggaggctggagcagagacgtcggcagaaaccagagaggacaaaggagaggagtagggtttctggcggctgggaagggttctggcggctgggaggggtcccggtggctgggagggtttttggaggggcgggctactgtagatgggccaaaaaccagagtgaagcccagtaccaaaactgcaacgaccaaaaacgaccaggaagtgttcgaccagacgactaatcgcccaggtcgacgactagtcggacgactaggacgactagaaaccctaatcgcgtcgtcctcctaatcgccaggcgaccaacccgactaatcgcgattagtcggacgacttgtaaacactggttgtcactaaatttattgttgctttcaggaacctattaaagaagctggaattttggaaggccgtaatggcatcaaggaaac

SEQ ID NO: 188496 - DNA, 1711 bp, Zea Mays
taggtcttgtggtggaaaaggatgtaaacgacattaccatctttcgtgtatggatccttccttggacgtgtccctaggaatatggctttgcataatgtgtatgaaaaagaggattcagtttggtgtatattcagtcagcgagggaattgaatctttatgggatgtcaaggaaggtaattatatcttataaagcgtatgccagtttttctttgattgttatcattcatttattaattctatcgcctctccattttaggagtggtgaacagcaagcaatatttcgttaagtataaaaatcttgctcatgtacataaccagtgggtttcagaaagtgatatagttgatagcaccccgcaaggttctgatcttatctccaaagttagcaagaagattcataaagaaaaggtgattactcgtgtgatgaattccattgcttatctttttcacaggattttaggctctgcaaaagtatgcatgctgatggattcttttctgattttgatttcttagacaataaggtggaagcaggaatgggctgaaccacaccgtctgttgaagagaagattgcttatgcctcaaaaagaagccgaagttttttttaattcactaggtgataaatttgtatactgtaatgtcgagtggctagtgaaatggaaggatctgggctatgaacatgctacatgggaactcgagtcctcatcctttttatgtactcctgaggccgaggagcttaaaaggagctatgaggaccgctttaaaactgcaagaaaagcatctgatccttcaaaagtagacaaggtatgctatagaaaacatttatttgtattaactggcacactgcaacttcatttgagaagaaagtgattataatctgtgcattttcatcatctagggtatatgctcatccctttgctagtccacaacaatcaacaagctctattagttccaagcaagtttgtatttttctgcaattgtctgtcagtctgtcacattgctttgctaagctgccacacaaataatgagctctattagttccaaacagtccttagattgcttaaagagttcacatttcacaattttcagtgatgctaaactatctatgtgctatacaggctaagggggggatatttcagcaactcgagagactgccagatggttgccctcctggtttagacgatgaccatttgagatcacttaaccagcttcgtgagttctggcacaattcttgtggtgctattttcatcgatgatcaggtagaatagaactatctaaatatttagccatcatgcatgaaaaaggtatatggatttgttttattggcaccttccacttaagttcttggattctgtagatttagttgtgcttccagtttttgcttgtctttttatcagttgaggtctatggttactgtcatgacaactctgctggcgcccttgtattttggcagattttaatcgactatggctgaagctttgattattacatcagtgtattttacatgtttaactaattaacttatctattgtacaggagcgagtaattaagaccattctttttgtggcatccatactgcctcacatctgtcaaccactcctcattgtgtctactactactactctctccttgtgggagactaaattcaatcgcttggcagcatccatcaatgttgttgtgtacaatggagagaaagatgtacgcaaatcaatacaag

SEQ ID NO: 188497 - DNA, 687 bp, Zea Mays
agcatttcaaagagatgttcaccacaaagacaacactaagcatatagtaagcaggaaatcaactaagtgtcactcacaagtgaacaaggtgaactattgtaccgatgggatggtagttagaaagaggtggcaccaaaacccaaacctgatttctttcaaaattttcaagctcctcatgcatagcattaacccagttaggatcagataaagcatgtccaacatctcggggctcaaaagtagcaagaaaagctgagtgagcaaaatgagaaatgtgttgtgacctagagcgagtgactcgctcatgaagctccccgatcatctgctgaggtgggtgacagtgctgaatatgttgtggagcctcccttgaggaagtggcctccccctcaacagtagcttcaactcctccagtctcagcaggagctggctcgagcggaccccaagtggtggaaggagtggggtcgggtccgtcagccgtagtagtggaagcaggttcgactggggcgaccggtggagttggctcgagagcaacccaatcggcatcgtcgtgctcctcctccataaagatggtctgtctcatctgatctggacctgcaagctcaaagacaggggatggacaaggtgcagtctcatcgaatgtaacctcacaagtctccataatgcggttagtctctaggttaagaacacgat

SEQ ID NO: 188498 - DNA, 1126 bp, Zea Mays
ctcagatagcaaggactcagaaacttcagatgataaaagtgaccagagtggttcagagagggaaacttcttatggtcacaggtcccataaaaaagataaaagggcaggtaagaagaagcctagtgtggttgtcatccgaaatatcaatgtaacatcgaaaaggcacggatcatcagacagtgactcacaaacaggttcagatgtagtatcagaggatagcgacgattcacacgccaagtccagaaagaaaaagaataatagctcaagttcaaagaaaaaagatgctaggaagatggttttcgagtctgcagatgaatatagcaagaatggaatgtcatatgggcaagatggagaccaagggagctggaatgttttccagagtttcctgctaagagctgatgagaaaagagataatgacgcggacctattcgccagtgagaaaaaagcacccccagcaaggatgaaggagagcacaagcgttgatgttgattcaattctcttggtggagcaaaattctgctggggccaatgaacataatacaacaggtttcagtatggaaaatgagaggattagaccccagcagatgctgtctggtgatgaacttatgatgtatggggaaggtgaaggcatgagctttggatgtgatgacataaaggagattgaagctggaggtgtgagatacagaagaggaacaagtgatgacttcatgatatatggacaggaaaagtcaatggacagagggagttctttggatcctcttgcagaagcacagtacaagagccccaccctggttgacaaaaatgtgcacagcttggcagatgaatcgtttatgatacctcttaggtctacctcagaggataaccatgaaccagaatgtcgtactgccattgacattgatgttgagcttccctcaactgttcagaagatatcagatgctaaagctggtagtcagcttttctatgagccagctgaattgatgccggagcgtggatgtgaagacgtttcgtttggatatgatccagcaatggattataatagtcagatacagagtcaatctgccaccatggttgaagatgcacatatggaagatgcattgttgagcactgtggatgaaataaagaagcca

SEQ ID NO: 188499 - DNA, 385 bp, Zea Mays
caggtataaaccaccttatgcaccagttcatttaagaatagctagataactacggagcaataatgacaagatcaagaagacttaaactatgctaaacacaccactactctgcctaacatcctcatagggaataacttatgctctgaaatgaaaaaagaaaacttgatgaagatttacatgtcattgtttgccctcatagcaacgccgaacgtgcgagttgtcaacatctacatacttggaccagaatggcttgtacttggaaatggcaaggtcaagccagggcttataattcccgttgtaatgaactaccgcagcgttgtcgatctcagcaatgtcaacagctggatcatagcccaggcccaagacatgccaagtacgattcaac

SEQ ID NO: 188500 - DNA, 439 bp, Zea Mays
ggtgaggaggaagattgtccatgagagaagaggtaggccgattggttggagaaaagccatgagacgtggagcagaggagtctccaagcggcatgcggagcggggaagaacgtgctgatggaggcggacaacgtggagagaccatgcggaaggcaaccgtgcgcgcacgtgaaggaaggatacgtggaataagatggacctacaacagaggaagtaggcgcacatgcgagatggttggccccatggtcatggatttggtagcacgggagagaagatagggtagtggaaggagccggaaggggacctagattcttgataccatagttttcagatcgcctgatcgatcccactgggcgatcaggcgattagtcgcgattaggcgtcgatcagggcgattattcgcccctgatcgatcctaatcgccccctggccgtcctgtg

SEQ ID NO: 188501 - DNA, 323 bp, Zea Mays
attgtgccatctgcctgatttcgctgctgttcgcttgattttttttccatccttgcttgtcaatcgctcgatctggaaggggacggtggtcgtggttggtctgagggcacacagcagtgagggacttagggaagtgaaaggaagcggagaggtgagcgatggcggcgcatctagaggacagagggaagcgggaatcgtggcggcagcatggggcaggtgcggaggctgaaagacggttctggagaacgaaagaggcgtgagagggcggtggctatgtaatgttctggattgtgatatataggcaggggagggacacatcacac

SEQ ID NO: 188502 - DNA, 358 bp, Zea Mays
acaagaaacaaagttggttaattgtgatcgtcgcactgttctgtcaatgttgggcgctgattttgacaataattttgtgtgcctcccctcgattggggctagtggtggggtgctgatcacttggagagcaaaattggggagaattgttgcctctcgagtggactccttcaatgtttcagtaaaattcaaccctgctgacggcgaggcttggtggcttacctgcgtgtatggacctcaaggacatgacagaaaaattgcctttatgaatgaactgagagagatcagagctgcttgcgccgggccttggctccttgggggtgattttaatctcattttcagagatgaagacaaaaacaac

SEQ ID NO: 188503 - DNA, 287 bp, Zea Mays
aagacttgtgttttgcactccctataggtctagttggttggaaaatcagaaattccacatcttatttattgatgaggcagcatacttaaaagaatgtgaatcattgatccctcttgcaactagtgggataaaacatgtggtgcttgttggggatgacaaacaactacaatcagtggtaaagagcacgatatgtctttattataacttataagaccatttgaatgtatccttgattccttgtgttaccaatgattatttctagactgctaatactttctccttactgg

SEQ ID NO: 188504 - DNA, 447 bp, Zea Mays
ccactcgtggggggttaaaaccccgagaacaaacttgggagtagcagcggccagccggaagcgagcggagaccgaggggagagggggtgaagaagcaacgagacgcagcgagcaagcgaaagcataccagagcaccaagcatagggacgcgcgcgcttctccagttctccctccctgccctgcaaggcggctgcaactgttccagctagcccctctcccagcctctgcgtcgtagacgtggtagtagcagccgcagcagcagaagcggcggcgagcatgctcttggcacccctccccggcgccgggcggatctgccggagggcggcggccggggcgcttggagcgcggcgctaaccgcgttcgaaggacctcgggatctgacgccgcgcctcccctaatcgatcgactccatcggtggcggcggcggccgaggcggcagcagccggg

SEQ ID NO: 188505 - DNA, 516 bp, Zea Mays
ctcaatggaacaagaattgtcggtggtgaaccgatgaacggaaaggagattgtgagtgatatgtggggctacgagaacatcgttgagaaagaatggtccagggagcaccgaggcacctactgaggtgaccggtagagtggaaccgtttccaacgacgatcgaggtagtgtgtgtggaaggagatgggcgtgagtgagatagcatgcctatggtgggggtggtgtggtaggatgcaccggagtcgatgaccctgtcagaagatggtggagcaagcgccatggtgctgtaggcagcggcgagggaggtcgtgtcccagccgccagcgaacggggaccaagatgtcggggtgggggtccctgtaggcgggagctaggcgggactgtggtcgtcggtggcacgatgtacggtggcatgccgtaggcaggcagcagaggtgcgacgtaggttggcatcgtcaggagagcaggtgctgcgccggaggacgggaggcgatgggggcctgacccagccacatgg

SEQ ID NO: 188506 - DNA, 433 bp, Zea Mays
cggggctcatgggaaacgtctacattgggactgcgctcctgcacctatatggctcccgcggcctcgtcttgaatgcccagagattgttctgggagatgccccagcggaacgtcgtttcttggacagcgatcatggtggcattgtcgtcaaacgggtgcatggaagaggcattggtagcctatcgtcggatgaggaaggaaggggtcatgtgcaatgcgaatgcactggccacagtggtcagcttgtgtggagcacttgaggatgaggtggctgggcttcaggtcacagcccacgtcgtcgtgtctggccttctaacccatgtttcagtagcaaattcgctcatcaccatgtttgggaacctcaggagggtgcaggatgcagagaggctctttgatcggatggaggagcgcgaccgtatctcgtggaacgccat

SEQ ID NO: 188507 - DNA, 386 bp, Zea Mays
cttcatgctgaacagtgctgttattctccttaacctcctctagcagaaccatgacccacacttcatgacctttgagccatttctgcacttgcagaactgacacattctgaatggaagtattgttcccagcaccatctccatacaacttcacccgttggccagcatccttaaactgtaatactttatcaatccaatcacactccataggactgtgctccatcaaccattcataaccaagtatggcatcaaatacccccaaaggtaacaccctcatatcagtatgatagaaatgtccatgtgaccaccactccaagtttttaaccatagtgttacaatccaatgcatgcccactagccaccttaactttcactggctgacagtgttcc

SEQ ID NO: 188508 - DNA, 378 bp, Zea Mays
cgaacagtagtcatatgcgcaacatgtgcaaaagtctcatcataatcaggtccttgagtctgttgaaaaccccgagccacaagacgagctttatatctctcaatgaaaacatctgatttggtcttaactttgaagacccatttacatgtgataggaacaacatgcgagggtaaaggaacgatatcccatgtaccagtgcgttcaagagcagccaattcatcaatcatagctagctgccactcgagaagcccagaagcttcctgatatgtagtgggttcaacaattgccacaccagctcgtggaaaaccatagcgatctggaggttcaatggtaccacggtcacgaagacgatatccctgattaaaaacatcattagac

SEQ ID NO: 188509 - DNA, 330 bp, Zea Mays
cgcgggttgccacttcggcgtcgtgcggtgtcgagctcgggctcacatctcagtcctttctagattagcgtgtcgcgcttagggctgcggaggggctggcgcatttgccaggatcgccggcgagccgagcgtacgggtctggggtgctcgctccgccatggaacgactggaggttgacgacgacgcgtccgtcgttggatcctgaaggagtgtgtgagatttatccaaggaaacgatgatcattggtcgttagatgtgaatcgtagggccacgatcgcatagcaggcgtaccggttcgacgtaattggctcagggcgtcgatctgcggtt

SEQ ID NO: 188510 - DNA, 322 bp, Zea Mays
gttctgtgacagaacagacgaaaaacaaagaataggctacaagcaaacgacctttctttgccccaggtctatctaattggtatggccatacatttgaatgaaaacaacactaaagtttgaagccaaaatacactttccaatttgcaataacctcacaaagcaagccagcaagcagaacaaatcaatactttcgctgacaaaagacatcctagttgttcaatacatcagacatcatttttcattacacaaacaaaaaattccagatgcaacaggagactttgagcaaaccatctcataacaaaaaatcgagaatagcagcaag

SEQ ID NO: 188511 - DNA, 356 bp, Zea Mays
aatattctgatactcttgaaaaaggttgaatagacagatccctccaaacttcccacttgcttttactatttcgtgattattgcaaactaagactatcaaactcaaaggatttctaatctcgcatgtatctattagaatccacagaaactagagtggaaaccactgtcaattgatttgttgcctcatcctgataacttcgccaatgcaaggttcaacaggagtagtaggtttagttattctgtgtcgccacaacttctcctattttgcctcttcattttgtaagaaattttctgtcctacgaccctacctcactattttatatgttgtcaacacacattttagcaactcagtactgc

SEQ ID NO: 188512 - DNA, 290 bp, Zea Mays
cgagacatttgcacatagtactccagcgactgtgggatcatcacatgtatgccaaattctccaaatgtgatttttgcctaagggagatcaaattcttgggtcatacaatttctcaggatgggatagcagttgatcctgagaaggtgcaagaggtgatggattggaagtcccctaccaccgttcgacagattcggagttttcttggactagtgggatactatcgacgattcattcctgacttctccagaattgctaagccaatggctgagttgttgaagaaggtagtgaag

SEQ ID NO: 188513 - DNA, 385 bp, Zea Mays
tgcagaggtaaaagattttagacctatcagcctcattcatagttttgctaaaattgttaccaagttgttggcaaagcggcttgctcccatgcttcctgagctgatatccccaaaccagagtgcttttgtaaaagggagaagcatacaagacaactttattatggtgcaacaaacagccagagcaatccacagacaaaagatccccaaagtgcttctcaagttggatattggtaaggcatttgattctgtttcttggccatttctgctagaagttcttgggcatcttggttttggtccaggatggtgcaatattatctccaagttattgtgttcatcctcgactagggtgttggtgaatggagaacccggaaagcttatttgccac

SEQ ID NO: 188514 - DNA, 445 bp, Zea Mays
aacgcgttctccctgaaaagcatgctgtgaggctcgatatcgctgcggctgtcgtgctcccgcagcgcacaggaaggtgagtgaggaggaagaaaccgcatgcaaggggacgggagtacgggaccggcgggcggaagacgaacgggattccaaaaaaacgacttgtcgtggcggagcggaatccacaatagcgacgagccgtcggggtctgccggcctggatgcaaaccagtctcgtcgtcacggactcccggaataaatactccctcctgcgtatagctcttccctgtcctctcatacactttctctgctcgcgcaaagctcttcctcgtgtaaagacgacgagaaatttatgtactctcgcaccacctcacaaacagacctgatcctctccgtttctttttgtttcccttttccctcttccgcgattccgtcgcccggttcaa

SEQ ID NO: 188515 - DNA, 554 bp, Zea Mays
aggacttgctcagcatctcttctttcatcaacaatcacctggacaacctcagtatcctggcacaccttgtttcttgacatttttctagtatataccttcagggaagtggaaatctgtttcttcccaaaggtcgcggaggagtaagaaacacttgtcggggcttcactgttcgctgtgattttatggggcgagccagaaacagttctctccagcgtctcctcaggctggatgtgagtaggcgaagagaatttattcaggcccagcgaccctatcacagtgtccttaactatgggagatagctgatgaggcaagttcaggttggtcatctccagcgtcccatccaagggattgtggtggggcgaagatggaccaaacgatcccagcggcccatcaagggttatagcttcttcatatggttcctggtggggcgagtcatggcacaagatttccagcggccctgagacaaatgttcccaggtgcggagaagaagtggcctgacccagcgtcccttccaactgaatgtcatttatcccagcatcgggaggaaacgaagc

SEQ ID NO: 188516 - DNA, 599 bp, Zea Mays
caaactcatccatgagtttttctgcaatctctatctctctagcttttgtcattatctcaataatcttatgatatgatgcaacattaggagggatgttccggttcttcatttccttgaacatttctagggatttcattggctcaccagtgcgtgcataaagctccattcggcagatataagcttgggcaggaagctcacaaccactccgaagaagccaatgccatgttgcctcagtttctttaatatctccttccttggagaaggccctcatcagtgacaccagcacatcagtgctctcctcaaacccggctcgcttcatctcatccctaagagctttgatcctgtctctatcaatgacatcttgatagctgtggagccagatgagccctgcataaatatccttgtgcacctcaaggttacttgtgactatattgtggtagacaaactcagcctgcctgagattgtgctttgcagtgcctcctgttttactcacaagtgccctgaacagtgaattatgcaggctgaggcgaggcttatagccacccatctgtatcatctggttgtagatggtgcatgcctcctcaagacaacccccccta

SEQ ID NO: 188517 - DNA, 769 bp, Zea Mays
gaaaggaactgcagaatccttggatgttgtcacaactgttaagcacagggaaccacatatgccctctgttgatgaattttcggcactaatagaccactcaagttcaggtgttgagctcgttcaatttcgtcagggtcaatcgaaaactgcatcagatatacaacctggaaaaagtacaaatccatatagtctaaaattagaatcctctcatgcacctttagtcagtagttcacacccactggagtcaacaagtttagcttcgtcttcccacgttacttctgataatgggttttcgttgcataccaaaagcagcaacagagcaactgcaaatggtcatggtagagagtgtgcacagcccttgggtatcagttctgagcgtgcacatcaagctttagcacttgagcaccttgagaatatgtggacaaagggaaagaactacaaaccagaaaatgtagaacatgtcgcaaaagtgtctgttggatctgcttctctgggctcgacttcagttcagcaatcagttccttgcagcacttcagtttgttacaatcaaagtaattctgaaagaccaacagcgtcatctcagtcaaaggaccagcatttggtaagacactcaactacacctacatatgtaacatatccaaatggcaccccgaaaagcctatctgcagaaatggcagaacatgccggtccagaagactttgcagtagagagtgagagttcatatgccactgaggacgatgaattcaacaatgtgactggacttgattct

SEQ ID NO: 188518 - DNA, 567 bp, Zea Mays
cggcgccagcggccgccgccggcgaggtcaaggaggtggtggtcgtggaagtgcacaaggctgcggcggcagacgcgaagaacgtggcgcgaggaccagatgaggagttggacgacgacgacgacgaccacgacgacggcgcggagggtgaattgttggacgaggagcaggagacagacgaggaggaagaaaaagagatgctggatctgcaggatcacatggccattgacgacgacgagcaaactgctccgcaccaaggcaaggatccgtagtccccagtccccaccaccactgtcgtagtagcgtcttcgcaagattcacttgtcggttgaactaataatgacactgtgctcttcaattgctgccgtattgcagtggacgacgacgacgagcaagatcttgagccaccgacaaaaggtgcacgaacacctctgccaatttcgtccctattttccccctctgtattctcttccatttcttcactgttgtgttcttgcctccggactgcatcaccgtgaatgtagcagggattaagcccacgctgtcggtggaagaagagagagcgac

SEQ ID NO: 188519 - DNA, 286 bp, Zea Mays
gggggtaatgccgggggtgttgccggtggtgtgccgacgaacttcttgagcactccaacatggaacacatcatggaggcgggcccctggcggaagctcgagccggacagccacggcgttgatgatctccaggacgcgatacggtccaacgaaccgtggcttgagcttgccggtggagctccgtggtagtgatgctgccgggcgttgccggagtcgtagtagtgcccagtccccaatttggtactccaccggacgatggtgctgatcatagacacgcttttggactg

SEQ ID NO: 188520 - DNA, 526 bp, Zea Mays
gtcgtggcataggttgtgtcctactttagtggtagtcatactgttgtaggtgtagatatgttatgttcttttatcgaatagtagagtccacgccatcaaatacgacgtagttggtaaccaatgaaacaatctatacttgataagagcaagtataataaggtgacgtggacgggctgcaagagatggcacatggaatttatggtgacatagaagaaagagaaatagagagagaagagaagtcgactgcttgctagtagccatcagaaagtggggttgctcatgaacttcattcaaatcattttgtgagaggaagaggtgaaagaagtgttaaatgtataacttatattatgagagatttattatatgactagacttttatttggttatatgtgacatcataaaacccattatgagccatattattaaccttgctctaatgcttccgcccgtgtctacatgattgatgcatgtatgatatagtggtctcgagcagtgtgatgtttgagttatggcgacagtgtgtctg

SEQ ID NO: 188521 - DNA, 615 bp, Zea Mays
gcttgcccttccgctgcataaggtgcgtgaccgctgcccgctctactacccggacggccggaccgtggagaccaggctggataggagcatcgatctggtgttcaacacgcttctcgaccacgccaccaggctccgggagtctctcaatgaggctgcggagaggatctcgctgggggaagctatagacaagctcaggaggctctaccatgtggccaggtcggatgacgagaggatgttattggattggcattttgcaaatctggaattctccaatgccggttgcctatgggagctttcgctcgcgcactgggatcaggacgatccttatgagatggggggagaccattgtttcttagccggagggaattcccggctcatacatgcattgtgtgatggggtgccggtcttgtatgagaagaatgtgacacggattgagcatggagtggacggggttagtgtcacagtggaagaagggcagatttttcaggctgatatggtgctatgtaccgtgccccttggggtgctcaagagtgggagcatagtatttgacccagagttgcctgaagagaagcttggggcaataaagaggttggggtttgggttgttgaataaggt

SEQ ID NO: 188522 - DNA, 396 bp, Zea Mays
cttccgggtctcatggtggtcatggtcggatggcccataatccatccggtcgatcccgacccatgacaaaccctcatgcatgggaagcaacaagtgatgatgagggtgggaaagatgatgaggttgatcttccccctgcccatgcccctgttattcgaggtttggtcctccaccgggcggaggcccgtcgcgctggcaatgagccagtgactgatttcactgccagtggaggttctgctcttctgcaggacatccgtttccagaatcctgcattacgccttcgtgatgccaggattgatgggaaccgtttttgggacgtttcatcatgtggatttttacaacactgtgatcctccccaagaaacatcaacccatcctacatcaatgctatatcaac

SEQ ID NO: 188523 - DNA, 589 bp, Zea Mays
gagtcaagcagaaacaaccttcatggtatatcctgcagtaaaatggagtttgtttgctgcatcctgctgaaggctggatgtaatatatggcaatggaggattcttgtgaattttacttcttttaacacctaaaacttcaaatgtagaagaatgaatcatcttttctatagcttgcgcttcttcttgagagggtatggaaagttgatccagcttttttgaattcaaatgctttatacagaatggaatacatgtggcatttgaaggatctgctgattgtattttgaagtctgtctgtactgtccagtactcatgtgccttaaactgttctatttcagcttctcgatcgcacacaagggccaaagcagcagattggacccgtccagctgattggcaaccaggcaacttcctccacagaagtggtgatatgccaaacccaattagataatcaagggaacggcgtgcaagataagcattgactaagtccatgtcaatatacctcggggacattaaagccttctttattgcatcctcagatatttcatggaaaacaactcttgcaacagtcacatcaaaacccagtacaccttgt

SEQ ID NO: 188524 - DNA, 372 bp, Zea Mays
caatactcttcgacagagtactgataacctttgctccagttcggtctcggaggcaacctaagctttcatcgtcaatgccgccgaagagcatcgcccctggctgatacccgcaggatatggcatagtctctcaactcttctttctcagcctttgacaattcttgtccaattaagttttgaaagttgaaattttcttcttctgaagtatcttcggccatctccttctcttttccaggcactgtggccatggtctcttcgatggctgtagtagcttcttctgcggccatatccagaagcattctatcaatattagaaaatgtgctttctagatttgcatcgtcggtcgttgcagcctcggcagttgcagcttcag

SEQ ID NO: 188525 - DNA, 489 bp, Zea Mays
caagagcggcagctgtgggggagctgccagtggtagtgtgctcacgtctgtgagcaatgccgcctcggacggtggtgctggtggcaatggcaccaccgtccgattgagcaatgccggctcaggaggtggtggtggtggcaatggcgggctggaggggagacctgtggtggtggagtgcaagcccaagagggaggtcagcggcaggaaagaggatttctactggccacaggattttgtgctcggggatgttgtgtgggcgaggtctgggaagaagtccccgacatggcctgcgctggtgattgatcccctgttgcatgcgccggaagtcgtgctcaactcctgcgttcctggcgccctctgcgtcatgttttttggttattccgctaacgggcatggcagggtaattaatcattgcctcgtgctgctttctgttggtttggttaccgaatgatgaatccacaacttaagggttgttttgtttctagtgac

SEQ ID NO: 188526 - DNA, 668 bp, Zea Mays
cagctcctccaggccccacgccccatcatcgtcgcagggaaggatatcatcgtcgcagggaaggatttggctgccgccgtgttaacgtcgcgggtatagcgccaacaagcccacgatgttcggcctgggacattcgcgggtgcacaaggatgtgtctgtgtcctctcccagcggtcctcggggcagggttgcgtggaatttgtcgatcggagcatcgccgtggagctctgtgcgtcgatttccggtaagaagcaaccccgctatgctcgtttgatgctcttctgcgcataaagttgatccggtgaggtttggggcgcctggcgaggctttggtgcgctctggcggggtctgccgccgcgggtgtgtgttgcgccgccgttagtcactagcgtgaggtaggtggcgccagcacgttccttgacctagagatggacggctacagtattgtttggtgcatctgttcggcggcatcgtgttcgggtctaggctgggtgcacgctggtgaaccatcggagaaagagagagttccagggagagcgcggcgtctaacctgggcggaatggctggggagaagtcttaggttgaagatgatcccggtccgttggttctcagatgtgtggatgagagatagtcaagctgtagtgtcttcaggattaaatctgggccgt

SEQ ID NO: 188527 - DNA, 1306 bp, Zea Mays
ctttgcctccccaatcctccttgtgcaaaagaaagatggcacatggagattttgtgtctattaccgaaaattaaatgccctcactataaaaaatcgattccctatgccacttgttgacgagatccttgatgagctagctggtgccaccttcttttcttccctggacatgactgctggctaccaccaaatccgtatgaaaccaggggatgaatataaaaccgctttcaaaactcaccacggccactatgagtttcttgtcatgccattcggcctcaccaacgcgccagctacctttcagtgcactatgaactcgatcctagctccttatctaagaaagttcgctatggttttcatcgatgatattttggtgtatagtgctaccttggctgatcacatctcccacctcagattagtccttactgcactccgggaccatcagttctttctcaagcagtccaaatgcaagtttgccaaatctgaactgagttacttggggcacatcatcacggatgctggagtggcaacagacccctccaaagtggtggctatgttacaatggccggttccaaccaatttcactgagcttcgaggattcctgggtctcacggggtattacaggcgatttgtgcaacactatggactgctcgccaaacccctcaccaatctgttgcgacagaaacaatttcactggactgcggcagcccaaacagcatttcaaaacctcaagactgctatgacaactactccagtgctcacacttcccaggtttgacctgccattcgaggtggaaacagatgccagtgatggaggtctcggggcagtcctcatgcaacagggcaaaccagtggcatatttgagcaaggctttgggagaacaaaataagcatctatctatatacgagaaagagttcctagctctcatgatggcagtggaccgttggcgtccgtatctccaaagaacaccattcactattcgaacagaccacaaagctctcagtttccttgagcagcaagagcttcagtcggacctccaacgcaaagccatgaccaaactcatgggcctcaactacaaaattcagtacaagaaaggcaaggaaaatagggcagcggatgccctttctcgcagggggcactcttctctcgccactactgtcactgagatcataccgagttggattcaggaagtaatcaactcctatgccactgacccagcagcacaggcactgttactcaaattggcaatctgtagtcctgatgaccaagggtattccttgcagcaaggattgatcaagcgccacaaccaagtc

SEQ ID NO: 188528 - DNA, 323 bp, Zea Mays
cctctcccgtcgggcactcgggctcgtcagactgcgcccgggcgccgaatctccagacgggatcgcgccccccatctgacgccaccggcgccggagcccacggcgaccgcgcgcctctgcctccgatctaaaaggtgcgccttcttaccgagattcggcgagcttcagtagcaaggaacgagggacatcggggcagtggttagattggcttgcctgggagggatcggagccggacctgcattttgcgtggtaagtgggaaccgtctccgttgtccgtgtgaatgcgcgcgggatcgcggtgatctgcgcttcgcactcgagct

SEQ ID NO: 188529 - DNA, 517 bp, Zea Mays
ctaacatagcctatgggacccacatggcagctccatcccctccgcgcgatcacaacaaaccgggatgcgatcttaacaactccacaccaagatttcctcggttgttactacctctatccgggatataaaatctgaggcctagcaccttgaatcccaagtctcggccatggtcccgagcacgccagagcgccaccaccaatcgagcagagaatcaccgggagagggatgttggtcgctggcgccaatccacatgttcactgtcgccgaggtctcaacgcatggctctgggggctcgctggcgtccattgtgtgcttctgtggccacacctagcgggaaggagtctcgggtcgcggtggattgctcaccgaacttcggtagttcggtgtgcacgttcgtgccaccccacgtcgtggccgggcgtcaccattgtccgaacaactctaggtaagacccgaatagtcttgccaatcgtgttgcccaccttttgcgctcatattcgtggggttccgtgcactt

SEQ ID NO: 188530 - DNA, 490 bp, Zea Mays
gatggctgatgctgcagacctagacgaccgatgatgcattatgacctaccacattgctctcctcatcggagtgtgcttgcaactgtattactgatttgatgcaggttactattgttgtaacattggctgcatcctttgcgatctcctttttcccccctcatcacatatgtgtacagtggcctgttcaatgcttcatagaagcatataggctgatgtctttttcatcactgtgcaacttgccaccaatattccatctctgtcgagtccaacacagatagaattgtactgtcttttttcaaagaggtgcagagatcaggcacaccaaagcagcagcagcatcctattgaagaccaggattttgaagaatctataactaatcaagaagcagaccattatgattgttggtacgagagcaggagatcaggtggcacgacaaaaagtaggctgagagcgcaaatgtattgttaagtaaccaggtgacattgtgctg

SEQ ID NO: 188531 - DNA, 593 bp, Zea Mays
ctcccctgctggacgttccaaggcgcagcggtgggcgtcttcctgcctcaccagcccgtcctcatcggccttgggcgttggtgccgttggaagcggtgcctcgcagaggactttcaaggacgtgctgctgctccctctgcccctgccgtctgcccggcagtccctccctagacctccgcacagaccgaagtttgcggtggtgcaacgtcctggaacggtgcgcaggcctgttcctgaccgggagggctgggttaggggtcgaacctcgtcgacgtcaactccccccttcgccacctccccgtcgatcgatccctgaggatctccggggtaggtgttttaactgtctggcctcctcctcatcgggcggcgggattgcccgacgttcggtgcgctgcttcaagtgttgggggctcggacatcgtgcagttcagtgcaaggttcgtgctgcgccggtgatcaaagcttcagtttcggtgtgggattgtcttggccctaagctggttcacaagcctttggactctcctagacgcgccatggagtggcgcagggtctcttcgccgatcccggccatccagaggtccggtgtggctgat

SEQ ID NO: 188532 - DNA, 289 bp, Zea Mays
gaggttgacgtagaacatgtcattgtcgacggtgagcgtcgcttgccggttgacgcccgggcaggtgacatgttcaccattcatcactattgctatgaggcgtggacgatgctgcaggggcaacccggtgtggagaacgacatcctccacgaccaccctgacctacatggtgtcgctgatggaaacccctacgattgcgttgagggagaaatgtggggtttcttcctcgatgacttcttcgtcggcctccgtgcccgtggtggtgtcgtcctataggacgtcgtcgagg

SEQ ID NO: 188533 - DNA, 395 bp, Zea Mays
cctggtttctttcgataaatgcaaattttcaaatgagtacgaaggtgatttgtaccatttcttgtattagctgaaagaagcttcttgcaaaagttacacctagccttccaaactccatcatcatcacatactcttgtgaagtcttcccaaacagtcgaagtgagcttcctttgtgatccatgagatcgagtagcagcaacacctaatccatcttcaccttgaccatctggcacatcaacaacctcaatggagacagctgctgcaatcgggggaacagacgtttgcgacacttgttcatgttggctgctattggcaggggttgccatcacaactggtcagctgatattgggctgcagaaatgaggaatacatgaatcatgactggaatggctaaat

SEQ ID NO: 188534 - DNA, 278 bp, Zea Mays
aagacctctaaccgatcaacaagacatttatttatccaaaggggcatggaatgtgatgattgacaaagcgaagcatcacattgccatacaacaaaaatcatgacaacaccgatagatactatccactaatcgtttgaaaaattaaacttacttctcgcttgccactacatcattccttaatcacacaaccatcacgagcatccttcacacgattatataatagcgacctaagcgtcgtgtcacaatacatacatctttccccattgcgagtataacca

SEQ ID NO: 188535 - DNA, 393 bp, Zea Mays
ggtggagaaggtgtcagacttaagacgcaagggaaacgtccacaagtagtgtgaacagtcgtccagaatggccagataatatttatgaccagaaacactagtgattggtgaagtccaaagatcacaatgtattaattgaaaattgcgactggcatgtgatgaagaagaatggaaaggtagacgaacgtgacgtcctaactggcatgcatggcatatgggggtgtttttattcggggtacaagggatgacagaagaccgagctagctgattgaggaccgtagatcctggatgtccaagtcgttgatgccacaacgaagaggtggtagcatggagagaagatgccgtgctcctgagtgggtagagtgggccggagctatcacaccgaaggatcat

SEQ ID NO: 188536 - DNA, 1325 bp, Zea Mays
ggcggcggccggcttcttggacatgtcgcgaggaggctgattcttagacatgtcgccggcgaggacctaccgctggtacgtaatacttggtgacttgctggtgcattcagtttttctccatgcaaatagtggttcatcctctttgtgatataagcagtgaagactggaataaaccctgtgtgatacttgcttgctcctagtcatagatattattttcaatcaaaactatatagaggttattcagctactctggaattgcttgagcctcggttagagcacaaaagagacaattcctagttagatgaatgcataggagcacatgattagatgatgatccagatttaactgaccagatccttttcaaactgtatttctctgatgtaaggaatggagccgatcaataacagtaacccgtttcgttttgccgttgcagtgccatccagatggataacaccagaatccatcgtcgagaccaaaccatagtaatcgtggctatcgttttcctggagctcatcgctataggggccgtacgtgggctttctgtacggcatcgagttcgccgtagagaaagctcgcgataaggttcacgcgatgtcgggtgaccagaagacgaaggagatcatgcacagtatttatagcattggggttggttatattggtcacttgattgcctcgccggtgatgtttgtgatgaaaacacagggtggaggaaggtgcgctccattggcaagagcgtcagtgcaagcctcggagttgccaaggtggtggaaggaggcgtggaagtgaaacaagcagagcctgtctggatgaaaggcattctgatttggtgcccgtgacaacattgctcgagttcttttgtcttagtgattaagatgctttgttcaagaaaactgagagaaatgagcagctgaatttaatcgtcggtagttctgtgcaagtcaggtggaactttgaactttaattcttctgccactatgtgatatggtgaatactcttctgcttgtaagaaaattctggagttgaaatttgttgcctgctgatgttctctggcctggagtttcagtccttgtggaattctgcctgttttcttatgcagggccagaactcagaatgatgatgatttttcgtttcttcatggttaggtgcagtagatgtgtatggtaaggcacttttgctagagctgtggtgcagtagcatttttgaagttttgtggctcgtgtgctaggttataatttttgccctttatgtttgacatgctacttggggcattttgtgtgccattttctcctgtgttacttacaattttgtttcacattttgaaacaa

SEQ ID NO: 188537 - DNA, 304 bp, Zea Mays
ctcgtcgatagttgagtagagcgctgcgcagctcgatcttggttggttgttgggaagggtcgccgccccatgcctccaactcctcgatctcccccggatgtgcttcgcttcagctagctaagtcccttcttcctttgagattttgctacgaacaaccacctcgatctgctctcgtgctcatccgccaagctccgtggtgccatactgccatgtcgctcacggaggtcagcctccacttctgctacctccactccctctccatcgtgctcctatacttcctctacgtgatctcctgatcgcctcg

SEQ ID NO: 188538 - DNA, 433 bp, Zea Mays
gtaccggtgtataactgtatatataatggccttagggacttatattgaatacaagtgctattcatagcatggtaccaagccagaaattagggttagtttccagcctggtatttcctacgcacatgtttgctgccaatcttctcatcttgaagattgtcacccgatttgtcgtcgttggctcgttcactcatgcacatcagtagggagagtgtgcattcctccatcggaggcatggtatttcatctcctctgctttggcctccgatggtttcttctcctcggagggtgtcgtctctagcttgtccttctctacgaactcgggtttcttctctatccgcccactaggacgtggttcctctcgcccccgtcagtcgtcttcctgccagctagccagccatcctcccgctcgttcgttgctcgcccgacggcagtac

SEQ ID NO: 188539 - DNA, 608 bp, Zea Mays
gtggcgctgacagtggagagcgacaggtctgttggctgttacttttattgaaagcgattgttttctttgtgattttgttttgtttggaatggatagacgttattgcggggggcaccgaaatgatgtctattagttatgtcctgtttaagaccgatcgcgaagtttgaagcgcttcgaaagcctacgtgttctgcaatcagaggcaatgctttgtgggttgcttcctcacctgttagtgctgtaggaacaattattttaactatttttctctccattttgcgcgcatgaagtacaagtgaatctatcgctgaaaattgcttaagcattttgaattgaaggttgcttctgcagttcgtgacagttgcatttctctcaggatgcgccggagaagatccccagaagtagtgcaggaacgattcatcaacgaacaccagagaagaacatctccaaaggcagtgctgcagtcattcatcaacaaacaccggagaagaacatctccaaaggcagtgctggagtcattcatcaacaaacaccagagaagaacatctccaaaggcagtgcaggagtcgttcgtcagcataagcaaattggtagcaacacgacaaggg

SEQ ID NO: 188540 - DNA, 562 bp, Zea Mays
cccttccctccgtctcccgtggttcgcgggcgctcgtccaagcatccaaccccagctccgtgcgtcgcggcgcgaccaccggacctataagtacggaacgctcatgtccgcctcttgctttcctacctctccgcccccgttgcctcccaccgccgagacgacgcggacttcgtaccctctcaccgacgtgtgcgccgctgtcttccccggcactcactgctgctggttcggctcccgaaccttcgtcgactccgcatttctgaacagggtttgtgatcctcttcacctttttgtttagcggttgattcaattcctggccagctgaggatttgagatgcttgggttactttgtaattttctaaaaatgatcttaggttctgtattcaccacctgattattcaagcgttgcggttgaaatcttgtttgcagatttttcatacattccaataacctcctaattgtccgaaggtgtcatatgtgacgagagagcacagatgtctctagaagttgagaagccaccagaaacgaccaagcagctcaagcgacaggattcactctatgg

SEQ ID NO: 188541 - DNA, 344 bp, Zea Mays
gttgggcccacattgcagactacggacgcccacatgacagccaccattagttttgcacacaccggacccacgtctgctcgcgcaaaaagttgcctcaatttgacattagcaggagcatttgaccatgattgctttctctaaagaaggaaggcttataagccgtagaagctatgttggctggccggtatggtcataaaaatgtgcaagccgtgatgacgacataggtcgcgtgggttgtgtttctttggtgcggcccaagtagctaccaggaggccgcacgcttcttaccctgacccagcttggctttagggtcagtctcccttgctttctctgcccagcgagcc

SEQ ID NO: 188542 - DNA, 364 bp, Zea Mays
cgaaagcttacacaagttgaggaacaaggtaaacgcaaagttggaaggattgacattgaagcagctaaggcactaaagaacgaccctatttataaaaagcttggggctgttgtgggaaattttcccggtgtcgaagttggcgatgaatttcattttagagttgagctgtccataattggtctccatggcccacttcaagcaggtattgccacttctaaggtgaatggtatcaatgttgctataagtatcgttgcctctggtggctatcctgatgaattatcaagctcagatgaactaatatacactggttccggagggaaggctggtgggaataaagaaggagatgatcaaaagcttgagcggg

SEQ ID NO: 188543 - DNA, 736 bp, Zea Mays
ggtttcttgaataacagtctgatgcaaagtcaaggtgatagtatcagggcaggcagtccggttacagtgaatcaactacaacatggtattcaaacccaagattttcatggtaggtcaaaccaagttgaccttcaagtgggcatgcaagataaatcagcaatgcaggtagggcaagcaagtcgtggggctagccttgaccccaccgaggagaaaattttatttgggggcgatgaggatggcaactggggagctttgttgaggggcgacaatgataatggcaattctttggacaatgataattatggtggtggctactcatctctacagagtggtagctggagtgcccttatgcaggaagctctccagtctacaaccagtgaaaacagtcccaaagaagagtggagtggcttgagtttccataaaactgagcaggtgatggctaacaatgcaactttatcaggccatgatgataataagcttactaggttaagcggtgcaaacctagaaaatgcacgtccttcaccaacatccagctacgctgatggaacaatgaataacccaaatctcgccagttttcagcatgccataaggcctccattcgagcgaagggaccatatgactcatgaatctcctaatgctcctgttaacaatcatcaatcaacttctgaagtcaacaatgggtacattcaacatggcttaaaacaaattcaatctgatggaaggcaagaacaagtgc

SEQ ID NO: 188544 - DNA, 390 bp, Zea Mays
ataatgtagcttccatgaagcaatgcatcaatcaccatggtggctcagaggctgtggaggtttagttatgcctgaacaagtcaaacctggaaccgtttctttgttttcctcttttccttttgaacttctcattatttccttttcatcaggaatctgttgagggggaacatgtgagttgtgttgggttttcggccttgcaaagatgtagctttaccccaagtactgcacagataaaagttgggttttctctagcacctgtggaaaccctaaagtctgtatcgaggaattcccttacttcacctggtgaggagttctggaatgcagcaattgaactcgctgatgggatatctgcccaggctgataaggtccgtggaaggccagaatttgatg

SEQ ID NO: 188545 - DNA, 355 bp, Zea Mays
gggtgaccactataccctgctaatggagcaatcggcttaagtcggcgatgacttaagtcggtgcaacatgctcgcgctaactcgattaagggtgaccactatgccccgctaatggagcaatcgacttaggtcggcgatgacttaagtcggtacggtacattcatacccacctaccttagggtgaccactatgccctataagtcaggtgatcggtttaggtcagaaaatgctttgaaaccgacatggcactcttactttcgcaactgttcagggtgatttctataccataatagcaagacaattaaaggagcaaaaaagaacatcttactcgttgacattaggggcactgtctgac

SEQ ID NO: 188546 - DNA, 476 bp, Zea Mays
atcatttcaagatatggaaagcacaggggatgtattgggtgtcccaactcattttcaaaatgatggatcagccctatatttgctgacacatgcactttcgccaccatctgcaggagctgtgggccattggctaacccaacaatctagttccagtattttctcgggtattcaatatttcctgcacaatttagttgccatactattgtacaagaagtttcttgtacagattaattttcatttgtgtctgtatatgttttaggttacaccaactatgatggagtcgcagctgataaggaagaggcacacagttctactttatcacggaattctcctaccagatttaccaaggagaattctgcaaataaaatgcatggagatgtgatgggatcggctctatcttacaaagaaagtaaacatttggacgaatggcatgatttttcccagatatcagctggaaatgagaaggataggctcac

SEQ ID NO: 188547 - DNA, 534 bp, Zea Mays
actcctccagtcctcctacatggcatgcttttagttaggatcggtgagcgtagtacggacaaaggacaacttgggggagaccaccggagaggaggacgctaagagaacttggcagttgacatgctggaggacaccgacgacccgtgccagtaaccatcgggtggacatacctagggtcctagtggagggcaacagggtgatacattggcagctcgtcatgagagggagtcggtgcatcagcccaaccacaccgctagtagatgtgaatgggatttacgaatcgtgacaaggaggtcccctcagcaaacagcggtggggccacacatgccagcgcgagggatgctggctccgcatttggtggcacaagcgacactggagccacgcatggttgtgcgggagacgatgaagccatgcatggttgcaggagacgacagagccatgcatggcagtgcgggagactccagagccacacttggtagcacgagagactctagtactcatcgcagcgcaggggatgctggatctacatgaggg

SEQ ID NO: 188548 - DNA, 698 bp, Zea Mays
tggacacacggatccacatacgcgggtcggtttcatagaaatcaaagtagtcctcggatcgactgatccagaggcgtgggttttcgccatcgaaggagggaaacgggaccttgggtagggatccgaggtggggtgggctatggttttgaggaaacatttggccacctgactgatgtggaaccgaaccaaaatgaggcgaatactgtggaaaatcaaaatggggcgtaccattgggcgggagattggtttgggcgttgaggtgcccaaggccagtctcccgacgttgatgttcgacgcggtgcccatgagggccgtcagtccattgtccagcaggtgggcgctggggcactgacaagggttcaccgaggatgcctggttttgaagacgccgacgcccgcactgcctgatcccagtggatgttcatcttggagatctcagactggacggagtcgaggcagcaccggacgtcgtcgacggcagattccatcgcgggccgccacgattcgaacaccgccgtcgtggattcgagcgccgccacccgtgaggttgttgccgcctccatgaaggcaaggcggtctgccgagtcagcatcgtacgacgccaactgggcagcgacgtcggtgaggatttgttccttgaattcgccgagttgggtcgacgccgaggctgcggcgcgctcgaggtcgccgatgcgcatc

SEQ ID NO: 188549 - DNA, 701 bp, Zea Mays
aaagcaaattgttgtctccttcatacagctagcaaagagactagggaacccaaggtacatttctgatagatatggagcaggagcccaggacagcctggacattaatcaatattcatttgatactaaactcaaaaagaagcaaaataaaataagaggagcaaattcattggctgctggagcagataattcatctcgtgcatttgaccttgaaatcaaaagaagcctatctaaattaaagaaaaaggatgtctactctggtagcgaaacatctgatgatgatgatggctactctgaagttgatgaaactgagagcgaaactactgtttctgatactgagagtgaccttgatgtaaattctggagcctgggatttaaaaggaaacagtctaaagttaattgaacctggggaatctgtgaccgatgatcgtatattgggtgcccgcatgacaaaggccagccttgttcctccagttactaggaagtatgaagttatcgaggagtaccttattgtagcagatttggaggaagtacagcgaaaaatgagagttgctttacctgatgactattctgagaagttgctgtcacagaagaatggcaccgaaaacttggaacttccagaggttaaggattatcaaccccgaaaagtagcaggagatgaaattcttgagcaagaagtatatggcatagatccatacacacaca

SEQ ID NO: 188550 - DNA, 1354 bp, Zea Mays
tgtttataaacttgttggagagaccagttcccgtggaaggccaaccaatagatcctgagattaggaaatcttgggcctggtggaaagttaagaaatggactatccatatcctgaaccgtctctataccaggtcagtgtttgattggcatgtaacaactttatcttgggtagtcagtagtcactgtgtgttcacctattattaattgtgtacagatttggtgatctgaagcttcagaaaccagagagtaaagcttttgctcaaatgtttcagaagacttattcagggaaaatattggcatgtcacatgcagctgctgaatgcaattcgtggtggagactacttgccagatagggttatcaatcttgttctacagtatctgactaacaggtgtcttgatgctaatgatacgacattgtatacttgtaaaatggtcttttgtgatgctagcatctcgcatcatctgcatcatcctttattttctttatcctatatcaaacgaaattctcattaatttagctaaggagttcagccacactcaaatatcgtgcggcatagttgctgcgacagactttctttgtgttgcttctggacctcactagtcactatccaggtgtgccagtcaccaaggacgaatccaggtgccactgtggccaaggatgagaggtgctggtggcacattgggcgagaaggaaggaggaaaagtgctttgttattgctctaactcatagaatggtgtcaattcatattaggttggcttgccaaacatagtctatctggttatctgagtagcaaatgctaaaaactcaataattataagatctgataaagccctacaactacaggagtcataacttgactaggttagagctgttgggttattggctatgcatttttgcctttctatgcactatgcatggctcctggttgattctggctcctctggtggcaaatcccaggaacatctgttccattactgtcttgtttaatctgtattttttttgtccttactgaagtagggcacttcatgataataattgacttggatgctgtttggacataacatgtagcttttggctagagaatgtttgtcttgcccaactaatcgtgcatgatcttatcttcaaagctgtatggaatactattcaaattcaaaagatataaaagacttggtgaatattttaaaaacggtgcacacttaaaatatgctaggtcaatattttttttttgccaaactcaatttatgatatcccttgcttaatgcttacgagtcatccaacttggtgattgtagaaatgcttatcagtattttctttgttttgtattgtgcagtgttacaaagaacagtatgtatcag

SEQ ID NO: 188551 - DNA, 908 bp, Zea Mays
tggtggtcgaggctgtgccggcattgtcggaggaggctgccactttggcggttggtgtagttgatgcagaaagggcggttgctgcagcgactgggaatcggaagcggcctcctgcagatgtacatatcaatggcgcggcagagcaaggactgagtagcgttggtgttagaacggagggggaggccaaaccaaggatcagggacgtgcccaatggcgtccagggggagcatgtggtggcagggtggccgagatggctcacagaggtggcggcagaggcggttcgtgggtggcaacctcggagggctgagtctttcgagaagctggacaaggtttgtggttatgatggccattatttttccagcaaatttatcatccttgctaccttttccattggttgtcttctggatcatcactatgagtcattgcctattgggtgtcactccttttaggttgattacttgaatggcttatgatattttgataggtgttggacaaaacatgttatagggttcatagaattgttggaatgccattcttgagggtttagaatagtttgaatgaaaacaaattgcaacaatagaaatatagtgctcaaccctggggctccatttgtatgtttatcttgtaccacttggtcatgctattctgtttgcacataaagtagacaaacaaaacatccaccattgatcaatgcttctcctactacacgacaactaaatcatcacatttaatacaaccgttttatattttttgtggtagatgcaacattacagaataaattcttgttacaatttgaactagtatcgagccacagatcctatgtgacctcacttttctcgtttcatctttaaatatttcagataggacaaggtacatatagcagcgtttataaagcacgtgatcttgag

SEQ ID NO: 188552 - DNA, 402 bp, Zea Mays
ttctgtgcctgaacgtactgcttttgttgatcaatattattttgttgcaagagcatgccagctgaagtctggagcctttgttgcattcccaattgttgctgcgtttgattaggctgagactggaactgcgacatcatatgttgttgaggttgctgaagctgattctgctgagactgaggttgcatcaaacccattgatgtctgctgagcatgctgttgctgctgtggttgctgaattggcttttgttgctgtaacatatgcatacggacatttggcacggttccaagaagctgctgctgctgctgatttagacttgacacatttccctggtttgccaattgttgtggctggtgcaagggcatagattgctggttcatcatctgctgcgtttgatgcatattc

SEQ ID NO: 188553 - DNA, 313 bp, Zea Mays
tggggcctcgcgtcaggatccgaagacggagtcctgtacttcttctctcgcgaacgaactcgccgaacggagcgcgcggaagcacagctggggtggttgcaaccatcttctccgattctccctgcgccgcgctcggtcgtgtggataaatagggccgagtgcactgttgtggccgttagcgtttgcgccgtgcgttgaggttgtaggaaccatcgctagcgcttggtgagggaccgccggcgaccacctcgtcttcgctctggtgtggtgctcgcttcggggcacgtgagttgcctacgtgggcggcgaaggc

SEQ ID NO: 188554 - DNA, 814 bp, Zea Mays
cggacaggaagcaccacctagttcctgaccctgatgtccatggcacccgaccatcccttcgatgccttcgtcgccgcagctcgtggcgccataacccaccttcaccttcccgtcatccacatccctggatccaattccagtcctaaccccgactccaagcagcaccacgaacccgaggtcgactgcctgctccacctccacgtcgtcgtcaccaacttcttccacaagcccctcagatcattcgctaggtgcttcaggcccaagcgacgggcaggcaaacactccccgccgctctaccaggagcccagcaatggcgcgaccccgcagcagcaactggagctcctgctctgcattgcgttcgatgccttcgcccacaacctccacgcgctggaggacgcctgcaagcacaaaggcgaggaatttgctgtcgctacccgacagttggagcaatttgtggttttcaggaaggtaatcgatgggaagagggccgatttcgatgggttcctttcaaatctgggctttgcaaaggttgggccaccgccaccgccagcaagcatcatgggtggtgcttcccctgtcccagcaccagcaccagtcagcaatcaggaggatggtgctgtgattgggaacggcgagagggtggacattgctagtggtacacaacagcaggcacaaaaattgcctgcccggttgcttaacattcctttgtcgaatgtggagcgtctgcggtctacgctttctgcagtttcactgacggagctcattgaattagttccgcagctggtgagcagatcatcgacatcggcagatgcac

SEQ ID NO: 188555 - DNA, 608 bp, Zea Mays
caaaaatagagacaagctcgatgatattctgagggactgcatggaagctaataagaagggtcagggttttgacacatcagaaagtgggccctctttgaatacgacacggccaacaataagcaagccgaccgaatccaaaagttctttgaatatttccaagcccagtatgggcagacctatccaaggagggactccattgactttacttcgaccagcaggaagcaaaccgaagcaagatggtccttctctggctcagtcgcgaccagttggaagcaaagcaagtgaagatgcacctttgtttatcttgtcgcggccaattgggagcaatccaaagttaaggggcactccggtgcaagatagttggcccagtaaagagagtttagctgccgcaacagagttcagtgaggcggggagcatctcaagaacaggcgaggtggatgtcgccttgcggaaacccaccgtgcaccagagtcaggatgatgatctgaagtccaagctcaaaattaagccaaatgttaacctgaaaatgaggaaagatatgaatgaggacttaaggaacatttctctccttcaaaagccagatgttgcaaaagatactgtaaacccag

SEQ ID NO: 188556 - DNA, 692 bp, Zea Mays
cctgctcatcaacgagtccagcctcaccggagagagcgaacccgtcgcggtgagcgccgagaacccgttcctgctgtcggggaccaaggtgcaggacggcgcgtgcaagatgctggtcaccaccgtcggcatgcggacgcagtggggcaagctcatggccacgctcagcgagggcggcgacgacgagacgccgctgcaggtcaagctcaacggcgtggccaccatcatcggcaagatcggcctcgccttcgccgtggtcacgttcgcggtgctcacgcagggcctgttctggcgcaagctcgccgacggctcctacttcagctggaccggcgacgacgcgctggagctgctggaggtcttcgccatcgccgtcacgatcgtcgtcgtggccgtccccgagggcctgccactggccgtgacgctcagcctggcgttcgcaatgaagaagatgatgaacgacaaggcgctcgtgcggcacctcgcggcctgcgagaccatgggctccgccaccaccatctgcagcgacaagaccggcacgctgaccaccaaccacatgaccgtcgtgaaggcctgcatctgcggcaaggtgaaggacgtgaacagctccgcggagaccaagacgctgccctccgacctgccggcgtccgtcgtggcgatgctcctgcagtccatcttcaacaacaccggcggcg

SEQ ID NO: 188557 - DNA, 414 bp, Zea Mays
cgcttccgccggagctctgtgcggggggcaagctgcagacgctaatcgccctcggcaacttcttgttcggtgccatcccagactcactcggccagtgcaagtccttgagccgtgtccgtctcggggagaactacctgaatggctcaattccgaagggtctattcgaattgccgaagctgactcaagttgagttgcaagataacctcctcactggcaatttcccggctgtgatcggtgctgcggctcctaaccttggtgagattagcctgtccaacaaccagcttacgggtgcattgcctgcatctcttgggaacttctctggtgttcagaagttgctgcttgatcagaacgcgttctctggtgccatacctccggagattgggcggctgcagcagctctccaaggctgacctta

SEQ ID NO: 188558 - DNA, 957 bp, Zea Mays
ttccatgctcttagaagatctgcagattcatccagtaatgaagggtgccgtgttgattctgcttccatagcctgggccttccaatctgattgtcaggatgatctacttaattctgtgcttcctgcagagccaacctggccagagatgcgaaagcttggtataggattatggtatacaaatgtgtcccaactaaggacaagggtatgtgattccaagcgatccaatgtttcagaactaatgtaacttctgtaacttttttcctaaagagaaaagggattcatcatttaaaaggagtgataaactagagcatgtcttagtgaactggcaaagccctcatgatgcacaatttgattaaattcgtatggatcatgttctcaacccctaaaaatcccgtttatgttttttgcaatgtatcctgcaggtgctaataagataatttaagctaacacataatcacaggttggtttgatcactaatatcctataccaaatgagtgtttggatgaagtggatttcgttgctccttgaaaatattaatcctaaagattcatgtctatttcccatttcccgaccaaaacagacactagtgttctttctgcttgccttggttagagttaaatgctatgttgctttccccttaagaagtcattaaatttgacatgtctgtgataggattgtagactttctcaactgatgggatactgttttatcattgtttgtaatgcagttttccaaattttaggaattaagcattaatgactctccattgatcttttgtgccctatctctaaacaccataatgaatgatttttatacttgaatttatctggataatcatctgtgctgattagatatgtatgaaattgtagatggagaagttggcaaggttgcaatatcttaaaagcaaggatcccaaggattgtgctttgctctacatagcattgaacagaataaaagt

SEQ ID NO: 188559 - DNA, 271 bp, Zea Mays
gccaaagcggcgcagaggataacgccggcgagctggagggagaagaactgctgccggcgtgcggcagaggaagatgctgagcgctgaaatatccagggagtagagcggcggctgcaaaaatccaacacagagagagcggatcaggctgagggagaagttcgactgggtaacaagaaactgtgttcagcggcaggatttttcagaaaacggcggcaggagagaacgaccatgaacaaaaatctacgggaggcagacgagcgaagaaatatca

SEQ ID NO: 188560 - DNA, 493 bp, Zea Mays
tgtgctaaatatgattgcacgatttatccaggcgaagaggcagagaggtagagcacatatctttttatgttgtttctttttggcgggtagtgtaatacattctttacctaagtgtcaattcattagaggacacatgcactaactggtgaaatttgaatagataaatcctgcagtacatggcattcaaagccacaagagcatgtaggggttattctttcaattccagtgcttcctaataggactaacatgttactttatttttctttgattcaacaaaacttccaggtttcagatactgttctggataattactcttacaatcttccttattgatcttttggattgtatattaggtgatcatggagtcaaagcacaaggggatggctggttgctgactgttgctctgatggagggaaccaacttggcagcaaccaaatcatctggttactctgatccatatgttgtatttacatgcaatgggaagacaaagaca

SEQ ID NO: 188561 - DNA, 331 bp, Zea Mays
caaatcgaagtcttcctacacccagcgacgaaaaggctgcgacaattcgaatcaaaaatccatccgagtcgaatcgagccagcggaaactccgcggccgatctcctgtgctctcaccgcccgcctcccccgattctgcagcccctcgctgcgaatctggacgcgatttcgaggctagggtttgggaggctccggatcgcgagcccgtgcggaggcaagggtttggattcgggggttgctgctgcatgtcgggggtgctggattgagctactccgcgccggcttgtgatggtggtgaccggcggtggaagacgagtagacggcggcggtgag

SEQ ID NO: 188562 - DNA, 415 bp, Zea Mays
gggggatccgccgccgttgtgtcacgcgtgctccatcggcggggtcttggtcgtaggctagggggctccagcacgtgcccacgatggtgtttgtggcctcgtcgtgcgcgattggtgctcggggcgctgtgaattgctcatcggagcctcaccaccaccgcgggtctgcttcggcgcgtgggcaagcacgtcttcgccttcgacgccagtgagtatcatacccgcatgttcgtcgtagcctcctcatcatgtatcaccgttcgatttcgaggttggaccgagaatgtggatgggtcaaagcttcgccaatggcgtcgccgtgcctcagcgtaacttcgcccgggctatcaccggagagggggattaggggagagattatgggcgttgtcgatcactggattgagggctcagatta

SEQ ID NO: 188563 - DNA, 364 bp, Zea Mays
aatactcatgcagccccaacagaagaggacagtggtctgaaatgaatgttgccgaactttgcaatacgcagtccgggaaataatccccccagtctgaagtgtgaaagacccggtctaaacgaacaagcgtgagacttgcgcgttcattggaccaagtaaatttgcgccccatcaatggcagttccgacagatttaactcattaagaatacgacagaatctacccatcatagccctgtcaaggttgctattgttcttgtcttcggctcgatatataagattaaagtccccaccaatagtccaaggtccaaaacatgccgagcgaattgtgcgcagctcatttaagaactgcaacttctgatcatc

SEQ ID NO: 188564 - DNA, 582 bp, Zea Mays
gcttcaaagatttcatatacaaagctttccaagaagataaactagacagctgagaacagtgcattgcgacattggatttggcaggaattcggcagcttctttagggaaaggagtccgggtgattggggtcgctggagcacctggtggccccacagtttccaggaaacagattggccgtcatgtacatactacaaagcaacatgcacagatacggagtccagtcagtcattcacaaagagtaggaaatgtaacttgcagaatcaaattatacatagaaacatgtaatcgaatgtcccgagccgagccttcaggggttgtaaatgctctttgtttcagaggataccattcttgtcttgtatcggtagtcgttactttcttcgatagaattgggggccagttttgcctttgcactttcttttctttgaacaaagcacgacgtactgaggtgcttatttgattgatagaggcacgtcacacctgagaatattgtcagctgtacgaaatcctaatcgactccgttaactttttttttctgtaccattccagagaactccgtacttgctaccgcattagagattgttc

SEQ ID NO: 188565 - DNA, 877 bp, Zea Mays
cttattgggaaaaccgcagagaaattactgagacaaagcaacaaatctgaattgccggaagagattaaagcaattgtgggtgagaaattgactgttgtggccaagttttttccaggaaaaagtattaaaaagagaggacctaacaaggtcaacaaagatccaacatttgatattcttagtatcaaaaagaggcatggaaaagacctactccttttcgtattcaaaaaagaagagcctgttgttctccacagcgctagctcatctcaacttccaaagctaccacccctagtaccaatagagccaaagacacaagatatacaggtactgctttctatcaaaacatctcaattataaatcttaatccgcaaaaacaaaactaacatgtacattgctatgtaagacctctggttcagaagcagcatcaccacatgaattacaacttatggagattgatcagactaggttagtgggtctactttttatatctttcttttcatatcatccagaaaatatacaatgttttgttataacatcttttaatctgatatgttatagttgctttgacaacgtcagagtatcatacaagagaaatttcaatgcaattgatgactccgacaaggtaactacttttcaacacatccgataatacccatatagatatcaatatatgtacttaatatttttaattaacctatattgctccttcttttacaggaagaaacacatggtgctgaccaactttcagtctttgcaaaaagaccaaagatgaagaacaattagataccttctacatagctactcttttgagaccttgcatctattgttcaatggaaatagatcggttgtggttctacttacgagaacaacaaaatttggc

SEQ ID NO: 188566 - DNA, 673 bp, Zea Mays
tctgcggataaggtattcaagggtcttgagggcagagggaagatgcaaatagccagctagaaggcgaaggtaggtggagatagacttgttgagtttgtcgttctccttgggagtcaactgttcgcggttcacctcaaggctagtctccctgaacagagtgttgctgtattttgcaaatctctcgtctacgctggtaaggtgctccaaccctgaaaagcaatttgattcaggtaccgtagaggaagagaagctcttcgaatgaaatacctcatatgcaaaactaaattggttttgtttttaaaaacttcattcaatttgagctattagtgaagtttcataaaatcgcatgcataattgcacaagcataaacaactaggtgtactatgtagacggatgggatcaacctgcaaatagcagcaaaatccagagggaattccgagaaagctgatttagatattatattaaatgggagctaaaataagaatcaaacgaaccaaacaaaattctagaacgctcggtttagcggaaaatacaaccaagttgtccttcatgaaatgctggctagtggctactctagaagagcgcaactaataaagcatcagcatgctcgaaccgatcaggtcggtagttagtggtacgaaccagagagggcaatgggcaggatggcccggag

SEQ ID NO: 188567 - DNA, 2544 bp, Zea Mays
ggggaactgcatattgctctgctgagatccattataaaggatattgaggatgttgctagaactccatcaattgcactgggggtgaatccaggaggtggccatccacaaattgttgaaggggtgggtatcgatttgtgcatgcatatttgatgttaatatcaaatattctattccttttcttttgtctgtttcatgttttttctttaatatatttttaaacattcatgtgtctttctggtaggcatatgcctggggattcaatatacgtagctggcaacgccatcttaatcttcttacatggcctgagatattaagacagtttgctttatctgctggttttggacctcaattaaagaaaaggaccgtagaagattcttactatcgtaatgataatgaggtttgtgcttctatacaacacacctgcgtctaagatgatttcgctcaaagtatatctgtagtattatgtactcctaatattatgtatttctcacttgaatcagtaagatatttgaattttgttataattttctcctttactgatacggtacttgtaaacatatggtcaaccgatacttgtgaaattcaaaataacctcttggatgatgccagcaaggcagcaacttaccagtaatactaaggccgtttttttttgcagtcctttcaaattttgtgtacttaacctacatcatgatgcatcagtttatggtaattgaataaccatgcgtctggtaattgctatcaagaaatgcttgtttctagtattaactgtaaaatgcttgaattttgtgatttgggacctcggttctagtgacccggatggtcaaaactgaaaaggtattgttgaatgtactgaaatcatgacaattctcatgaacaatttacatatatctgagccatgtgtagataatattagttctcggaagcggcatccccgttgtgagctcacaccaaattctcagttttctgcatgataagaaaaaagttctaaatgtattttcacaaggttaaggcaaaatttgttgcagggtcatgatggtgagaatgttatattgacgattcgaaatggtacagcagcagtgaatgctgctgctaagatgaaagaaagaggttacaccaatcgccgtagatcccgccaccgtctcactcctggaactgtaaaatttgccgctttccacgtgctttcgcttgaagggagcaatggtctcacaatattggaagtagcagaaaaaattcaggtacatacacatatatgtatctttaatccctttacccttctccttaaagtggttatcttcaattttgtaagctgattattttcctgttcagaaatctggattgagagacctcacaacaagcaagacacctgaggcatccatagctgctgccttgtctagggatacaaagctttttgagagaactgctccttcaacatattgtgtgaagtcgccttatagaaaagatccggctgattctgaggctgtgttgtcagcagcgcgtgaaagaattagggcttttcagaatgtgctttctgactctgaagctgaaaaggaggtagatgaagctgagagggatgatgattctgactgcgatgatggtgatgatgaccctgatggtgatgatgtgaatactgaggtggaagacgacaaggatcctcttcttgctgtcaagtcacaagatgaagtaccgagtacaactacagttattggcataaaggccaatttagatggtgtgggtaatgcattgaactcatcaagtagttttactaaatcagcaaaaggcgctcctctcccttctttaggcaggtccaatgcagcagatacttctaatgatttgcctcttggagtctcatcagctaatcatgaagtagtacctgatgattctgaaaatacacaaattgatgaaagcaatcaagccgagccttgggtacgtgcactagcagaaggtgactactgtgaccttagtgttgaagaacgccttaacgcactggttgctcttgttggtgttgccactgaagggaactctattcgtgctgtacttgaggtatatattgtgatcctgctaaactattctatcttgtcattcctcattgggaaacacctgatcaagagtcttgcaggagcgtttggagttagcaaatgccttaaagaagcaaatgtgggcagaagcgcaacttgacaagaggcgtttcaaggaagaatttactagcagagtacaatataactctgacatgggtttgaagcctgatatatatcaagaaaacaacgtgacagagattacttcaactccagcgtgtgatgcttatagagagaatgatgaacatgtcgggacaatcaacaattgtgagatgcttgatcagcataatcagggtaatgctggtagtctaccttatgagagaaatggcgtatgccaggaaatcctcgcaaccccagatacttcgtatgttcagcagtatgcttatgctgataaaaggcgatctcagttgaaatcgtacattggtcaccgggcagagcagctttatgtttacagatccttgcccctaggtca

SEQ ID NO: 188568 - DNA, 378 bp, Zea Mays
ggaagatgcccttgacaccgtggttgtgggacctgtagcactgatttctgaggtgatgaaggcgacatccgagacgaggaagcagaaggctaacgaggccactgaggaagtctgtttagaggagggtgcttcagatgctaaggaggatgttgccgagaaagaagataacaatcttcagccaacaaagcccaactacatcgatatggtcagtctatcattaagcctagggacctggagctcttgaagaaacttagttacattgaagatcataatattatccgttttgctggtgacgagaccacttctgagttgaaggaggatgagattgtagttttcaagagcttcttccagactggacttggaatgcccatgttcaag

SEQ ID NO: 188569 - DNA, 275 bp, Zea Mays
caatgaatctgcagctacaatctgcaggcagctgggattttgcgatgatcaggaacatatttccttcgaagacgcccaaaagtatgttcacctttttgatgcagcactttccagagagcatgttgctgccatggcagcattatttggctgggaattgccaggggaagaccgggctcaaacctgattggagggggtgtaggtcgtgtttctttagtgtaccctgttataatgcagcctgtttttcttatctggaatgtaaggggcctgaatgacag

SEQ ID NO: 188570 - DNA, 444 bp, Zea Mays
gatgggtgctacaaccagtgtttcagcaggggctgcatcagaggaatcttcagccaacatgtccagcatggcacttatttctgcgtcactcggattcaaaggcacctcgaaatgaacctgcctctcatcgtcggggatttcgccaagtgaagcaaccaaagccgcaacttattcgggagaaggtcgcactctaaggcccaaaccgctatcaccagtaagaggatttgacacaaaactgatgaaggccttggaaggaggcagattccaggctgagtatgcaacaggagcaccgatattagacaccttgcctctgagtatcatctcaagccggctcactaaatccacagcaggaatccttctgttggtaacccgggttgaatcagcaaggcctcgatacagataagctggatgcgctctgtctttcagtggctgaatgttcttgaa

SEQ ID NO: 188571 - DNA, 450 bp, Zea Mays
ttacatacttcacggagcagtcagagaagcatgtctgacagccaaagcagtagcatttccagtagtgacattgacagtgcccagtcaagtgacagaagcacatcaggtggaactacaagtactgacagaaagactattgatactgcaagcattcgagatgtggatcaaggtaagtcagatgaaaatggtgcaacacctgaagatgttagaggcaacaaagacaatggtagtgttcagtttaaaaggcaagattcattgaaatgcatacatgttgatcaccatcccagaccagagagcaaacaaccaaagatcattgagaagataatgacaacccttagagaggagagcaggctgagagaaatcaactgtcctgtcagaggtggtgtaaagccgaattctggccacagcaacaataatcaagtagagcaaccattacaggtttcaaggaca

SEQ ID NO: 188572 - DNA, 311 bp, Zea Mays
gacaacaattgttcgattgaatttgatgctcttggtttttctgttaaggatatggcgagtcgtcgcgtgatgcttcgctgcgatagtgatggggacctctacaccattccagctgccacccacacctcaccgcacgcctccattgccatcaccacctccctgtggcactctcggctcggtcatccgtcttctactgctattaatactcttagaaatactttcgccatttcttgtaataaagtagaaccacctctatgtcattcctgtcagcttggcaaacatgtgagactaccttttactccttctcaaac

SEQ ID NO: 188573 - DNA, 808 bp, Zea Mays
ttttcgttgatccctcctgcattggtccgctccggctcagatccgattctctaggtttgtatccttttgtttagttccttttccgatccttcctttatcaagttttctggcggtgacggtgagggggaagtgggttggcaatacgacgaagacgcggccgcctgtcgccgtgggttcatccgtatgaggtgcacaataatttggatcgagctgctcaatgggctgctcgagcttgcttaggtttccttttagtggctaatttggatcgaagattgattcttggcggaaactcccagatttacggaagctcgtctattctttctagttcctgatttcccagtagcccccttcaatatctgttcccagtatcccccttcaaatctttgatgggtgcttcattcatgtgctttacgagttcaattctgctgccccttcaagatttgctcttgagtcctcatctttatctcttttactatattttacatatatttggtgtttgcaggaaaagaaagaccagagtatcaggtggaacaacagaattctaggtactgccgggccgctcaacaagggaagagcaagagctccagtctctgtcccactgaggggttgtgaatcatgatcctctaataaccataccctggaaggctggaacaaatttcgttccaaaagggacataatcagagaaggccagttaagggggcagtgagaagggatggcgatggagttggccaagcaattgctcgtcgctgttctcagaagctatgcaccacctctctgggctacaatcattgccagtgtttttgttatc

SEQ ID NO: 188574 - DNA, 507 bp, Zea Mays
ctttgtggcaaggtgcatgactactccagcctttgttttttggctacgtgtgccatgtacttcttgcacctcatgagcactaagttgactactcaatcagttgagtgtgtttttcttgggtataggccaagcacaagggatatcattgttgggatggttgctcgacgaatgcgagtgtctcatgatatggtttttgatgaagtcttgtcctttttaccctcgtccttgcatcgtttcctcaacgtctcttgctgacccattttatttcttgtttatatctgatgtcgctataccccgtgtgccgatttcttgctcaacgcctcctgttatgccttctttgttttcttcagaggcttcgactatggttccagactacactgtgaagcctcatgtgacacaggtctacatgacatcgtctctagaatgtttatgttgtgccatcttctgaagtgctcaatccttataatgcttcacctacccctgatgaatcatcttctcctacggaat

SEQ ID NO: 188575 - DNA, 301 bp, Zea Mays
gagttctttgatgcgtttgaaatcttcatcggatagaattttaccagtttcatcagatggaacttcagccttcttggcagttgctaacctcttcagaactcgaaggcttgcatcagcagaacttagctgtccaatataatcatttaacttcctcttctgcgctttagagccactgccttttgacttgtcttcctcttcgctgtcttcattctggtctaaagcttcatcctctgaaccatttatgctttctttcagttcatcgtcgtcaccttcgtcttcatcagatatatcagtatccaca

SEQ ID NO: 188576 - DNA, 416 bp, Zea Mays
cattggcgcagtatgcggcgaactccgcgacggtgaattccccgccattgtcggtgcgcaggaccttcaacttgcgcccactttccacctctgctgccgccttgatcttcttgattgcttctgccgctgcgtccttggatggcagcaacacagcccacataaaacgggtggcatcatcgacgagcagcaggatgtagcggttgcccaccggtgttgctggcgtgactgggccgcacagatcaccgtgcaccaattcgagttgattctgggcacgatatgctgctgcagccggaaaagagcgccgcctctgcttcgtggtgacacaagtgtcacatacctgctccacatgatcgaccaccggcatcccacgtgccatctcctccttgctgagtcgtcggagtgcatcgaagttcaga

SEQ ID NO: 188577 - DNA, 290 bp, Zea Mays
gaaaccgctgcactgggacaagctccgcgccatctccggccgcaccaccgtctgggaccaggtcaacaattccgactcgttccggtgcgaccctctcgcctctcccatccatatgtttccacaacactccatcgttctgcactgagcaggaaactgcgtggttattggtgcagcgtcgacgaggcggcaattgagagcttgttcctgaacaactccggcggcgtgggtaattcggatcaggcggcgaggaggggaggcgccgggaagcaggagagccggctgctcgaccc

SEQ ID NO: 188578 - DNA, 506 bp, Zea Mays
tccgatctgctatgaccctccgggcaatagaattaacagaggggacagggacaacctcccacgggtgacaccatggcggagaagggagagcagatctgaagtagccgatgctgatggaccgctttctgttggccaaagtactcggctctctgcttcagggaaggaggcttcagctcagcctctggccgcggcaggtcctcacgggacggaagacgaggcaccaaggaagaaggcacgccttggatggggtcagggtttggccaagtatgagaagcagaaggtgcagggtccttcggatcccgctgaagttgttgctgatgtaagttcaggtgatggcgaacagaagacctcccttgcgcctgcgccttctgttgcatctgtatttcctgctgcaccactgcctgagtctgcaccagcacctcctgctgctcttgcactttcgtctgctcctatgcgatgctcatctccagttactgcaccgccatattgttcctcaggtatgcaac

SEQ ID NO: 188579 - DNA, 854 bp, Zea Mays
cggtcgtcgacgacatggttgcctacgagaggcgcctatacattccccctgcctctccactactgcaagaaattttggaggccgtccacggcgacgggcatgagggcgtccaccgtacgctgcaccggctccgccgtgatttccatttccccaacatgcgacgtttggtgcaggaatttgtgcgggcgtgctccacttgtcagcggtacaagtccgagcatctccatccagcagggttgctcttgcctctacccgtgccctcggcggtttgggccgacatcgcgctggactttgtggaggcgctaccccgcgtaaacgggaagacggtgatcctgtccgtggttgaccgcttcagcaagtactgccacttcattccactcgtgcacctgtacacggcagagacggtggcccaggcattcttcaccgacattgtgcgcctccacggcgttccgcagtccatcgtctccgaccgcgaccccgtgttcacctcgacgttctggcaggagctcatgaggcttatgggtactaagtttcacatgacgtccgcttttcatccccagtcggacggccagacggaagccgccaaccgagtcatagtgatgtacctgcgctgcttcactggagattgcccccgccaatggctgcgctggttgccgtgggctgagtacacctacaacaccgcgtaccagacttcgcttcgggacacaccgtttcgggtggtgtatggccgagagccaccttccatccgctcttatgagctgggggagacgagggtggcagccgtcgcccgggacatggaggctcgggaggccttcctggaggaggtctggtaccgcctagagcaggcccaggcg

SEQ ID NO: 188580 - DNA, 442 bp, Zea Mays
ggactttcaagctaagttcttgcagtgcacccaaagcctgccactgtatatccatcagggagcagctgggcaaccaccaatgcggcaatgcctgattcacccgccgcaagatccactgcagaattcagggatgacattgaacaaggaccatcgacgcctgatgatgcaccctcgaatccaccgtcgcctaatgccctcccgaatgctgctggctccaccactggcaatcaacacggatcagctgaggaggcaccgacgcctgatgcaccctcgaattccctggtgcagatgatctgcgactgattggtctatgggtttacagcactccgttctttttatttggctgcgcgtcatcttcgggactggtcatatgaaccgattggcatcaaaggtacgcactgtctggtcgacatgaccgtaatttcccactgctatagctata

SEQ ID NO: 188581 - DNA, 314 bp, Zea Mays
gaaagtcttctcaagatcattgatcatgcgaggacatcacaactactagagctcttgtgtgaatgtctgatggcttcaggttcagacacactatctggttctacgaacatggtacctgctgcttgtgaggcatgcaaggctatttggtacctagctcatgctgttgacattatgtccattggtgcacaccatttttcatttcccttagctaattcatggcgacagatacattcaatgcaagagcaaagttcaaaggcagattcaaactctaccaatctgattaacatatttgtcaaatcatttctcgcctcacg

SEQ ID NO: 188582 - DNA, 663 bp, Zea Mays
ctagattctctgaaaaccgcttcacaacctaaagctgacgagcttcgcagaatgcaagagctggatggcatcatatctagtgagcaagctgaactagagaggctcacaaagtgttccagcaaacttaaagatcaggcaagtgcctatagacagtctcgtttccatttccaggtcatatttatctagtctttttcccaaccatttccattcactttgctttagtgtggtcacatgataaaaggggccaactctacaaattcaacactcttctgtttcaaatatttttgtatgcatctccttatatttttagcattgctgctaacagaatcttgctttgccaccttaacctatttgtaatgtataccaggcttcggaacttcaacaaaaagttgaaaatgctggagggaagaagctgaaggaccagaagacaaaagttggcaacatccaatctgtaagcatgcaaccttttgcttctattgctttcgttttttatggtaatctgttttatagttttatggtaatgtcaggaacttgacaaaacaagttcagaaatcaacagacacaaagtcaacgtaacttcaggtgagaagttggtgaaaaggttaaccaagggcattgaggagtccaagaaagatagagaaaaactttctgctgaaacagaga

SEQ ID NO: 188583 - DNA, 659 bp, Zea Mays
ctcgtcctgctccacataaaagtaacagtacttctgcaccaagccatggatatcctggtagtactgcacctgcacctgtacgtttgcctccgccaaaaggaaagggagaaggaaattttgctcatgctccaaaccatcccaatcaataccattcaacgtcatattctccaggttatctcttgctcattacattgccatttgttctagctgcaacaagtgttccagccatcccctaagaacaagcgaacgacactgaataagcatcaccatttcgtgctcatgctaacttgttaaagtttggttatgtttgagcatgcgtattgccaacatggcaacattgagcgttgaaacatgaaatacacctcatgcaaatgaataggtgatagatatttgcaacataagtcatgcacttgatcgaattcaacttttaattattccacaaaattgatcaatatttcttgtcttgccctactatacaccttttaacgtgttcaaaaatattggtcacacatgcctcaaataaggtttcaacctatatcaaaatggattacatcttgttttgccagaagtaatttaggcttccattgttaccattatacctatgcaggatcagctctaccacctgcgcatccacctgacattcctgcatttagaaagcc

SEQ ID NO: 188584 - DNA, 307 bp, Zea Mays
agctgagaatctgtgtgtgcttgagcctgagagagcttgtgtgtgcctgtgcgtaacgttgcatgccctcccttttatagctcaaggggggcacgtacaagggtgttgagccctgacatgtgggcccaggaacataacggatgtaatgcttggagccactaatgttcgttgctggagcaatctccttgcgccctgatatccgcgatctgcatagtactggcgtgcaggggaagcttccctggcaacgtaccagtgatgatgggcacagtgcaccccgcagcacgggcgtactgttcggtaatggaat

SEQ ID NO: 188585 - DNA, 792 bp, Zea Mays
taaggttctagtgccatctgatgcagctgttgttattggtgacacccttcttgatattgccaaggatgagagtttgagatctttacgaacaccgacctttttggacacatcatctgcaccgttacaaggtgactttcttggtgatcccccttgtgatgacattgacgaagagaccagccgatcaattttatcatctgttgttactggtgacacccttcttgatattgccaaggatgagagtttgagatctttacgaacaccaacctttttggacacatcatctgcaccattacaaggtgactttcttggtgattccccttgtgatgacattgacgaagagaccagccgatcaattttatcagcaagatcaatacttcttgacaaggtatttgcagcagaggacactgttgttcgcttcggtgaaacaccacgtgacggaactgatggaagagcagacctactgatcttatcagtgagatccatgctcttggacattgtgcttgcagacaccctgccccccatcatagcaggccagcgatgatgatcaatcaccttggcatgtggattctccgattgctcaggggtagctctacctctcaatgggctcctcttcctatcagcgggtgctgcatccctcgtcttggcctgatctgcagaggagctactagaaatctttttcccctttgattcgagctggaaagaagaagacagactccgcattgaaggccacagcccatcaggagcccggccaccaggcaacctcctcagagcgatttgcgtttctggaacggc

SEQ ID NO: 188586 - DNA, 338 bp, Zea Mays
caggcactcaacaccctttcgccgtcgtggtcttggtttgatgccggcagcgcgctgggtgcccaagagaaaggtcagctctgtctcttttgcagaccccgttgttaccgctgtttggccgcaggaggagtgccatgggccatctgatgatgttggagacagtccggcttcgatggccactgacgttcaggttgcgctgcacggctctactgactccactcacaaggtaaacaatacggttgatcttgctaatgttttcactacaatccacaaaagcttagacagtgtgcctgtttgctcccccggcgttggcatgatcaatatgagtaccactttac

SEQ ID NO: 188587 - DNA, 524 bp, Zea Mays
gcggccaacacttcttcctcacctccgaccgccgcgcgtcctcctcaaattcaccggccaccgctcccggcgcctataaattgagggcggggatagttgcgccatatagtcgtgaagctgtagcacccgctcccacactcgatcgtccaccagctcgcctgaattgctcgttgcccccaaactggttttccgccgccgtgaatcaagctcaccgtcgccagcccaactccggtcagttcccgccctttgcttcctcgtttgagcattctcatgcctcagtgatgctccccgacccctttaattgaactagaccaacgcccatcgccgggaacacggctgtcttgccgctttgcttacggccaccgtggccggagctctatagttcatcaatcatgcgattaagttaggggaaatggtcaggctgaccccaatttcatgtccaccgctcggagaacccagccgttgccccgttcggccggtctgctggctcgccggagcgcggccgtgcgtgaacggcgtcgagg

SEQ ID NO: 188588 - DNA, 322 bp, Zea Mays
ctgatttaggtgtgttggaggtcacatgaaagggaggttggcttggtaaagttcgcggtgtcaaggcagtatgggcactgtccagcgtaatgtgttgggatttatgggcaattgatgggtgttctcgttcaagatggcttaagctaacaacagatttgatagcatgaagctgttgaagagggatgatcatagggagggtctttgaccctattgcggttgcgaagtccatatgagtgtgagattgggggttgtgttcggaacctccgattttgagaatacgtcgtggtggctagtgtgttttttcggtggcacaataatgagg

SEQ ID NO: 188589 - DNA, 413 bp, Zea Mays
caagtgagttaagagttttgttttcctacccaactgtggagccgcagtttacaatcagtccatacgtagaaacagaactagaaaaacagtcttaccagtattgaattgggcttcccaatagcccaaagattgaccttatggtcctctcctcctgtgacaagaacccgcgaggtcttcctcccaatcttgaggcagttaacattggacgagtgcgccacaaactcctctacaccaaatgcaagtcaaggcattccaatgtgtgcgaatttaacagcccaatctccctcgatgactgatattatttgcatcaatgtaccacttcagacattttcacatacatgccggaatgccagcaatcgcacttctaggataataaacgacaaatcagtaacgactactcgataatcaccaac

SEQ ID NO: 188590 - DNA, 1412 bp, Zea Mays
gaaacagatcatgggtgagtttgctcgtgttctaaggatctcaaagctgtcaagagtgtcactccaattgctacagacaatgagtatcatgatccaaaatctgagaaatgaacattcaatttgtatgttctactttgcagcatccactcagtttttgcaatgtagatagttgaaacacctaatatgcaagttgttatgttttctgcagattacatttttagcaatgagcacatcaacttcttggttacgtacccattcgattttcgaattgatgagatgttatcgtactacatatcttttctgcggttcgtaacacccgcctatataacattagttttattactgaccattatacacatcagcttacctggttccattttatgaagggcgataagtgggaagttgaacaagaatacaatttctttgctcgtgaagacgaaaaatgtacatatctgaacttatggacgacagatactctagccttgttccttgcttcttttgtttgaaccgctaagtatattctattctgttcccttccatagttcttggtttgttttatgtgtacaattagtgtagcacaacattttttctgtatccaaccaacaatcgtgagtcctcagatgtaatgcagcttcactgagtggactgcaaaaaagctcctgttaccatgttattgtggtcagcagcagcattttattacttcaagggtaaatatgcccaaataagagccatggcactaccgtggttaagtttgggatatgagtgtgctgtaggccagatctggttcttgctctgctttgataggggtgtcacccatattgttgttaccctgttttgctaggggtgtgccacccatattgttgttaccctgttttgctagggttgtgccacccatatagttcttaccctgttttgttaggggtggcacccatatggaaatataggcttatattctgaagatagttatatgcttgtctcacctggctattctaatcacttcatttatttgtttgcccactaaaagtttggactagttgagctttagaggttgttgtgcatcgcaggtcccttgtttactagctttctctcatcctctgtgttctatgcaggatgaggtcacttcctttcctctttatgttgaggccttaaagtttgcttttcacgaggatagcatgattcgagttgctatacgtaccttgacactcaatgtctatcacggtaagttggtaaacccttgatgtcaattatgaatgcttgtgtcctgtgtccacttttgcttattgggcaattctttgttttcagttggagatgaatctgttaacagatttgtttcccgcacgcctttatcagattatttttcagacatggttcagcattttcagaagcagtgcattgacttggataagttggtt

SEQ ID NO: 188591 - DNA, 386 bp, Zea Mays
atggaatcaagggtcatggttgtgcatgtcaatcctgacacagggacgagaatattttctgttgctaacaagctccagatgatggccactggctatgtctggatagtaactgattggctagctgctgtcttggattcctcgacgtcaagagatcgtaaagaaatgagtcatattcagggactaattgttctgcgccagcacactcctgaatctgttgccaagaataagttcatatcaaaatggaataatgctgctcgtaatagaagtattacttcgggcttgaactcgtatggtttctatgcttatgactcagtttgggccattgctcgtggtgtcgatcaatttctcaataatgggcagcagatcaacttttctacagatccagt

SEQ ID NO: 188592 - DNA, 749 bp, Zea Mays
tgcaaggagggtttcgatccttgattctgttgcaagggttcgttgttgtgttctgatgttggatcttgacttggaccatatgatactggacatgttccgccatttttttaaaactgcctcgtaagaaacttccatcacatttatttttaatcataatttttgcatacacttggtgctatattttttaagatatgacaaatggactgagacaataatgtaattgtggcatctttagatcccaaagaaagatttcattgctgtgatggtagtcataaaatgcatgtgttcctattatatatgttcccatcatgcatgaatgctgtccttatttatctactgtggatattatatttctcatcttatttattcccttctttgtatatttcagcaccaagcattcagaacaagtcacccactgtatggaaattataatgatgtttgtaattcaggagagcgatgatgtccatgctgaactggcatcattccttcttcagaaccttacaaaagaagcacaagtaatctgatcctctgttgtttgcatcaccaactagttattgtcatcttgtactaaaatttctgtccttactttacaggaaactctcccggcatcttttggacttgcagagagggtactaggcctatgcagggacaagctcaaaccagtgtttcatgagttacttaaggccactctcttggatgaatacagcaatgttgttacgatgttgttccaagatgcttcagatgctgga

SEQ ID NO: 188593 - DNA, 441 bp, Zea Mays
cctggcgattacccgctgcgaggtcgagtacaccgaacgtcggtgggggcaaagaaccattgcggctacaccttttttcctctctctcccttctcggttcgctctcccgcggacatggtggcactgctgcgaggcgaaaggaccttcggcacaaggtagagggtgagagggggggaaagagctttatatccaatgcgcactcacccgcggaggttgttacgccagccggagccggggacctcgcaggttgggcgagaagatcacggcttttctgtttttgcgcccccagcgtttggaccagaggaaggggatagggctgacaacgcgggcccacttggccggtgaaacaggatgcgcggttgagccaggtaagccaggatgggccggcgtcggggaaagaagagatgagatgggccgaggggagaggaaatcgacccagac

SEQ ID NO: 188594 - DNA, 402 bp, Zea Mays
agcctatcaacttcttccttaactctgtcatggatgtcgtggttaaatcgtctaggtggctgcttgtgtggcctaaacccatgcttaattggtagcctatgctcaaccaactccctactcagccctggcatctcagtataatcccatgcaaaacagtctctaaattctctaagtaaatcacataccttttgcctctgaccggctattaatttagcacttacaaatgttggtcttggcacctttccgtctccaatgtccacttcctctagttcatcaacagatgagaacccctgtcctaactttccaagatcatcaaaatcatccaccacctctcccatatcgtttttgtttaaacgatattcatctgtcctctcctgtaaccattttaaactatcgtgttca

SEQ ID NO: 188595 - DNA, 288 bp, Zea Mays
ctcaaatgcatggttgttatgtcgtccattaagtgtccacttaattgtcgcttaagcgctaaggcgctggaggaaggacgactccggtgacaccttaccatttaggctatggcgtccacaaggtgtccatgttcctctacgacgccttattgctcgctcgcccacccctactcgccctacctgcacctgctcgccccgcccaccgcgcgcctccaccgctgtgcacgtcccgcccttccactgcgtcgcgcgcccctactcgccctgtccgctgttgtcctctacctg

SEQ ID NO: 188596 - DNA, 408 bp, Zea Mays
attcaatccccaagtactttatacacaagtgactcacctcttttcaatttcactgtccactttaggaaatgaactcttcctgattccagataagggcaaaggtaccaactcttgttcttgctctttcacagattttggactgcttacaaaatgatccttggccacataaggcaactgtttattctctttcaacttgccttttttctttacaggtgtgtcaacaacgttttgagtgaaactcttcacagaaacttctctggtgtcgtgtttgttttgctcgctttcttgcatgcgaaccttgcttttcattttcacagtatctttgggaggttgctcaagaattgactcactgtaagtcctctttttcttcttaggcaacaagttagctcccttctttacaaattgaag

SEQ ID NO: 188597 - DNA, 822 bp, Zea Mays
tttttttatggccttgtttgccttttctctttatttagtcttcaacctttggcacttcattgttgtaggccctgtctgtcggaatatttccttatgtactcaaactgcttccaacaaatacaatagagttacgtcaaattttagtgtttatatggacaaaaattctctctcttgataaggtatgcactcttcattgtaatcttgtaaggtcattttgttgtttctttagattagattctgttgttttacctgtaacattttcccaaatggcagtcttgtcaggttgacttggttaaagatggaggacatacatattttattaggtttcttgacagtttggatgctttcccagaacagcgtgcaatggccgcttttgttatagcagtcatcgtggatgggcataggatgggtcaagaggcttgtatgaatgcagggcttatagatgtttgcctgagacatctgcaacctgagaatcttcatgcacaaacagaacctttgcttttgcagtggctttgtttatgccttgggaaactctgggaagatttccctgaggctcagttacttggtctgcaaacaaatgcaccagaaactgtaatatgcttattgtcggagcctcgacctgaggtatgatgccctcatattctgtgcactctttcttttgcctacttcacaagtaaatatttggttttgccaggtcagagctgctgctgtttttgcacttgggaatcttactacattatcaaattgccctgatgatgattctgatgatgatgaaaaggtgaaagctgaaataaatgtagttcgaagccttctccagatatc

SEQ ID NO: 188598 - DNA, 600 bp, Zea Mays
aaataatttcatctttgttatcaatttcttccaacttttcaggaagcacatttaagatgtgtgaaaggcaaaaacggtgacgtgcgttagggaaaacctttttgatagctatcgctacatcatgacagtagtttgtaattattgaatgtggtggtttggcattcatacatcttaaccatgtaccaaaaagccacacataagccccaagagatctaccagcaagcaggccacaacctagtaacactggctgtgcatggtggttagttcccatgaatgacacaaactgcatatcatactgatcgctgaagtttgtgacattaatagcaacaacatcaccaaagtaattgtatgaactgcgtgatttggcgtcagaccaaaagacattccttagttgcccttgctcattcatatctaaactgtaaaagaaacaagggttttggtcttgcattttgttgagaaaatccaacaaggcgtctaagtctccttctgcgagcttcaatttcctatttctatctatcttggctttgaattcaatctgtgtagaagacgaagttataccagtatcaacaactctgcttgaatgtacaagagctgagttgc

SEQ ID NO: 188599 - DNA, 570 bp, Zea Mays
gttttacaggaaaattttacaagacatgctgggacatcattaaagtcgacataatggctgctcttaattccctttaccatggaaatgcctataagcttgatttgctgaactcagcgtatctcattcttcttccgaagggagaagatgcttcttcagctggtgattttcgaccaattagcttgatccatagttttgctaagttggtcactaagatcctcgctaatcgattggggccatattttcaaaacctagtggcagctaaccagagtgcttttattagaggaaggtcaatccacgacaatttcatgctagtgcaacaatcgattaagttccttcataagaggaggatctctagtttactgctgaaactggatatttccaaggctttcgactcagtctcgtgggcgtttttgttgaaaattttgacacatttgggctttggacctgtttggcgtaatctgatctccaacttattattcacttcttctactcaggtgctcctaaatggctcgcctggtaatcatatttttcatcggagaggtcttcgccagggagatcctctttctccca

SEQ ID NO: 188600 - DNA, 782 bp, Zea Mays
gcatacctcatcatatatgctcgacaagctgcacctgggtgtggtctccgccttcgactgcttcatcttgccagcacccacaacctccctcattgacaaaggcgctggcaaggcctcctccaagcggcgtaggtcgctaagggagatgaggagtggtctggaggggagcgagtgcagctccagcacggccaaggtccaaggtctaggaggaggaagacaaatgcagaccacagtgttgggggaggttcggtgacgggctacactgccgtgtgtggcatgaccgcgagaggcttgggtgaggggctacatcgccatgcacgagagaggtatgagagggctatgctgccatgaaggtagaggtgtggtctaggggatgcaccgccatgcgaggagaggtgctgccatgcaatgatttgagaagagataggagagaggaaatatttatgtgctgctcttgcttgcagcaataaagaaggtaatcgttttattgtattacgtatgaagtcgctgaaatccaacatagccataggaaggaagcaatagggaggaaggattagggtggggccacatgacaagggcacaatcatagtacatgaggtcaatgccgtcgagtcgagtgccatgaggtggaataggagacaggacatcacatgctactcattggcagtggtgcaagcttagaaagagtagggagagggacacaacagatgggcctgcgtgcaagcatgggtactcaggccagtgttgtgggatatggtgtctaaacagccatacaaaaccag

SEQ ID NO: 188601 - DNA, 458 bp, Zea Mays
cagaggcctccacaattgctgcagaatgccagactccgcatgcaactttgacagttctaaatccattcaaggcttccacttcttttgggtacgcagcgctttcacggtttccatgcccaagagcaccgaattttccgtcaccaaatgtgtaaagtcttccagttgatgtgatcagagctgaatgccacgagccacatgcaacagacagtacctgaagcccctccaagggccctgagacacgctttggaagccaatggctagccccagtgtcgtatccaagcaatccagcacggtaagagccatccccccagttgaacagatcaccagaagcagatatagcacaggtatggaactctccgcatgaaataaaatcaactatggtcacggatagtgactcaacaagcttgggacgactaatatctgtatcagttccatgaccaaggcgcccaccaagttcc

SEQ ID NO: 188602 - DNA, 295 bp, Zea Mays
gtggggacggtaggggagacgatggtggcgatagcggggttggtgcaaattcggtaggtggggattctggggctggtagagattcaacaggttggtctagatcatctcgagtaaggaggaaagtacattttattagcccacctctggagcgctaactacgcgaaaaagcgtgaaacacgagcgagcgtgtgatatttccatagttgcatcgatcactctttgtttttctcatataaagggtcatgcatgccttcactcatatattggttgacatctacttaaatggacaatgcgg

SEQ ID NO: 188603 - DNA, 2722 bp, Zea Mays
tggatgtatccgtaggtgacgagccagatgaaagaatgatctttgaggtatttttgttattattgtttctcaaattcgtattcatatggtagtgcaaacgtgactaagactgcaacgttaaagattaggagctgtagctgtctctttttatattgaaggctaatgatggtattagtttgatctgtttaaaagcatgagttacctttccttgcagttgtttgctgatgttgcaccccttacaactgagaacttcagagctttatgcacaggtaatcctctctccacttccttttcattaaattagtaaaaatcatctgttatctaatgttacatattattgtgtaatttggtttatgtgacaagttgaacatgttgttttagctttctaatggttgtggtgtcacataatgtgtccatcaaaatactgaagtttttgttgtgatctgttcaaactattaaatatttcaagtagcattactttcaagtggtattatatgatgtaaaattcagtaaattcacaaagccacacttttctgaaattataaaaagatgacaattccaagaacttgctttgagcaacaacacttcttattgtttacagttttagatcgaaactcttttagtgcttgatggttactgagtagtcaagcactcaagcccactgggcaatcagaccatgcttacgaagttacgatggccacttaatgacatggtgctaggaaccatgtgcggatcatgtcatgttgtttatgagggaatgtgatgttatcaccaaattgctaggattatgctacaatcacccctgtttatctagatatgggtcttaaccagggagggttggacttagatctgctgatgccccatccaaacagtaataatgaaaactgtttcactgaaagagtttctgttgtgaataatgttccagtgctaaggattgtaatcctttttaattttagggaactacaaatctagtttcatgttcaaatgtagctttcttttaattaccttgggatgttcctgaaatttcactattttattgaaatagcatcacatattttttttgctgtgtttaatttcgctccagtggttctagttgaggcaatattttccctatatttatgtacaaatgttgtacttcctatcctcactaacacaagcccattaggacattagcacagtgtccaatacttcagtttgactagcaatatcaagaaaaagtggatagattaaattaaacggatttgtattttgaaaataattatcccaatgaatctacttgtggcgatcttctgttgcaaatctatgtgaattttagatattgatgtctggagctgaaaagaatttgacctaagacaaatctaaatggacatgtacttgtggtcaatggaagtactgcatagcttctctttgcaacatggaataataccacaaatgtattttattctgatgaatctactaattgcaatcttctattgcaaatctatgtcaatttagatattgatgtctggagctaaacagaatttgatctaggacaaacctaaatggacttgtatttgtgtatcactggaagtaatgtgtagctactctctgcaaccttgaagaatacctcaataatgtattttattactgctcttactgcattttatttttattatctgcactaagcagttgtgactgatactgttgttatactagtctttttatcggcacttggtaatcctaatggtttttattgttctttctttgcttaaaaacactctttggaatatttattcaaacttgaactctcgtctactttcagctatatccaatatgccattttgtgattctgtttgaatatttctgaaatctgagaacctaatctattctttccatgttgattaactggcaaagtaattctgcatgcttaatgcttactatatctacgtgactacaaatttgtaattgctctttatattatgaaacttcatcttgaaattttgagcaaggcgatgatgttactacatgggagtctcttacagatttcaagtaaaactggatgcatgatacaacagctgatgtttctacttttttgacagttttgttttgtcagacaatttgttatgatgttcttcagttatgacatcaaataaaattaggatatgaaatgaagattctgaacttgtctacatcagtaaacacaaacatactcacatgtaattagtataacttgagctatagacttctatcaaaatcttgtgttctaagctgccaatctaatctacgcataaaaaagctaatttgatgatgagcggttaatatactattatgtgttttcgaaatcttctgatagtgtagtggttaccattgttctttttgccacagcccaccttgtgaatagtcgaacctacagattatatccaattctcagttaaaaaactccttcctgttcctagcattgttgctcttgctaattgatgtcgcatgctttaggtgagctgggaattggacagaagactaagaagcccttatgttacaagggaacattgttccaccgcgtgatcaaggggtttatggcacaagttagtttttcttcttttgtgtaattttgtatttatgcatttttgttccacctcagttacgatggttgtattttgtggttagaatttggttagttttgtcttgtcctgtttttagtcagttccttgtttccttgttcatgatgtaggatgcaagacagatg

SEQ ID NO: 188604 - DNA, 379 bp, Zea Mays
gtccagacgctgaaccaaagcagtccaatattaccttaacacaattcagatcttccactataggtttaacaaacagaaccacatcgtcagcataaatagaaattctgtttcagacattcccttccagaaggttatggagcagccccctatcttcagctagcagaaacatactactaaggacgtccattatcagcacaaatagcattggggaaaggggatcaccttggcgaagccctctccgatgcctaataggaataccaggagacccattcagcagcacctgagtggaagatgaagccaacagattcgaaatcaaatttcgccaaatatttccaaatccaaggtgagaaagcacctcaatgagaaaagcccaagaaac

SEQ ID NO: 188605 - DNA, 333 bp, Zea Mays
gaaagatctggtgatggcaaccctgctgaaaagaacaataccttgcatcaaggaactcctagcacacctgttgtgccatctggagtagtcggtgatcgaagaataatgttaggagttggaggtggtggtcctggtcttgctgctcaattggaacaagggtaccgccaagctcgagaagttgtaagagccaataatggcataaagattcttttgcagcttcttggttctcggatggttacacatcctgtggctatagattctattcgagcccttgcctgccgtgttcttcttggcctggctagagacgatacaattgcacatatactgacaaag

SEQ ID NO: 188606 - DNA, 337 bp, Zea Mays
ccatctgtacacaacacaaatgttgttttgccctatacccctgcttgtaccaatacggtacgcactgttgcgcgtgcgctcttccccagctcagccaccccttctctagagtcgccgccccttacccatcgtcgccgctctcctctcatgctgccctgttgtgctttggtggccctctactcgagcagcagctacgctccctccatctcgcggcggttgtagtctgcagagtccccccttcagcgcgctctcgtcctcctctgttgtctattcagcgactgaacaggcgagtaggcgaccactcctctgtttagaatacagagattgagatgaggac

SEQ ID NO: 188607 - DNA, 634 bp, Zea Mays
tgctcccccgtcgttgtagatgtcatcggcatcttctccttctgcacatggaaagggtagtggttttcattgtgatcattgcggacaggatggacatgtagagtttttctatcgatcagcttactgatcatgaatgtcgtgttattcttaatcatgatttctgttatgttcaggatcgttccacgggtcgctgggttgggtactgactctcagcacctttgggatcttgactggcttcatcttttccttctgctgcacttgccagctctatcagctctgcattagctgctttgtccacgtcgtcttttgctcagtagcatcattgtctaggtcatctttgtggcactcatctgtctacttgattcattgtggtctcctaggttcggtttcaagtcatgagtccttagctcagtgttagggttttcaactgggcaagcagattcaccttccttatcattctagtgagtcagcgtctgagcgtccttttcatcttgtccactaatgtatgggtggactccctttgcttcaaaaggggcgtcaacgatattatattattttatagatgattttttcgccacacgtagatttattttatgaaaaacgtagtgaggctttgttcatctataagattttc

SEQ ID NO: 188608 - DNA, 642 bp, Zea Mays
gtctggtgtagtggagctttggaatggatggggtaggtaaggtagcaagcttgcaggttcgataaaagaggatgatagccttcagacaaaaacgtatggctgccctgatcgcctaactgcgccctgaccgtgtctctgatgcatgtcgtgaccatgccctgaccgcgtctctgcttggccgccctgaccgcctccacaagcggggataggagaggggaaggaagagagtgcagggccttaccgtgagaaggcggcagagagagtcttcgtcgactttgcgctccgccaccacatagttactccacgtcgcctcctccgtcgttagggctgcgccacatctcgctcttgcgtcgtcgccatgatccgatctggaggatagttgatcggggttcgaaccgggccgtcaaggatgggaaaactccaaaccaggcggtggaggaggccacacgtggcgaggcagaggggggtcgtgcttgtcggcttgtcgccgtcactatcgcggtcgagaaaaaggcttgatgagagggagggggtggatgatgcgggggtgcagtgcattggggctaggcgttgaggatggggaggccgcgcggttggccgcatcgcgccggagggacgccagagggatttaaggcagacgta

SEQ ID NO: 188609 - DNA, 364 bp, Zea Mays
agcgaacttaggtttccttttaaaatctatcctttcctgaacaatgctgctttatactctttccattataaaattgaagtcgttttcgtttttctaagtgcataatttttatgcacctagatatgcactatattaaaaattatgtatctatgctatgtatctagaaaagccaaaaacgacttacaatttaggatgatgggagtagaaatttagagaaggggacatttggagcagggataagttaaatttgagacaatccaataacttggcctgttggtgggtacattacccaaattcaaacccttacccgtagtctatgtgagaacgactacgaccgggaactgggcttagacatgtgctttgg

SEQ ID NO: 188610 - DNA, 326 bp, Zea Mays
ctctatgctgctgcacctcctggaaactcagcttgggagaatcgaaagcaatgtctcaaggtaagcacatttgatggtcttgatggagtagacatcacatgctgcggacttttgttttgcttacaagtttgccaattgatcattaggttttgaaactttggcttgaaaggaaaacactttcagaatatatcatccgtcaccatattagagaaattgagactatcaacgaggcatcatttggaagttctcgccgtccttcaagaacagagagagctctaaatgaccctttgcgtgacaatgaaggaatgcttgttgatgagtatggg

SEQ ID NO: 188611 - DNA, 328 bp, Zea Mays
ccgggatagtcttgtgcgggaggcgcgctctggagtaggctgagccgccccatggtgaatgggcggtagtgccgggggcgtcgtgggtggggtgcccacaaaccttttgaggaggccaacatgaaaaacatcgtgcaggcgagcccgaggtggaagctcaaggcgataggcaaccgtgttgacgacggagatgatgcggtagggcccataaaagcgaggctgaagcttgccactggtgaccccctggagggaggctggagtacgatggcgaaggcacagccagacccaatcgccaacgttgaaacgaaggtcgcggtggttcttgtcg

SEQ ID NO: 188612 - DNA, 400 bp, Zea Mays
ggggaatgccagctgtcttctagggagaggcggtggtgacaacggtctacatcctcaatcgctcgcccaccaaggcactcaacgagatgacaccatacgaggcttggcatgggtgtaagcgccgcgtctctcacctacgagtctttggctgcctcgcgttcttggccacatcagcagaagcacccatgggtgttcattggctatgcgaagggctcgaaggcctactacatccttgacctaggaacacagcgtgtgagcacggcgcgggacgtagtgttcgaggaagggcgaggatgggcattatgggacaaggcggtggatgacgacatgactccaacgtacgatgacgacaccatcgagtatgtccacttcgagggagctagggagtaggcaactcttc

SEQ ID NO: 188613 - DNA, 374 bp, Zea Mays
gtttggaatcccttatatgcagtagtttgtataagatacctaatttgtagtcggtgttaactaatagaacactgtgtttgatgtagccatggaatcggagaacgaaaagctccgtaaagaactggctactctgctcagagttgttcaaaagcgtagttgtgacatcgttgatgtcgtcaaatcagccttccaacctttcaactcacctttggtggacgaattgaaccgagcactagttgagattgacgacctcgccaaggatctcgaagacgtagcagtgcaaactcagtgggaggtagaaaatatggctaactgtcaagtaaacgaacatccacgacaagaggaagcagtagaggagcttctgatagaagatg

SEQ ID NO: 188614 - DNA, 444 bp, Zea Mays
ttcggacggctgtgcaatacttgcccatagagtcattcgagcaatcccattctttatttatctgacttatgaccaccagtgaatctccgtataccatcagtctcttaatgcccagtgatatggcaatgttcagtccatgaatcaaagcttcatactctgctgcattattggacgctgagaataacaactgaagggcatatttgagttgttcacctccaggcgcgatgaagaggattcttgtgtctgtcccctttagcttcaacgagccatcgaaatacatccaccatacttctgcagtctccgggttgtctggcacttgttgctcggtccactctgatacgaagtcaactagtgcttgagtctttattgcagtgcgaggtcgaaactcgatgtcgtgagctcccagctcgcaagcccacttggctattcttccgatggcttctt

SEQ ID NO: 188615 - DNA, 473 bp, Zea Mays
cagcagcagtcctcctcgggcgtcggcagcgccggtggctcccttttggggaagcccgtggctccggcggcggatcgcaagtcgaagaaggggacgctgatgcagatccagaacgagacaatatccgctgccaaggcgcttaaccccgtcaaggtcctgccccagcgcaacaggaagaagaaggcgcgtcccctccccttctccccggattttcatcctctcttcattcgcattccaggtctcatgctgtagtttatgcttctcgttcagcccgtctcctacgcacagctggcccggagcatccacgagctcgccgcgacgtgcgaccaggttcgtccggctgctgcttcggtttggtactttgattataatttcatgatgctggcttggatctgttaactttatctgctcttgtgatatgccttttgtagaaaagttcccagaggcagctcgtaaatagtgtgttccccaag

SEQ ID NO: 188616 - DNA, 271 bp, Zea Mays
agggctcgatagtgagtccacctcatttgttgcttcgatgtcacgttctaattgacgttcttgatcttcagcaacttgttctctcttggttattgcatattttttatggacaatgcacacttctcaagcttgtcgcaaacatctccaatctgaaacaacgcagtcttaagtgtgtagaccgactcaggtaaagtagtttcgacaaccccatcagttacaagattgcgaatgatgtagacatgggcctcaatcacttgaactgcagtctcga

SEQ ID NO: 188617 - DNA, 1698 bp, Zea Mays
gtgatctagatccagtaagatggaaaaactcacaatggcgcaacatacaggttggttttctagttaatttcgttgcatcctgtgcgctacccttttccccttttccgttgctgatacagattcttttgtgacctaaagagattgtatttttttcaataggtcggctgggatgagtctgcagcaggcgaaaggcggaacagggtttcaatctgggaaatcgaaccggttgctgctccttttttcatatgccctccaccattttttggttcaaaacgtcccagacaattaggtatgctctggtgtttacattagcattagtttcatatgtcaggacttctttttctagatagtttggtaggtcagggatgttattcctcaagctatactactgaagatgcttggtagtcttctttcgattatagctttcctgttaatgaattctatatatattttgtgattttaagatttaagagtagttttgagccctcagaaatggagaacctcttaaagatggcatgggtgtacaataaattatctctgctatgtacttgcagatgacgagtcctcagaaatggagaatcttttaaagagggcaatgccatggcttggtgaggagatatgcataaaggatccacagacgcagaacaccataatgcctggtctgagcttggttcagtggatgaacatgaatatgcagcagaactcatttgcaaactcggctatgcagtccgagtacctacgatcgctaagcaaccccaacatgcaaaatcttggcgtggctgatctctcaaggcagttaaaccttcagaaccagattctgcaacagaacagcattcagtttagttctcctaaactgcctcaacaaatgcagctggccaatgagttgtcaaaggcatctcttccactgaatcagattggtgtgggcaccaaacctcaagaacagactcaagacccaaacaatctgcagaggcaacaacagtccatgaaccaactacttccattgagccaatctcaaaccaatcttgtccaggctcaggtccttatccagaatcaaatgcagcagcaaaagcaaccaacatccatggctcaaaatcagcagccagctgccagccagtcactgatcctgccccagcagcagcaacaacagcaacaacatcaacaacaaaagttggtacatcaacagcagcagattttactgcagcagcaacaattgcagcaacagcaacaattgcagcaacagcaacaaaatcagcaacagctaaataagatggctgcacaaatgccaaatctggcatcacatcagccgcaactgtctgatcagcagcttcaactgcaactgttacaaaaactgcaacagcagcagcagtcgttgctatcacaaccagctgttactcttgcacaattacccctaatccaagagcagcaaaagttgattattgatatgcagcagcagttgtcaaattctcaaccactttcccagcaacaaacaatgccccaacaaagtattcaagttccatcacgggcaacaccaccaccaacaacaaccgtgcaacaagagtcacagcaaaagcttccacaaaagcatgttgggttcactgacacatcacataccaccattcctccgactacatcagtcaacaccatttcagttgtaggaagtcctctgatggcaactggtgccacacattctgtagttac

SEQ ID NO: 188618 - DNA, 314 bp, Zea Mays
gctggcttcggtgcctcgttccataccactctgaacgctggtatcctctcttcttcccatcctccccatcctacatatccttcctccattgttggcaatggttctcttcttccggtcgcctccatcgacgtcttgattctccctagtccttttcgtcttcgcaacgttcttattgctcctggcatcatttagaaccttttgtttgttcgtcagatcacactgacaattcatgttctatggagtttgacccttttggtttgtcagtgaaggatcttgccgctcaaagtcttcttgtgtggtgtgacagctctggg

SEQ ID NO: 188619 - DNA, 366 bp, Zea Mays
caatgacttggacatcccggtcatgtcgttttatctcatttagcgcagtcatctgcaatttcttgtaataaaaatactagtactcatccatgtcatgcttgtcaactcggacgccatgttcgtataccatttcctacctcttcctcccgcgccacatgtaactttcaattaattcactgcgatctctggacatcacccatcaccagtgtatctggccacaaatactaccttgttattttggatgactgctcccaatatttatggatatttcctttacgcctcaaatctgacaccctctccaccctaaccaatttctttgcctacgttcgtacgcagttcggtgtcactatccagagcatccagtgc

SEQ ID NO: 188620 - DNA, 525 bp, Zea Mays
ctaatcaacacataagcacacacccaaatgcccccttgagagcgagcgcacacacactctctctctcttcttcaacctcctccctctctctctctctcttccctgcattcttaggcttacatacatggcatacatggctcagcagctcgtcggccggatcacaatggaggtggcgccatcgaagctgccgtcgacgatggccaggtgtgctaggctcccgaggaacctcgacacgatcgcggaggacgacgacgacaaggaggcagcagccatggagtcgacaagggagctgcctctccgcaatgcgagccgcggcgcgcaggtcgtcgtcgtcgacgcccctgtgcactgcgccgacaagctggcctgctacctcgcccccatggcgaagacgaccgagtgcctcaagatcaaagcctaagtttgtcaggacatagagagagacgagggtgaggcactcgtctcatggagctggatttcttgctctcttgttttattgtgagcatatggcaatccgtttcgttt

SEQ ID NO: 188621 - DNA, 323 bp, Zea Mays
cttagctgtgcatgagtattgctgttgcaagctttagatatgcagtgttgtagtcttcagtgcatgtattttctagaatagcaacacttctatattgcagaatgcaatctgatagtttatataggaacagataaagttgattgctctttggcattatagtacagcaagtgcaacaccttgcgaaagtaattttctacctcattggcatttataggctggctgttcatacactgtattgcatgtgtataatgaatttacattatcagaatagttgttagttgttacgtaccccattatacacatgtaagcaacttcactgaagc

SEQ ID NO: 188622 - DNA, 692 bp, Zea Mays
tgtgtgtatatggatctatgccatatacttcttgctcaagaatttcatcccctgctacttttcggggttgataatccttaacctctggaagctccaaattttcggtgccattcttctgtgaaagcaacttctcagaatagtcatcaggtaaagaaactctcatttttcgttgtacttcctccacatctgctacaataaggtactcctcaataacttcatacttcctagtaactggaggaacaaggctggcctttgtcatgcgggcacctaatatacgatcatcgatcacagactccccatgttcagttaactttaggcaatttccttttaaatcccaggctccagaatttacatcaaagtcactctcagtatcagaaacagtagtttcactctcagtttcatcaccttcagagtagccatcatcatcagatgtttcactaccagagcagacatcctttttctttaatttagacaggcttcttttgatttcaaggtcaaatgcgcgagatgaattatctgctccagcagccaccaaatttgctcttgttttgttttgcttctttttgagtttagtatcgaatgaatattgactaatgtccaggctgtcctgggctgctgctccgtttctctcagaaatgtaccttgggttccctagtctctttgctagttgtatgaaggagacaacaatttgc

SEQ ID NO: 188623 - DNA, 274 bp, Zea Mays
ggcttctccaactccaacgacgcccctggctcatgatcggcgacctggttccggccaagcgcggtgtcgctcggtgacttgtctacagctgagaccttcgagcagagaccccccatcccctttcccaagacgaataccctgatccccacgccgtccttttccaatttcttgccgccgtcgcagcccgtgatccccacctcgtcctattccaattccttgccgccgtcgcagcaagtgacagagtccatccaataatgtttgggctctatgggca

SEQ ID NO: 188624 - DNA, 1160 bp, Zea Mays
ggacagcagttgaagatgataataacgatcatcttccagaagcaaatgaagagtcaaccagtgttgatcaccttcctgaaggacttgaagggtctatcactgatggtagtcttcctgaagcgcaagaagatcagcatgacagtgatcatcttcctgcagtgcttgaagagctgcatggaaataatcactttcaggaatcacatggggaatggagaagagatgatcgtcctgttgaagtctatgatgagtggcagagtgatgatcatctccctgaagtaaatgaagagtggcataatgatgatgagtctaatgatactgcagacaattggcatgataataattctgaccaaccaattgatcatgatgctgctcttattagaagagctaatactttcatccctggagatgatgataatgtgtacagcacagaattgagggaacttctaagcaggttattgtttcttgtttaaagaaagttgttacaagcaatttgtttggtgtataaatactaaaattgccttctttatgcagaaggagcgtttctaatcttcttcacagtgcttttcgtgaaaacttggatcgacttatccggtcatatgtggaacggcaaggtcgtggtcctctcccttgggatctggaaggaacaacccctgcccctccatcaccagttcaaattcaggaggagcaaagagatgatgaggaccaggaactgcagcgcactgtcaacaggcctcctttagtgataccacccccacctatgcctcctcgtcagccactttggcattcagagttgcatcgtactaattggatcagacaaaacattcatcgttcatcttctgatattgtgagctattgccattgatatccttaccgcaattacattaaaattttactttgctctatttatatttttggagctttgaatacaatacatttattctttatgatgaatttgtgaaccatatttggcaggctgtgtttatagtaggctaatgcactcaactcttcgatttatagtaagtttggggagtagcttatatgttatgtgtggcaaaggctcatatttttcttttctgtccaggaatgggaggctatcaatgatttaagagctgatatggctagacttcagcaaggcatgagccatatgcaaaggatgttgg

SEQ ID NO: 188625 - DNA, 318 bp, Zea Mays
cataggggcgtgtcgtactgctggaggcggtccaatagtgattgttggtggtcgctatggcgtgtcattgtgaggggaggccgtacctccaaaggatgtggtcatcggcctctgcagaaggccttgaagtccatataatgggccccaaggtttggaggtagtggatgactaggacgaggttgaacccacctagttatataccgaagcagctgatggtgaactcctgacaattgcgcatggacacgttgcgtgccacgtcctcgtagggaatacaatcaccattgaccaccgtgacccgcatgttggtgttgtctgcta

SEQ ID NO: 188626 - DNA, 807 bp, Zea Mays
ctcaaagtttggataaaaagcttggaagaatggttactcgtgttgtcctaccacgagttgtcatgcacgcgagacatcattatggagtaagttctaactaaagatgtggaaaaagttaattgagtcattggcgacagttatttattttcatgctctttacttagaaaaccccttcatataaactaaccaatttgttttcatgctctttacttagaaaatcacttcatataaactaaccggtttttgtcttgtactcttgtgctaggcattttcccaaaacttcactgggttagaattggaagacgggggaggccggggcacctcaggtagataacatgcaccctttatggtcttaatttttatttttctttctttccttttttcatttgctgttatatgtatgcatcatgcaagtttccaaacacattcatttgttttgatgtttgatatactattaggttcacattgggagaagaggctcttaatgaatgagatcatgactgggtcagtggatacgagatctgtggtttcaagaatgactttagcattactggaggacagtggatggtatcaagctaattacagcatggctgaacatttagattggggtcagaatcagggaacagagtttgttatatctccttgcaactcatggaaaggggcataccattgcaatacaactcaattatcaggatgcacatataatagggaggcagaaggttactgccctatagtaaactatagtggggacttgcccaagtgggctcaatattttccccaagccaataaaggtatgcccaaatgtag

SEQ ID NO: 188627 - DNA, 343 bp, Zea Mays
tacagatacataatgatattgctcctgatcaagataccaatattgttgctggtctttcttggaagtaacctcttgaagaaagtctgcgacacctttcctgtcagggcaccggaaaccgacagactcaaagaattccaggatattctcgcgtggcccatggtacactatgtatccttctgatagcaggattatgtcatcaaaaagattgtaggtctctggcggtggctggagcagagagatcatgacagtttcattcattacatggaccaaatgcctcataaactttacaatctgaaatgtgctcgagctatccaaaccagtggatatttcgtccataaataaa

SEQ ID NO: 188628 - DNA, 410 bp, Zea Mays
accgcaccgtgcaccctgctcctcggcgcgtttgacagcccgaacttcgtttgctctctcatcgtcctcaagcacggcagcgacaagctggtgcatggccagcctcggggcgagattagatgagttggaggagcaggagaagtacacgatagagtggggcgcgggaaagaaggtgggagggccggagcaggacgacttggcgcacatcgactgccttgtcctcgctagactgtggccagcccagcgtcgccgccgtctgcctcctcgacgaggtcaacaagatcgtcttcaacctaactgtctgaaatctcgtcaacatcaggcacggaccctaaactgagtgtccaccgcgagtacgtcaatctcattgatagctcttctccattcccttccccttcgcctacctcctc

SEQ ID NO: 188629 - DNA, 449 bp, Zea Mays
cttaattagaaaatgataaggaaaatattcaaggaagacatagttgtcttgggaaaattgatggacaaaaactagattctttgtagcacaagaacatgtaatacattattgagttgcaaggttttcacaggagtattaataacatgaccaatgttagtgttcatacctgccccactgtctgtgattatctgatctgtgcccttatatttatgctattgtacttgttctagatcgtcagcttgttcggatcagatgtgatgtcatcagtcgtagctgtgtggaggtaccagttagtgtcgacaccatagccatgaatgccatgagtggccgcaacaataatcttggtcttggaggagtatctttcattgaagtgataccaacaatctagggtaacgtgccctactttgccacatacttggcagatcttgttagtgtgctgggattgtgag

SEQ ID NO: 188630 - DNA, 296 bp, Zea Mays
ccggacgcaagttcgagcatgcactgaagcatggtccgaggaatgggctattcctcgttacgctgggttggtttgtggactgcgtgaggaggaacagtgagttcaagccccatgaatcaacttgtgaccttcaattttggctgaagttactgatggtctagtgcatcattgtatcctgttatgttttgactgtagtgaggttggatgaatccttgtatgccatcaagagcattggggagaatggtgtgccgcccggggagttcagccgccttgttggagttcctgttaacgagaag

SEQ ID NO: 188631 - DNA, 354 bp, Zea Mays
ggcctgcccgggcgttcttcgcaacgctccgatcgacgtgggcggcatggtattcggcgtcgacctcttcgtaatgcccttagcgggatacgacgtcgtcctcggcacgcactggatggccacgctcgggcccattgtatgggacttcaccgcccgaaccatggcattccagtgggagggtcgggacgtctgctggcgcggtgtagcacctccatccacgccgactctcctagccgccacaaccgacgacaccctcatcgacgggctgctacacgccttcgccgatgtcttcaccgagccgagcggactacctccagcacgcggccacgagcaccacatcgtcctcaagccagg

SEQ ID NO: 188632 - DNA, 299 bp, Zea Mays
aattcggtcatgacggcagcaattccttcgcccacgtgatgaaaggaggcaagctgctcaccggcgtttcgcagttcatcgacaagcccatcatcttcgtggaagaggaaatcatggaggccacgatgaaccttgacgagcggtgcaagatcggcagcacgtactacagggcgaagctcgacggggaggtgtttgcggtgaagccagcgaaaggtgacgtgtcggcggagctgaagatgatgcagatggtcaaccacgccaacctgatcaagctggcgggcatatccatcggcgctgac

SEQ ID NO: 188633 - DNA, 303 bp, Zea Mays
ttttcgggggtatggttgccatggttgattgcgatatatggaaatggagggtggaatttatctctctactatctgctgtgtagtgggccattgctgctgttgacactcgacggtaggatcggccgttgccctatatatttgtgttattaggtctgtataggaggtgatgatgtttgtttaccttattactcgccgttagcgggagcgcgagtgcaaacagttgttagtctatcgccattagactccctattttaaactccactttataaccaatatcgtctacagtacaaaacagtgttttgc

SEQ ID NO: 188634 - DNA, 353 bp, Zea Mays
agaaaattgagctcaaaaacggtctgtcaggatgactgaacaccattcgccatggtacagtaagctccaacctgaagaagatcctatccctctgctcgtcgccggtggcccgtcgccgttgatcaccgcttgccgtgattcgtgcgccgtcgccatggataagcacaacccagtaaagatctcggcgtctgatccactcaagcttggctacggctaagaccgccgcacttcaccgccccagctcaccgtcggttggatgacctcgtcaccgataagccaccaccgtcgcgcaccacgtgtctcagcgcggaacttcctcgcggtgactcaccggttgcatgcccggcgatcac

SEQ ID NO: 188635 - DNA, 274 bp, Zea Mays
tgacaatcatcctaatttagcgcgtccatcatgtgattcagccttcgttttggccgggtgccgaaggcagcagtcattaactgatcctccttcttggtgtagttgccaaggatttcattgcacatagtttcaatcatttctaaccactcttggcatggcttcttgaactctttctcaaacttgaaacggtaagggagctgaacaagttcgtgctttttgcccccatccttcttcttgggcattccccagccactagaggttggaaatactctat

SEQ ID NO: 188636 - DNA, 376 bp, Zea Mays
atgtttcgagagagtacatatggttgtgattccattatccccagtcataacaattgagatatccaacagacatacatacaacatctaagcaatggtttagacaaacaatgacttaatggggtaaaacatgaaacttaaaaaaatacttgtctgtgaagtgaggcaagctatcttcagattctctaaaacaggtgtgacatgacataaggctatgaggtggttatttgcatagctgaacacaaaatctgtgaacacactaacaaagtaacaatagcatgcatccaaaatacgagcttgaaaaacctatattgtatcattaaccacataggcaagcactaaaaactactctatattgttcaacttagcatctagaaaa

SEQ ID NO: 188637 - DNA, 333 bp, Zea Mays
ctgccaatacaaaggatggcctgctagtcatcatcaagttattgccatgttagcacgccacgtatataaaactgccctcaaactatattatggtcatttatacggttttacttgggtgtgtatgggtggttgtcctttttctttccaactgtgcaacttaacacttgcttgggtaatcagcaatgttactattttaaagttacctgcttaatcagcctcatctcttggttaacttcccttccttttgcagctgctatgctaatgctgttcttcaatgtctcatgtgcacaaagccactgatgatctaccttcttctgagattgcattctaaag

SEQ ID NO: 188638 - DNA, 339 bp, Zea Mays
gacagcaccactacccctcaaccgtagtcgctattatgtggggttgttgatgtcagcttcttcctctcaatcctggtaatacgaaaacaactcgatctgtgcgcggctggtttgttgatggtacctaatcactgatccgggcgggatatggtcccctgtgctaagtatatatatgcttgggtggctcgtggctttcatacaccatcaccattaagcactgccgccaggggattgggtttttcgccaagcgtagagtgagagattggggatcgccaatgaggagccgggccatgttgcccaagaaccttcggggcgcgttcgggtgaggctagccggaga

SEQ ID NO: 188639 - DNA, 558 bp, Zea Mays
atgcttttatgttgctttcactattgtttatgcattcttttgattgtttcaaatacctttccaatgacacagaacattgctgataccatggcttaccttcaaggagagggtcgcttactacgtggtgaacataatcatttatgtgaagcgtttcttgtgatgtcatcctctgctgggtatttggctgctaaaccttttcgtatttatgcctgcagcataaaagcagttttggtgttgcttctgttacaattcgtatttttttgtttctgtaggattcaacagcaacaagaagttcttgcttggttacttgaacctcttaataaaatgtggactcaagtggaatggcaaactgcatacttgtctgatccttctggtttgacaaacatgtttgctgatagccaattcatgtggtcaatttatcacacagttacattctttgaaaaggcactcaagagaagtggaaccaaaaagtcttcagcaactccacaagcacccaccacaacagtacctggttatctgcatccgatgtcttcacatctagcatggattgtgccccct

SEQ ID NO: 188640 - DNA, 618 bp, Zea Mays
ctggtggacaaaggaatgcatgttgggttgtcaaattggtcagcaaatgatgcgctgacaatagtgaactactttgctattgcagtgacaatcatcgttgtcgcagtgcccgagggtctaccactggctgtgactcttagcctcgcgtttgccatgcagaagttgatgaatgacaaagcgctagtgagacatctcgctgcgtgtgagaccatgggttcagcaagttgtatttgcactgataagactggaactttgacgactaaccacatgatcgttgacaaggtttggatgggcgatgtatccaagtctgtcaacagtgatacaaatatgaacgagctgaaggatgctactgcagaaagtgctgtggacttacttgttcagggaatatttgtgaacactgctgctgagatcgtgaagggagatgatggcagaagatctatcttaggcacaccaactgaagcagcgttgttggagtttggcttgggcttgcaaggagatctatacggtgagtacaataagatggcaagagtcaaaatagagcccttcaactcagttaagaaaaagatgtctgtggtaatacagttacctaatggaggcctccggtccttctgcaaaggt

SEQ ID NO: 188641 - DNA, 569 bp, Zea Mays
gaattccaccttggtgggacaatacacagggcactctggtatcttgtttatccactcaaggttggacatatcaaacttctccaccttgcgctttgcaaaaggattcttgccctggacatctccaggtaaacctcctgtattgttgtcgggatgcaatctgaccctgcagttagtggggctccgcaaggcatcaccaccgcttctcgcagccaacgcaggattgccgccctcttcattctgagcactcaaacgcattctctcgagcctcctctgcttcagggtctcgaggccgctcctgacctctgcagggagatagctcctaccctccacctaaaaggcgtaggtaaacacgtcaattttggggtcgaacaaaactatcattaacagcagttcagcactgcaagtagacattgaccaacagagacagcagactgaatcagcaccaattgtttggataccacaaattggtattatgtagtaccaaagagcagcaactcggcaaccaagtcaagaaagctgtaggtgctggaatcaaacacggcacactgatattctgaggttgtttccct

SEQ ID NO: 188642 - DNA, 588 bp, Zea Mays
ggacatcacgggggccaggggctgcgagtccgacatggtgaagctgctccaggtcggcctggcctgctgcgacgccgacgtcgaccggaggtgggacctcaagacggtcatcgcgcgcatcgacgagatccgggagcccgagcccgccgccgccgccgccgcctccgagtcgtcatcgtcctaggcgagcacccgcgcatgtactagaccaagcaaatcccactgatcgatcagcaagtcgtcgtgcgtgcatgcctgaggtacctcctccgagacgaggatttacatacgcggcggccatgcgcatgaatgaatcgtcggttgcttatatggttcaatcaatcaatcaactaaagttggatgcgttggtggtcgactgatcggtttgatgaacaaattaaagcgtttgagacgggatggatcttggtaatacggtttctgatatgctcatggggaatttttcaatcgtgtaaattggtttagcttaattaatctgtcaaaggaaaagaggtctagtgacagtgttagtagtgtgtgagaggatttaaattcgtgtcttgtaattgcgattaattcgtacaaatccat

SEQ ID NO: 188643 - DNA, 485 bp, Zea Mays
gtcccctcattctgactgatttggagaggatgtgccttagttcttctgcgaaagtagaccttgagagcttttgttgcttcgttgtgtcggactgttactgccatcctcccagccattcccagcatctgtagaggcaagccagcacttggaattgttgactcagggaaaccagaaactagttggggcgagactatcatgagggtgttcgtcttcagcggcccagagcacagttggggcgagacaggcaatgaaatgcatgtctccagcggcccagccggctcatgaggcgagacaggaacaggcccagatgtctctagcgacccaaccaggcaacgggccggatccggcctgagaatccttaactgcccattaatctcaaggcgggaagtcaccccgccagtttcgtgtaccgcagagtagcaggcttggggactgtttctcttctccatcattacttgtcccgccgcttcaaaatctggtgaagg

SEQ ID NO: 188644 - DNA, 432 bp, Zea Mays
tcaggagctactatagatgtgccaatagtaaagaccaagggtgccttgcaaccaagacagttcaacagaaggaatcagatggaagcgggacagtgagcttgttcgacgttgaatattacggccaccacatttgcaagaaggatgtcgtcaaccatccgtgtgttgttgacacagcacactattacagtgtgccgattgccaatcagaaccaaagcagtagcagcccaacgtttgttcacaatgatgtctatggaatccaggatgaaagctttgaaaacctgttcatggtgccgagcataccagagtatctgacagatttcacagacattgaaatggcgggggcacttgaggttacctccgagatgatctctgaaaatatatgggcgtacgagatgatctctgaaaatatatgtagacagccattgattgcac

SEQ ID NO: 188645 - DNA, 465 bp, Zea Mays
ctggtttttgctaacagccattccaatagatcagttttataagtatattgttttacactatttaactgcgattgtttgatgtgctaccccctctcccagaagctacgcaccaattcaattcccgagaaagtgattggggttttacatcttttatgcctttgttggatctgtatgattcaagtaaaggatatgttgtgaatgataaatgtatcatagaagctgaggttgctgtgcgtaaaactcttgatttctggaactatgactccaaaaggatgactggttatgttggcctgaagaatcaaggggctacctgttacatgaactcccttcttcagactttataccacattccttactttcggaaggtggggcaacatttctattttttattactgttgtttcttaagtgtggtgctgatactgaaattaatattttaggctgtatatcatatgcctactacagag

SEQ ID NO: 188646 - DNA, 302 bp, Zea Mays
ttcgcgcgcgtcaaacgtgttgcccatccgcgtcatcgccctcgtgtgttgcgcgcctcgtcgcgcttcagtaaacactccacctagaatcgctcgtgctaattaactacgtaataaaacgacgattattcgagtaacaacacaatcagagttaagtaatgattttattggtgcttacgataattgcttgctaatatggctaggtcgaataaaatattataatcaatattcgcgtagtgcgtttaagtcaacacgtgtcgttcacacgtgtcgacgatcgctatcgcgtgcatcgttccgca

SEQ ID NO: 188647 - DNA, 615 bp, Zea Mays
agctatacctattagtgagaagcttttcatagaagttctcaatgggcacataggtacaacaagtgcaggttttgaggcgattcatggaggttttgggtattgtagtaggaatcaggagagaggaagtcttagacctggcagtagcttttgacatgttgatagccagcactttctttaggaagagagactctcatttagtgaactatagtaatgtccaacactctgtcagatcgactttgtcctcacaagaagagagaataaacgaacatgtttggattgtaagatgatacatggggagtgtgttgtctctcaacataagtttgtggtggcagtcttctatttttatgtgcgtgccattagggataaacaagccaagattgcgagaacgaagtggtggaaactgaatggggagaatgcatgtcttcaaggaaagggccatcaaagaggacacttggaaggtagaagatgatgcaaacaatgtgtgggacaagatgacaacgtgcatttgtaaggtggcctcagaggtgtgtggagcaactatagggagtggaggtgaagttaaagatacttggtgatggaatgaggaagtctaaagggctattaaggaaaagaaag

SEQ ID NO: 188648 - DNA, 1099 bp, Zea Mays
gctggactatcttttctcgtaatttattttaagtatttttagtcatgaagtgttttccttttaatttatttaaaacattttcaaacatcaggttcaagacaacagtgaatatatgcattctggaccgccgtttctcatatttcttcatcctgctttaggcccattttgggatatcatacgacaaaaggtatgctattgtatacattgggtaaacatgatatttgtatctttcttctctccgttattagataatttattctacctgagatatgtgagctgtaagcctgtaactggctaagcctgtaactttgcctgtgtagttttgagcaacaagattaacaaggcagtcgcttaccatccctcgtgaacattgagcataacaaaacctattatttgacagttcttgacacatgtcatggtatactatttgatctgcatttagctcacatataccaaggattctgtcaaaactgaacattcaattgtttgggaaagtacgcatcataccacaatagctgaacacagactagacaccttcgctattgcctaatgtgacataatggcatgttcctcatatgttatatgcataaaatgtaacattgagcttgagcatgttgtgcatgaaagctattaactgctgtgaatgtttttagatgggtcacttgcagcacaagaaacttgaaattgaatgaaagactaattgtttgtgtcatgtcaaaaagaaaaaaaggaaatgtggtagaattactattacaaacgttctgtgagatgggaagttggtcctgctccatactgccctgtgtagtgtggaagatcgtctatagactgttatgctcagtttctagtaattggtttcttaaattctaaacagtctatatgtttcgttctattctttgccttgtctacttttggtggtcaccaaaatttctccatgcagttcgtaggtggttctgtttctaaaggttcagagttgcaaatagaggtggctgagtttctatggaaagatgttgaggtaacaatcaagacgataagtttgcatgcactttgcctgtttctgcaaactaagtttattatgttaaattcttataagctggatgga

SEQ ID NO: 188649 - DNA, 2923 bp, Zea Mays
gcgggaggatcgaagaggaggcactggtccggggctgtccactgcatcgggttcttcgaagttggggggaccacgggactcgaagggagcgcccgatctgctccgccggcgaggtgagcttctggaggggtatgtggctgttctgcgttcgcgttccgctctcctgcgtgccgaaatgtgggtcgtgttgtggagagcctcgcgggtaatttcacctgaggagctcgctcctgtttttcctttttttccttctctctctctctgggtctttggattcgtccgggaggcgtttttgggtgggcgaatcgcttttttttttggtccgcctgggggtctattttgggatcggtttcccaacactccgcagaggcgcgtgagaacaggggaggcgtcaggtaaggtttagagacgtgcgaagacttttgggtttccgatcgaatgcagctccgccgtgctgttgtctaggcatttcttcttcttctgatgaatcgctcttctagttgcgtgaaagagtgtcgccatgtctatgttgtttggatttggagtactgatggtgcatgtggctgccgcttttgacgtttgaagagtttagtcttaatagaacatgggcactgtgtactatttacaatgatttttgtgtaagtttagcttgggacaggagccttggttgtgccatgcttgtcacagtttatttttgagcttaattttgaatccgggacatttatgcaagctgcattacccaagatgatagagggtctgtggcatgcctcgtcaggacagcttctgataataaaatgaataatcctgcaccattgcccacaatcacaacaaaatcatgatgtttctggtttgcttccaagtagtatgttacggaaaaccactactataaatatgtgacttcctgttttattatttactcattaatttgttcgaaattaatgcagattgcactagtcctttgattatgaacaagatcttcacatattttatcagatttaagtgtatagttagtagagtattcacgtatcttttaaatgctaatatcatgcgcgtttggtttgatgtgatatcatttttcattgtaccaaataaaatttggaaaaataagatgttttttattcaactcgcgtttggcatcttttttttatatgtaataatttatgaaattgacacattattttctgtacaaatcacataattaatctgctattattggaataaaggaaatgactgaattggctttgacaactcataaatgtcctggatagttgtgatataattaaggctagcctttataggtgaatgtgataaatgggttacattcaaaactcaagttacatccacaccaagaaaaaaaaatctgaagaacaactggagaagccatcctttacttcattcccttgcaactctggcgagtgaggcagcagaaggtcaggcaatgcctcactttggttgggttatttaggttcttcagtttcacttttgaggaaacaaattccagttctcccgtatttttggttggattgatttgctcactcgggtttcaagttgagtaatcatgttagttttctctttgatatatagacctaaattttgtggagaaaatatgctttattttgatattaactaaatcatgtcacaccagtcagttagcttgccagcaagctaaacaaaacttgaggaccgctgatattatttagagtctcttgcattgatgtttcaaattgtaacgagtgcactgactcactgtacttcttttccataatataaactgtgaccttttgaatattatgtgactgtattgtgtcttcattacttttacaggtgaagtcagctgatatgatgtacctcatttggataacaatttgactggcaccagattttacagaaatatgcaggaggggctagggcaaaggatgcatgtacctcatggtatcaatctgtgtatcgcaacttcttccatgccctttcaggcgcaatctttcattgagcccagtaccggacaagtgaaccctcctgtaacatctgaaaacttatctgctaactcacaagctgttaatgatgctggagcagttgaaggtactgacatgaacgaaaaatcggttcaaaaacctaagaggaaaaaacataggccaaaggtcattaaagaaggacaatcagcaaagctgcagaagcctaaaactcccaagcctcccaaggaaaatgggaatcagcctactggaaaaagaaagtatgtcaggaggaagggactaagtgcaccagctgaacaaattccactatgtgctgatacacacactagagctaaaccaggagtagtccaaagatgtttggactttgatgtggaggaccagcatggacatttggatctggtaccgcaaacccaggaaacagagatacagactggtcctgcggacacacaaccatcaatatctggagttgaaagaagtaatgttcaaatatcataccattggggtggtacaagcagttctattagttcagttgacccaatagctggtatacacggattacaggcagactgcaattctaaaagagtcagttttgatctgaacaattctatagtaagtcagctgccaaccaattattctagtccaatggacagctctgaacaatttttcaattttgatttaagagaagaagttcgaacaaaccagttattgcctcatctaaccagctcggtagatcacacacgacacccctcggtcaattttgaccaatacataagcacatctcaagattgtccagaaaaatcacccagacattatcagatggtcagtagttatagaattctagaaaatatgacaacagcttctcagtataccgaaagggtgtctatggggggcaatttcaaccctgaagcttgtatgggcgaagatgcaataatcaaacaaatggcccaaagcta

SEQ ID NO: 188650 - DNA, 285 bp, Zea Mays
gtttgctgaagaatgtttgcaactgttgatcatgtttcactcattatctttcatatggtttagttatttcatttacatgtgcaggagtttgattttggcaggacaatgtttcttgctcttcagactcttgctgtggtgtttggagatattggaattggtccattgtatacatttgatgtcatgtttaacaagtaccctattcttggagaggaggatgtccttggagcactctcactagttctgtatactcttatattgatgccattagtgaagtatgttttggtt

SEQ ID NO: 188651 - DNA, 405 bp, Zea Mays
tgcagcacttcagtttggtgatttttataacgtgcagtatgtgaagatgtatacatttttcatgattcagttgcaggtaattttgaagacatttactatttttcttctgtgcaagtagtttgtttgtctacatattgagttattgaagtttcacatatttaattattgaagtttttgtcccttttgcatataggctattcttcctcctgaaaaaatcccagatgcatatgctaatggttccactgaagagcaggtacacctgaaaccatattatctgttgtagtggtggtacattcgaggagtccatgattaatgctctccctacttttataccactctatgtcatattaataaacacgttttgttcatttgtgcaggcatttatacaaaatctcgcactcttct

SEQ ID NO: 188652 - DNA, 354 bp, Zea Mays
gtggtaatggatctcgaggtcataatccttgatcaattcaagccatcttctttgacggaggttgaggtctggctgagtgaagatgtacctaagactcttgtgatcggtgaagatgtggcatttgttcccaatcagatagtgcctccatattttagggcgtgcactatggctgccaactccaagtcgtgggtggggtagttctgctcgtgcggcttgagtaagcgagatgcataggcaataactttctcaatttgcattaagacacaccctaagccttgccttgaagcatcacagaagatgacgaaatcctggtgtatatctggtagtgtcaaaacaggcgcggttgtaagcttc

SEQ ID NO: 188653 - DNA, 283 bp, Zea Mays
tggaccatacacatacgaagccaaagttcatttccaatggtacttgttaaaaatctttgttcacattacattttcccccaccctagatgcccttgtcttttacgtggctcatattttcacgattcaggtgatgatgatgagggtgtcatattcgaagaggatgaggatgatgatgagaacgatggatacctattcggtgggcaatgtgcgtacctcaatttttattatgataccatgacttatataactatacgtgtcttaatcgttgttttccaaaaaaaat

SEQ ID NO: 188654 - DNA, 1004 bp, Zea Mays
agtgggatgaattctgttctggattgtataacagatttggaagggatcaacatggtaccttgattcgacacttctatcacatataccagcagaactcagtggtggaatatgtggaacagtttgacatgctgttacatcaactactagcccatgaaagccagttgacgccaatgatgatcacttccagatttgtggatggtttaaaggatggtatacgggctgtggtggccattcaacgcccagccgatctggacacagcctgttcgctagctctattacaggaggatatgttgacacaacccaatcggaaggaaggcaggagagtggaattgggtggttatactagaccctccaatccctccatgaagactgcgaccatggctggacatcaagtatcagttaccacaagtcggatccatcccttgtcagaagatcgtcgtaggccgtctgggagcgatggaaggacggaggatcagaaacttgctgccttgaagtcctacagaagagccaagggcttatgttttaaatgtggtgaaaagtggaattataatcaccattgctctaacagtgttcctcttcatgtggtggaggagatgtgggctgtgactgaccagggaaaggaggaaggggacactgatccaaaggatgagcattatgaaactgagaacgaggaggcagtgttggcgttgtctacggcggcagtaaatggtagtgaaaacaacaggactattcggttatgggcctcgattcactgtcaacaggtgctcgtattggtggattctggtagctcggctagttttatgggtacccatctgatggaagtagtgaaaggggtgcagaatttggtcagacctgttaaagtcaaagttgctgacgggtactatttgtggtgtgaaaaatgggtaccaagctgtcaatggctatgtgagggaataactttttatactgatttcaagttcttgccattggacggttatgatcttatactagggatggactggttg

SEQ ID NO: 188655 - DNA, 1382 bp, Zea Mays
acggacttgaagttcgtatcctcttctccgcacgaggcctttcggtgggttaatagttttgcggaccagcaatgttacgtaaacctgttgcctcaccccatggcatctagcaagaagcattcttctgaactcattcagtttgatgccatgtttgatccttatgttaaatgtcggtctccaccaaagatacttgtcatcttgaatcctcgatctggacatggtagatctagcaaagtttttcatggaaaagtggaacccatatttaaggtatgtctagctgagtagaagcatgcatcttatctcaagattggatctgtgctgtcgcttctactaggaactttggtatgatctagtcatgcttcccaagatcatatttagtcgggtgtttcatactcaaagatgaatgttagggcaatcttcattcaactaaacttgatgctgtgattatgctacatgttccctgattgtattaagatatctgtttcaactgaaaaaacaatgaattacaaagtgcctagtcataccaacactatctagtttctagtaaaatacaaacgttggcagtgtgtaattaaaatggacaggtaggtgaagaattatgtataattcattggttcagcctgcttacagcatttagtgtgtatttttataatagacaatgttaattttatggtttcatactttaattatcgcactgggatattctttattatgtataaatttgagctgggacttatgctatgctttagaagcaccagcatgcatctagtggctgtaaaagaaccatgttatctatatcttaccaggactcattataaatgttctctggctatgtcatgtataattggcaaggcatctagttgttatcattcatatatttagggaaaatggtattgaagctttggaaagctgctccatgctcctaattatagttttcatccaagattctattggaaatgcaaccctagtaaactagttgagaaaacatggtgtataaatgaatcaagactttgttgccattatgtagatgtctgattcaattctacttagcccttgaccccttattatttgttcagactgttcagatatatttaggactattcttgacctgtggtgccagtcatagaatgctgaagttattcatcttttttttatatacaaagaaatatatatcactacttattattgttaatgcattctgtgttttttcagtatcttaggaactttggtatggtttaataataagtgctagccacagcttgcaggtttcaagatggaagtggtaaaaactacacatgctgggcatgcaaaatctcttgtatcaactattgattttagtacctgtcctgatggtatatacaatttcacatcttagatgaggt

SEQ ID NO: 188656 - DNA, 514 bp, Zea Mays
ggaaagattattgagtactgctcaagtttaaatctgttgaatatgtgtccaccagcacaattcagtggcattggttctgacctttgttttccagcatcatgtccttggatgactgcagttctgtgctatgaaaatggtatgacagaaccgcttctctttggacttgatgaaagcggcaagctttatatgggcaaaaggttattgagcaacaactgcagcagcttcacattatactccagtgtttatggagccactgagccagttatgagccacttgcttgtgactactaagcaagatcttctattcattgtggatgtcaatgaggtcttacttaaagacatcgaggtcacaattgatggccttgtcagtagtcctgctcgcggtaagcaaaacaaagagtacatcactgtgtgggaaaagggagcgaagttggttggtgttctccatggtgatgaagcagctgtcataatgcaaacaacacgtggtaacttagagtgtacctaccccaggaagc

SEQ ID NO: 188657 - DNA, 316 bp, Zea Mays
gtggatacgaaccccatctagattgttttggttatgggcaagttctcgtaggaccctagcattatccgcagtggcattcaccagggcaacaatgacgtctgccagcgtaagcggaactggtggcggtggaggattgagattagtttctgcatcatcgtgcgatgttctggccccatccgaacctcgagtacacataggcatctgaggcaaaactaagctcatgaatatacatccataaccgcgaaatatattacataaaactagtacatggagtattattcattacaataccaaaattggcatagcttacaaccct

SEQ ID NO: 188658 - DNA, 523 bp, Zea Mays
gcttttgctgacgcggattgggcagatgacaggcggtcttcagggggttttgcagtttatcttggcagaaatcttgtgtcctggagtgctagaaagcagccaacggtgtcaaggtcaagtaccaaagctgaatacaaggctcttgccaatgctactgcagaattaatgtggatacaatctcttctgcatgagctaaaggttccctgtccacctgctgctagaatttggtgtgataatataggggctacttatctcacagcaaatccaatgttccatggtcgagtaaagcatatcgaaattgatgttcactctgtgagagaaagagtagctaaaaaactcttagaagtgagactcatctctgcagaagatcagattgtggatggttttactatggccttgactacaaagaaattggcatcctttagagacaatctcaactcatgcaagttatgattgagggggaatgttagattgaaaagcttgtaatctggccataggcctctgccatgtaaacatagtttta

SEQ ID NO: 188659 - DNA, 282 bp, Zea Mays
gaggagtcttcatgaaatgcattcactcggccactgggagacaattgttagatgaaatccatgtcggatagtgtggggtgcatgctgcatcaaggactctggtgggaaaggctttaagatccggtttctactggcccactgcgaagagtgacgctgccgagttagtccaaaagtgcgaatcgtgcaaattcttgtcaaagcaacaacacttgcccgcgcagcagctgtagaccatccctgtaacctggccgtttgcatgctgggggctggacatgattggac

SEQ ID NO: 188660 - DNA, 482 bp, Zea Mays
caacagcccgcgcgtcctctggatgttcgacgcggcgcccgagtacctctcctgcctccgccgtgatcccttcgacgccaggcacctctgcgccattggccttcgcggcttcctcctctctgcgattcccaggcaggactccgacatctctctgcaggagcaccgggtgaactgcggtgcaggggatgtcgccgacctgcagaggctggagaaggagatttcagcacctgtacccgccccggcgctcgcggcgttcccgctcttttcctcgagaatttgcttctcccccctgtggaggcagatcctcttcgtcaccttccctcgggagctcatcgtctttgacctcagctacagcactgcgctttctgttactccattgcccagggggtttggcaagttctcggatgttatggccgatcctgatatcgacatgctctattgcacccatctcgacggcaagctgagcatctggaggcgcaagg

SEQ ID NO: 188661 - DNA, 1280 bp, Zea Mays
tctgggatctgacagctggaaagttattacatgaattcaagtgtcatgagggtcagatccagtgcatagatttccacccccacgagttccttctggcaacaggttagattcagaatttacaatgcttatctgtttcttgactgttatcttttctttgtcccttttggttgtacaatgtagtatgtacttgtttatggtaaaatatcagacttctgtcttggtatttgcttgaagaaaaaactcttctattcgttgagctagtaaattaatttaagtatttaggtgctctctaaaaccaagcttggcatttgtccgttaagtggagaagctgtttaaatatgatttcctaactagacctgaaccaaactgtaatggctgttcctttgatgttttaagtggtaaagtgtaatggatcatactatcgctgtaattgttgtctgccccaccgcacctcataataactttttgattgtttaccaaaaaaattcctagtagtcatatcttggcatagttcagcttgctgtaagtaaatcactatacatgtattgtgtaaaattttcgttatgagatatcatgcttgttttcgttggtgacatctgtaagagatgcattgaaattttgtacgatacgttctatataaactttctttccatgtcatcaattaacacatttcattttttgttttgttgtgagacacattctctcctgtcaggcagtgaagaatgtattcatatgtttgtgtgggagctcagaagactgtattccttttgaaactatatctctcttatgtaaaacttgttgcttcattcaggttcagctgataaaactgtcaaattctgggatttggagacatttgaattgattggatctacaggacctgaggtacatcggtatttggagctgatagttcacaattgtttatttcctttgcatttgtaatcctcagaatttaagcattatttccttaataagtagcttgggtggggatcccatctctaatgttacatcgaaaaagaaatggaaaatgaacataaacttagatgtccctgtttgatgcttctttatacaacaaacagtcatatgctaatgttttgcagcataattcagttcaatttgggcacctatttaattcatttggatacctcttttgtttccatcatttaattcatttgaatcacttcttggaatcacttcttgtgtttccataaaaaatactagacaacaggtgtccgatccatgacattcaatcctgatggaagatctttgttatgtgggctgca

SEQ ID NO: 188662 - DNA, 316 bp, Zea Mays
tactcccttggtcttggtatgctcgcaccttcgtaatcttgcatactcttactttttatataaatgcttacctttgtaccccaatgtttgtttaacatttcagtttacatactcttgaccacctttgtttcttcatgatccatgagcgatcgttccattcctcacatccttaatgatctcatcgtttccatataacttccctcggtaatgttttattttacttcaaccattctattggaaccttacctaccttactcgtgattgttttctccatttcgccattttgtgagtcttgccttaactccatcctttctta

SEQ ID NO: 188663 - DNA, 654 bp, Zea Mays
gcagctttaggaagcccggcaatggccacggcgggcagcagagggtggtgaaccagcccgacacaaccggtttccaacctgcccccgcgcctgccccccaccaaactcctgcgcgaccgccacctgcacctcagaatgcggctgtgcatgttcccatatccgcaccatggccgcaacctcaaggtgagtgagtgaggtgtcctgttcttctgctatcttgtattgcctctggaatggtgcaaatacgaaccgatgtgttcctttgattgcatgtgtttttctttgactcaccaggtccacaagtgtcatcttcatcagctgccagcgacaggccggctaatccgccattacctaaagctactcatgctgctccaagggctccaccaaaaagctctaacccaccccttcctcagggaggatcgaaaggtttgccacaattttcttcgatgttatatacactattacatgtttttgcatgtgcatgatgaccatctatggtggcattgcccaccttttttgctctggctaacgaaaccctattttaggtagggtgtatactgcatggttaaccaccttatttttcttgttgatttcttttcaggggaaccaccaaaggggtttaactttcagtttggtagtataaatatgaatggg

SEQ ID NO: 188664 - DNA, 349 bp, Zea Mays
tgttgagcttcagcatcagtagcataagaattcagcacctcctgtacccaaactggttgcacttcagaaatggcagccaagtccaatactgaactcctccttgacaatgcatcagcaacgacattttctgccccctttttatatacaatctgaaattgcaatcccattaacttggtcatagccttcttttgaagatctgactgcaattgctggtctcccaagaatgtcaaagatttgtgatctgtcttaatcacaaatgcacccctctgcaaatattgcctccacttatctacagccataatcaaagccaaaaactccttctcatatatagaaatatgtttgttctttt

SEQ ID NO: 188665 - DNA, 658 bp, Zea Mays
aaaacgcctgcatcgcgccttagaagcgatgtctgctaatgttgctgagaataccaagaatatacctgaagtgacaggaccaaatgaaatgactctaaatggctctttgttgacagcaagcagcctttctaataaatctgcagatgcagtggtcacagtatctaatagacctgtaatagttcaaagccctgaaccttctttagacacacagtttgtgcataacccatcaggcaaatgtacctcagaatcaattctacaaaataacagcattcctgattctgcttcagttccttcaaaagaaaatgatcatatcgtgttaaaaggtgatatttgtgaagaaaccctcatggatactaaaactgctaatggttcttgggattgtagtgaactaaataatgattcctgtgggaaaacttcagccctttgcatgaaattgaatcggcctgcacttaatgttacacaagccacatctgtacctgaccgattatcttcgtctttggagaaagccagtgaaaatgtggccgcaagtggtgtcaaagagacaaaaacatttggctcagctgtttgtgatgttgacagaagtgcagaaccaattgaccgttcaaacaacaatgtgacgagcaacacaatgcgacatagtgagactattgtagcggat

SEQ ID NO: 188666 - DNA, 277 bp, Zea Mays
cgaggcctcaatgagtgctatgatcatctatggacctagatcactagccaggtgccattcccctccttccacaaggtccttaacgaccttatcctcgagatcaccaaggggcttgcttcctcctcctgcttctgggggtgtttgtcctcgtgcccgtttgtccctccagtgcaccctcctgccatgctcaaccctagagctggtgcgagctctggctctagtggaggtcgtcggcgctaccagggtggccatggcagtggcaagaggggcgttccct

SEQ ID NO: 188667 - DNA, 1685 bp, Zea Mays
ttgttggccaagcaattttgtagaaacggcctgtgaagccgtccgggccaggtgccttatccgccggcagcgatttgatagtgtcccaaacctcctcctcagtgataatttgattcaatccttcgagatcaagttgagttcctgggtggaaggaaggaaggtccagggtgaactcacgttctctggccgttcccaacagattattaaagaactcccacactacctcctttttcctttcttggtccatcacgagtctgtcgtccactttcactttagccatataattttttctctttctgtatttcgcatgcaggtggaaataagaggtattcgcatctccctcctttaaccaattcaggcgcgacctagttctggctatcgttctttccagagacgcaagccctaaagacaggtgcttgagcttctgccgcaaccaactttcatgaggagtgaggcatctaagatcttgggctttttccagctgaaagataatttcccgagcgaataacagctgctgtctgacattcccgaccttcttctgtccccacgactgcaactcccgagcgagcctagccaatttatctgctagcagatttagagggcaggacccctccaaatgttgagaccatgaacgttgtacttcgtcatcaaatccatccaactttgtccagaaactttcgaagtgaaatcttcttttaccttgagtaaactcatgtaggccgaggagaagagggcaatgatctgagaacatggtggccgaactctggaggatacagttagggaagtagatctcccaatcagtggtgtagaacaacctgtccagcctaaccagagtaggtgaagccctttcattggaccaagtgtatcttctaccaagcaactctagctctttaagttcaaggtcgtttaagaggcgacgaaatcgacccatcatggcacggtccagattactattatttttgtcttccgctctatatataagattgaagtcgccacccactgcccaagggcctggacaggaagctctgatggttctaagctcctgaatgaaagccaatttcagattatcggactgaggaccatagacacctgtaaaccaccagggtgtgtcaccaccgtgtgcgatcagcagcgaaacagagaaggagtcgattcttgaattgatgacattgcatactgtccctttccacgccaatagaatgcctccacgagtgccttgagccggcaagaaaataaagttatcaaactcggatcccaacatagacatgaccattcgcctggagatggcttcctttttagtctcctgcaaacacaccaagtctgggcgtgtagaaagcaccatatcccggacaccatcacgcctcgacttacggttgaggccccgcacattccaaatcaaaatgtttgagatatccatggttgacaaggaaaaggacgacctaacaacggacggagctcagcacaagcccagcaatccatctgcagacgtcggcccttcaaggtcccaaggcacttgattctcacaagggaccgaccagccaaaaagcgctgtcaaggccgcaatatgagcttgggataggggctcgcggaagagccgcccgagggcgtcaatgtcatgcggcctgaagatttctgagtccgtcgccacgcctagatgcttgataagactgagacgagtgcgccgg

SEQ ID NO: 188668 - DNA, 585 bp, Zea Mays
gtatgtagcccacaacaacttgagggctactgacgtcgactttatggattctgggattgtgtattgagtaccctggcgctgaggatctcattggctagagctggattatattatggaattcatagaatacgtcgcttggcaccattggatgtgagaaatgctttgaaatcagtactgtcaagtactcctcttaaatatgattggaaagagtaaatttcacaacatggacatccagtcctcaaaaaggttttaaggcacatccctgttgaagataaaagcaacaaaaaggttcaggagaatgaaggcgcacgcgtacgggggtatgggttgtataaacctgatgctggtagcttgtctatttttgcaagacaaataagcgaacatggaaagcaaaagcctaaggtgaatatttatttctttttttctattttatgtttgtttcactgatttttataccagaattattgctctgtatgaaggaggatgaatgtcaacaagaggaggaagaaccttttaacaaacttccagaattggatcttctgagctcaatgtatctcgaagaccttccagctgtcttggaaaact

SEQ ID NO: 188669 - DNA, 382 bp, Zea Mays
acttctctgcaggaggttccatagtttattgtgttttcagtagctgaaggttttcatggggtttcttggactgttcagtgtgacatagtgcagcagttcatgcttggtaacatgcctgaggatgaagaacctgtgcctccgtatcctcataatgggcatcaacttccggtggaattttttggattggggcaacctgtgcccaatttccaatttgacctcgacatccccccaatggtgaaattgaattagaggatgctaatgccaacaatgctgatgatggttgggatccatggccggttgaacaggtccaacaagatcaaccgcctgcacctgttcctttagtcaacaatgaagaggaacaattcagttaccaattctccgg

SEQ ID NO: 188670 - DNA, 646 bp, Zea Mays
tggaacgttcagtaaatagttagttaccccaacaatcatgttgttatggacaccatccatgacatcagggtttccagcctttccaatagcaactataagtccaccttttataccgatatcagccttgtatattccggtataatcaatcacaacagcatttgttataactgtatctaggcagaaagattctgggtaccctgaagcttgtcccatgccatcacgcagaacttttccaccgccaaatatgcactcatcaccataaaaggcgaagtccttttcaatctcagcataaagattggtatcaccaagcctaatcttatcaccggtggtaggtccataaatgctcgcatacttctcatgatcaacagtacagtcaaatgaaccatcaccaataataccttccctgcatataaacttaaaagataaatttaggccaaaaaataaataaaacgattttgtcattggccgtcaataaaataggaaggatcaaccttgcatctggataatcttcatgtccaaaactatttgcattaaccttctgcatcaccacattaagacttgaactgtcaataggaccatcagcaatgccatttccacctttgattaccttatgacctccgatgcttacaagtataacactttttgc

SEQ ID NO: 188671 - DNA, 468 bp, Zea Mays
gaatgttcctcacagaagcagctctgatgttatggctatagcactcatcatgcatttgcttgaaaatcaaccactggcttctgtcaggaaattccaggcaccactcagccccacccttccacatcatggcatgtgtatagcggtttgtggccccaggctgcaaaacttgacagaccttgtgagcatacttggtcccttcagcaagtttcacgcatatcctctgttcactgtgaacatcagaatccattgtgatctgggtatcatactccctccaacctctatcacccactgtaacaagaacatttgcaatgcaagtcaatagctctggactgctatgcccacttctagaactatcaggaagtttttttgcatcacttgtcttaacactgacatgagattgtatcttgcggaaatgatctttgttttttaagccaagttcctcacttctaggagaacctgagtatgaaa

SEQ ID NO: 188672 - DNA, 303 bp, Zea Mays
ccctacaacaacctatgcagggggcagccaaaaaggagagccctttggctccagcaatttcccagcttcttctttcctcacgtgcttgctccataatcagaggaaggctgggagaccctccataaaaaatggctctattgcgattcttccaaattatccaagatcctaaaatgacgagggagtcaagaccttccctgaccagaccatttgctgttgctgaaaccatctcccactaatccttaaaggaaactgtatctggctgtgggactaaactatgcagcccaaactttcttagcaggttgt

SEQ ID NO: 188673 - DNA, 276 bp, Zea Mays
tgttatacgagaactctacataaggcaaactggactcccaatttctgtcaaacgtcaacacacaggctcttaataaatcctcgaggaccttgttgaccctttctgtctgaccatctgactgggggtggtaggcggtgctgaagtctagcctagtgcccatagcttgctgaaggctcatccaaaattttgaggtgaactgtgttcccctgtctgacactatcttccatggaataccatggagtctgactatctctttaagatatatctgggcaaggg

SEQ ID NO: 188674 - DNA, 343 bp, Zea Mays
ggcggggcgcgcatctcgacgtcgacccgaatgtgttccgggaggccacccacgaagagctccgccttttggcgcgtggagaggtcccttgagtgcgccagcaccgtctggaagcggtccgcaaattcctggaccgtggagtggaaaggaaggcgccccaactcggccagccgcgagccgtagataggcggtccgaagcgaaggcggcaaagctccttgaagcgctcccaggacggcatgccctcgtccaacaggagtgcgtagtaccatgtctgagcggcgccggtgaggtggtaggaggccatccacgtccgctgctccaccggagtgcgctggccccaga

SEQ ID NO: 188675 - DNA, 1185 bp, Zea Mays
cgctggtcataacatctcttcccacctcttccaacagctcgttctcgagctggacatcgagcttgaggtccttgaattcttgaagcggctcccaagagatatcgttgttggataggccacaccactgaacaaggatgtgccagatgccttggtatagttgggtgtgcaacacattctctagcgtaggcagtagttagccatcctgtacgagcgacacaaatggtagagtcgtcggagtgtccccacaaaatggcttgaacaaccccacgtggaacacgtcgtggagacgagcaccctctggaagctaaaggcgataggccacctgcctgacacgctccaacaaatggaaggggtcagcatagcatggcccgaacttgctcttgggttgggactctagggaatgcgtcggtttatggaggagatggagccacacccaatttccaccacgaactcaagctcacgatggcggatgttgtagtagcacttgccatacttttgggcctagagaagatgctcgcaaacctccacggggaaggtgtcacggtcgcacaggagggcgtccactgcctccacttgagctatccttgcaacgtgtggaagtagagacggtgggggtcggttgtacaccacctagaagggcgtggtgtggagcgccatatgtaacgaagtattatagcaagactacacccaaagaagccagtcaacccaggcgcacgaatgatcccccatggcgcaacagagtacatggcgatcaccttgttgacaatctttgattggctatctgtttgagagtggaaccctgtgctcaaacggaacttgatgtcgaccatcttgaagagggcgtgccacatgggataggtgaaggctgagttgctgtcgctgaaaatggagatggggaagtcgtgtagatgtgcaatgccctcgaagaatgcgtgggtgaccgagacattcatgtacgggtggctaagggtgatgaagtgcgtgtacatggagaagaggtcaacgacgatgggaacaacgaactttccatggaccttagggaggccttcgatgaagtccatcgatatgtcggcccacacctgggatggtacatcgagcggctaaaggagacaaacatgtagggttgtcatcttgttgcgctggcatgtgatgcatgcacaaatgtaatcctagactagcgcccag

SEQ ID NO: 188676 - DNA, 476 bp, Zea Mays
ggatggttgcgcacggaggtggggcggttgtgcacggggagtgtggggatggttgcgcacgcacggggaggccgacgcacgaagtgaacgctgggccacacgctgggctggcaatggatactgggccgaggagaggcgctggcaatggatactgggccgcactttgaagaggaggggcgctgggccgcacgaacgctaggacatatgcgctggtatggaatttatttgattagtaccatatcggccactgagagaggcggaacgtggcttataagcgttgttgtggatcatctgttgcttactctaactcctccaactctggtgccacaccaacgtatgttttttgcgcagggctgaatttggagggtgtgtacggcctatggggcccacatgtaggaggcgtatagacagaacaggtcccacggttcagaggcagaacggccgttggcagaacatgtcagaggcagaacggcaga

SEQ ID NO: 188677 - DNA, 376 bp, Zea Mays
gtcggaatgccttcgtcctgctggacctgcatgtaccagagttgggccttgtcctccaaattatagggggccatccacaccttttcttcctccacgatcctctgttgatggaagtacgactcgcagcgattgatgaagacgagcgggtcggacttgccgtcgaagcgagggaagtccatcttctagaaacgaggtggccgatcggtgtggtgttgcccgtcgagaccgccgcccggcacctgggcgcccgaggacgacgtcttgtccttcttcatcgtgtcgatgtcggtttgatgggtattgatcttgccggtgagacccttgatcaatttggtgaggtcggcgatcgtgggttcggccatggcgctggggtggt

SEQ ID NO: 188678 - DNA, 387 bp, Zea Mays
ggtcggccttccaattaggtaagaggtccgcaagcctatcgattagtggttgcagctgctccttgcttagcttcctgagggaaagaggcaacccgagatatttaagaggaagtgtttcaactttgcaaggaaaaatctgggttaccatttccatgtctaccggagagcagtgaatgggagccacactgcttttctgaacattggttttaagccccgaggcgtccccaaacagctccaaaatccttgttaccaagtgcagatcactagcagccggtctcaagaaaattaccacatcatcagcatagagcgatattcggtgctggatggagcgagttgagaggggttgaagcaaaccctcatcagcagctttaacaattaggccattga

SEQ ID NO: 188679 - DNA, 501 bp, Zea Mays
gcatcctaggctgccggcttcagatgagccaaatcaacccgccgtcccatgcttcattggagcagtttgaatcagctaatctccaggtggatggtatggttcttccacatgcttccgctggcattcctaataggcctcatgatggaacagagtcttctagaaatggtacaattgaggatatatgtgctgatgaatcagccaatcatagtggtcacaatttagaaatgcgaaaggatacggacagtaaatcccatgaaaaggagtcacataagcgagaacaagtcaagaagatattatcagtatgttctggtgatgagaccaatataatgaaagatgatcaagtagtcagagaaaatgtttcagcttccaaaaaaggtgaagatgagacatctgatttgccagcagaaaaggatgataccatacttccagtcaccagagcttgtacaatgatcaggaccaatcaagatcatacagatgaaagtaaacagcatgggaaaatag

SEQ ID NO: 188680 - DNA, 750 bp, Zea Mays
aaacatttggccgcaattgctaaagaggctgtagtgtcatctgacactgttcctggagcaaaaatcagattgtggcgtagaataagggagtttaatgcatgtgtaccatacactggagtgcccgtcaatattgaagtacctgaagtggtcgtactggccttgatcagtcttcttccaaccataccacatagccttcctgctgatgctcctcctcttctgcctccatctccaaaagcagcagcaacaataatgggttttgttgcatgcttacgcaggctacttacatcaagaagtgtggcatcacatgtgatgtcgtttcctgtcgctgttgggagaataatgggtttgcttaggaatggttcggaaggagtagcagctgaagctgctggacttgtggctatgctaattggtggtggtcccggtgattcatccatcttaatggatgcaaggggagaatcccatgccacctacatgcatgcaaagtctgtactgttctcgcaaccaatgtatgttccgatccttgttaacaggttgaggccaatatcggtgtcaccgttgttatctttgtctgttgtggaagtccttgaagctatgctttgtgaaccccatggtgaaacaacccaacatgctacatttgttgagctactgcgtcaagttgctggtttgcgccgtcgtttgtttgcattatttgcacatccagctgaaagtgtgcgagagactatttctgttataatgcggacaattgctgag

SEQ ID NO: 188681 - DNA, 506 bp, Zea Mays
ctgccgcttcgtcgtggcccacaccgccgtctgctccaccgtccgggttggttggttgggacgcgatcgccctggctgccttccagactcccactctgactccactgatgggtcccgagtggatcgcggacaccggtgctacctaccacaccactcctgaccctggtatactcacctctgttcgccctccttcctctctcccttcgtccatcatggtggcgaatggctcgtgtcttcctgtcacatctgtgggtgtcgccggcccttctggctcttttcgcattcccgatgttcttgtcgctccttctttgatccacaatcttctttccattcgccgttttactgctgataattcttgttctgtcgagtttgactcttctggtcttactgtgaaggactcggcaactcggcgccccctcctcagatgtgacagcaccagccccctctacacccttcggcttccgcacgccacctcttcttcgtcgtcgtcacctgccactgctgct

SEQ ID NO: 188682 - DNA, 495 bp, Zea Mays
ataccatgagcacagtcatgagtttccaccgtaaacggaatcgtgaaatcaggaagagataagaccagcgtaaaagccatggcatcttgcgcaattgaaaagcttcctgggcggcagcagaccactgaaaagctttcttccgaagtaactgagtgagtggcttcgcaatgatcccataattcatgataaatttatgatagtatctggtaagacccagaaaagcccgaagttctgtcactgtctgtggcaccggccattgtaccattgcatcagttttgagatgattggttgctaccccttagctgatataatatgtcccagatattccaacaaggtctgagcaaaggaacacttggagcccttcaagtaaactgatgggttctcaatgtggacagggcaggacctggcaaaggtgcacaacatgggtctccaaagaagggttgtagacgagtatatcgtccaaaaacaccatcacaaatttgcatagaaaatggc

SEQ ID NO: 188683 - DNA, 276 bp, Zea Mays
ggaagatggctcagggaccgtcgatccagtcttaaacggttgggattagatgactcctatcgcgttgaccgagcaattggtggtcaggggcgtggatccaacggtgggaggcgagtctgggtttcattaaacactggccgatggatctagatccaagggtccgaatggcttaccgattcgtgtaatctgggatctaatccgaggcatcggctgttgatccaacggccaggtttgacgcgtaccctttcacgctagtaattttgttaaagagtcctc

SEQ ID NO: 188684 - DNA, 1082 bp, Zea Mays
gacgtctcttcagaacaatcaacaacaattgatattctgcagaagctattccttccatcaagtggtccatggcatgtgaataacgagtttgtttctgctgctctcatgaagttgccagaaaatggtttgttctactctatattttctgttgtagaatagcttttatgcgtcattcaaagtatgctaaatttttccttaattttctcatgttctctagaacacagcaggcaattgcacaatgctaccagcgatgtgttatccaagcttcatgtggtgatgcgtacagtagataatcttcacttgaaacacaggcagttagcagcgaactatcaaaaacaaagagattcgagtgcctggaacagagctgaacagaaacgtctgaaaggtattttgtatttgttttgtggatggtatttttgagggtgctccatctttaatagtacttttgttcttaactgaaagtattttagcaatatttaaagttttgttctgtgccctagatcatcaaacaagtaaatactaatctccgttaaaatggtgaatgccttgtggcaataatattttcattatgttgtgaaactgtaaatcgattgtttcttgctgtggcactaccaacacatggtattaccaatactattctttattctattatgtgtacctagctgtcgtgtaatggtaaactaacccagtatttatgtacttctcaagaggagttgactagtgttgttgccaagttggaaggaagcaaacaaaaactggcagtactgaaagcacagggagacaataaacaagcaacaccgatcctggttcctacgctgggaaacaaaaatatgactgcagaaaaggtgagagataaacaaacagaactgcaagatcttgaagctactcacaaggagttaatggtaatgtcaagttcttgttttagagctccaaactattggctaggatgctagatgtgtatggacttttaagattgacacatacaaatatgagcaggaattgatttcaaagcgtctggaggaaattagaaggctgcatacagagagaattgaaattttgaacaagttagcaacttttcaggt

SEQ ID NO: 188685 - DNA, 532 bp, Zea Mays
catcgttcgagtgccggacgatactgctcaccgtatctggggtgcacttgaggctcagttcctcggcaaccgccagactcggattctgtacctagagaccgccttccgccagcttgtttagggcgatctctctgtggacgagtactaccgtcagatgaagacgatggcggacactctccgcaccctcggggcccccatgaccgatgagagcctcgtgctcaacctcctccgtggtctgagtcctcgcttcgatcgcatggcgcccatcctcacccgcatgaatccgtttcccacctttgcggaggccaagaacgatctgcttctcgaggagcttcgcctctccgccgctgcaaccaccgctcccaccacgacactctacagcgcacctcgggctgccccctccggggggggggggttcctcctcaccgcactccggctccgctgccctctggagctctgcgacagactgctagcttcggggggctcgcggtcgcaagggcggacgcattggcggtggaccgtcgggcggccg

SEQ ID NO: 188686 - DNA, 784 bp, Zea Mays
acgatgttgagttggataatgtggcctgcataatcgcggtggataaatatgtcaatgggagggggaaaacacaagaggactacactagaaaagaagctgctcagcgcaaagactcgagtgaaaatcaagggcagaatgatgctctagagctagacaacctccggatggagatgcaagctgacgaacgtccgttagaaccaggaaacaagagggacaggaagtggcagaaaaatgtatatggactcggatcagcttcgggacagaaggaaaccttgtccaggagagaaaatccacggtcagatagagggatggtccacagtaacgacagcaaaacaatttattacaggaagggtgggacggaagtcgataatgttgatgaccaccctttagaaaagcaagaccaccaggatacatcaagtgacggatctaaaaagagaagccgaccagtggacaacgcatctggtggcaacagaccatacttggatgagaacaagaagcgtaatctcagagaagatggaagatatgctcattatgaagactggagaagtgaaaggaatacagcagcagacacgtctggatataaggcccaatcagaagagaagcctgtatggacaaacactcgaacaggatcaagggagcattcactggacaggcaaaggatagagtgcggtgacagctatcgtggaacctataacaatagacaaagacatgaatggctgcacccgcacgctagtggtaattcctcgagaattggttgggatgacaggaggcagtggagttcatc

SEQ ID NO: 188687 - DNA, 478 bp, Zea Mays
tttttcatcagctaccaaatatccatgtctgttttcaatgaagggtaaaggtcagactttaacaagttttaccaacattcataagacccggaacctctatataactggacatctagatggaaccataagcttttgggatgcatcttgtcctcatttgctgcagatttttatgataaagcagcaggttccttcaaatcacaataactttggagcattcttaattatgcatttgcataccagttaatatattggctactttgataattgtgcagaataaagacgatacatcaactggtaaccctatcacatcattacagtttgatatgtcctctagcattctattgtctggagaaaggagtggaatggtaagctattttatggccatgacatggcttctagtttccatgtatgatgcactgcactgcaataaagcttatttcctcttatttataggtccatattatcacattcaaaaagg

SEQ ID NO: 188688 - DNA, 469 bp, Zea Mays
ctctgatgctaatgggatgcctcttcctttcgaaaaatttctcgaaacattgttgttggagagggatactgactcagatgacaaggtcttgttggatgcggctataacgtcctgcaaaaaagatctgtaccattattgccgattgtctggaaagcacatgcttgaagtagtcttggaaactgctctatcatcaattaagagggagcagcttcttgaggctgttgatgtatgtcaattttcaaggatgatactgtgttttttccctggtggtaggagcattccataacaaattccactagtctgttgactcattgatttatcttctggaaagtggttttctgcaggttgtttcgttgttcccccttctccacccactggttgctgtcttgggatgggatattttgaagggtaaaacaggtctgcggagaaagctaatgcagctgttctggacaagcaaatcccaaggtct

SEQ ID NO: 188689 - DNA, 370 bp, Zea Mays
gcagactgtagactacaattgcatcctgaagaataaaatggaccaacatgattccatggctgactcaccaaggaggcggcacaaccttttgcgtgacaaggtccaattggtgaaaaggaaagattcagatcgctatgagatcgtccgcttccatgatccactgtcttttgagaaaggcttctttgttgtgatccgtgcttgccagcttttggcacagcacaatgacgggataatatttgttggtgttgctggcccctctggtgctgggaagactgtgttcactgagaaggtggtcaatttcatgcctgatgttgctgtgatatcaatggacaactataatgacgcaactcgcatagtcgatggcaatttt

SEQ ID NO: 188690 - DNA, 718 bp, Zea Mays
atcagctaaatcctggcgatacagacttgaccaaggactatattcagatggaaaaaagagtccatggttttccaatggcagcagcaaattttttatcagtcatatgcttggaaggtatagtatgtagcatgacactaaatctgcagtgaactgattttttatatcagagaattgactgccctaaccttaaatcaactgaaatagtgtttttatttggtgcttgatctatatagtaaaagggaataataattgttccagtaaaaatgtattaagtttgagctgaaccagatgttgggttctgcagtgctctcgtagaccccccccccccccctcgaaaacagacttaagctagaaaccagtggagaagctttctttttcctccctttccattggtttaaacacataacaaaacacccttgtgtatttggtaacccagatagcaacaagtttgtcctaatagattatttcatttttgtgacaggtctgctggcaaaaccaaaatttccatttcagttgtttgtgatttcttgctacctggcacctctggatctgttgtatcatacaatgcctccaagatcattcttgtggttccagatcctccccttgcacttgcgctaccgatgacttggttattcccacccttctataccactatgagccttttgcctagatcagcaaattcccttggggaaccaaactcacttgacctggagagctc

SEQ ID NO: 188691 - DNA, 312 bp, Zea Mays
ccagtggcaggcggcgtgcaccctacattaaatgcaagcggcgtgtgcagtccacaaggcctgaggtgctagtaactcgtgcattaccaaggcgaagaccattgacccactacgttgtgcatgggtaactcccatcatgacgcgcaaagttcccattacgacatcaggcgaaaagataggcggaggggataggacgacaccatccacctactctactacgcaagacgacgggccagtctacatcacgacctacaccagagccttcacccgcacgctgacaagatggtgcgaagacaagtctagctagaggag

SEQ ID NO: 188692 - DNA, 327 bp, Zea Mays
ttctggaccaagggacatgtcacaaaatctcatattccccagcataccatcaattgaaaaagaacttggatgaacctgataaatattaagaaagttaagagaaacggaaaattttaacgtatagctgatgaagatgcacaaacacacagaggcaatatgacaaaaaaattgcaaataaaaacagtatcaggcacattccttatcctgtgctaatgcatgattgtgtctaggaaaattaataagttgtgatcattagacaactccctggcataatactagtggtatttcaaatgcatgcagtaacaatataagcatataatttaaaat

SEQ ID NO: 188693 - DNA, 617 bp, Zea Mays
agaagatatgtttcaacaggtgacccactgaagatggctgcagttagcattgaaaacaacctatctcctccagaaactctgcagaaattgtcagacagtctcacatcaatgcttcctttgctttcagtatgtcatccattgttcccgcttttccttcccagttacatacaagtttcaatacttttgaaaccataaacctaacgctcataagtattgtcgcaccagtcttcttccttttccttaaacacgcaagagagttgcatacgtttctactaactcagttgttctataatctaagacccaattaacaaaaaaaaggtgttaggaacattgcttttagaaatgctccatttttttgtaaaagatggaataaacatgtctttcttttaacttattattttaaagattatgtcctttctccttgcatgatgaaatcgatcagctacaaatgtggctgcataatggaattccttgttcattttgggaagcatttcgtctcatcattttttgacatcatgttttttcccccttatctcaggaactgtctgatattataccaagggatactcttctatggaagctcaaacttctcaaggcaggagcagcctatgcaaatt

SEQ ID NO: 188694 - DNA, 320 bp, Zea Mays
atcatcgaaggcacacatacaaactaatatcttttttgaacttcacacaaatcaatacttgaaggcgacattagagaatttcaagccacgaaggttggcgatgacagaaaaatcggatctctcttctctccactcggaacaaatgtaatgccaccaaacaacagctccccagttacctaccgcccagcgtgtccaagatgtattaggcccatagaatgccacgagtgcaataataagcgggcaaagcgacagctttcgcggtttcacgatcagtcatggaggtaatttatcgagaagcgcttccgaaaatctcaacgcat

SEQ ID NO: 188695 - DNA, 1213 bp, Zea Mays
ccgtaagatgaaactagagcttgaagaataccgtgctgaagctgcacacttgaagaaccagcaggcaacaattaggcgacttgaagagcgtaatcgccaactggaacagcaggtcttttctgtacttctgtcaccatttagttatatgctctactattaatttatcgtacatgtctttgttttttttacttttatatgacattggtgttacaaataagagtttcttcttgtcctatttctttgtcaatcataagagttgacattatccatataataattccaattaaaatactagatctctacccattttaatgtgttgtaattttttttgagcatcacattattatctacattttattttgtagaaatatgtttctatgtgagtgttgtctaaatgtagtatagagggtagaagattcctttatctaccaatagcaagcatgcagtcaggagtcaaaatttttataaacaacaggggtccaaacttatataaaaaagcgttccagataaattataataaccaattcgatctctcaagctttgtaccttttcgctttattaccatttgtatcattttagatggaggagaaagtaagggagatggttgaaatgaagcagcgaagcatggctgaggatagtcagaaaactctagaagccctgaaagataggtatgcaaaatcatctgtagtactacctttggatcaaaccaggtgctgttttagagttggccacaagaactaagaagttcaatcatacggccattttactctcattttattattacccagttgtgtcttctaattggtgcgtgcatgactgcttacgtgcaacagcacgggaaacgagatatgcatgtggataatttagttaaattatgaaattaagtaggggtaagattggaaatttggctaaatttccctagaaactgtagaatgacatgtatttcgaaggtagtagaagaggctatactacatctatgaaaaaaatcgctctgttagagtgttagtctgttatcacctgaactgccatatagaattcttgcctgacatcaaaggctaattcatgtaccatgactcatactgtatattttgaccttcggcttgccatacttgtagggaacggtcattgcaggaccaactaaggcaagctacagaaagtgtaaagaatatgcaaaagctacatgaatcggcgcaaagccaattgtttgagcttc

SEQ ID NO: 188696 - DNA, 600 bp, Zea Mays
gattttgaagatcaggatattggcaacagtatgttccctcgtcctcctcgtctgggtgccccttctgctggtcggcagtcagtccattccaggctgggaccacagccgccacaaggaagaggaggggtctcgcgtgccaacagagagctgaacacgcctgccaccaccaaggatgcggctgatttcctgaagctggggcatttaaattccttggacaatgggaaggatgcggctggaggagatctcttgtgtattcccgaagcaacagtgctggacccaaggtcggctgatgaagatctcctggcgccggagcatttaaatatcttggaagacggggaacatgcggctgatttcttgaagctggggcatttaatttccttggacaatgggaaggatgcggctggaggaaatctcttgtgtattcccgaggcaacagttctggacccgaggtcggctgatgaagatatcctggcgccggcggctgaacttaactgcctgggtattcccgaggcatcaaggctggacccaaggaggaagacgaacagtaccctaggcatggcccccactgtctgcatgagtgaggcacgcgggtcgctgaac

SEQ ID NO: 188697 - DNA, 535 bp, Zea Mays
gtgctgtgccagagccagaattggtagcctggccgaccgctgcctgttctggtgaagatgtccacaagcatctcagacccattccttttgtgctcatgcataaaggccctactggcttgtgtgtatgttgtggtctattcaagtggtttgtcctgtaccatccttgactgtgacgattcagttccaaacctagccagctaaccgtttcgcgccggaaatgcgttacctacaaccattttacgcacaacaaccatgcatgtatgagctttccatctaggtgatttaaccgttgggacctgtgttgtactcactcagatggttgcattgtgtagcactatctttcatgtgcttccttgttctaatttgtgccatcgatgaccaaacctagtttggttgtcatttgttgcttccaaatctagttccttgtcatgttgccttgttggtttagttactgggttggagggctctagtaagtataacaaatgttgcatcccctgtggctgcattgtgccgagtcgttggtatgtgtgattct

SEQ ID NO: 188698 - DNA, 306 bp, Zea Mays
attttcttgatatcacctcactgttgtctacctgttccatagttttgacatttcattcttcttgagagaccaccaaactattacactgtaatagcggagtttgattctacttctaccccaccaagaaaggaaatccatatcattgttctaatctgagaacctgggattcatgttttcgaacaaaaactgttttcatgagttttagcttcactcgacatgccacagtcattcagttttttgtgtattactgtattagtatctataaatgttgcaaagtaccatgtaaccatgttgccaactttagat

SEQ ID NO: 188699 - DNA, 566 bp, Zea Mays
atggactgtactctggacagacatagctgaccaatccgaagaaggccagtactgtagttactgtgaggagttatgcagtgagtcttttctgggaggtcctcccatatactgctgcatgtggtgccaacgattggtgcatgctgattgccagtctgccatggctactgaaaccggtgaaatttgcgaccttggtcccttcaagcgccttattctgtcgccactttttgtccgggccattagcaaacctggtagcatcttgagttctataactcatggagcaaatgagtttgcaaccactgtgcgggggcgtttaaaccgaactaaaaaggagaagcatcagaacagattttcatctgacagcaacgatgattcatcaagtgataccacgttgaactcaaaccagagggctggagaattaaaaacaattggcgacagtgctcaaaggagtcctgagaatgagcatgatagcagtgagagtgatggtagagaactcatatcggagtccagaaggctcggtaatgatgagaccggtgaagttaaacttaagtacgcattgtctgaattgc

SEQ ID NO: 188700 - DNA, 503 bp, Zea Mays
caggcagtttcactccatccatccgacagcactctatcatctcctgttgcgtcactacaactccttgacatcgatcattaaagcatcaccagcagctcggcaatatcatccctcatgctcataaaactgttatatattggtggagacgctccagcagttcccagattgctctttttttcttttttgtcaccaaaaaacctcccatctctcctcaaataaaggggaccacagcaactgtcaccttttttctctctcacacatcctccattctgacatgtggatcccatgtgttggtaaaggctactatcagtgatctgctctaacatctcctgtaatattccataaaaaaagaactattgattcccactgataacattccattaaatgatgatgctcacaatcctactccctaccaacaccacctcacctcaccatgtggttcgtccctgccttcagaatacatacacaggctgtccccttttttaggatcatcagtgtctcgt

SEQ ID NO: 188701 - DNA, 676 bp, Zea Mays
ggttttttgggttcggtttgaggtcagatggtgcacagtgtaggtcttcggctaaatgccgtggaggccgtgagccactccatcgcccccaggcctgcagcctgttcgacgaaattcctgttagggacgtggtcacctgctcagctgcaatttaccgacatgcgaggagcgggctgttccatgagtcagctgagctgtttgttggcatgatgagggcaggtgtgtgcccaaactcgttcaccttggtcggtgtgttgcttgcggctgctggtctgggtgacgttgtgcttgcccagtgcattcatgggtgggctgcgaagagtcggttggaatccaatcattttgtttcaagcgcactagtggatgcatatgcgaaatgtgggcgccccatgaatgcattggcattttttaatgatttgagggatcctaatgtagtttcctggaatgcgatgatctccggattagtgcacaatgttttgtttgttgaagcagtattcgtgttcaagaggttgtgttgttgctttgggtcagttcctaataatgctgtgaccatgattaatgtcgctcaagcgtatgctggttgtggtgaccttggaatgtgcaagagtgtacatgcttatgcagttaaggccggttttgatttggatgtcttggtgacaaactcaatacttggcat

SEQ ID NO: 188702 - DNA, 390 bp, Zea Mays
cacaaagaaggtgtccatgataacgatgacctaatcgtgcacccttcagatggggatgcttggaaggctctcgacacgtttgattcagactttgcagctgatccgaggaatgttcgcatcggcctcgtgactgatggcttcacaccttttggtcaaatggcatcatcatactcatgttggcccatctttgttattccatacaaccttccaccttctctttgtatgaaatatgaatttatatttctttgcttaatcattcctggcccagactatcctggaaagaaactcaatgtcatgttaaaacccttgattgaagagttgaaggagctttggaaaggagttaaagcatacgatgtttttaaaaaacagatattcaaacttcaagttgcg

SEQ ID NO: 188703 - DNA, 329 bp, Zea Mays
gtttttcttggatacagccctgaacataaaggctatcggtgttatgatgcatcttctcgtcgcatgcgtatttctcgagatgtgagctttaatgaaaaccgacccttcttttacaactcttccactcattcttctttttattccacagagtctacctccttcatgagccttcctcccatttctgaaacttcatcagtatcaccacctactgtttctaccccagatgttcttatttccatcacaccaccttccacttccacaccatcttagtcttacgcttccaaaccacctgtcactcagacttacatttgtcgtcctcgctctactcc

SEQ ID NO: 188704 - DNA, 535 bp, Zea Mays
cccgatccccctcctccatccacgacctctggtatgtcgcgttctccccgccccgatccgcgagatccctccgatccactctgtctgcctgcctgacccgtactccgccgaattcggtcgcagcaaccgggccttctgctactcccagctcgagctccacaagcacgtcgtcaaggattgcgaccgcgcactgctgctcgaccccgccctgctgcaggcctacatcctcaaaggttcgcttcggctataattgctcccctgttcaccacagccttttctgcagcttggtttagttcgccaggggttggcttggcttggttgtggggaattatgtctgcctcgtttagtctctctctgttcggctgtgtactagtctgatgcacatgtactttttaagagtaataaattatgtattgttagctcaggaataccgttttgtgtggcttcaatgcttaggatcactctttccagtgcttaggattactctttccagatagttgtagatacactgtgaatcacacgagtgccctttttc

SEQ ID NO: 188705 - DNA, 799 bp, Zea Mays
ctaacagcagcatgggtcaatccctacgagaccttgagaatgaccgtgcagatttccaatcgacaccacatgaccctcattctgtggctggagaagctaatttgctgcaacataatgtcccaagggacagtgatctgagtcctcttggcttactttggtctgagctggaaggacgtccaaaacaacctctctcatctaatgtacttagtgtaaatgaacgtagaaatcccaagcctacaacacccaaggacattccacctgtaaacatgagacaagggccacttagcagaatgaatgaagtttctagtgtgcgcgatgagtggcctgcaaactttggtcggctggacaacatgaatgatgcaaacatttctggcagaatccatcaggttgaagcggagcatcatttgaattttgatgggcacctgctgcttcaacagatccgacgggagcaacagcaacagcggcaggagcaattgatggcccataataatttagagttttctggtgcatttcccgggcaggtgtttgatcctttgaaccaacaccgacagcctatgaatcaacagattcctgatgtggagcatcttttgagaatccagtttgaacttgagcaacagcagcaacgccaactccaacaagagcagcaccaacggcagctacagcagcaacggcaagcccagcttttgcaacggcagcagcagcagcagcagcaacagcaacaacaaatgatccttgagcaattgttgcagcaacagctgcagggttcaaattttggcccaacaagtatggttgatcaagt

SEQ ID NO: 188706 - DNA, 357 bp, Zea Mays
gagcacaccagaaatttaaatctgagaatttttaacaaactgagaatttctaaatggacaaaacttaagtacaaacttatagaccctgcaaggttattgaaaaaagacctgatgtgcaagctagacgggcaaggtagtaaattatccatatcatttcatcaaaacaaagaatccaaaattcataccattgacaaatgagttgctagtgttcgcatgttcaaaggttgttgacaggtcgtcactgcaagggaacgggactgtcgaaaggggatctgaatgctcgtcaccaagggctgccagatgaggatggtctagtacataaccttccatgagaccatgaaaggatgcatctactcg

SEQ ID NO: 188707 - DNA, 558 bp, Zea Mays
caccgctcaccgagctcgcggtcgccggagatcaccgttctccggcggccccgcgtacgccggtatcagtaaaggttggttatccacatcgaaaccccagctcgcgcctcccacccgagtcagtcacgccgctaaatttggctcatccgccattcagaccagcgccgctagggttttggacctatggatccgctccggagctacctgggccggatcctcctcgaagagatcacaccggtggtgatggtgctgtccacaccgctcgccgaggccgcctgccgtaagaacggcctcagcttcgtcgacatgctctccccgttctcgctcttcaaaaaaatcgacggtaactggcctctaaatgcttggtttcagatgaccctgtgctgtactttgtttgcttctcgtttgttttggttttgtgatctcatggagggttctgtctctgtgcccgcgactgagcagtgcccgtgcggacggcgagcgaggttccgtacaggctgcaaatgtttaagatccggatggtttacgcgtccgacgtccggaaggaggactgcgagg

SEQ ID NO: 188708 - DNA, 1121 bp, Zea Mays
caaggtttcttaacagtgcccaactttcttgtggaggtaaggtttgtttgtcatttcatagtgcgctcaccgctcaatgtgatatgcactatatctttattaatgggcataatatgtaatttagttgaaaaacaggcattgagagtcaaaaaaatttaatcttgggcactatgcttttttatgctacatatatttgaaaataagttttggtttaattgatctgtcgcttccagtggactgaatcttaattaatacttggaaaaagtaacaaaagattttcttgtctgtcacaatattaccacagtagttaagcaaaaatgggagtgtggtcactaattctgatgctcttctttggtgacctgatcatgtatcctgtaatttctgttcaaaaaatgtatcctgcaatcgtgtctatcacaaatcagaaggacaagttggctaagccggagttagaggcatggttccaaaccgtcaatctgaacaaagaaaatggcaaaacgattgtaagtaataatgttttactttaaagattgttttcagggttggattggtgaagggataacttctgatatgcttgcacaggtcaaacctacaagggctgggtcaagcattggcgtagttgttgcttatggtgtgaatgatgctgcccagaaagctgaggaaattatttcagaggtgcagaaactttctactatacttctggaatcattcaggttaaactcagtaataattttgagacctgaaatcctctgctgattgacagggaattgatgataaagttatcatagaggttttcattgaagggggcactgagtttacagccatcgtggttgatgttgggattgctaacaacagtgagcctgttgttctgcttccaacagaagtatgtcttcatttacttatctgttgttctgtcatgctggagacattgtaacaacttgaccaaatataacggatggtcctcttaggacaaaagaaatatgatgttatctattgacaagtttaaactgaatgtgttagataacctgaattagcctattttattttcctttcctttttgcaggttgagcttcagtactccaacaatagtgataccaaggaggacacaatatttaactacc

SEQ ID NO: 188709 - DNA, 311 bp, Zea Mays
tctgcatactgtaacacttttgttaaactgtctggcaattgcgatgcacagagccataataatacattaataccacacccatgtttcgtaatctccagcttgtaccaatatagacgtgtcagaaccttactacctgccaacactatacattcctgtatttttattgtgataagagttggctaaatgtaagagtcttctgaaataaaaaccttttcaaatttctttgccatgtttagtaagatcaaaacagtttattgatactgttttgtgtttctctttcaactcagcctctctgtaaaatgcaggggtaa

SEQ ID NO: 188710 - DNA, 1066 bp, Zea Mays
ttcaagactcgctacgcagccgtcgtcgcctcacgggtattccagtcatcaaaccctatgctatgggtgacagatctggctcctgagccacgcgatgtgtattggtcaaacctctggatcccctacagacagatctggctccggaagctagcgacactcgcagctagtatcgttttcatgttcgtgttcatcgtccccgtcgcgtttgtccagagcatgatgcagctggagcagctcaaaaggatgttcccgagcttgacaggtctcctaaataagtaagttgagaagaccaccaccggtagctgctcctgctcttgactcttgagatctggggggttttgctgctggctgactgaggtcgtgcctgacttatttcttgccttgtaggtccttcttcgccagagtgataacgggataccttcctagcgtcaccttgctgctgtccctgtacaccgttcccccgctgatgatgctcttctcctctatagaagggtccatctctcgcagcgggaggaagaggagcgggtgcttgaaaatcctcttcttcaacatctggaacgtcttctttgtgaacgtcctgtcgggatccgtgctcaaccagctcaacgtcttctccagacccaaggacatgccgacgatgctagctgaactagtgccgaagcaggtgatggctggcagcttcatattttttttttgtttcgtgctgtgatagaaacgcaaacgctggtgtgttctgttcattcatgctcgtctgcaaactgactcctgacggacggacgggtggttgtttttcggcaggcaacctttttcatcacgtacgtgctcacctcaggctgggcgagtctgtgctcggagatactgcaggttttcaacttggtctacaacttcttcagcaggttcgtctgctgctgccatcgccagaataaggaatacgtttactctttcccgtaccacaccgaagtgcccaaagtcctcctgttcaacctgctcggcttcacgttctcgatcatggcgcccctcatactcccctttctgctcgtgtacttctgcctcggctacttggtgt

SEQ ID NO: 188711 - DNA, 324 bp, Zea Mays
agcaaccctaaaacccagtctaatttcagatccaatccgagttaggcttccttccccttaagtgtgtgaccttgtaggttcacgtacacatagacatgtcctgagtactcatacttcgcccaataattaacaacggcctctagcaagacatgtcaactcctatgcacatgtaaagatcatatcagatgaaccattacaacattacgtacatcatgttccctttgtctcataatatttcgtctggctctaaaatgacctctctttctcgatactatgaattggaagctagcgtcgatgtaactagttacaacgtgctcctcttac

SEQ ID NO: 188712 - DNA, 394 bp, Zea Mays
ccctgatgatgctcttcagattgccttagttgatattccttcgtcgagccatcaactggcttctcatgatttggggcttccttcattcttctccaatcttcaggtaatttagcttttcttgattcggctatactctaggcaaaatattgtctctacactcatttgttttcaatatcaggctttggtcgacgagatggctggtcagctgagatcgcaggtgcctctatcccagaaggagctctgtctttggcgcattggaatctgatgttgcttcagaggcaaatatctgatttgaaaatgacaaatgctggttagtgtctttgtttcctcattggctacttgattaatctgctttttaactgaatatccttcttcgaccgctttgtgctagata

SEQ ID NO: 188713 - DNA, 425 bp, Zea Mays
gcaggacacactgagagattttaagtgtcggaagggaaataatgatggagacaatcatggtgagtgctgcttgtggggtgatgaattccctgctgcgcaagcttgccactctactggagaaggaatacatgctactgaaagatgtgaagcacaacattaccttcttaagaaatgagcttgctagcatgaacttgctcctcttcaagctggcagacatagaagatctcgacgtgcaagtaaaggagtggaggaataaggtacgagagctcgcctatgatatcgaggattgcattgataactttatggttaatgataggcccaacagaagccttattcggaagactataggtaggataaagaagttatggtttcaacatgatattggcaaacagatccaagaactcagaacccgtgttgtggaggag

SEQ ID NO: 188714 - DNA, 325 bp, Zea Mays
ccggccttcaccttggagtcggccctgtccagtccctcaccgcgtattccgatgcggattgggctggctgccccgactcttgacgttccacttcaggctactgcgtctacctcggcgacaacctcgtctcttggtcctccaagcgacagaccacggtctctcggtccagcgcggaggctgaataccgagctgtggcccatgctgttgctgagtgctgttggctgcggcagctccttcaggaccttcaggtctctcttgcctctgcgacggtcgtcttctgcgacaacgtgagcgctgtctacatggcagctaatcccgttcatca

SEQ ID NO: 188715 - DNA, 814 bp, Zea Mays
gacggagtccagtgatttgaaaaaaggtttggttaatgctattcaagacctatatgatgttgttcatcatgaagcgttttcggttgatatgaggtctgctgtttgtctgtgttccttctaccttgtcttcagattttgtgcccttacactttcactttgctaaagccctttgtttataaatgttagtggccacattgaagactgggatcaaattaatttagcaagggctgaaggtcgcctcttcaataaactcaagtggccaaatgatcccaaattggtattttctaagtgctgaatgcacatttttctattgtgtctttattttcttggtagcctgcatttttctttagtcattagtctgatctgttcttttgtaatctgcccagaaagacttgatcaagagattgtattcacttctgacaattaaagaatctgctgcaactgtccctaaaaatttagaagccaggcgaagacttcagttctttacgaactcactgttcatggaaatgcctgttgcacggcctgtttcggaaatggtctcctttaggtggggctcctttagtctatttgcttgttcattttgttgtggacttgccacttctcttttggttgcaatttgattattttgttctgtgcatttttcccctggtttggctgttcaattatactattttcttacattctgtgtcttcattttttgttatgcagtgtgtttactccatattactctgagattgttctctacagcatggctgaacttcagaagaaaaacgaagacggtataactacactgttttatctccagaagatttac

SEQ ID NO: 188716 - DNA, 427 bp, Zea Mays
gaagacacatgaaagaagtagattctgtgggataatatgaggagtgagtagactggttgtgaaagaagggtcaattttcattgaagctcacatctctagaaattcgaatacgatgagtagatggatcataacaacgatatcctttgtgttcaggactgtatccaaggaatacacactctacagattgagcagtcaatttagtccgctcacgaggtggtaacaagacataacatatacatccaaacacacgaaaatgatcatatcgtagagaagtcccaaaaagaacttcacctggtgatttgccagaaagtttagatgatggttgtctattaatgagatacacggcagtggaaacaacttcactccaaaagtgtgaaggaacaaaagaagatatcaaaagagtacgagcactctcaataatatgacg

SEQ ID NO: 188717 - DNA, 1366 bp, Zea Mays
ccaaaaagtcttattgtcagtaacaacaatctgagtacacaaacagacactcttcttttggagtttccaaatcaaccactgtggacaaatgtttttgtaagaaatcgtgccaaagttgctgtccccttgctctggagtcgcgttcaggtatgtggctttgtaatgctatcttgattaacactctaccaagtaccaaccatgatgtcttttgtaacatttaattggttttctgacattttcttgttgaggtctatagtcttatgctttcctgctcttcagtctatcgtcaaattatatatcctttatgaatacatatatgcattttggttgtaaacataggctgtacgaatcaatgtggcaatgtctcaatggtgaattacggaagtgcatgtggtgttcacaatgcaaagtacgaaagtgtagatgtgatgttctcatataatgtcgaacaaaaaagaaacctcaactattttacatttcaaatctgatgactatatggctgcacatactggagtcttgatgttctatttattttttgtactctgttgtaactgaagctctttacatctccataaatcaatgtcacatataagttgcataagtcatgcatggtgcttttctataatgagaaataagcctattgtggagttgcttcttatattagggttgatcatgttttctttctaaaatttgaagtatgggacttcttatttataattttcaggtcgaagggcaacttagccttctttctggtgctattctaacttttggtctcactcgttatccatactcggagtttgaactgatggctgaggagcttcttatgagtgactcaacaatcaaggtattttccctgttggtttcttgtgatattcaattattcatctacattgtatctgctttacaagtacatttaacttgattttttctaggtgttcggtgctttgagaatgtctgtaaagatgctccttatgtggaactccagaatggaaattgatggcggtggagattcgatagttgcaacatctttgttggatgctagcaacctgatagttctgaaggtttctagttggtccaatgttaattaccgctcttcctattttgctgcttgtgctcagtatgtataactattgctcatatgttttcaggaatcatctgtgatacactctaatgctaatcttggagttcggggccaaggtctcctaaatttgtctggggacggagacacaattgaggcgcaacaccttattctttcgctgttctacagcatacaagtatgatatatatgcttttcagcatcagtgtcttttttagccatcacctttctgatgtatttgtttattgctgcaatcttagcgtatcgcat

SEQ ID NO: 188718 - DNA, 549 bp, Zea Mays
ggaaattcttaattactttcactgatgttctgggtctttgtccagttacacttgatgagtttgttcagtctcttcatgattatgtaagtttctttttcctcgggacttcagtatgtttttttttcctttttttgctggtaaagtgatgtataagggtggaaaattgaataaatagatttgtatggttatgttcttcaaactttctgacagtggtaactggtaagatcatacacaatgaaagacacacagatgattgatcaaatgttatatacttatatgtggctttgggcaacaaatgattgatcagtcactaggattggaagttagcatctattgaagcaatatactgaaatctacgtcctacgatcttcttttttatatttgtcttagcctaaattgttatcacatttccttttataggattcaaggcttttgggagaactgcatgttgctctgttgaaatccattatcaaggatattgaggatgttgctagaactccatcaattgcactaggggtgaatccaggaggtggtcatccacaaattgtt

SEQ ID NO: 188719 - DNA, 306 bp, Zea Mays
ggccaatgaatcgatgggaatgtaccttgtgaacacgctgttggcaagctcgaccgctgctcttggtgtagcaggcacgagcgtggacattggcgcaacactgataggcttcaacaagtcgatgtcctgaatgaggcattctgtcgaacacttgggggccgatgtgtggaaaacctcatcatcctcgcagcaggtgcgccccaagatactgtggtgggcgagggacttcaccactggcggatgcccagctcggagagcacgaaagtggtgatatcggggcggtacttgcgccagagctcgcagcag

SEQ ID NO: 188720 - DNA, 439 bp, Zea Mays
ggacggggtgctaaagcttcacaatttcctggcgcaactagccctgccctcaatttataggctccgagagcggtggctctcaatttgaccgcgcagtgctggcggccggaggtgaagaagaacctgggtgcggtgaattcgtggcaaatggcgtggcgagctccccgtcgacgatgggatggcttagaggagtcacgacggtacggtgtaaagatagagccacgcggcggacgccggtaatggctcaacggcggtgaaatccttatccgaaggatcggtgagcaagggggaatggattacggcgggccgaggtggcatccagcccaccggcggcaaagatttttaccgagcggagcttatccgatggccacgacgcacgaatcacggcgagcggtaatcgacggcggcggtcaccggcgatgggcaagggggggtgaac

SEQ ID NO: 188721 - DNA, 386 bp, Zea Mays
agttattgaactttgatcttttcatccgcagcataaacggtgaaaaaatcacttctttgctaagaagaacgctcaaatcaaatttcccccttcagtcaaaggattgtcttgcggcatgcctcattaagctagaatccagagctggcttatcaggagatcatggtgttagtagtatagatatggagataactatctatgagactattccaaggctaattgagcaaatgatgatatcactttcgtttgaaaataaaagaagtgctgtaatagagctcaacaagataatatctggtggtgtgctggaatatacaagagcagtggcagattctggaggcatatttccactggtgaaaatgcttgaagaggcggatggagatgcactggag

SEQ ID NO: 188722 - DNA, 1354 bp, Zea Mays
atttccttttcagtcttcttccttaggtttgcacatgatgcatgcaacctagattagcatgtttggtcatttggagcattccactgtatattaagttgatatttataacacaatttgatctgaaccaggacttggtcaaattcagttaaaatttggagacttcaaaagttcattaggtagctttgagaaagttttggaggtgcaccctgaaaattgtgaaagtttgaaggtaagacatatatctaatcaaacacttattctcagttcatctatttgcaacataacgttgtatttgtgaaatgatttttatgtttcttctaggctattggtcacatacatgcaaaatctggggaaactgaaaaagctatagaaaccttcaagaaagttacccgtattgacccaaaagatcatcaggtacttgcttccccctcccctcaaccattactttcatggcttcatgtattcgggtcaaaaaaagtgctgtaacatagtcccaaaatataattctgccactaatttgtttctaacatgtcaatacataaatagtacaactgctttccaggatgaatgtactgatgaaattttcaaatgctcaatctgaacataaattactccatatgaacatggcaaaaaatatatatttttgaacactgagttttggtccatctctggatctttgaatgctgatgatttggaacaatgaagatgctgatctaggatgaagttgattgaaaacttggaatgctagcgtcttacaatcagtttttttgttgtcgatttgttctgtatttggtccatgaaaggaacacactacatttgccctaatgtgtagttttgattggtatacagattttctattgttaccttaattattaatctataatgagaaacattctttatcttcatagtttctcgcacgtctgctatatttgttttagaaaaggataagacacccataccaggcttcataattgcaaaaaaggacatttgttgtttagctgttttttcttttgactaatttatgtgtcacagtactacatttttgggacttactactgtgtcatgtattatgaagttactggacgatagtttcagagtgattaaccaaaaaatgaataaaacaaagtgtggaagctgttcaatatcagattatgagtatgatgtctattcaaattacttcctgtttgtgtttagtcctagactcctagttgcattcttactctccgttttgaggccacacattaactttactgatccattatttcatgtttgcatataacctattttaatgagattattttgcaggcatttgtggagcttggtgaattgttggtagaatctgactgggctgctg

SEQ ID NO: 188723 - DNA, 335 bp, Zea Mays
aaccatcacgagcatccttcacacgattatataatagcaacctaaacgtcgtgttacacaatacatacatctttcctcgtcgtgagtataaccatattacggcatatacccatgcacctcaaataaatatctcacgccaccactactatatcacaccacggcacatacgcacatatgtgtccccactgccttctcatgcccaattttagcacaattatttatgacaacgtttatcgactagacaagtgaaacactaaccgatcattcgcacatctcgtctttaaaacacgaatcacatgtcacataatttagattttcaacccacgctatcctac

SEQ ID NO: 188724 - DNA, 539 bp, Zea Mays
acaaagagcagcaaaagaagaacaagtggggcgacagggacagggaggaggggaaggcagaggaaatggaagcctctttcttgaggaaagatggcggtgatcaagccagtgcggcgacaatgtccggcgagcacaggaacaagggccttgactgggatttgaacgactggaggtgggacgccaacctgttcctggccacgccggcggccatcgtgccgtccgagtgcagcagcaggaagctgagtcgagctcagggggagatcgacttcggcgtcgtcgttgacaagaggcggaggctctcgccagaggaggacggcagcgccggttgcagcaattctggggtagcagatggagacaacaatcatgtggtgcctgctcagagagggcggagcagcgaggaggagacacccaggaaaggtgccagttcgagcaccactccgtcctgccaggttgacggctgccatgccgatctcagcggtgccagggactaccataagaggcacaaggtgtgtgaagcacataccaggacgactgtggtc

SEQ ID NO: 188725 - DNA, 468 bp, Zea Mays
atttcagcagtggtagtagcaagtgctcgaagttcggcttcagcactagaacgagatatggccgcttgcttcttggagttccaggcaatgggagatgatccaaggagaatacaataacctgtagtggaacaacgttcaacaggatcacttgcccaagtggcatcagaatacgcatgaagctgaagtgggttattagaagcatagagtaaacatctggatcttgtcccgcgtaaatatcgaagcacacgaagcagatgaccttaatgaactgaagttggtgttgatacaaattggctcaaatatgaacaacatgagcaatatcaggtctggtgatggtaagataaacaagactatccacaatatgacgatatcaagttgggtctgctagtggtgtcccatcttttggatgaagttttaaatgaatatccattggtgttgcaactgtgcgtgtatcagtaattccagagc

SEQ ID NO: 188726 - DNA, 443 bp, Zea Mays
gcctaaacccatgcttaattggtagcctatgctcaaccaactccctactcagccctggcatctcagtataattccatgcaaaacagtctctaaattctctaagtaaatcacataccttttgcctctgatcggctattaatttagcacttacaaatgtcggccttggcacctttccgtctccaatatcgacttcctctagttcatcaacagatgagaacccctgtcctaactttccaaggtcatcaaaatcatccaccacctcacccatatcgtttttgtttaaacgatattcatctgtcctctcctgtaaccattttaaattatcgtgttcattcatttataatgctaagtcattgagccgtgctatgtcagccggctttacatgaataggcacaaaactatctcgctctacactgataaaatcatatcctgacaaatctctt

SEQ ID NO: 188727 - DNA, 810 bp, Zea Mays
gggacatcaccgccaccaactctcttctcgctgccgtggtgtcgctcttctctcgcttccgcaacgcattcgacaataatgccctccgcctcgacctcaagtactgccttgacatcttcgccgccccactccttgaggtttttctctttgcctcccgccgccttcaagccgctgccaccacggccaacccgctcgagctccgtcccgtgtttgagtgccttcgcctctgttgcgagatcttctactcgcttaactccattgaccttcctgagttcttcgaggataacatgcgccagtggatgacagagttccaagccttcctcaccacatcctacccaccgcctgttgaggcagatggtgccccggatgcgctccgtgctgctgtctgtgataacctgcagctttatatggagaagtacgaggaggagtttaggggatacctgaaggagtttgttgaggctgtgtgggggctcctcatggcgcagaccgcttcgccttcccgtgtgcagcttgccgttactgcgataaggttcttgactacagttgctgagagtgtgcaccatgctttatttgggagtcctgaggcgatgaagcagatatgtgatagtgtcgttgtgcctaacttgcgcctgcgggatgaggatgaggagttgtttgagggcaattgggtggaatatgtcaggcgcgactctgagggtagcgatgcagatacactcagacgggcagcgtgccggttgctgcggggccttgcagcgaactaccaagagcaggtggctgcactcgtctcagcacaggtccagcagatgttgg

SEQ ID NO: 188728 - DNA, 486 bp, Zea Mays
ctttctttaaagtggacagaacctaaccttgcagttattcatggtcattatttggatgctttgggccctttcttgaagcatcatccagatgcagttgccagtgttgttaataagctttttgaactgttgacgtctctcccaatcacatttcaggtacatttatgttttacttaagtaaataccatatgctgtggagtgggaaccattgaggctggagattgatagccatcatacaattcaattctacgagtgatgttctagaaatgaaaatctgatactttgagctggccaaatgtttccacgtgcaatcctttcatgttgtttttttattcaaatttgaattatttggttatcatgcccatttcctagttttgtgtttacagttctcatttctgccatttaatgtatggctgtatctgcaggatccatcaaacaattctcgcctagcaaggttacagatctgctcatcattcattcgtatatcga

SEQ ID NO: 188729 - DNA, 546 bp, Zea Mays
aacaaacgtaggtcgagggtcgatgacttccaacccattgtatgtgattatggctctgatattgtagccatttcagttccaaatctgcaaatgcttctccttgatatctgctaatatgaagatgaagagtgcagctagtgattcatcttgctagggtgatctcattgtctgtatagcttcactttcttcaacgaaccttctgtcaccttcattgtaaattgcaccttctgggttgtaactgatggtgttatatacatgttctcctttgcggtggtatggtgatagttttccctagaacctgtcagtgattacgctagctaaggtggggctaggtgggacggtgttgcctagtggctagtgcctagttaagctaggtggtcattaggtaccttggcaacactattttaaatgcaagggtaccacacctttttacacatattttttgtattgtttgtcagagaaaaaacagcatcgtagcattgcagaagtaccacctaaaaaatcactcatcaatttttctgtttgcaaacactaaaggaaatcacc

SEQ ID NO: 188730 - DNA, 408 bp, Zea Mays
tcgctttacagacgccacttgcgtcgcgatatttatttatttttctttgtcacctcgattgttagggtttacggtctgcaggtcggtatgccccagcgctcaatcgccaatttatctgcaagtctcagcacttgtggataatttggatccatgtggtttggtttcgttctaccgccgtgctctgcgctacaccgttaccttcgccttttgcttcgcgcattgcagatttggtgccgcgttgtagatagtttatgtttggtcgaaccagtttcttccatgcagaaaataaaaaatattgtttggaccacaattgtttgttccttcgatgtttcgttgaaataaagcggggaaagtttttatctaaaaaattgtttgttcttttgtccgtttactgttcctaatcatcac

SEQ ID NO: 188731 - DNA, 466 bp, Zea Mays
agtagacagtagcaatactaagtgcagcaccaagaaccacattcatctccactgtctcaaaaacaatgagcctgtccacttgacatcccaggtctagagcaccagcctgagcctaggcaaagagcgtctagagcctcccagaccattttcatctccctatacacctcgatcgcccttcagcgagcctgtttagctcgtaccttgaaatcatcgcgttccaagctaccatgttccaatcacataccttccatctctagccatagatcacataccaagaccgatcacataccaccccgtcccataatctagactttcctagttcctatacttataataacaaaaggatacatagaaatgcaagatgaactgagaatataaaaacgatagaaaaactacaagcacacatgcaaagattattagtttgacgaccagaagatcaaaggttcaagaaacttattttgctatc

SEQ ID NO: 188732 - DNA, 468 bp, Zea Mays
tcagcggcttggtaaattaagttaaaatcacctgccacaagccagggcccattgcaaagagccctaatatttctaagctcctgcaggaacaacactttttcatcatcaccttgaggaccatagactccagttagccaccaattacgaccttcctgctcagcgaaaagaacagaaactgagaaattatcaacccttgaagcgacggcctgacaagaaccccccttccaagcaaccagaactccacctctagtgccaacaacaggtaaagcaacaaagttatcatagacagtcccaaaaactgaaaggagcacctgctgggtcaaaatagcgaccttcgtctcttgcaaacaataatatcaacattactagagaggatgacatccctgacagcattacgacgatcaattttattaaggccacgcacgttccaaataagaatagcagagggattcatgaggacacaagaag

SEQ ID NO: 188733 - DNA, 602 bp, Zea Mays
ccgagatgcgtgtcattgttaaagagatatcttatccggtaagtggattgcttcttgtctcttatttcagttggtgaaatttgtttgcactaaaacaatcaaggattttgtcttcaggtacattccaagggtgcaaactctgcgacaaattgatctgttttgtgcgaatacgattgcaaaatgtgaaccgatggcaaataatagagcagcatcttttgccaagaataatgtatcagcagcagctgcaataaattcttcatcccttgccccaccaatatccaactttgcttcagcatctcttgtgaagtctttaaactatgttcgctcattggttgcaaggcatactccaaagttgtcattccaatcaatagtcgcggcaaagcagtcacttccttcactttcatcatttctgaataggtccttactttctcaactaactccagaagttattagcaacagagaacatcttgaatcgaaggaatgccatagctcacctgattttatatcatcagcaagtgaaaaagttgatgtgggtgaacctgtagatgatagcaaatatatatccttcgacattttaagctggcgatggcatgtgtatggcg

SEQ ID NO: 188734 - DNA, 344 bp, Zea Mays
aagtcgtgtgtttgcagtcaattgcagacacatgatgatcttgtttgttattgcaagaacctgagtcttgttgtacttatctgctctcaagatgttcttgtttagattaactgaatctgtctacttcttctgatactttatacgcagtctgcctgtccgagctttagcctgagttcctaatatgtgctgcaccccctccccctgtccgagctctagcctgaatttgtctacctcttccgattccttatatgcggtaacaaattgtccacaatgattgtagcatattactcattaatatacacttgtgtgtgaacctgtttgtttgcttgtctgctgcctgccca

SEQ ID NO: 188735 - DNA, 317 bp, Zea Mays
cagatagtatagagttgaaatgacgagaacacataaagaaacacacattccacagaaccaaaacctttaacaaggaaacatcatcataacaaattaaaaaatatatatgtctcatggccagtcccaaagtttcattgcagcgatgccactacccaaggcaatggaatatgagaccattttcaaatggaggaaggctctcaaagatgaaaatccttgcaagcaaacctctacagataaaaacttaatatttgacgtttgctttggaatatgcaaacatgtaatgtttgctccaaaaaagctgaagaacctcggagccc

SEQ ID NO: 188736 - DNA, 406 bp, Zea Mays
ccaccgccggcgcgtctccacctcctgtcctggtctccaccacctcctccaccacttggcatcgtcgtctcggccatccaggacccgacgtcatgaccaagattaccagtggtctcgatccttcatgtagtaggggacattttgagggtctctgtcatgcttgtcagttaggccgacatactcgtctcccatttactacttcttctcgggctgagcaggcttttgacctggttcactgtgatctttggacctcccatgtactcagtctttctggttataaatactacttggtgattttggatgatttttcccattttctctggactttcccgcttcggttgaagtccgaaacattccccaccctcacacatttcttcgcctgggtatccactcagtttcgtcgccc

SEQ ID NO: 188737 - DNA, 997 bp, Zea Mays
ggagtcgtgttattgagacgttggagggagtgagtagcaggttgaaggatgtggagagggtgcagcaacaaatcatgatgcagactgaattagtggcatcagttgctgaacaggcggcgaaggagagaaatgatttgggtcgtaaattggaggagactggaagggtagtagcacagatgaggttggaacagttggggaaggaattaggtgaatcttctgggggttctggttcaccatcattggaggtgcagcatagtgggtctctgtatacgagaggtcgtcatgagaaggaggtggagggcggtagagctttcagaggtgattcagggaggatgcaaggggaagacagacagtcttgggatccacattatcagggtttacccaagttaccttttcccaagttttcagggggtgatcctgtagtatggttggatcaatgcatggaatattttaccacttacagggtttccaatgctatgtgggtgtctattgcttcgatgaatttggaacatgttgcagcccagtggtggcagtatcacaagttgaggcatgggttaggtggttggcaggagtttacctcagctgtggttgctaagtttggtgctaatgcttatcctaaagcattgaggaggttgttggctttgaagcaaactggtacactggattcttatgtgtcagaatttgaacaggccagatatggattagctgttcataactcggagtttgatgagacattctttgttacctattttgtgcgaggccttaagtatgaattgcaggatgtggtgcaggttcaaacaccttctacggtggaccgtgctattcatttggctcagcttcaacaggaggtgttggagcgcaataaatttcggggacaacggtcagggttgtctatgcatgtgaaacaacctgtggctggccagaaaacagatgaccaaggactcggggcagatctcacaagagcacgacaacttagggatttcaggagacttaatgg

SEQ ID NO: 188738 - DNA, 469 bp, Zea Mays
gtgcagcaagcaaagccgaagcaggggatgtggccgtggaggtagtatcaagcttggccactcgccagcgcaagacgatgaaagcagcagcagctgctgctgaggcagaggagaaggcaccacgaagggccacgaggcgcggcgcggtgacgagtacccttatgcagcaggagctacaagagaaaccacaaggtgagaaactggagtgatttcatcccaatcaatttgcactaactcagatgatgcttttgttgatatcaagtttgatggttgagccgacaatgatgtcttctctgatgcagaggctataggtgcaacagatgaggccgcgagggctctacccatccggcctactcgccagcgtaagccgacaatgaaagcagcagctgctgcaacagcacaggagaaggcaccaatagccacgaggaggggcgcgttgatgactctcttgcagcaagatgtacaagag

SEQ ID NO: 188739 - DNA, 329 bp, Zea Mays
aagtggtgaagcacaaggcgaggttggtggcgaaagggttcatgcggcatgagggaatcgacttcgaagaggtatttgtgccggtggcacgaatgaactcagtgtgactgctgctcgcactagcaaccacaaaggactagagcgtccatcacttggatgtgaaatccgccttcctcaacaggaagctcgccgaggtggtccatgtgcagcagccgcccgggttcatcgtcgccgggaggagagcacaaggtgttgcgactccgaaaggcgttgtacgggctacgccaagcgccacgagcatggaacttgaagctagacgccacgctcac

SEQ ID NO: 188740 - DNA, 630 bp, Zea Mays
taaagaaagtcaaacttgctgtacagtatgctttatttgcagcataccacctgtcacttgaaacctcatatcttgctgacgagggtgcaacacttccaaaagtcccttcagaccttcaacttgagaagccgaattcttcctcaagatactatcagcagaatttgattgaatttcaaaccattgaaggggaaacttatggagctggatgcatcacaccttgccttaatggctctgcaaatcaatctcattcaagagatgacataattcatgaggaacatgcacactgtcattcaagatctgacttaagttgggaagaatatactggtggaaccattgatgtatacccttattccacagaagcttcaatgtatagtagctgtatgccacctgtatgcatgactgttcagacacctaaaagttcacttgccagtgcgagaaaaagtacaccaggaaatttgtttttttccaataatgttcacatagatgaagcaggtggtggaatgtcaaaggttgataatgacgtccttgacttggataatggttggaatcatatctcagatgaagattctgtagcaatacatgatcacaacggtaatcacaatgaatattttccaacatctgacagtccac

SEQ ID NO: 188741 - DNA, 526 bp, Zea Mays
cagcatcatgatggggtaactggcacagctaaagatcatgttgtggtagactatgggacgcgaatgcacacttcactgcaagatctacagttatttatgtccagggcaatcgaagttcttttaggagatttccacgatagatctgaccctacattattatcacattttgagcctgtgcaggaacggtcaaagtatgatgttcagccggtacataaggttcttcttcctcatgaagggaaggcacagtcagttgtattttttaacccattagagcagacaagggatgagattgttatggttgttgtaagtagtccagatgtttctgttattaattcaaatgggtcctgtttgccaagtcaactttcccctgagtggcagtttgtcagcgatgaaaagatttcgactggtcggcaccgcctttattggagagcttctgttcctccactaggtttggagacctactatgtggttactgggcaggattgtgaaaaggctattcctgctgtagtgaaaacatacacagctg

SEQ ID NO: 188742 - DNA, 554 bp, Zea Mays
atatttcctctctttcatcaacgctagtgatttgaaaaggaatgctaaaggtaagctacaaatattttctgtcgtgaatgtaaaataaatacaatccatgtcatacaaaatgtgctcttgcagatgaccaagattttgagagactgcagaaagaactagcaagcttgtcacaggaaaaccaagacctcaaggacaggatctcgtccatgttagagcaaggcaacaaggctgagtgcgagatccttcgcctcaaggagtcccttgctcaacaagaagcagaaaaggagtctgcagtttcactatgccagcaatcaactgctagactacaaaacctgaagtctgaaattatgcatacccaggagaaattcaacaggctgaaagaagagatgcaaactgaactacaacctttgaggaaaggagatgaacatttatttttacttgaaagagctaatcaggacttgcacttggagctagataacctgaaacttctgttgaaacagaagcatggcgaagtaaatgaaaagcaagatgagttggaaaagcttcatatctct

SEQ ID NO: 188743 - DNA, 372 bp, Zea Mays
ctcctctcctctgtaatacctagccgccaaacagtgcactacgtctcctactctcctctcttgctagctcgactgttccagcccttatacacacttggtcgtcggtggctaccccttcagacctacagctcaccggcggctacatcatcagtgtctacaccaccgtgccccttcccctgctcgcctgctgcagtctccacctacggcgactatcttaaggttcaccagctgcagtctccactctgccccttcccaagctccagcagacctgcaccattgaggagatgagcttgtcatctcaaggtccctcctgctctcccccatctcccccttctctgcagttttgccaaattagtggatggttgctggctg

SEQ ID NO: 188744 - DNA, 452 bp, Zea Mays
cctttgcaagtgaaggttgccgatggaaggacactatggagtactcactttgttcctgattgccagtggctatgtgggggacatactttcgtccatgacttcaaaatattaccattgagtgggtatgatctgattcttggtatggactggctggaaaaatttagcccaatgtctatacactgggggcaaaagtggttccagtttatatataaagggaagtcagtacggctgcaaggtgttttacccaatactcggtcttgtttttccctaaattgtcttcagtttgattcccttgtcaaacaagatgcaattgagcagttattagagttgcaagtcgtaccacttagtgaacccactgacatgcctatggtggtggctgatctggttagccagtttaaccatctgttcgatgagccaaaagagttaccacccaagaggtggattgatcatgc

SEQ ID NO: 188745 - DNA, 406 bp, Zea Mays
atctccagcttggtcggtacatgagattgaaccgaaaccgtggcatacgagggcaccatgagctgctggatggcgccaaggttggcgctggcgcctaaggtctgctcagacatggaggagaggaggggtgccggcggcgtgagaggaagcagagagcagcggaaggaaggccgggatcgaattgatcctggtcctctgataccatgtagagagttggtttaggggaaagcaccgcacactcaatcaggtgtgtgacttctcatatatatagccaagtggcttggtgtacaaggatacaatctcctaaactaggaaggctgtcacctatacaaggtaaggctaaactaagaaggttgtcatctaaacagggtaagacagccggctgtagatatatgcctaataaaaa

SEQ ID NO: 188746 - DNA, 303 bp, Zea Mays
tagagaagccaaggcccggcggtcaccttgtgtgcctccacaagacgaggacgacgacaccacctctccgcgccgggatcgctccttggagaccatgccgcagcaggagctggagccccagcagaggaacgagagggctcagccgccagccagcgggtctgcgagcccagtggagttcagagttcacaagcagcacgccggttgcatggacgctgcgactcaaaccgatgatcttggtcgcagaacacccgagctgcgcaagaagagtctgaggagcacagaccatgacgccgtcgttcgtga

SEQ ID NO: 188747 - DNA, 454 bp, Zea Mays
tgtacacccggagccaaattgaactcatttaggatgacctagagctgtagaaattccatctacgtttgagcattactgcacctcttatatgtctgacaccaacaaccattgttcatagtgtcctgtactgtttgtatctgctgaaccttactggggatgagcttgataagagagggtgccaagaccgacaaggattgcccatggagccacctgccataccaaaacgtgctgctagcaccatctcccaccgcagttacaagcgaagcagtgaacatagcaagaccagaacatactgaaaagaaagaccaaaagcaacatgaccaaaactaccacactattgcctgtgcccctcctaaaggtctcccaataagcttcaggaggccctttgctctagctgagtaccaaaggatgcactcataagttacagcttgcaacaccgttgtaaggcttggag

SEQ ID NO: 188748 - DNA, 299 bp, Zea Mays
ctgagacatggtcaccgcgtctccttccctgtctcccggcgtcgccttccctctggtccctttataggggtggcatcagttgcgggcttgctcctttggttggtgtgagcacgagtagaagtaggcatcaggaagacaggcaggcgaagccgcgcaatcgccgcctccagatcctctgcccccttgccccggattcaataaacattttagataccatgtgtaaagctcgaaccttctgtgagtttggctgaagctcaacctagccaactttcaacaatgctattcctttttttcaaatt

SEQ ID NO: 188749 - DNA, 381 bp, Zea Mays
cttgcataggtgtggtttggtttccattattgttggtcttcgtcacaaaagaattattaatgtttctctgcttgttagcagcatggtcggtattttcctttcttcggtcagcatcctcatttcctccattgtctcgcccactatttggggtaggattaggggttatcgccggtataaaatcttgtgactccggtgtgaatgtaatatcatatccaacattgtgaaacacaacatctgttgttagtggtagttggcccttgtctatgacacccactaataaacggataacccccttccttctgtaggtcagcatatccacttccaaagttgttccaatcatggttccaattgcccaaaaccccagataatgtcgccaagcat

SEQ ID NO: 188750 - DNA, 346 bp, Zea Mays
gccgaaactgtacacgtcgctcttggtgcttggctgcattgtttccaggtacctgcatgcacgacgtccgtatgggtaattctgaattctatttctatcgtacgtacgttatggataattccatgatcatggacgacgtacgtactctgggtcgacgtatcctggtgtgccaacaagagtgttcgtggacgcataggtgtcgcggtctagagcctttgacatgccgaaatcagcaaccttggcctccagtttcgcgttcagtaggatgttgctggtcttcacgtccctgtgaatcagaggcgggttgcagcccctgtgcagatactctagccctacatgccatcac

SEQ ID NO: 188751 - DNA, 407 bp, Zea Mays
ttttgaacaactcgtcgatggcgacccacagttgcttggccgtctggtgaggtcgaagacgacatccgagatagagccaaacaatcagttgtggatgcaacaatctgtctgctgccacaagggatcagtgggacgggcaggagcagagccatcgatgtgtgctagcaaatcgaatttgccgcacatggtgctaaagaacgatgattggttgaagttggaattcgttaggttgagggtcataggaatgtgtgtacgggtgaggaagacgggcccatagttcttgctagagcctccattcgttgcgggcgcgccgagcaggggagaggtcgcaaccgtggtcgaagaatgggtagaggtgattcacgtggctggaaggagttgcaaggtatgaagtatatgaatatgca

SEQ ID NO: 188752 - DNA, 278 bp, Zea Mays
ttcttgggcgagacaggcagtcacgactcgcccgaggccaacccccaatgggagacgtagtcgcgactcaaccgaggccaagccctagctagacattcagtcacggctcgcctgaggccaccctcgggtgggacatgcagtcatgactcgcccaagggcaacccctggcgggagacgtagtcacgactcgtccgtggccatcctcaggtgggacagatagtcacaactcgcctgaggccatccgcgggcgggacaggcagtaatgactcgctcgaggc

SEQ ID NO: 188753 - DNA, 515 bp, Zea Mays
gggagctcttccagcagctcgccgacatgcaggggaggtgaggtcgatcgccggtcgtacgtcaaaactctacacacactgcacactgtacgtggcatggcaatctgactgagctcgtctcgtgcacgtcgacacatcgatagatgcatgtgtactgcacccggtgaaaatttgaaacgatgaatattcactagaacacaaactgaacagagtggtgagtcctacgtacgtacgtgtaacaactagcaccggtcgatcgatacaatattcttcaacctgacacgtggggtctgcactaccggcgacggacgagggtgagctcgtcatattctcaaatttccaatatttaatatacgtgtgtgcgataatgtatttatttgtaatttcgcgattgtgtaatacttgggggatttgctatgtttcggtcgcctctaaaatacactatatttttagacaacgatctttatcgttaattagttcatgagcatgtaaagctaagattcattttaacgcag

SEQ ID NO: 188754 - DNA, 288 bp, Zea Mays
gcactaattcaggtttcgctttttccgatagcaagcctgtacatgaaaaaaggaagtgttggcatctccctctttcagatatttgatccgcgatctaagtctagcaattgtcctttccagagatgcaagccccaggcagtgatgcttaagccttcctttcagccatatctcgtccccacacaacaatctattgtcttgagcaatctcaagtctgtgcaaaatttccctggccaagctaagctgaaatttaacatttccgatccttttatgactccacgactgcaaggc

SEQ ID NO: 188755 - DNA, 521 bp, Zea Mays
tgatccttctcgtcctctgcctgggaggagatggatgcggcgacggaggcgccggccgagcgcacgctggacgcgacggagccggcgttggaggtcaccgtcttgaggcaggacgatatgatccgcagcgaactcggcagcaacccattccttgcccccttcccccgcctcatccctccccgccgctccctcacctcctctccctgccccagcccggagaccagcacaagcacccgctccgagtccaacttccccgccgccaccgctcctacaacccccgccccgcaatcccgccgctgcccatccacgatcgccgcctccggggctggcgaaagccagtaccatccgagtgccgccgcccctcactgcctccgatccccgctgccgccgcaatccgcagactcagctggccaccatatccctcctcccctcgcacacctcttcctcgccgctcgtcgtcccttcccctccgacgccgaccagaaccgaaattcaacaactccctgggccctggcttcctt

SEQ ID NO: 188756 - DNA, 735 bp, Zea Mays
ccggcctacggcgcgccgtctcctgctggtgacccagcttatggcgccagcggctcgccggcaccaaccccgctgtagagtgtactgcttccgacgcgtacgcgactgcatgcatgagcgatatataatgtcaccttggtgcagactcctgcgctccgaaggattttttaaatatttttaaatatttttaataggatctgttggctctgattcgggccaaacactaggggttgtatgattgtatctctgatggtgctcggcggcgaggacggcagaaggtccgcgaccctgctgcaagcaagtcttctctcctgctggctggatggtccgtggtttaggctggacggtacgcgaacgcacaaagggtcgaagaaccctagaactcactccaggagggatcccacaggagagttctagagagggtgccctaggaacggcaggccacccaggaggtccttagacgacgaagagtcgaagagagatgaatattggaggtttggaaaaagctaagctaggtctaaattacgtcacctcctaatacgataaaaaacgaaggaaataaagtagatttgattgattggttcgattggtgatactcgcaatcgtatgtaccccttcatatatatagggagaggtctggatcagttcctaggtgtttatcaataaaatttgcgtatttagttggataaacacacacaaaaagagatattttatcttatctttactatattaaag

SEQ ID NO: 188757 - DNA, 408 bp, Zea Mays
gccgactgttcttccgagtcaaagggacctcatcttcttcctccccctcgttttcatcagcaacacagacagcacacccattgggatcagcgacagatggatcacacccattggggtcagcgtcggtaaattcaggcacaggcacttcctcaacagcaggaaccgaaggaccagcatcccgatccaagctagatactcgccgaagacgtctctttttctttttctgctcatcagcaagagaatcaagttgattggctcggcaagggcgcttcgggcgaacactgacaggcctctgaatatccaaggttgtaccagcttccgggagaggcgccaccaccaatgtcccagcaggagcagcatcagaagagtcctcggccagcatatcaataggggggatcacagcagcgg

SEQ ID NO: 188758 - DNA, 331 bp, Zea Mays
gatctttgaaggtaaatcctaaaggaaaccatgaataatgatgaatgtaatgcaatcagaaattataagttaccttaaacagtaaaaataggcaaatatggcctatgcaatcaaagaataatatactagctttacctcacatacttcacatgaaggaaccaatgctcgaaagaatcaaaattatttactcgacatagcatagttcggggaaaacgatctaaatcaagaattcatgtgttagttgacgcctacaatcgagggggaggggtatcttactgcaacatgaagcctggaacagcgaggaccagaacgctggaatcagtgaggaggc

SEQ ID NO: 188759 - DNA, 415 bp, Zea Mays
gtttttaagggtttgagaaaaaatatagggaaaggggatctgctggagcagttcctttcacctcactgccctatatctatatgacagtttttagggaaagaggattgtttttctcaaattggtggagttgctctaatagtgtgtgatggcgggtcggagcttccacaagcgatgtctgcaggtgttgtcgcaacgggaaagggagagcacgacgcagggggcaatgactgatgttgtcctgcttaattgttcactgatacaagagttcacgttatgttaatctaaacaactgtactcctaactcaatggcccatgtctcgcgacatcgttcgtctcacacacctgcataccccttcacccataagatacccttgcctaacaaaatatgctttgtgttgctatttctgatttcttg

SEQ ID NO: 188760 - DNA, 279 bp, Zea Mays
cgaggacgacgaatgtaagtctgagtaacaggtggtttggaagagtaaggctgagatgttgtggaagtggaaggtggtgtgatgggaataagaacatctggggtagaaacagtaggtggtgatactgatgaagtttcagaaatgggaggaaggctcatgaaggaggtagactctgtggaatgaaaagaagaatgagtggaagagttgtaaaagaagggtcggttttcattaaagctcacatctcgagaaatacgcatgcgacgagaagatgaatcataa

SEQ ID NO: 188761 - DNA, 350 bp, Zea Mays
tgtagtcagttgagggtaagtgcggagggaccctctacttatgtgcccgactggatctcaaaagctaatagcgagcctcaccaactcatttgttgcgcacgaaaaaaaggacaagacaatgtccgacccgggagaagcccccagggctcaggggctactattgggatatgatccctggtttcaggggaccatcggtaagtgagcacacctagaaaaagccactagcaactggggcccatcaatcagctagaggagacatgtagcgtctaccctagaggaacccaccagcgcacgagcaccgcggcaccaagcctggggttgggcatggtggagtcaaacaatgtgcaagc

SEQ ID NO: 188762 - DNA, 285 bp, Zea Mays
gtcgatctacaagtgtttacaccctgaaacataaaatctcaatgttgccttcaggattttcggaagtggtttcacttaatccaggtgtagataggcttgccttttcaattatttgggatattgatcctcatggtaacctaattagtcgttggattggtcgaagcatcatcttttcgtgctgcaagctgtcatatgagcttgtgcaggatctgatttgtaatgaaaccagtcagactaggcctgaagtttcttctcttgaagtacatggtatatttgggagagatg

SEQ ID NO: 188763 - DNA, 626 bp, Zea Mays
cctcatgtctttgaagactctatcatagataatattaagaagtgggtaacggaggatcctgaagcgtctaatgaatgcaaatggaagtatctaggaaacaataaacccacagatgctgagatgctgagaacatatgggattggtttgcttgctatggcgttgtgcaggtactgctaatgcctcattgatttattatcatctggtaccgaatattatccttttactactgaatttattattatgttattctaattcttgtgtgcttcaattttcacctcagcagtgggcaattgatagaggatgtcttgactttgggggtatcagcgaagctcatgcgctatttgcgcataagagtccttggggatgcctcatcttctcagagagatgctaatcatccacaggacaccaagcatccttggggcggagacgacagtaggggtaaatcacgtctgtcccaagatggttctcgattggacggaacaagggttgggtatggaatgttaaccaacccgacagcagagaagaacaacgaaccttgtgttggaatgatgcaagcatatggagcaaggtcattggatgacagttttgcttcattggatgattctgatgtccctgaggctgattgg

SEQ ID NO: 188764 - DNA, 773 bp, Zea Mays
actactggaaacatttacttggtataattcataacgagagatcaacaacaggtaaagaagttggtgcgaaagtagcacttcctcaaacaaacgcgcagcagaaatttgtggctaatcagagcgcaatgtgctcagtcgaatgcctggaggaacaaaaatgcaagtcaagcttaggtgttgtcactgagaaaaatgctgaagttttcaagcaaactgtgtcagctcagaacaacatacataatgcacacagaaatggagcttttggaccatctgtggtatcctcagtttctcatcagaatggatccattgtaacaggtgggtctaacatagcacaggcgcagccagctcagagtattttccatccagacccatccaccgtttctgtgacgtcaggatcattttgtccatcttctctaggtaaacaccaccttcagatgtttccggaaagatctggaaacatgagtggtgtcaaggcagcaaaattgtcttcttttaaaccacaagcttacatgaacctctacaatcatggcaatattgcagcatctgctgctgccaatatagctgttattacatccgatgacagtaaagtttcagcatcccaactgactgcgaaacaccggaagaaaatggctgcagacaatgctctacaattgaaagcattttcttcagcagccacacaatttctttggccgagtaccgaaaagaagcttatggaagtcccaagagatagatgtggttggtgccttgcttgtagaagttcagcaattggaact

SEQ ID NO: 188765 - DNA, 734 bp, Zea Mays
gcccttcttgtcaccacggccgccggtcttcgacttgccgggattgtaccccgacttcttctccccaccgctcgacgacgacgaatctggcaggagacgatgtcgatttcttgacacctagtcctcctccgtcaacaatagtcgccccgtcttgtcagtgacagtttcggcctcgatccggtcctcagccatcctgagacggccgaccagctcctcgaccgtcagggtcttcagatcgagtagggtttcgatcgagatcgcgatctgggcgtagcgttggggtagcacgcgcagcatcttcttcacgacccgagtgtcttcaatctcctccccggacgtgcgtagatccgccgccagtgcattgatgcgcatcgcgaaatcgtccaccgattcgccgtcactgaaagcgatgttctcaaactccttcaataggcgttgtgcattcgcctccttcacgcgctctgctcccacacgcatgctcttcaccgccgaccatgcttccttcactgtcctcttggacccaagcatttgccacatctcctttggtacagaccgcagcagacagcccatggccaatctgtcctgcgatctcctgacgccgtcacctccaggctcgatcacctcccacacctccatagcttcatagttacactgcatgagcatcgcccactccgagtaatttgagcgggtgagcatcggccacatcagtgaactctcgcgaacaccgctcgccg

SEQ ID NO: 188766 - DNA, 482 bp, Zea Mays
ctccgttcgtcagttcactactgacaactcttgttccatggagtttgacccgtttggtctttctgtgaaggatcttgcgaccaggacccttctcgctcggtgtgacagccctggccccctctacacgctttgcctgcctgctcccactacttcaacctctgccccacatgtccttgcagcggccgcctcttctgcgacttggcatcgtcgtctcggccaccccgagcgtgatgtgatgtccaagctctccagtagtacttctgtttctggttgtaggggatcttttgagcacctctgtcatgcttgtcagttaggtcgccatgttaggctcccattccccacctcctcctctagagcagcaggcattttttatctgatacactgtgatgtatggacatcccctgtaatcagcatttctggctataagtattatttactcattctcgatgacttctcgcattatttgtggacttttcctttac

SEQ ID NO: 188767 - DNA, 833 bp, Zea Mays
ctttcctagccctactgttcaatcctctcacattccaaattaggaagttgcactgttccattgagaaagaaaaaccacgaccaaacgaatagacccaagcttatgcgagctcagatgtatcccatccgaacagcgcagccaaggcagcgatgtgctccctggagagtggtgaattgaataagacagcatatttgctagcatcttccagagtgatattgccatgatcatcacagaatcccaatttcttgcagacagaggctgctgcatcggatcctagctcaggtggaaacttggccaccctcctggatctcctaggcctgaaatttcttggtagggtcttctttctgcgtttggggattggcgggggactcagcaaaccattaatggctttagaaatgtgctgactgaattcttgcaagggggtcggggatggcgagctcacttcctgggattgcacaggcacggtatctcgtcttctagagtacaccttaaagcatggtggttttgcttgcagtgagtacttgataatatcccagggattcctgacttgtgcagcattatcagcagggacatctgggacatgcgggacatgagaaaatggcacagaggcccgtcctgaagcatcagcacaaagattttctgggccctgtcctaacctctgaaaaccgccagcctcctcaaaagccgccacattaaatgagttgtcatgcagaattggcctctcagaatccaatagaccagaggaaattgcaccaattaatgaggcgggcccaggatcttcagatggagagccggttgttaaagcattggcggctcctgggactataaccgaa

SEQ ID NO: 188768 - DNA, 375 bp, Zea Mays
tggacctccctcccagcgagtcaatcgcccacaacacacgcggttcgttcttactggtttccaggagggaggtgtttttttcccattttctttgtgtgtgtttgcgctgctgccttcttatcaagtcttcttgcacgtccttctcttctctcccggattcatgcttggcgatatttagactgttttcgtctgagattctttctgcctcctgcgttcttggtccccggccagcagtcggcaatatcgctctgtcgatcctcctgatacttcgtcttccattggttttttaatcccatgtgagcagcagcagtaagaagaggatctgattcgatcggaggagacctagtgacgccgccaaatcgaatcgaatttctt

SEQ ID NO: 188769 - DNA, 292 bp, Zea Mays
acccttagaatcccaaaagaatgagggagatggtaaatctagtgatagcattccacccataccagctcaatcaaacaagatggctgaaaagatatttgagcagcttaatataatagctccatcgccaaaacaacaacagtctgttactctgaatgctagtaactctatgtcaaagaaacctgtttttcaagatgctgggtcaagcagtatgtataaccaatctagttccctgaagtttcaagatttggatggtgcaaatggaccccatgatacaaacttgaatggttccctg

SEQ ID NO: 188770 - DNA, 373 bp, Zea Mays
ggaggacccaacatatgattctcagtcctaggattccttataggccaactgctgggctggctttcttgttctcccgttcaggcaccagttcttctgctgccagggcggtacacatttcctcccggggtgtggctgctggcaccttcgtcgaggctgtaaggaacgcaatggcgccggttggtgatactggagggcgtggaggcagtcgcggccagcatcagtctgagggcgctggaggtttttccaccggtcatcaacagcttgggggcacgggaggacatgtcgctggtttgggactgaacactgactttggacgcggtggttcccaaccagtgttccatcctggttatggtggcggaggccgtccttttgg

SEQ ID NO: 188771 - DNA, 320 bp, Zea Mays
gcatactttgtggcaaaatcgttcatgcaggtgttagaaggttgaagcagcaccttgttggtggtcatggtgatgttgctaagtgcccgaaaacaacatcggcaattagcaaagagatgagtgattatttgaagaagaatgctagacagaagcctattgacttggatgatgataaagatgatgaagttgaagtacttggagaaggggaaagtagagcatcccattcagttgttcacccagttccggaacagcccaaaagagaaggctctcagctgaagcaagccaaaacaatcaacacgcgtcgaagtcttctaagtcaa

SEQ ID NO: 188772 - DNA, 701 bp, Zea Mays
tgcaaagataaagatgaagctgaagtatggttcgctgggctgaaaacactgatttcacgttgtcaccaaagaaaatggagaactgaatctagaagtgatttgctttcctctggtgcaactagtccgaggacttacacacgacggagttctcctttgagttcacctttcagcagcaatgacagcatccacaaggtattactgtctctattgtctattgtattaaaatcctacctagatgactagaagactagagtaaaacattcgagttttcaacccttaattgtgctgggaagtctcttcatagttagaagggatccagttttcatgttgttggttcagctagcgatttctccactcaaatcattctggaaacaccttgttttcactgatgtgttcaatcagagcaggaagccttggcagaaatttgatgacagatgacactagagtgcaaagctagaaaagaaagctttttttgtcaaattgctagtgtacttaatcacttttaatggtttctccttcccttcacattactttgcaatatatgtcatctttttttatattgtcatttatttttgaaaatgaatttttataccaggatggcagtgacaattatcgactccgtactccatatggaagcccaccaaagaatggattggagaaggcattttctgatgtcatgctgtatgcagttcctccccgtg

SEQ ID NO: 188773 - DNA, 349 bp, Zea Mays
ctcttgagaaaggaggtgtgggtgctcttgaacttgttgctatggacatgaaagccaggttagtgtttgtggaactgctgaattaccaagttctgcccaatatgtgcacaactgcacactaattgatatagacaacacaaatgcttcgatgccatatctatcatctaatgttccgtgtatactgcacacataggccacaaagttatcctgctgctaaattccaaatctagtccttttgcgcatcattgttcagtaatactgcttttgtaaatctttcacaggggaatgtatgtttgccgtactctaagttacaagggtgctaactttgatatcctagaatcacttctgg

SEQ ID NO: 188774 - DNA, 312 bp, Zea Mays
gatggaggtctgcttagtgacgtagactctgggcccgtgctggactcgatgtgtaaagccggcctgctatcctccccacagttggcagcgaggcagtgatcactgctctgttgagccagcctcatcgtcaatgaggtgccgagctttcgctagagctcccgtcagccaccaagtacccaacttgagacgggcagcaagccggcggccaaggcacttgcccatacaccgagtcccaggcccagaagagtcgtaactaaagcgcatccgcaccacccttaatgcccccgcacgggttacaagccctcgctactg

SEQ ID NO: 188775 - DNA, 528 bp, Zea Mays
aggcactggggcaaacagtagagtggtttagaaaagctctagctgttgaacctgtcaaggggaacctacggctcagtgggtactcagcttgtggtcaggatggaggtgtacaactacctcatgcgtatgttgaaggtaattttcagttttaatgaatcagtttagcaatcttgcattcttgcctgctaattgcctgactatgttttcatgtgaatctctcctcaattgcagatggtgttgctaatgctgatttagtcctcttagtaacaactagaccaacaacaggtaacacccttgcatgggctgtggcctgtgaacgtgaccagtggggtcgggccattgcaggtttgtgaaccaactcaattaagtacagacatccacatgccaggggtttctagtgttgttctgaccctacatgtattctttttctgcttttaggacatgttaatgtggcccctcgtcatttgacagctgaagctgaaacattactttcagctactctaatacacgaggttatgcatgttctag

SEQ ID NO: 188776 - DNA, 1090 bp, Zea Mays
acggacatggcagatgcagttgtgccgtacaaggccgaggagtccagcaggcgcaccacctccctgctcaggtcaggtatcatctctcccatcccaacgatgaaatgcgcgccgatcttcagagcaaaggtcagcagcttcatgaacttactcatgtaaggtagcaaggatttcaccgtctggttgtccacttgaatcaggtcacagccgagctgatcttccactacatgcatctctctacggaattcacatagcatatgcacccgtaaggaccgcatcccaggcagtattcttgtgaccagctgtttggaccggttgtccaggctaacaagataaaacatctgtggcactttcctctcctccaactgggtgttgtaattcatcatgtagtccattttcctgtggagttcagtcaaaaggtgatactcatagtacctcaagcttgcgatttcctccttgaggtcccttattccttgttccactctcttcaatctttgtagaaccatctcaacaccttttgcaatgcctaatatggaaggatcaaccacatctgtttcggggatgatttcatgttgctgctgattgtcagggttgacagcaagttcagttgcgaggtgctgtagatcatagtatctacggtgaagaacctcatggaaatcatcatctgatagcaattctctggcatgatctgatcctgattgtaagatgatccttttattgctttcaatggcactccatgtatgctcgtaatcatacatgctttctgcaggcaatgacaaaagaatttgcttcattctcttcagaggcagctgctgtgtttggaggaacctatgcggtatgagatattttacacagtctggcctgataatgctttcctcgaacatcaaacttgaagacaggtttagtatggttgggattattaacttgtggaatatcctcaccatgtcagtaacacttttgctggagcatgcaagcacatcgacggatgactctaatgtacttcccagcaccactctgacatggatactattgaccactgtataaataagatttttctccaagatgtagagtgcaccctgttgttgtccca

SEQ ID NO: 188777 - DNA, 417 bp, Zea Mays
cccaaaactattttgattaggataatcctatctccctgccttttgacgtccaccactccatccttaagggtcttatcaatcaggatactccatttttgtttgccactgttcctgagtactaaaatttgaaaccagtgttctccacctccttcgctttttgccccttccatcttgtctcatgcacacataggatactaatgtgcctcctgctcgctacatcgactaactctcttagcttacctgtaagggaccctacgttccaactacctacacggatcctagccggctcaactagcttccttaccccttgcacccgttgagacagatgcgaagacccttgcccatttgtcactacacccgggcgccgatgtagcgcgccactaaggaagcgacgacccgatccttgctcacttgaca

SEQ ID NO: 188778 - DNA, 352 bp, Zea Mays
gttttattatatcttcatgtgatgatgttgcaatagtctataatatgccatacaaagccttaatccacttttaaataaattaaatttatttaatagacactaattacatgttaatctgccattaagaaagactaatggttgcaccggcagagcctggctctagagaaacggccaattcctacgtatctcgggagccaggctcaagaggaatatttgcatcccgcgagccaggctgaagaggctgatcaggcaaccaaacagaataaagctgcgtctcatgagtctggccagatcatatccaggcaaccaaacacacccgatatgaaccagaatagtagcagcatgaactcaa

SEQ ID NO: 188779 - DNA, 456 bp, Zea Mays
ggatgttaggattttcattcctccaacatggtattgaaccaaaggtcttcttcccttctcgtcccctagctgccggtggtggacaaggtcccatggttcgcgttcctctcctttcctctgactgctctcctctcctcttcttcactggccgctgttgggcgatagtggccacaagcccacgacccctcatcgccctgtgaccctatcgctgccccctccaccatagttgttatcgctggagcatgcccctaggcagcccgctccccctccacctcccgtccagggctcacctgcctctgctcctgcgggtggtggcctagctgccgttggcccagccgcccttggcctggccgtcgttggtctagctgcccttggcctaggcatggttggcatgggcacaggcctcgctaccgctggcatggttattgttgacgtgggcccgagcgtggctcccat

SEQ ID NO: 188780 - DNA, 517 bp, Zea Mays
cttttggcccaagcttgaaggttttcaggaggaagtgcattctgcatggaactcagtcgaagctgtcagatgccctttccagaccctggagaagaagctaaagatgacagcaagaagactgcaagggtggagtgacaagcaggttgggcatgtaaggttgcagttggctttggctaaggagttgctgcatagactggagatggcacatgatgaaagaccacttaccccagcagagatctggcttataaacaggctcaaaaaacaatccttgatgctgtcatctttcaagcgaacaatggcaagattaaggtcaagaatttcatggctcaaagagggggatgcgaacacaagatttttccatattcatgcaaggcatcgtaagaggaagaattttgtggccatgctggttgatggagatcgtatcctaaccaaccactgcgaaaaggcagcagcagtggatcagttttatacaaacctcattgggcagtgtggaaacagggaaaggactattgatttg

SEQ ID NO: 188781 - DNA, 427 bp, Zea Mays
ggcattctccggaattgcccaaccgaacaatgcagctaaggcagcgacatggtcctgagatagaggcttagaaaacagccgcccatattcatcaagagcttcttgtgccaatccctcctggtcagccaatatccccaaagttctagcaatatccactctgatttttctgacagctgtggaaggcgcccccctaccatccttcttcagtctattacttcttctaggtataaagtcttttggcgtctgcttacgtcgccgcttttgggtagctggtctggccaagatgcagtcaactggcttagtgatggtggccaaaaaatcctgcaccagcgaatggtcaacatccgatgtcgtggtatccaaaaccgatgccgaaatacagtcagcggagcaatcatcccccgcttgtccctctagtagctcttgc

SEQ ID NO: 188782 - DNA, 399 bp, Zea Mays
ccgaagttctgtacccctccttcccctccatcagacccgagcacctcccactcacctgcatcggttgcgctagccaccattgccgccagctcggagaaaacaggatagctaccatcgtacttggaccacgcgtgttccggcgtcctgccggtggtcagggagattcgccagccgccacagaaacatctagttgcatcacttgatggattaagacctcggccttcgaccgatttctcaccgaagtataaacaccgcggcgatacttcaccgtcgcgtggtcggggccgtcatcgccacaatccgaggtaggaactccctcttctatctcgtcttgttggccgcgtcaagtagcacttactcccgacaagttttatcatcgggtgggccgaatcactatcc

SEQ ID NO: 188783 - DNA, 312 bp, Zea Mays
gatcatttacatattcatggtatggcaagcacgtacactacgtggatacatcatggggaggcacaatttgatactgtaataaatcaacaagctgaccatctagaagaacaatattgtatgaatgaggatattagtatgaatgagtctgaaaacccagaagatagattgcctgatatggtacgagagttgttcacagctggagaggaaggtgcacataaatctatgtttgcagttgtattggaagatatggagcaagaacttcaccctggtgcatcgtacacaagattttcttttgttgttaagttacttcat

SEQ ID NO: 188784 - DNA, 931 bp, Zea Mays
acatggagatcttactgctattcatcatctgattctttcatctctccagagactttgtgggaggtgtgtcattgaatcacttatgtaatttgcacttttgcacatatctgaagagctacattttctagcttcgatcaaatccctcgatttggtttgcagccttatgaccattcaaagttcttttggggcagcaaaaaacacaacagtgtaggggttttcccttttattaaatatatgatatatatagtgctttccaccttgtctctaacatttgcacaaatattctagaatatgtaaggaatagggatcgttctattcctggtaatggaacaccacaattatttcctgctccatggtgccaacacatgttttaactagaagaaattagataggagtcaagctcattggtgcttttgaaatgtagttctggccagagtaaaatacattcatttcaacagccacatggccacactagttttaccaaatggtacccgtttgttgttagttgttacttggtagtatgttttgctcctttgagttcgaaacaacatttttttatgttcaagtttacctacaaacctcgggtgctactaagtccttaggtgaggcaaggctcgactttaatgctagattttcttatgcgaatcaagaatcacttcaatcatagtgaattgtaacttttttctgcataacaggatctcaaaccagctgtttcatatcttcaacctgaagagttaaaatttgtgcatgatgctttgaaggtaactggttcacaatatcttccttcagtgctatttgagaaaagactgcacgaacgtctgcatcactatagttcattaataaccgcagttggcatatgaagcacacagtggacaaaaacggcgaagtggagaaccattcattattcatcctgttgaagttgctcgtattc

SEQ ID NO: 188785 - DNA, 390 bp, Zea Mays
aaacttgaaatttatataaactaattgtactccagttatctcgttgccgtcttttcgtaataggtttcttaaacgtatatgttcacctatttcaagagtaatttttttaccaaacatgtatacatacataggagtatatgtgaatagtgtggtatacaatacatcgacactcccactattttaattatggcccattaattcatgcatgcattcatttattcccttgctgcattttttctatatatttgccttcatctaattttgactgttcatttgatcaaacaacaatgtgtgttgaactaaaatagaggcattagtagaccaggatgaaaaaatagcgttaatacatgttaactaaaagtttaagactccatcctggtccgattctat

SEQ ID NO: 188786 - DNA, 429 bp, Zea Mays
atcccagacctcctcctccgagacaggcgcatccagggcaacgaggtcaaaagatggcatccctagagcatccagatcaactgtaacatcccttacttctgcagttccaagtaacccttgataaaaattaaagaaggctgctgcatttccttcatgggcagtccagatttgcccatcctctgagtgtattgctgcaatgaaattctttttcttcctgaaccttgtttgtgcatgaaagagagaggtattggcatccccttcattgagccacccaatccgcgatttcaaccttgccacagtacgagagatagaagacagggcaagggagtgcttcttgagcatgttccggagccacaattcagcatgagataatgagcgattgtcctgcgcaacctctaattgatgaaggagctccctagccatctcaag

SEQ ID NO: 188787 - DNA, 1195 bp, Zea Mays
aataaaatctgctactgattttcaaatatatgaggaagttggccgtcttcctggacttgattttgcatataccgatacaacatctgtgtatcatacgaaggttggttctattggcttatcattattaatgccaatcttatctaagttttttctcttccacatttttatggctccatacagatataaggttgttgataaaagttctgacatattgtccattgataattctttgtgtatttctgtttttaaaaattggagtatttttttttacgaagcctcactcaatgactaagcttctttaacaatgttgcttgatgaacgttaagacttcaaactgaaatatttctttgaaatcgcaagtattaactgggctgtttaattctagaagatatatgatgtggcagtgttgacgttcgagggtaaacttgctcttgatcagcaagctttatcagcttatgagctgctaagttactcttgcattgcatataggcatacacattggaaacatcggaaccacagcattttcgatagctgcgtcctttttttgagccaggaatacagcagggtacccccactgtaatagctgcgtccctgacaaccgagtggtgctacaggaggttagccagcaggcactgttgcgtgttctgtccagtgggagattttggggtagggagatggatatggcttgccctatctttcaaggtcacgaatgtgttaaaaaactaacccttgccatgtaattggcttgtaatcggattctttttctatcttaatgcaatgattcgcagttctcctgcgtgttcaaggaaaaaactactagttaagcaaaagattaacaaaatgagtgatatctaattatttgaatgcttcaagattagaattttatgtgatgctgtagcacaaaagtcatgtaacaatagatttggagtggaacatggccttgattagtatggtaaaattattacagggtcaaaagaatatttcatgatccattttgttgaatcctaagcatgttaactgctggtttgtgattgtttctattatcactttgtagaatgacaagatggcgcttctgaaaccagggtctcttcagcatattggagataacatgcttgctttcctactccattctgcagcatctccaaaatttttgaaagatgcacaacaaaggaagcaaggaaagacagagcaggat

SEQ ID NO: 188788 - DNA, 493 bp, Zea Mays
gtttaatgtatcatctgcactggatggtcttgacaagagtaagtttgaggcaaccaccatgggtgggacaaaattatgctcccggcgcctgctgcaagaaataatctattgtgttggtggcgtttctgtatttttccctcttctgatccactttgatgatgctgtggttcagaatggagagtttgccaccagagatcaattggctggtcaagttattgagcttgttgcatctgttctagatggaaatatagcaaatcagcaacagatgcatcttctttctggattttctattttagggttcctgttccagtctgtttcaccgcagctgctaaatatcaagactctttcagcatcgaaatacatgtttactattttgaagacctctagtgagctctcctcctccctctccctctcttatcttcctacttgtttggaagaggttatatcagtagcttatctgccttttttcaggcatgtcagatattctattgag

SEQ ID NO: 188789 - DNA, 344 bp, Zea Mays
caatacaccagtcagggagaaaaactttgctggaccatccaggtcaccatccatgacacagcacatgctagtccagtcttcagaaatcactccaggtggaagtcagtcattacagacccctacagcacccggtgctgtggaatttgcaacaccaccaacagtgacccccgaccttgatgcagatcatgatgatgatgctccacgcagatacaagactcttgaacacattcttggttcaggcaatgctcgagtgcaaaatgacatgggactcgttgaagagttactagcagcaataggggatgaacctgccacaactgaagaagctgttcaagacccactctggc

SEQ ID NO: 188790 - DNA, 825 bp, Zea Mays
ggaaaagtggctcactgcaataaatacaacattttcgcacattgaaggtttcaatgcctttgtcattagcagtttttatgaagttaatctaccactctcactagaaatgttctagtaataaaacaataaatctatattttggtctatctgtacaaatacatgtctgctgatggtgtatttttttaatactgcatacgttccaaactgtaaattcttctgtcttttctagatacatagctatgtatctaaaaaattcagactggcttacaatttggaacggtagtagtagttgatattaaataaaaagttttttggttgtttcttcacatttagttgaacagaacactaagatttaatccttgtagtagtttgcaagtgcatatgcacttcggtcttgtcaaaactaatgtatcatgtttggtgaaaccatatttggtaattttatgctgaattatagacaagggtcaacgtcattcttcttacaaacaattctaataacaaaataatgctaaaatataacactttcttatttgcactggttatgattcttgcttctcatgtggacttgtaggtggattcaaagcactgttaactgataggagcaaactaatgatgggtattggaggagttactgcactggctgctggagtttatactactaggtttttctccccaattttatttttagagtacatagacacaaaacattcataaatcatacctttatctattacatatttacattttcacacacaataatatagacttctaatttctattgttctctattttcatttttcagggaaggtgcgagggttacatgga

SEQ ID NO: 188791 - DNA, 420 bp, Zea Mays
ccttgttcagcgacaattcccctggagtagtaggagctgccgctgttgcatttaagtcggtctgtccaagttgtttaccgttagtatcaaaacatttccggaggctatgtgagaccctccctgatatcgaggaatggactcagatcgtcctcatcgagatcctcttgcgttatgtaatagccagacatgggttggtcaaggattctttactctttgcttcagatttaccgacagagattcatggcgttacagattcagatgctgttgctagcgtgcccacccaatctgattctatcgtcaatggggtttctgatactatatcaagcatcatgctgttccggcactacatcgaacaatgctcaggttcctctgatagagaaggcaataatttagaattatcgtctgtcaccgcaaacaaca

SEQ ID NO: 188792 - DNA, 557 bp, Zea Mays
acctttcacatccacttcaggtacttgtgtatggattcttgattctggtgcttcttttcacacgaccccctcatttcaccgatctttcttttatgtgtccttcctctcgttctcttactattcataaagttgatggatactctctctctctctgtcattgtgcacggtactcgtttgtccaactcttttcatgttctggtgtttcctatgttcaaaacctaaatatgcagcttatgtccactggttagcttactgatcgtgttattcttgatcttgattttttttgctatattcagggtcgttgcacgggtcacatgattggtacaagcccttgtcgtgtttctcgacgtctttgggagattgactggcttcaccttctttctgccgcgcttgtcaatcttatcggttttgcttttgctgcttagtccatcacatcatttgctcagtggcaatcatcgactatgtcatctttgtggtccctgtctgtccactttgatttgtcgtggtcttttaggttcggttttaggtcatgagtctttagaatactgtcaaggttg

SEQ ID NO: 188793 - DNA, 281 bp, Zea Mays
ccggccatggcgccaccgcgatgatgacgacatcaccgcttggtctcggcgtgggtggggaagacatgtcggtaaccgttgatgcgtaatcgggcgaccaagatttgatttgggcattggtctgggctggagggtattgggtcatcaatcatgaatcaaacaggacaggtcggtcaggatcgagtccccggaactttaaatcgccgctctcgattcttgatctgaggacccatgtgacatgcgactatggctgaatctgggccgtggatggcggatctaag

SEQ ID NO: 188794 - DNA, 666 bp, Zea Mays
ggttctttaaaagaaaattgtcatcaaccaatgatgaacggacttcagaaggaaatcaagatgcaccaaacataaatgtcagtagccattctcagcctgcccaacattctttggtgctgtcaccaaaagatgtcaatttagatgaacttccatatgatccggccgataggaggagaatcacagattatcctgggcttaagctgcaagatcagattagaagaaggtacttggttaaaggtcctcacagaccacaacctagttttaagtatccacaaaaaaatcatagtgggcaagccacgtcgatttaacccagcatggtttgatgagtacagttggattgaatatagtgagaaggtggatagagctttttgtctttactgctacttgtttagagattgtattgaaggtcaggccggaaatgatgcttttgtaacaaaaggtttctcttcctggaacaagaaagatagattagatgttcatgcaagcaagttaaatggttttcataatgctgctgtgaaaaggtgtaacaatttgctaaagccagaccaatcaattattgttggccttaataagcagagagatgttgcaaaagaggattattttattcgactaagtacctccataaatgcaactaggttcctactccatcaaggattagcatttcgg

SEQ ID NO: 188795 - DNA, 294 bp, Zea Mays
ggcagtccttctccaagatcagcatccgatcgcctatttcagcatgccggtcacgctccgccaccgctctttggcagcatatgagagcgagctcattgggttggtccacaccgtccgacattggcggccatacctatggggacgttcgttcatcgttcgcaccgaccactacagcctcaagttccttctcaatcagcggctcgcgacgatcccacaacaccactgggtgggcaagctcctcggttttgacttcacagttgagtacaagccgggcaccgccaacaccgtcgccaa

SEQ ID NO: 188796 - DNA, 822 bp, Zea Mays
gcacaagcaccattgctcttccattgtctccttagcagattatcttctgtcaagatggcttcgtgaagggtaagccacatgaaaatcttcaccttgaaaggcagcttagctttcaagctatgtttaaaattcatctcaacttcatttctgcgtaagtgtttgtatattgatttgactgagaatacacaagatttctcccaatcccattttgccttataatgattgtcattagtgctacatctgaacagaatatcctgcatcctcagttagatttgtaactcttcatgcagccatgtacagttatgctcttatttgtaactccgcagttatgtgtcatttgtaactcctcagttcgctactgctcctcagttatgctctgatttatgcatgtgttgcataattggacaatgctgtgtcagtgggggactgagggagtagcaagtggtgttttttcactacatacaagaacccactttggatatgttaatgacacatggaaactattcttttttgacaaaggattaatggaaactattgttgatttgcaaatataacgaaattgagttatctaatttgaagtgttcctttcggtagactgttagttcgcatggctattcaactgatggtcggggatgagataaggatatgtgctgcaaatttgagttctccaatttgaagtgttctttgtggtaggtagactgttagttcacacggctaatcaactgatggttggcgatggaataaggcaggatatgtgctgcaagtgtccacagttaaagatgcttgggacatattgacataaacatgttccttgaagtaaat

SEQ ID NO: 188797 - DNA, 283 bp, Zea Mays
caatgtttagtccatgaatcagagcttcgtattctgctgcattgttggatgctggaaataacaattgaagatcatatttgagttgttcacctccgggtgcaataaagaggatccctgcgcctgccccctgcagtttcaatgagccatcaaaatacattcaccatacttctgcagtttccggattatctagcacctgttgtttggtccactctgatacgaagtcaaccagtgcttgagttttgattgcggtgcgaggtcgaaattcaatgtcatgagatcccag

SEQ ID NO: 188798 - DNA, 523 bp, Zea Mays
cgctctccagccacaacttcagctgcatagggctcttcgacaccacacacttcagcaccgacggtcacccctccgagcacgtccacttcgacgatgcctttgcccccgtggcatggatggaaactgtgccactccttgcgctggcagctcaggaatgattgcgtgttcaccacatggacgtcaagtcagtgctccttaacgacgacttgaggaggtctatgtgcatcaatcgctaggatttgcgatccccgacaaggaagggcagggtgtcgcgctcgcggaaggccctctatggcttacgacaggcgtgtggaatgccatgttggactctgccctcgtggggatgggtttcaggccaagcccacacgaggtggcgatctactagtggggcaatgaaggaaacgtcctgctggtgggtgtctacgtcgacgacttggtgatcaccggcactaaggatgaggaggtgacatcattcaaggaagagatgaaggtcaccttccagatgagtgacctgaggcgtctc

SEQ ID NO: 188799 - DNA, 574 bp, Zea Mays
aataacctttccgttttcggataattcagaagataatgtggaaactgaacaaatcaattgccaaagagttgctgccagcagaacctgcagatttagcaatagaaccatggtggggcgttcggtttgtcaacttcacattggaagaatttaaggttagatccatccatggtgatttttattttttgacagaaaaaaaagaaaataaatacagcactgtcttcctatcatgtaaagtgcacatcgtttgctctcaatggaagaaaataatacattagtagaatcttgcattggtgggaactgatgcgctacattactgtagaagctttcagaagacgagacatcagcgatagacaaaatatgtaaggaggaagtcaattcatatgttctatttgacccggaggtagtacggggcctttataggagagggatggtatacttcgatgtccctgtttatcctgatgatcgttttagaggtaagcagcatcagcaaagctttcagctttgtcactgtttaactctatgatttcatgacttgggcccattttaagatcattgccatgcgggcccatatggc

SEQ ID NO: 188800 - DNA, 508 bp, Zea Mays
tttacaagtttcttattcaaccgaatacctaatgcattaattcggtgcttgtgacaagcattcatgcaaattcgtggatattaattcagaacctggtggcatattaatcttggatacttggtcaactgcaaacttgaagattcattttcatgcaatcaatggagagcctagcgcaattagaggtgttgtgtgaaaagctttataattctagagactcggctgagcgagcgcatgcagaaagcaccctcaagtgcttctcagagaacagcgagtacatttcgcagtgccaatacatattggacaatgcctcaactccatatgccctgatgctggcgagttcaagcttgctgaagcaagtttctgaccgcagtctttctttgatgctccgtctcgatatacgtaatgtttctttctgtacacttattgcatggcatcatctatagttaaggttttattgtttttgttctgttgcatcctgatccacatgtcattttagcattaaaatcca

SEQ ID NO: 188801 - DNA, 336 bp, Zea Mays
ggttttttagttgtagagatagaaaagtcttagaattgttgatagagatattatttaaaataaaagttgtatgtagacagtctctgatcgtgagcgtccgtttctgtccagacggtcaagccgcgaacatttcccgcccaatcaaacccaaaccaccgctcacctccgctgacggccgccagcccgccacgatggagctctccgccgccttcgaggaacgcgtccggcagatggaggacgcccgcaaccaacgcctcgccctcctcaacgtctcctacgacgctcccctcctcatctcgaattccttcatctgcctcctccccgaaaccctccaaa

SEQ ID NO: 188802 - DNA, 495 bp, Zea Mays
tctgaggagacgtgtaggggcaggacatgcggaggtggacgccgcgagagaggaagaagtcacgggacacattgttatagaactcacgcccgttgtcacactggatgcttcggatggtgcgactaaactgagtggagacccaagcgaagaagtgagacagggtgggaaaagtgtcagacttctgacggagaggaaaagtccacagataacgcgagaagtcatcaagaataagtaaataatacttatagccataaatgctaattacaggggatgtccatacatcacagtgtatcagataaaaaatgcctgctgctccagaagaggagatggggaatgggagcctaacatggcgacctaactgacaagcatgacagaggtgctcaaaagatcccctacaaccggaaacagaggtgttgctggagagtttggacatcacatcacgaccggggtgaccgagacgacgatgccaagtcatagaagaggcggcgacagcaa

SEQ ID NO: 188803 - DNA, 412 bp, Zea Mays
gattattcttgctttaaccacaccgaactaaaggctattggaagggtgctttcttccttcctccatttgcgccaggctcctctttcttggtgtttcctcatgaaaccttgctttcttgttgaagaatgcagttcctgttttcttccgcgagagtgcgaggtagaaggattcggtaagatttggtagcgtagcaaggggggaaagctggaggcctcgtccgctggttcttggcttgtagaaaaacctggcctttctctgagagcctttgccctgtatttgcaattgatacccctctttgaataagtatttcccccttttcaagccaatatgttccgctgatcaattatttatatgggtgttggacgataatctggaataaaatttgtcgctaacaaaacatattatgaaagtg

SEQ ID NO: 188804 - DNA, 530 bp, Zea Mays
gaactgtcttcaagtacaatcatgccacaacaatcatcttcgccggttcagcctcggcgagtgatgtctgactctgcagtaaaatttttatcagagataacagaatcagcatcaggtgagatgtcttgttcacaaactccagttgaacatgaaccttcctctctgatggaaaacaatccagcaccaacagcatctctgttacctttgtgcacacctcctcctcttcctccccctccacccactgtctctttactccctgttcccactaagttacccataaatactagcacaagtaccatcaacatttcccttagagcaaccgtgcgttcctctccaccttcagaaccatcagtccctcctaaagatcttttgagaaccgaagagctgggtaaatcacaagaaccttcctatgaaactcgtgggaaattacaaactgatagtactacaggttccaatgatttcatactgtcaccagccgcttcatcttcactggatgaggaattgagcaacgcaagagcatctctcccgac

SEQ ID NO: 188805 - DNA, 470 bp, Zea Mays
gacagccccgggcccctctacacgtttcgcctgcttactcccactacttcgacctctgccccacatgttcttgcagcggccgcctcttctgcgacttggcatcgtcgtctcggccaccccgggcgtgatgtgatgtccaagctctccagtagtacttctgtttctggttgtaggggatcttttgagcacctccgtcatgcttgtcagttaggttgccatgttaggctcccattccccacctcctcctctagagcagcagacatttttgatctgatacactgtgatgtatggacatcccctgtaattagcatttctggctataagtattatttactcattctcgatgacttctcgcattatttgtggacttttcctttacgtcagaagtcggacacttttcccaccctgtctcacttctttgcctgggtctgtactcagttcggtcgcaccatccggagcatccagtgtga

SEQ ID NO: 188806 - DNA, 422 bp, Zea Mays
gttcttcagtaaagtccttgtctcggaggtaggaaatggatatagtaccctcttctggtctgataactggttgtagggtaaaagcatctcgaccattgcccctagactattctctataatcccaaagaagatagcaaaaagtaaaacagttcatgaggccttgttaaacagcagatggatatatgacattagaggtggtcttactgttggagttttggcagattacttaaagctctgggactgtctctctggaattgagttgcaccctctcattgaagacatacatatctttagtgtagccccagatggaaagtattcggcgaaagcagcttacaagggtctcttcttgggatcctgcacatttggccactataagagggtatggaaaacttgggctccatcaaaatgttgtttcttcctct

SEQ ID NO: 188807 - DNA, 293 bp, Zea Mays
ctcttgggatgttgtcttcgatgatgctcatcctttttattctcattcttctttcgatgcttcatcaacatccttgactaatcccctttctttttgttcttcccagatgttcgtgcttctactatacctgcctcacgattagaacagtccttgatggagtccttatcttcttcaattgtgccttcttcagtggtacctcccttcccttggtgtcttctttagagtctccttccttggtttctgactagactaggaagcctccggtgacacatgtctactctcaacgggtcgta

SEQ ID NO: 188808 - DNA, 598 bp, Zea Mays
ctgagtacaggggaggtccaaagatcacagtgaaccaggtcaaaagcctgctcagcccgagaagaggaagtagtaaatgggagacgagtgtgtcggcctaactgacaagcatgacagaggccctcaaaatgtcccctactacatgaaggatctagactactggtaatcttggtcaagacgtcgggtccaggatggccgagacgacgatgccaagtggtggaggaggtggtggagaccaggacgggaggtggagacacgccggcggtggagggctggagcgtgtagagcggtcccgagatgtcacagcgggcgagaggggtcctggtggccagatccttcacagaaaaaccagaggggtcaaactcaatggaacaggagttgtcagtggtgaaacgacggacggaaaggagattgtgagtgatgtggggagctacgagaacatcgttgaggtaaaacggcccagggagaaccgaggcacctactgaggtgactggcagagtggaaccgtttccaacgacgatcgaggatgggtgagaggaaaggggggaatgagagcgggagagcatgcctgcagtgggagtggtatggtaggaggcac

SEQ ID NO: 188809 - DNA, 543 bp, Zea Mays
gtgatgctggccgtgtgaaggatgcacgccagctgttcgatgaaatggcttcagcgccagatgttgtcacgtatgggattctaatccatggacactgtgctcttggtgagctggagaatgcagtgaagctgttggatgaaatggtggcaggaggggtggagccaaatgcaactgtttatactagcgtcgttgcattattgtgtgacaaagggtggatttcagatgctttgagagttgtggaggatatggtccagcgaaaggtgatattggatgaggctctgtatacgactgtcttgagtggtttttgtaataaaggggatttggtatctgcaagaaggtggtttgatgagatgcaaagaaaaggtttggcaactgatggggtgacctacacaacgatgatcaatgggctttgtcgggctgttgagctggaagaggcagagaaattgcttcaggaaatgtgggccaggcggttggatgttgatgaagtaacatacacagtgctcattgatgggtactgcaagagagggaagatggcggaggcct

SEQ ID NO: 188810 - DNA, 423 bp, Zea Mays
actctgtctagggttatgcttttcataattatcacccttacccttatcacctctatatcttaccttgatgtttatcttataccggccctttaaaatctcctcttttcatctcaatactagcattgtactttacctatttttcccttggtcgtatcctcttccttgtcgcttgctagtttttaactccatcctttgttgtgctccggttgggtactacctttacctttctcatctctcgatcttaccttggtaattacactatgtatgttctctaaaatctccaatatcctatcatagtttaggagcgttgttttacttaccccaccgttggcaatatcctcttctttacggcgggtaagcctgggcgcaactccattctttgttgtactcataccactggctcttcaatgccttcatcttttc

SEQ ID NO: 188811 - DNA, 286 bp, Zea Mays
tgtggtcacgcatgatgtcctatagctcgacggtgatggtgccgtggagccacgagcgattcgctgtccatctggacccatgagtggggcgacggggtcgtcgaggacgtggtcggcgagggcgaagcgccgaagagtgagaaccacctgggtacgccaccgagggtagtgggaggacgccgagtccaaccactacgaacatgagggaccgtatgttgtgaaccccagcggcttgagcatgaaggatggtgtcggcgtcgagcccggaggcatgaggagactcggg

SEQ ID NO: 188812 - DNA, 340 bp, Zea Mays
ccatacctacgctgcaaaatctctgttgcgtaccgggcaacaggcgagagcacatggttggccacttggccttcgcccccatcgagggtgtcatcagcttttcggtgggctcggggcatgtcagcctccgcacgtccttgcctactttggcaatattatgttatcgaaacctcgaacacattattttatctcagcactagaatgtctagcggactttcggcatttttgcatcctttgctccaaacttatcttctataaactaaactttgaagctctacccactaaagctagtgaaagctattatagaattcagtactactactcatcagcctatttgtag

SEQ ID NO: 188813 - DNA, 369 bp, Zea Mays
gaagaagtgttgtgagccgctgatgtgcagatgaacggtttagattaaaacggggcgcactacttcggctaggcacgtggtggccatctgatcggtgatcgacgggtgggattaggactcggttattttaaatcacgaccgttgagactagatcggacggtccgaatcgtgtaccggttcgtatagggctcggtctaatctgcgccctcgactttggatcggacggccagatttggccagtacccccttcgcgatggccatttcaccaaagagcccctgtagtcgttaataattgaacccgcaatccatctggtgggtttcctgtgtctcggtaacacttgcactgagacccctgacctttctggaaat

SEQ ID NO: 188814 - DNA, 527 bp, Zea Mays
gtcgatttcatcgcttatgctcagacacagtttgccaccacacccaaatcatttcaagccgataatgggactgagtttgttaacactgccaccacctcatacctcgccagttgtggcatcttgctgcgcctctcgtgtccctacacctcaccacaaaatggcaaagctgaacgcatgcttcgcacaacaaacaacaccatccgcaccatgctcctccatgcgttcatgccgccatcctactgggctgaggccctcgccactgccacttttctcctgaataggcgtccttcctcctccatccaaaaccagataccttaccaactcctccacaaacgcctcctggactactcctcacttcgcattttcggatgcctttgctatccgaatctcaccgccacctctccccacaaactcgccccacgatcagcaccctgcgtcttcttaggctatccctcctcccacaagggatatcgctgccttgacatgtccacccgtcgcattatcatctctcgccatgtaatatttga

SEQ ID NO: 188815 - DNA, 332 bp, Zea Mays
gttccagtgtggaaggtgctcagctagtttttttgtgggcttgatgttgacacttacgccaccaagtttgttgtccattgtatatctcatggctagcctataggaaaggaacaggagtttgggttcgttcacagtaggatcactatcttgctttcgtttttattgctgcatgctaccaacccttttcttttcagtttctgatagaagtgctgtccgcccgcctatgtcctagtgttaaaacatggtctgtcgtatgataacttagaattctgtttcactgttcttctgtgatgctcaggctatccgcagtggtttcccctaaatttatcccc

SEQ ID NO: 188816 - DNA, 532 bp, Zea Mays
gagatgtcatccttattgttgcaatattgcaaggccgtggaccgcaagatatggccccatcttcatccacttaggcagtttgataaggatctttctcctcaggtttgctgtcaattatcattacttgtgtttcccttgtttttgaaatgtaatccttcctctttgaattaggtattgtggaaactcgaggaaagaaatgttgatctggatcatctttatgagatggaggaaaatgaaattggagctctgatccggttttctcatcagggaaaggtatgccttggcttaacaggtgttttttaattgttcaatatttttttctacttgttactaatgtgattaacatcctcttggtgaagttggtcaagcaatacgttggatacttcccgtatgtcaacctatctgcaaccgtgagcccaatcactaggacagttcttaaagtaagagtttgttccagttaagtattgtgtgccaattagaattttctatgatatgctcttatgcaaccacttattgtatttctgtaggtgga

SEQ ID NO: 188817 - DNA, 316 bp, Zea Mays
gtgctgggcgtaggcggcgaagggcggtggcgaagcggagagttagtgaggtgtcgcggagtgatgggcgtcattgtggtgaggtggagggtggtcgtcttcgtgtggacggggctggcaaacgggaattgttgtcctcgccggctggggcgagtgtaggagagggggagctgtggaatctttttgtgggtgaggagctgaggataatgctgtttaactacagggagatgggtatcatcccgaaggttgaaccaatgtaaggtgtgatgccctcgctgcatgtatgtaactataatttgtatgatgaggttgtgtg

SEQ ID NO: 188818 - DNA, 285 bp, Zea Mays
gagagtttgtttagaaagataaggagtcattttagataaggacgactgctaagcctataaatgtacccttcaatcaatgaaagatcaagcaagcattaaccttgctcggcttcccctttcccctgtgttcactgttcacccagtgggtactgttcacgctgctctccttccgctgccctaaccctaggacgacggcgcccaaacgccatggcctcgagcctcgaccttcaccgcaccactcataccacctcagaagccgcagttccaatagaggaggaataaatt

SEQ ID NO: 188819 - DNA, 407 bp, Zea Mays
gagaaaaccagatgattcaatatcagctaagcggggacgcctgcaccagcaagttactgaagaaaatgcaacacacttcctttcagatgttccagcagtaacacaccttgaaggtgaacgtcctagtgcaaatgtgcgcacaaataaaagcacaaggacttcggagcaaccggtttcaaataacttgggaaatcacaaagaaccggatgattcagttgaagaaattgccataaactatgttgagacgggagagttatataaccgaaagactacaattgtcgacactgatttcgtctctatgatcgctgttgtgattgctgaggatcctgaaccaaagtccatgacagagtgccagaagcgctcagattgggtccaatggaaagaagcattagagacggaattgctct

SEQ ID NO: 188820 - DNA, 365 bp, Zea Mays
gcaccaccctgacgagcatgacaaaggtgaagtagcgcggccgctgtatctactgtgctctggtggcaatgtaactgctgaccatctggttggggactatggtttcactagaggctgaccacatgagagtgttgaccaggatcattgtagcaaggaaggaggaagccatggtgtaaatgggcaagcaaggtatggctatctattgctccctgagtctctagcaggttgttttgttaccagattgtggtctccctgggttgggatgtggttggtacaactcttgcacgcttatttcatgtgtgaactactgcttttcatgttatcatcatatctagtattcagtgaattctccacgttgatagcac

SEQ ID NO: 188821 - DNA, 506 bp, Zea Mays
agcagatgaacaccctacacttgaatgaacggagtatatgtttctaaacactaattgaaagcatgactgcccaaattaaaaacagaacccttttttaattgaaagcataatagtttgttcctttacgcataaagcagaactgtatgaagtgcttgtttttcagtcataactttacatgaatttcctaaaattgagtacatttgttcaggaatgaactgaaaacagaaaaaggcatacaatctaccacatggtcagtttgttcagtttacaacattcatgttttatggttattggaaaagaggtggtctgttctgtctgcgtaagggaactattctatttttatttagggtttagtaaactgaacaaactaactcaattttaggaatggtatgggactactgctgtataagacaaacgttttgtctgtttgcagaccacctcttttccaataaccagaaaacagtaccaaacagtacccctattaaagagttttatcgtaccacatg

SEQ ID NO: 188822 - DNA, 961 bp, Zea Mays
cacaaattctctgacccgtcgtaaggcctgtggactgtagaaggatgctctccatcgatgtacagtcttctcaatgccctcgtgaccacaattgtgtgctgctgccaggatttctgtccaaactgctgaagcgtccgggatgaagaccttcccttgaaatagtagcagaccatcagcttccgtccatcctgattttgcagttcccgctgtaatggcagcccgcaagcttaagacctgtgggtcggtggcagcttcattgcgaagggtgtcaaatagctgaaaatgtggtgccgagatgctgttaatttctgtggtgtcttcgtcgcgtcgagacaaggcatctgctgcaccattcaatttgcccggcctatactccactgacagttcatatccaaacaatttgctgacccatgtatgttgcggtattgtagacaaccgttgatccaggaggaatttaaggctatagtgatctgtccgtaccataaaagttcttccccataaatatggtctccaattcctcactgctttgactaaaccaatcaattcccgctcatacgctggtaatttctgatggtgtggtgctacaacacggctgaaatatgcaatggccccatctccttgatgaaggactgctccaaatccagtccctgatgcatcacaatccaccataaactgtttagaaaaatccggcatctgtaacagtggtgctgatataagggcttgcttgagttgaagaaatgcctcctctgccctttccgaccaacagaacgcctcacgcttgagaagagccgtgaggggtgcagctatggtcccataattcgctataaacttgcggtaatatccagtgagacccaagaaacctcgaagtgcccgaatagaccgagggcgcggccaaacttctactgctgccaccttatccaaatccatagaaacgccctgagctgagataacataacccaag

SEQ ID NO: 188823 - DNA, 400 bp, Zea Mays
acgatcggctaggagcggtaactctggcatttgggctcaatgggcggaccgatctcatcggagttgtacttcacttggacgtgtcgtgtggagggcaagggagcaaatggggaagagatgaattagggcagctgaaggagatacacatattttttgcggtggattcgctattgttcatgcctgaggatttggcacaattctaatcaggggggaaacgattcaatgtgcagagttgggagcagatagaaacagagtaattgtgccaataggggtcagctttgcaaccttcgttttgcgttggagcgcgtggcatggagcgaaatttgaaaattccagcatcggaggtggctggcgagactgcagaacatcgccactgacaggttcgccattgttgcagaaa

SEQ ID NO: 188824 - DNA, 565 bp, Zea Mays
aggtggttctgtgttagagaagattgtagcacatccaaacttcttcatccttgcaacgatgaaccctggtggtgactatggaaaaaaagagctttctcctgcattaagaaatcgatttactgaaatttgggttcctgctgttattgatgttgatgaacttaggagcataacttttgggaggttcaccaaaactgacttctcttgccttggagattgcattgttaacttctggaagtggttcaaccaattgcacatcgggagaacattgacgatacgggacctgctgtcatggatttcatttataaacgtgactgaacaaaatcttgggcccgagcaagctttgatacatggcctgtttcttattttgcttgatgggctctcattaggtctaaatgtttctaaaactgaggctactgagatgaggaatacttgcttgtccttccttctagaagaattgcagaaagttgggggcacggcagtagattcatacttgaatgatctaaataattatggctggggtgacaatatgaaaaaaaaagatatagatcatggttgtttggaagat

SEQ ID NO: 188825 - DNA, 553 bp, Zea Mays
gcgaggcctctcgccgtgcccagtgcgatcttgtatctctggctccagccaagcaggctttcggcgcttctctcgccaaagaggtacttgtccagcgactcattctccacgtactcgtacaccaacagcctcttggtcccctccgagcagaacccccacatcctgaccaggtttatgtggttgatccttccaatcagggtcacttctgcccagaactcctcctctccctgacgaacatccgtaagcttcttcaccgccactaccttcttgtcctcaagcactcccctgtagacgaccccggcgcctcctctcccgagctcttctttgaacttcccagtggcttccgccagctcacggtacgtgaaccgcctgaacgggtttgtgaccagcttgtacccgtcctccatcgatttgggtatgctgtgcttgttgaagaacaggtaccagcctgtcgcgatgacaagcatctccagagctcccagcactgcagcgaagacgtacaggtatgtccagttgatgttgtccttctttgttccgtacatgctcgccggtc

SEQ ID NO: 188826 - DNA, 272 bp, Zea Mays
attttctaaagtctcctaggaatgcggctcaggagagctggtgcaatataacaacagactgaccatgtatccaacgatcagtctatccatgagaggggaaaaatggcagacgacaaggataggcacgtgaccatagagagagaatcactttaaatgctggttttgacggttgttctatgcacaaacagtagctaatctagaacttttactgtaatcctaggacctttccttttggtaaaacacacaagtaaatctttagcgtccttttagtt

SEQ ID NO: 188827 - DNA, 293 bp, Zea Mays
atatgttgttcccgctctattgtcacgactagtcctgatgcagatacttgtactaacaatattgagtcacctgttgtttttaatcagggatattgtcttcgagaccgtggaaacattgaacctccagatcactatggttttccacaggctgctacagtaattgttgaaccatcttcttatcattgaggcttctagtatccctgagtggcagcttgctatgcttgaggaattgtctgctcttgaacgcacgggcacgtgggatattgttcctttaccatctaatgttgtacccg

SEQ ID NO: 188828 - DNA, 439 bp, Zea Mays
gtggcttgcggccagattcaatactccattgatgcggattgaagaacagcgttacccacacgaagaaacagtcgcggcggccattaatggagatggagcacggtggaagaaacggtcggcacaagtgggagagagaaggcaagtcacagcgcagcgcggatgcgaggggagaagtcgcggcggtgtggttctgcgcgggatccccggcaggcgacgccggcttctgttcgtagagtcaacaggagaagaaagagccacaaggaagaaatgcagagtggggcccatcggtcaatgacacaaaagaaaaaaatagaagggtgagcgtcggcgttgggcattgggctggaatggccaagtgctcgagcgtgcagagtagttaggtttttcagtttttttatttttaatttcgaatttatttctttctttttttagataaaag

SEQ ID NO: 188829 - DNA, 572 bp, Zea Mays
cccgtatcacataggcctcctcaacccttccagccatgcaaagcataccaatgatgatgttatatgtagaggaatttggctctgcatcctttttcattgcctcaaacaagatcagtgcttgatcaacttcacacttcttcccaaggcaagtgagaatcgaattaaatgacacaacagatggaatacaacccctatcctttaactgatcaagaagcttataggcattctcaaactggcctgctgacccataacccatgatcattgtattatacgcatacgcacaaggcacagctctttctgtctccatctgaccaaacagctcctcagcctcacttagcttccctgccttgcacaacacccaaatcatgctcgtgtacgatacatcatctggcttgaacccttgcgacttcaactcatggaagaacttccaggccatgtccacattcccagccttcccgaaacaatcaatacacacattgtacagcacaatgtcaggctcgaggcagttccccttcacctcgtccactagtgccagggctccctcaacgcgcccctcacgggccaaagcccgc

SEQ ID NO: 188830 - DNA, 281 bp, Zea Mays
gacggatacggattaactacaccattggtcaaaaaatgtcacatgctgcagcttccaaacttgcaagttgcttcactcggtgtgtgaatggtaaatatcaagctctatcagtaaagtaacaccccaaccaaatacataagttagaagtcacatcaccattgctaatatttgggcaattattggcataaagtgctaacctcagtatctatccggtacattaatactcccattcatatgcaacacttgtcttctttccaacacaaggccacattataacgtgt

SEQ ID NO: 188831 - DNA, 297 bp, Zea Mays
cccatttccattacacatatagcgaaataagtcagttactctgatagttcagagaaatgaaatgagaaaaaaaggagataacagaacatgaacctaacagccccctttcatctattgcaatctgattcaggcgtcatagctagacagagaacgactgaccacagagcactacacggctacacgcattcaggtttacagataaacaaagaacgacaccagacccagtacaacagcatcttcaggtgcatctgtcagattcctggtcatcatcaccttggtgatccatatccctcagct

SEQ ID NO: 188832 - DNA, 929 bp, Zea Mays
attgattgggtgttttctataaaccttagatgatccttgtctatatattgtacaccacttgtacctatataatcaagctactataccccaagccatatctcctttcatggtatcacgagtccatgtttcaccttggcttccccctcttccgctgccctagcacactggccctccaccatgctgcgtttacgcggcggcctcctctgtcgtgccatggctactctcctccccaccccttggcaccatgttccccacgccaccacagtcgtcgaagggcaacacaataagacggatgacaatggcgtgttagattgggttcaggctgcctgtgttttcaagtcatccgattaatcgcgattagttggctgatcggttttgggtggccgatctgggcaggtgacccgattaggacacctgatcgccctggtcgttcgagtcgccgactagctatgattagtcgctcgatcaagagatcatgactgaccagggtccggcgcgcctcaaattttcatgggcttttttctggcgggcggcccagctgcaaggaggtgaaacgccccatagaaccttccctgacgcctgacagaatgtttccaaaacatctcgattcccgtcgtctcaatctcttcccttttgcttctcgttgttctcattccacctctccacggcaaaccggcgcgcggctgccacttgatcgccggcgtctccagttcaccggcgcgtggcttcatcctgatcgttggcggctccagttcaccggtgcacagcgggtctagttcacatgcgcgtgcatgagttcatcgtctggaggttggtctgaagtctgaaccctgatattatctgtccatcttgtttttcaaaacctctgttcattacctgtccatggtctgaaattctctgaagtctgaaccctgatattatctgtccat

SEQ ID NO: 188833 - DNA, 419 bp, Zea Mays
ctcttcttcgctgaattgcatacaaacttgcacaataatctagttagggtgcataggtcatgaaaacaacctccttcaaaaactccaccacatagactgaccaggttgcatgacgccaaccttattgcccttaatcacaactaatttaactagtagagtggctaagtaaccttaccaacaatccaaagtcgttggcaaccttaccagcaatccttggtcgaaggcggctacttggagtccttgcgtgaaggcggctacttagagtccttgggagaaggcaaggatggcgaatgcgctatagaagatcgacgaggcagggaaggctccgggtgagaaatggatgcaggaacacaaccatgccgcacaggagtggcaacgacgttgatggagaggtgacgctttaggtgcggcgtaggtgt

SEQ ID NO: 188834 - DNA, 317 bp, Zea Mays
ttgcaaaccatctccacggtcactaattgctcgtcgggacgcgatgaacacgtacgtccccgacacaacgcgcccaaggacgaaatgaatatcaatctcaacatgcttcgtgtgtgggtgctggacagcgttgacggagaggtagacagcgctgacgttgtcacaaaagacaagtgtgctcctggtgagggtgttgtgaaggtcctagtagagctcgcacaaccagctcgcctcagccatcccgttggtgacggcctggtactcaaccttggcacaagagcagaaagatcatggaggacggccagatactcaaccag

SEQ ID NO: 188835 - DNA, 530 bp, Zea Mays
gggtcaaatctcagatgaggtatggaatgtcatccagtcaaatgaaactgatatacagggaactgtgaaagccgtctacaataggatactgaaccctgaaaaggtctctgagccttctcccaagaagctgaagcagagaggcaaagaggaacaagttctgcccacaaagacagcaactagcgttgcagtcgaggcggaagatgatgatccagaggagccaccaggatttggtttcaacaatacacagcgtaatgatattggagcaacaaagccacagatgagtttggaaaatggtaatgaagggaagccaaatggaggcgagccagctactatcagcaatccaggggatgaggaggaagatcctgaagtgccccctggatttggttaatggaattcactaacttcagtggaatgcagctgtttctttcttagcaatatatacaagaagggaaatgtttaatcttctgttgacaggaagagtaatgcaagctcatgtctgcgacagttgaaacccgtgtaatgatggttac

SEQ ID NO: 188836 - DNA, 310 bp, Zea Mays
ttttcttgcctgcaccaacgtcatctaaccagtcattagttggtgaaatcctccactcccctgcagaccacgtcagccttcaccttgccgtctccgttacgcgccgcgagcccgcgagcgtttggggagttttggagcggaggaggcaagggaggacggacagggaagtttggttgtggaaatggatgtggtggaatcctcgccgtcgtcgtcgccgatatcgtctccggccgggtcttcggagtccatagacctcaacttcctgccgttcctcaagagggagcccaagtcggagcccgcgtcaccagag

SEQ ID NO: 188837 - DNA, 295 bp, Zea Mays
aaaaaactgggttttggacagctctggtgtgatataatatgcgggctgttagcttcatcttctaccaaaattttactaaatggtctgccaggggaatgtattgggcatcaacgcggactgaggcagggtgatcctctatcgcctatgttgtttattcttgtaatggatgtcttgaatctgcttgtgcagcgagcctctgaggaagggtttcttcagcctctttcttctaggagtatgcagcaccgtttctcgttgtatgcggatgatgcagtgttatttctatgtcctactgccc

SEQ ID NO: 188838 - DNA, 296 bp, Zea Mays
gaacgatcgaacgacgaaggaccggcagccgcgccaagaaccagatgctgcaagaaaatacaggcgatgatcgaacgaagaagggggaggatgctttggacagatctgtttgtttgcttttccttgtgtccaaactaaacaagcgttgatgttgaatgaattactccatctgcgacgtgttgtatccctatgattatcattttaaatgtataaagttgtttacgattcctggaatccagttttatggaacatgctccaatgcgtttttttattattatcagaaactgcaatgactc

SEQ ID NO: 188839 - DNA, 650 bp, Zea Mays
actttattaagtgcactctaattcctccgaaatgaagggtccaacggccctttacacatgcatcaacattcaggagccttaacttatgagaataatttttaggtattaatgctatatctccagcacctcccatatccattacctatctcactcatatttcaaactccactgagtatatgcatatgcataatctactaaaaatagaatacaatgatggccaatatggtctaaaatttgaggcaccaatcaaggccgtgttcagttgcatgtgcattagagaagattgaagaaaattaaattcttttctattcaattttgactagcctcaaattctcttcaatccactcctaaccaccctaagagcttgtttgatttgagggtaattccaaaaagaattcgagtttaaaaactagtcctaatagaaatgcagaactcgcccattctaccgtttcaatctgtaaacactgtaatctacataataggtgcttatataatccataagctaggcctaaacccataatctatattacatttcagtaagggctagacatatagattattacaatccataagcccttaccagtatatagattatcataatctatatagctagcccttatcataatccatctatatatctaacccaaact

SEQ ID NO: 188840 - DNA, 698 bp, Zea Mays
gataaacattaaggtaagatatagaggtgataagggtaagggtgataattatgaaaagcataaccctggacagagttaaggcaagactcgcaaagtggcgaagtggagaaaacaatcaaggatcagataagtgaggttccgacagaagagttgaagtaaaaaaatcattaccgaaggaagttacaaggaattaacgagatcaccaaggatgtgcaaaataaaatggttgttcatggatcattaataaacaagggtggtcaagggcaggttaactgaaatgtcttaaatagacattggggtatgaagataatcatccataaaaaatatgagaatatgcaagactccaaggacatgagtacaacaagactaaggaaatgaaaattgccaaaagataacgacctaacaacagaagaggaaagggtctcaaaagatacgaagatcatggatatataaactgaaatgtttaagtatgcagtagaaattctgatgtaagcatttgaaacaagagtattgaagaatatagggatacaagcatgtcaataccaagggaatagagatggtcaaatggtagcaatttaatgatggaagagaaatgaatcccaaaagacaagaaggttatggtcaggggcatctacaaagatgtcgcaagcacaaggtgagatcagatctaatagattgagagaagtatagaccatact

SEQ ID NO: 188841 - DNA, 325 bp, Zea Mays
gctgcttgtacctaccaaggcctttccatcaccataattttgactcgatatgcttctaccaccgctacaacaaatgatagatctaactacattcagtacaaagcaaatcctttagcaaatttaaatatgaattcattaagattcacaaatgatatagtaaggaccatactggtattatctcttgcatgtggcaaatcttcattttttgtgtgcattagtggccaattctctgattgcatatgtccctaagattcatctatttgagaaactgatattttcacttttaagggatagccatagaacttgaggatgaacagattgatcg

SEQ ID NO: 188842 - DNA, 370 bp, Zea Mays
aaccaaaggtctggtggtaattcacagactcgtcaaggaagcatcgtaaacacacaggccaaaaacaacagcaacaccccagtccaacccaatggctatttcaagtgtggcgaacttggccactatgctaacaactgcccaaggcgcaaccaatagacaccctagaagaatagcagtcagagaactaactagaacacacctgctcgtggatctgcgaagaacaaaacgttgcagaaccagaatagaggaagggttaatcacgtgacagcagaatcagttcctgaggatgccgacgtggtgtatggtatgtttcttattaactccatacctgcttcagttttatttgactctggagcatctcattcattta

SEQ ID NO: 188843 - DNA, 460 bp, Zea Mays
cacaaaactagggatattaagtgtggattcttaatcttacgcacttttttctgtcagtgttattgtaaatttatatgctggtatatggtaacaccccccccccccccccccaaaaaaaaaaaaaactaaacacttattcctcatttgttcatgtttttagtggttttatcaacatatttgtattaactgttcgtgttgctttagtatttgcttagtagcattattgacttctctgctttatgatctgatagctgctttatttctttgctgcatcattttaccagtaccacatctgttcattatgtcgttatcctgtttctgaagctcaaccaaaaagcttgctgcccaacaccacttggttacttgcaatgttaatgggcatggagcggcccatgctgacaatggtatcaaaattgcggctcaagcccatgacaaggaagtcaagccttctattgtccga

SEQ ID NO: 188844 - DNA, 843 bp, Zea Mays
tgatgtgaaagatcggaaagtggtcctattcctgaatgattgctcttgcgcaaaaaaattctgcaaggaaagggctgcacttgcagtacaaagttgtcttaagagagtcacacttggggattgtgctactgatatctgcattgagtaagttaccataaatgaagtccttaaacatcactgccaccttgcccctttttttgtggattgctctgagatgctgtcttatggcggctagtaaaagccagttaaccagtttttctgaagataaactcgattctcgtttctatttgattgtttaatggtcatatcatatatccatgttccatgaaattagatgcttattcttccatgtttgagtaatcagcatttttgagctaccctatcctccgattttcctgtcagattgtgcaatgctatgcaagttggcagattagtttagcacttgcttgtttacataagcaattgggtcagacatggctacttactgaagcagcattgttatgagaaaacttagcaagctttctaatcaaagtggttaaaatgcatggtctgatcattcttaaagtgagaatagatgtaggatgctcttgtggtgcagattctgtgcttatttctttggggttaaccataaatatgttgcttgcattttcaggcatcagaagcaaataaatttagatggaacatctgaagctgccccaactcttgtaggacatattcaccttgacaaggtatactgatatatgatttatactgaatttttttgcataaactgtttctgtaaaaaaagtatgcatgatttttttgcaggggcatttagaaaggataaacattagtactcaagac

SEQ ID NO: 188845 - DNA, 598 bp, Zea Mays
ctgctttcatgacattgaaagataactatttccatttgttgttctgtatgtgtcatcatagatgaaattaatatttgtgtctgtttctttcttacatgcttttcaatacctcttattgttgtttacacctaaccttttttgtaatctgtgtgaagggaattatgtcataaactatcttggcacaagggggcctaaattgcagaactttgtcattgtgtccttaattcagctggtctgtcgaattacaaaatttggatggtttgatgatgacagattcagagagactgtcaaggaagcgactgattttttaggtcttgtaagtatgtcttgcatgctttatgtgttgagataggaattctgtgattgtttgccacgtatttaagaattttgttatcacataagaccttgccagtttgatgactgaaacatgtttttgaaattaattaaacatcacaatgtagctatttgcaccgaataaatctccacacaccgttcctgtttttatacacacttatccaatgagttgtttgaactttttaaccttttgaacatagagaaatgtaacttgtaaggaaaatacatactgtttgttgccacc

SEQ ID NO: 188846 - DNA, 430 bp, Zea Mays
ttcttcgccactttgatgcaattgggaatgcatcctcaaacgaaggtccacagtctgagcaatctgggattgcatcgaacattgaatctgtcattaagcagtacattggacaacgttgggttgctaaggattcgctgccaggaaaagatgtaaatgggagctcagtaagtttggattccttactttaatgagatctaatgatataagaccttctatatatcacatttcttattattaactcacctttttgcagtacctcgtggagcctgaatgtgtaagctctcttcaaatcatactagttgcaactgcggacagttctgaaggaatgcaacagtcaattagaagatgcttccgctatgagatcgacatgaagactatgaatgaagaacagagaaacaaactgatatctgagacacttcaaggcattcct

SEQ ID NO: 188847 - DNA, 417 bp, Zea Mays
atgagcaaaagggaagcacaaaatcaaaacggaattgcaggcgtggcaataatacagctgctgagaaagtttgcaaatcaacaacagtgtcacgtccaacttctccatcgaaagaagtttctcgctgccaaagtttttcggctgataggctgcatgcccagccacttcctattcctggagtacgccctcgagtaactcgtgcagttgctgatgtcaatgtttcaaagcccatattggaaaaacgtggcaaacctccactgcttttgccacttcctaaacccaatccacttcaccggggacctggaagcagtgatattccttcagaaatagtggttgcttctgtctctagcaattgttctgctgatagtgaggatcgtgcagattctcagcttcagagccctgttgggaatgatacta

SEQ ID NO: 188848 - DNA, 366 bp, Zea Mays
gtggccacgctctctgcctgtgcgcaggctggcgctttggacttgggacgtcaggtggacaagctcattgtttctgagaggatggagatgaatgtggttcttggtgctgcacttgtgaacatgtatgccaggtgtgggcttgtgaacaaggctcgtgagtggttcaatatgctccaggaacgcaatgtggttacgtggacctccatgattgcaggatatggcatgcacggacatggcggcgaggcagtcaagctattcaatttgatgagacagcaagggccaccacccaatgatgtcacttttgttgcggtgctgtctgcgtgcgcacatgctggattggtaagcgagggccgggatgcttttgct

SEQ ID NO: 188849 - DNA, 385 bp, Zea Mays
agcaggcttcatgacgggactaaacgtctcatcatagtcaacaccaggacgttgtgtaaaccatcgaagaacccagtgggctttgcaccaatccaaagagtcattgactttcccttataggtccagactcacttgccagtcaccacattgccgcctaggggaaggggcaccaaattctaggtttgattggcaaggagggcatggtactcttcctccataacacaacgtcaatgacgatcgacaagggcgctatggacgaaagacgacataggagagatcgaaggtgaggcagtcgtggagagtatgaggtgatcaacagggtgaaggaccccgtggtctggcgactcaccatcaagtgtatgtgccgagggttgcaatgaagaag

SEQ ID NO: 188850 - DNA, 505 bp, Zea Mays
cttgatgaccgacttaatcctatgggggaatcagctttctggtgttattcctccagagataggaaactgtacaagtctgagcacaattgccctctatgacaataatctagttggccccattcctgcaacaattgtgaaaattacgaatcttcagaagctatacctttacaggaattcattaaatggtacaattccatctgacattgggaatctttctcttgcaaaagagatcgacttttcagagaatttcttaactggagggataccaaaggagctggccgacatcccaggcttgaatttactctacctcttccagaaccagcttacaggccctattcctacagagttgtgtgggttgaaaaacttgagtaaacttgatctgtcgatcaattcactgaatggcacgattccagttggatttcagtacatgagaaatctaatccaactgcaactcttcaacaatatgctttctggcaacatacctccaaggtttggcatttatagc

SEQ ID NO: 188851 - DNA, 284 bp, Zea Mays
gtaccggacgacactccaaagtcagatcctgttgcaccacaattggttccatctcaatctgatggtccgaatcccgcaagaacttcctcagcatagagacatgaaaaactgggtgtacccctgccatggaatccggcaattgcaagcgataagccaagctgcccacccgggccaagatagtgaacggtccaacatatctcgggctaagctttccggagacaccgaaccgaacaactcctttagtgggtgataccctgagaaggacttggtcacccactgcaaat

SEQ ID NO: 188852 - DNA, 465 bp, Zea Mays
ctggttgcatagtctttggtatcgcagtgacattgtatattgcttcccatccacaagtttccagggccactgttttcactgtatctgttgctgctgctcattgcctgttctcgcttctccgcccgtgcagctgctatttgtttatcgcctttgctcagaagccttcaaattgccaccaccagcaaccacaatgtgccctcctgatcccaacaaattggatgacgcctctgcgtggtttccttctgctccactgcctcaactttgtttgtttcctgcatcaattgctcgcaccaactgtcaaattgctgccacccctaccctctaagtccctctgctactgattcccctgcagctgatctctgcgaaaattgtcctcagccatccttcacgacctattctcacagcagttgtcctcctatacattagctgtactcgtcctccatttttaacggtgtgccacctgcc

SEQ ID NO: 188853 - DNA, 469 bp, Zea Mays
aaaataaataatttgctagacagtacaagtcatataacacctaataggtcagttagcatttcatccaaaatttgcgatatttctcttgcaagcttggatttaataatttaccataactgaatctcaacttggcgcaacagaggcagatctcggcgcagcaggggcattagcagtataattatttcccggtatgaagatgaccttccgtcgtctagctgctcagactgcaacacatctgtctgtggtccagttccaaggcgtgaccaggagactgctctactcaccttaaaagaccggcttcgtgagcttgggcagcgactacatgaggtgaatcagctgttctcaaaaagtattggacactatttataattatggtttaattattattgaatgttcactctaatttaggacagatctgtcttgctcgagctcactgtttaagtttattttagctttgtcacaattttat

SEQ ID NO: 188854 - DNA, 276 bp, Zea Mays
gagttcttgtggagagggcgtaaagaggctaatggtggtcattgtatggtggcctggggcaaggtaacacgccccaaagagttagggggacttggtatctctgatcttcaatgcttaaatagggcccttcgtgttcgatggatttggctccaaaaaactgattcttccaaaccttggactgatttgccattccattcaaaccggttcttggatagcttgtgctctttggcaatggcctccatagtgggtgatgggcagtccactcttttttggcat

SEQ ID NO: 188855 - DNA, 466 bp, Zea Mays
tgcttgaaagatgtttcactaagtactagggattcagtggattggtgtgtaaatcctaggttgtgcctaatttgttggtgatggatctctgtagatagtgtgtccgagtcatacttttatcactagacacattcattttcctgacaagctgctttcctgttataggttgaagttggcaagcaattccatagttgttgcgtcattgtaaaaaatattcaaagatgcatatatgctattccaaaccggtcagtgtttccaatggactccatatcagggatagaaagaaaccccactgctgaccttttgccatcacttcgagcaactctacatgtgagaatgattttgtttttatgcttagcacatagcactgcaatgaaatatgcataacacattctctattaccaggagttggcatcaggattaaagagtgaaatagctgacaaattgtcagacctcaatgtgtcaa

SEQ ID NO: 188856 - DNA, 638 bp, Zea Mays
gaattactgagcagcaaatagctcttgaagaagctgctgcaagaggtagagaacatctatcatgggaagaagcagaggagctagcttcacaggaggaaatctgtagggctcaattggaacaattacatgaaacatggagacagaaagatatgcgtattttgtcacttatgaaagtagaagacaatatcatgaattcgctgctttcttctaaacagtatgtttcatctttggtggaccatgatcaggaaagtgagtttcattatggacaaattaaggccctcctttcaatcttcgcaaagccctttgctgacctggaatcgctggaccatatgctatcatcatctggcatgtttcctcacatagacaatcccatttccaatattaaagatgctttgtctttgggctcttcattgtctgacgtggtgtggcctttagctggcatattgaaggatcatgctttttttgtttgggaactcaatcttcttgattcggttcttgttttatgcatgcgtgagatttcatcttctcttgagcatggcattaatgccaatcaactttacatgactcttaaaaagaagcttgcgatctatgtggaaaaacaagttttccggtatgttacagaaaggattgctcctgcg

SEQ ID NO: 188857 - DNA, 347 bp, Zea Mays
agcagatcaaagccagcgagcggccattgttcgtttccattgcatgcacaatgtggaatgggtgggccatccatcatagattcatatagtataccattcatttacattacatccgggagctagcacaaggaaacacgtacgttgagaacattgtctgattcatgtacactgctgcactactatacatacaacaacatatcatatatggtcatggcaaaaaaatccttcgtcggttcggttacgaggccaccacttattttgcacacagacacaccatggacgcatgcgcttctgttctgttctgttcactagtagctcactctcactgcagttgtttcctttttttc

SEQ ID NO: 188858 - DNA, 551 bp, Zea Mays
ggaaaaggaactacaaaggtttctttgttctaatggcttctgcagttatcctggtaagtgtggatctcttgacaaatgacaaactgacacaaatcggaatgtaaagaggtcccctctgttattgcatttacctttaacatctgtaccaagtggagcaatgcatatagttagcaatgttgttctgcatccttcctattatggtatcatggtaggttcttgacaggtctccatggtttgtacaacttgatccagcttgtgatgcagtggttgtcggggggacttgtgttgattctctgtattgtgaagcgaggagaattctccaggcaggttgtcacaaagttgggaagcagcttctcaacagtggcttttgtaattgttgtggtgagttgaacaattttttcttcctttacttactgaatatgtgtccgcttcattgaagttcatatattttttggtaaactaaaacaatgctctttgaaaaaggttacaagattggatgttctaattttttgcaggcaacttgcaccattttagcaatggttgcaaccgta

SEQ ID NO: 188859 - DNA, 343 bp, Zea Mays
gcatgtttctggggctacaagttgccatttggtttgtataattcttgcttgaccatgttaaatctacggtgcctgggaatcgtgtttgaccttgatgagacattggttgtcgccaatacatcacggtctttcgaggacagaattgatgcacttcaaagaaagctgagcaatgagactgatccacagcgtagaaatggtatgctatcagagatcaagaggtaccaagatgataaatccatcttaaagcaatatatagaaggtgatcaggtctatgatgacggtaaagtgtataaagcacaacctgagattgttccaccattgtctgataaccagcaaacaatga

SEQ ID NO: 188860 - DNA, 383 bp, Zea Mays
gaaaaagcgtagcacagaggggctctagttgctatagcggcactatagcctgctgttttcaatattgattctatgcagtggaggaaaaaacttctacttagttggtgacctagattacactgctttttcatgacattctttacccaaattaatctttccatcataccctctttgtcgcaaaatgttggccctatggttttatctatcctgtttcgacatacaaggcatgagatccttttttccctttccccacttgtttaaactcactctatctaagacatctctgagttaattttacattccgctttatcattcctcgccctagacaaatatgccttatgaatagaaatggatggagcacttattgaaaaattcaaaaaaag

SEQ ID NO: 188861 - DNA, 340 bp, Zea Mays
acagtggcggaagtttcggttgaccttgtgccctgactgagtccctgactgaccctgatgcgcacaaccaaccaagaggaaatggaggcgacacagaagcacttgtctggtcaaagcctcaagcgtgcgttagcagacagtggcagcggcagcgagcgggaccgcgtcaccgcgcagccgcaagagtgcttctcgcgggcgaaaccaagcaggggagacggacgtgtgagtgactcggtgagtgcttctcgcttttctcagtgtgttcactcggtccgcaccgcaccagcgtcgtcgctacgaaaaggaacggaagccggcccctgtttcgtttcgtcgc

SEQ ID NO: 188862 - DNA, 628 bp, Zea Mays
ttaaaggtctcaacaagcagttcgagcacatgaagaccttcatcgggcgcaccacgtcgttcccactatttcaggccatccgcaacaaccttctactcgaggagctcgccatggctgaggaggcctctaccttggcttctaatgccttccatgccacctcgatgctagcacaacagcaatagtctggcgccacctccacccctgttgcgtcgaagtagccacaacagcatcttggaggctcctccagctctagcagacgccattgtcaccacaatgtcaatggtggtaatggtggtggcagctagagaggcacaccctggccatcaatctacaacccctagaccagacggatcaccatgtggcatgtaccgaccctgggtgcacggcaacagcatcacgaataacagcagcagcgtggacagcatcaacaacagccttatacatagcaggcgttgttggttgacgctactgccccatatggcctacctcctagcttgatttgtacgccttcactgcctccagcgccgaccatatagtagctcccccacactccacaataggtcacatcgtcgcctggctgccgcccttgactagtccttgggatcagcaatctttgtttagcacagtg

SEQ ID NO: 188863 - DNA, 531 bp, Zea Mays
gcttgaacaaggagcccaaccttatagcagattcgctgctcacatctcttaatttatcttgaatgccatgagtttctctgacatggggatatgtcagctccaaggaaaatggtgcacgtgagggagcaggaagacgtccgattggcggtgagaatcagaaacagctgaagaaagaagtgttgggccgccgtgtgcctaggcccagtgggcgatatccatcggacaagtggtccgtgtaagagtgcaataaggaatacttaaactaagactggctacagtgaacgctaggaaatgagaaaatactattgctctccttccatctcctacctctggttctcctctgtaccgtagctgtagtaggctgttaacaattggtatcggctagggtttcctcgatctggcgtactacacacgcagcaagcagatggcggccgcctctgagtccagcatctcggcggcattggaagctcagtccaaatccatggcgacccaatcgcgtctcctccaacagatcgctgagcggctcgacgc

SEQ ID NO: 188864 - DNA, 312 bp, Zea Mays
cttatgtgtggtaactttggctgtatagcttatgtagtctccaacaggcatggttcttgtgtagtcgtgtacacatacctgatagcaatggaatgttcgcagatgtaggtacatctctttgcctttttaagatgatctgagcgcataagactaaactccagctgcctttctcatctcttcactacagccatcttctccagttgtaccattgccatctctggcagtgttgccagtgtctccttaccaaccacatcatgtcccatctaccatgttggatcgatggcttttttctgacacctctgctgtagagtc

SEQ ID NO: 188865 - DNA, 395 bp, Zea Mays
caaagatagtggacattttcagaatgtgcgaggatttagagaacatagatgatcttcacatgattttcaaattggtcaagggaataagtaagtacatgcatgtattacaagtgcacttgtgtttttacactcgtactgattattaattttcattttgcagtattgttgaacagtccatcgatctttgacaagattttctctgatgagtttattcttgacataataggtgcccttgaatgtatgctatcttcattgtttccccatgtttctcacataccttcattacagcatgcaatcatgtgatctgattatagctgcaatgggtcgtccaaggttgctggtttcttattttaactagatgtactctgtacagatgatccagaggttccaagagt

SEQ ID NO: 188866 - DNA, 756 bp, Zea Mays
atgagagagacaaccgctgtcctgaacctacatgcctaggatgttgcagttcagaacattcgaagtctagtccctgtcgtcctcgacctagccgtcaacaattacacccgatggtacgagtagttcctgttcaccatcgggaagttcttcctttaggaccttgtcctcctcgtcgatatgacgaccgactacctcgactggacgcggatggactatgttgtccgatagtggatctatagcacaatattcagtgacctcgtcgaaaccgtgatggagcccgacgctactgctcgctctgtctaggtttccatcgagtcccagttccttggcaactgcgagactagcgctcctcctcgatgccaaacattgttccactccagtatacaatattcctaacgtgtttgcaggctccgacccttcagtgtaaatcctttagcttttctcaaacttgcgggtgctctgcagtacttgatcttcactaggcatgacattgcctatgcagtacaataggtgtgcttccacattcatgatcctttggagcctggtctaacgttgaggcggagtgccgcgctttggccagtgtagtgaccgaggttacttggctacgacaacttcttctcgagctgcacgctcctctttgtcgcgctccgttagtgtactgcaacaacgtcaacaccatctacatatcctccaaccccgttcaatatcagcgcaccaagcacattgagatcgatcttcacttcgttcgggagcatg

SEQ ID NO: 188867 - DNA, 818 bp, Zea Mays
gtcattgtaagagatctctcaaatgaaagaagatccacttcctgcttctttggtatgttggtcgccattctgagctatttatttcctaactttgtacataattttttacaagttcttgtttgctggtagtttacaatcacatgaacttcatacatatacaacgacacacataaagtgggaaaaactttcgagcacccttttcttgaagttccatatgaaatttttttagtgaatgtaccacaaacatgctaactactctcactttgagcagattttgcttcaataaatgcactgaaacatagttaattaacacaatctagtaacaactcttaagagtatacacatttcattatactatcctaaggttttattttctgctgtgctaatccactcatctacttgggattgaataagtcgtttggatggtttataatctaggacaggataaagctgatcgggtgtcagtacgagcacttattgctttatttcttatcctttcatgggttgtgatcattgtccaatgcttcacgggttctgatatattgaggtggcgatcattttatgcaacacatgatatggcatggaaagctcattacagggaagtgttcgaccatggaatccgagaagctttgtgctgcctaggacgtgcaaaatatctgtaggtggcagtccaatgattttacaccttggaactccaatattagtttagttatttgagctgataattatatttactaatttagaactgtattggaagaagatgaggtttattctgttgcaagactccttggtgatttggttgcatatcgtgcttctgg

SEQ ID NO: 188868 - DNA, 3431 bp, Zea Mays
gcagccgcgtacgcaagacgggcttcgtcgaggtccgctcgttctggaacatttataggagcttcgacaggctgtgggtcatgctgcttctctacctgcaagctgcagcaatcgtggcgtgggagggcgccaagtggccgtgggatgatctgctctcttcccgtggctcagagtccaaggacacacaggtgcgcgtgctcaccgttttcatcacctgggctgcgctccggttcctccagtctctgctggacatcggcacacagttccgccgcgcatttagggatggccgaatgcttgctgtgcgcatggtgctcaaggccgttgttgcagccgcttgggttgttgcgttcgctgtcctatacatgagggtctggaaccagaggacagacaatgggcagtggtcgtcagcagctgattcacggatgaggagcttcctctatgcagctgcagcgtttgttatccctgaggtccttgccatcgtgctcttcattgtgccttgggtgcgaaacgcattggagaagacaaattggaagatctgttacgccctgacctggtggttccagagccgcagctttgttggccgaggactacgtgagggcacatttgacaatgtcaagtactccatcttttgggtgcttttgctcgccgtgaagtttgccttcagctattttctccaaatcaggccacttgtaaaacccacaaaagagatatacaatctgaatggaatccagtacacttggcatgagttctttggccaaagcaatcgttttgcggtgtttgtgctctggttaccagtggtgttgatctacctcatggatatccagatttggtatgctatattttcttctctgtcgggtgcatttgtggggctttttgcacatttgggagagatcagggacatgaaacagctgcgacttaggttccagttctttgcaagtgccatgtcattcaacatcatgccagaggagcagcaggtgaatgagagcttcttgcccagccgttttcgcaatttctggcagcgattacagctaaggtatggtttcagcagatcctttcggaagattgagtcaaatcaggtggaggcacggcggtttgcacttgtttggaatgagataataagcaagttccgggaggaagacattgttagtgatcgtgaggttgagcttcttgagctgccacctgagctgtggaatgtgcgtgtaatccgttggccttgtttcttgctctgtaatgagctgtcacttgcacttggtcaggcaaaagaagttacaggatctgatcgtaggctatggaggaagatatgtaagaatgattatcgtcgttgtgcagtgattgaggtctatgatagtgcaaaacacatgctgcttgagatcataaaggaggggactgaggagcatggtattgttacacaactgttcagcgattttgatggatccatgaagatggagaagttcactgtggagtataagatgactgagctgcacaatatccatacaaggcttgtagctctattggtcctcatcctcaaacccaccaaagatgttaccaagatagttaatgctttgcagactctctatgatgttgttgttcgtgatttccaagctgagaagaggagcatggaacaactgagaagtgaaggtcttgcacagtcaaggcccaccaggcttctctttgtggatgcagttgtgcttcctgaagaggacaatgctaccttctataagcaagtgaggcgcatgcacaccatcctgacctccagagactctatgattaatgtcccacagaaccttgaagctcgtcggaggattgcctttttcagcaattcattgtttatgaacataccaagggcaacccaggttgagaagatgatgtctttcagtgtcttgacgccttattataaggaggaggtgttgtacagcaaggaccaactctataaagagaatgaagatggcatctcaatattatactatctaaaacagatttacccagatgagtgggagtacttcgtagagcgaatgaaacgtgaggggatgtctgatattaatgagctgtacagtgagaaggaaaggctgagggatcttcggcactgggtctcatataggggacagacattatcacgtactgtgagaggaatgatgtactattatgaagctctcaagatgctgacctttttggattctgcctctgaacatgatttaaagactggatcaagggagttagctactatgggttcctcaagaattggatcctcaaggcatgacggagttgctggtgggtcagggtattacagcagggcatcttcctctcatgcattgagtagagcaagcagtagtgtgagctccttgtttaaaggaagcgaatatgggactgtcctcatgaaatacacatatgtagttgcatgccaggtatatggacagcagaaagctaagaatgaccccaatgcttttgaaatattggagctaatgaaaaattatgaagcattacgtgttgcttatgttgatgaaaggcagatcaatggcaacgaaaaagagttcttctctgttctcgtgaaatatgaccaacaattgcagcgggaggttgaaatctatcgggttaagttgcctggagagttgaagattggcgaaggaaagccagaaaatcagaatcatgcactcatcttcacaaggggcgatgcagttcaaactattgatatgaaccaagacaactactttgaagaagctctaaagatgagaaacctactagaagagttcaatcgttattatggaattcgcaagcctaaaattcttggggttcgggaacacgtcttcacgggttcagtttcttctcttgcttggttcatgtctgcccaggagacaagttttgtcactctggggcagcgtgttctggctgatccacttaaagtcagaatgcattatggccacccagatgtttttgatcgtctttggtttttgggccgaggtggtatcagtaaagcatcaagaataatcaacattagtgaggacatttttgctggtttcaactgtactctccgtggtggtaatgttacacaccacgagtatatccaggttggtaaaggtagagatgtgggcctcaaccaggtctctatgtttgaagccaaggttgctagtggcaatggtgaacaaactttgagccgagatgtttacaggctgggccaccgattggatttcttccggatgctctctttcttctatacaactgttggattctatttcaatacaatgatggttgtgctaactgtctatgcatttgtatgggggcgcttttaccttgcactcagtgggcttgaggactacatcaacaagaacacttcctcttccaataatgcagccctgggagctgttctcaatcagcagttcgtcatacagctaggcctgttcacagctttacccatgattattgaaaattcacttgag

SEQ ID NO: 188869 - DNA, 343 bp, Zea Mays
aaacaaaaaatagaccaaaacagcaaaaaatagaatagccctattctcaactcatgctgcaagaaaacgaccccagctgccacaacgtaagtacttgaattagccctgaccatattgaaggcagcaggaaaaccaaggctctcaagatgctttacaccagccctactccaacactccacttcgtccataaacaaacattgaattgtgctcaatgaaggtcttgttccatcaaaaacagccctgttgcgatggcgccataagtacctggcctccagaatgatgatgctgcctataaataccctttcttactcgtttgtgcatttttctatgcaccttgccccac

SEQ ID NO: 188870 - DNA, 1002 bp, Zea Mays
gtggctgtaattacaatttagtgctgttattgttccaggtaatccacggaggatgcactggaagcagaagagcgaatttcttaagaagaataaaggttctaatcctgctgggtcatattttttctttgtttcatctgtttatgtttaatatatgtcgtttattcacctactccagctgctgttatcaccccaaccaaatcagttttgaaggtgaagttatctaacaacatccccaaagggaatatctcaagttcacctgcaccttctcctgaacaacctggagaaagcaatccttcgtttcctgttggatcagatgcaaataatgaagtcataacaccttttgattttaacaaagaggaaaacagtaaatatgagaaatcagttagaaataagatgtctaacaaagatataaatcgccgagcaagttctcatgctgcaaatgtggatgataatacaaatgaagtgcgaagctacttgatatccgtgctctcaaaaaatccaaaaggaatgggcctaaaggtaaatctctctatctctctgagcatgggtaacatgatattaatcaagtccatgtgcaaatggtaaaaatactcaggaaccttgtgcactcctttgtaaagactcataccttattagttattaatgttgaaggtgttgggacttacatttctgcagagtttgttgccttttcttttgactgtcaaacccatttgcatcttggtgcttttatcaagtggtattgtatttgtatctctattttgtggtttgatgatttctcttttaccttttgaacatagtgcatagtaacatttttttgttcatacacatgaaatgtttcttgtttgttacgtaacaccattttttttgttttaccatactctgtagatgcttatggacgtcatattccattattctagtattccacaaatatttgtctgattttgttttcacatgttatgaatcatatgcaggccttggagaaagctgttgcagatgcatttc

SEQ ID NO: 188871 - DNA, 308 bp, Zea Mays
gattgttgggtggtggtgggatttcgtcggcgaaggccaccttgccctttttggtggcgagggtcactcttgctgcgtcgtcctcggctggagagctagctcgggtgttcttcctgggaggcatcatgggttggtcttcactgcacaaacggtgagcgccatatgttggacctgctgataggtggtcaggtgggcccaaacactcgggagctgataaggggtcaggggcacaacaaaatgttaggttggaactacagtgtcttgctatgtgtgtcccattaggttgcagaatggggtatttgtagggc

SEQ ID NO: 188872 - DNA, 634 bp, Zea Mays
cggggtttcactcagcgccctggtattgatttttcagaaactttcagtccagtggtcaagccagctacagtccgaaccgttctttccctggctctctcgcatagatggccgattcaccaacttgatgtcaacaatgctttccttcaggggaccttgtgagagactgtttattgtgttcagcccactggttttgaagattccactcatcctgattatgtgtgcagtctcaatcggtcactttatgggctcaaacaggcccctcgtgcctggtacagcagattcgcttcccacctgattcaaattggatttgttgaggccaagactgacacttcattgtttgtctatcacaagggtgcagatatgatttaccttcttatttacgtggatgacattgtgttaactgcttcgtccatgccccttctacgacgcactattactgctctccaacaggaattttcactgaaagatcttggtcctcttcatcacttcctgggcatgcatgttcaacagtctgcctctggcatcactctctctcagtgccagtatatgattgagatacttgagcatgctggtatgagtgactgcaaaccctgtacaacccctgttgatatcaaccccaaactttcagctgatg

SEQ ID NO: 188873 - DNA, 783 bp, Zea Mays
aagctattgtggcttaccaagagaatgtagatatattagataaggatgaagacccacctatagtatttgctttggctgctggctctccacgatgtgttcgtgcacttgtaggcaggtctgctagtatcaattctaggcttagagaaggcctgggtcctactcttgcccatgtctgtgctcatcatggtcaaccagagtgcatgcaagtatgtcgtcatgctcacctcatgtcgtttaagcttgctggttcctactttttagattatgtatgtgttatgtaggagctgctgatggctggagctgatcccaacgcagtagatggtgaaggtgaatctgtcctgcatattgccgtggccaggagatatactgattgtgctattgctatacttgaaaatggaggctgcagatcgatgggaatatcaaattctcaacataaaacgtaagaaatattcacctagtgcctagtggaagcgaagccagtgcatcagcttctattatcatgttctacaacttgaaaaagttttggaaatttatttagttgtggctgcattaaatcttcttcctttgcatgttttatctgtctatttatttccttctagtgacatttcgctctcacggtgagtaggccattgcatttatgtgttgagacatggaacacgactgtggtaagaagatgggttgatgttgcatctctagaggatatagcagaagcaattgatgtacccagccctgttggtacagctttatgcatggcagcagctcttaaaaaggagcacgagaaag

SEQ ID NO: 188874 - DNA, 756 bp, Zea Mays
tgaagacgattctgatgattctgtgtctaagtgttttgagtctgatgattctgggagttcgattgtgtggacagaggagtcttcggatgaggacttggattattttacagcattggatgtggctgcggcggagacttctccgcgtgtgatgggtggtgaggatcttccgggtgcgagtgctgggcgtaggcggcgaagggcggtggcgaaacggagagtgggtgagttgtcgcgaagtgataggcgtcatcgtggtgagatggagggtggtcgtcttcgtgtggacgggactggcaaacgggaattgttgtcctcgccggctgggacgagtgtaggtgagggggagctgtgaagtctgtttgatggtgaggaattgaggataatgttgttcaactgtagggagatgggtatcatcccgaaggttgagccaatgtaatgtgtgatgccctcgctgtatgtatgtaaccatattttttgtgtgatgaagctgcgcgctttcgttgatcaggccgcttccgtaggcttctgtacggagttctttagaaaagacttcgatttttcgtacctgttattccggctgcacccgtaggcgacttttgcgtggagagtctattggaaaagacatcgatgttgcatacttattgtgctagtccggctgcacccttgggcgacttttgcacggagagtcttttggaaaagacttcgatttttcgcacttattgtgctagtccggctgcacccttgggcgacttttgc

SEQ ID NO: 188875 - DNA, 364 bp, Zea Mays
cattggtgctacctgtttcgatctggaagcgtgcgagatgcggtgtgtagctaccacacagatccgtgagctctcgagcgtttgattgcgtcctggttgttcaggggttatcctatttctagacgtcaatcgggtggggggcgtgggaaagtggagttaatttcggtggagatgttcgtttttacttagaattagaattccctattaccaattggaagtgcggacacaatctcagatggacgaaccagctggatctggcctgctcaaatggaaccgcgagctttcattgcgcctggtgtgatatgcatgtgaatttcagtggtttccttcgcgtttccttaatcatatctcggtttgtttggaa

SEQ ID NO: 188876 - DNA, 451 bp, Zea Mays
agggaggatgcgcagaggtgcagcggaagagtgagaggggaaggactagtcccggtctcgtgataccatgaaagaggatggctgggaaatgattgttggattgattattgagggagcccaaaggctcagtacatataggcaaggatgtcccagaaataggaaagtgctaatctagagaatcaggaaagtgctaatctaaggacaccttgccaatcagatccaatactaccaaaaaggggagaggggctgcagccgccactgctctagggttgcagccgaccaccctcctgggccaaccgaacaccctaaaggcccatgggcctatacagcatgctaacatatatcattgcagagccatgtacatatattagaacttttgttaggcaaattacttgcagacaacagaaaaagtagttcacaagtcacaggtggcacaaagcgtacatccagc

SEQ ID NO: 188877 - DNA, 551 bp, Zea Mays
ccgcagaagacggcggcgtacatcagccagacggacgtgcacgtcggcgagatgacggtcaaggagacgctcgacttctccgcccggtgccagggcgtcggcaccaaatacggtacgccggcggccttattgtgttttcgatttgacgtacggacgacggcacgatgcacggtgccagggcgttttttgacgatggatgcgtgccgtgtcgaccatcagatcttatgacggagctggccaggagggagaagggggccggcatccggccggagcctgaagtcgacctcttcatgaaggtagagtagagaaagaaagctagcatccaccacatgaataaaaaagtactagcactctagttgctgcatttagtctgacgatcaaagtgcaccacgcgtgatagtgccatgtccttcgaattcgaagtctacatacgtacgcacatgcatgtatgcactcattagtactaattatcatagaatatacccatcattagtaatttttttttactgttgccaggcgacttcaatggaaggagtggagaacagcctcca

SEQ ID NO: 188878 - DNA, 1143 bp, Zea Mays
gcggggcgtcctgctcctcgtcttcgccttcgggctggccttcctcatgtcccgtgagtcctccggaacccggattttcatatctctgctagttcccaccttcgctgcccacagtgggatgggctcgtgcgcgtcggcgattcagccgatgcggttgtcggtgtatggtgccgtgattagggttatgctgcctgcagcctgcccatggcttagtttcccaactggacttcgtggtttcggcaattaacccttccagataggcggctgctgacttttgaattcgtttgacttgttgctgcagtgttctagttcattgcattatccagtcgctgccgcactaaactaagttgcacgttgttttcaccgcacatgactggtcgcttgtacatgacaattgtttgctctgctcagtgttttttttgtcagtggtagtttgttgctgatctcctgcatacaatacagtgcaagtcatgttctcaatagtatggatttcgtagctgaaatacatatcactaatagtcctgcatctcatcctagactgcatggtagagtctaccgccaaagatgtctagcacgatgcatatcggtttaatttgagtgctcaaataggcagacttttgaaatgtgcttctttgaatattactgcagggggttatgttttgaaacaaaattttattgcgcacatacaaaatattccccccttgattatattttcgctgaacatcattttgccctattgcagttacgagctcgtcagtttggtttaatctgccatttgccatagctctgattgttttgttccgctacatatcgcttgattatggccttcgtagaaagagcgtaactagaacagatcatgccagtcattcactcgtcaaaacaaaaggtactgaggtaaagaaagtcattcatcagactgaaacggatggaaaaatagattggaggagcaaggttaactcgcctccagttgaagcagcattcgaacagttcacaaggcaccttatctcagaatgggtaacagatctgtggtactcgcgcgtaacacctgacaaggaaggtccagaggaactcatcgatgtagtcaatactgtccttggggagatttcagttcgggcaagaaatgttaaccttatcaatctgctg

SEQ ID NO: 188879 - DNA, 321 bp, Zea Mays
aagggaagagatcaatttacgaaaagccctgttcgtcaccatcgcaggtactagacctgtggtacagggatcggaggtgttggatgaggtggctcgcagctttggggtatgtattgataacatgtccatccaacattcctcaccagaggattttctgcttttcctgccggatgaggacactgcctccaggattttcaatgggggcagattattcactggacctcgtttctgcttaatgttcaaaagatggtctcgtttctcgcatgcttctatgtctcgcatgtctcacttagtggatgtgcggattaggggaatccctga

SEQ ID NO: 188880 - DNA, 290 bp, Zea Mays
tgttgttgcagctgctgttgttgtgccctcctttcctggcgtatctcatctcgctcctggcgcaattcctggcgtatatcttctctttcctgacgcatctcctggcgttcttgctgcatctgggcacgcatatcagccatagtgtctgccatttgctgcatcaccgccatctgagtagcaaccagtgggtcaactccgcctggtggaggattaggaggattcatctctgcaggctgtggctgaggttgtctatatatccttcgagtgtgttggttaggaggcaaatcaat

SEQ ID NO: 188881 - DNA, 454 bp, Zea Mays
aggtttgctgcagagcttgacttatgttgccatttggaattaagataaaatctggctccaaagtgctctgtcagaccggctgcttgcaattcacatggtacagtatgaggatcagaacgccagctcagacgctcgtcgccggcgataagaacgccaccgccgttcgggatgggtcgttggcggccacggtaaaggaatcttgcgacgtggcgttaaagcagtgaagtggcaagctccggttaatcggtggccaccgtgccctcacctggatccgccgcgcggtagccttgccagcagtcctcgggtgagtacctattcaattatttcatgtttttgcttgctgttagcctcctattgcccccggtatcaaccaattgaaattcggccaaagcctttcaccagaacgcgtgcttgctctgaagaataccgccgtaatccaccctcaccgtcgccc

SEQ ID NO: 188882 - DNA, 395 bp, Zea Mays
gtcagcagcaacgatcctggcagctcgtcctctgtgatttttccgtctggtccagctgatcaagtccctgttcctgctacctctccagaaattgagccccgttttgcaaaccaaatccctgctgcttcttcgaaggttaaggcaccatgcctggcaggtctgttgtttgtaagcgacaggaacgagaggaactttaggttgcctagcccttctgataactgtccatggaacttattcgaagctagccgtagcgcagtcagctttctacaggagtatatgctttccggaatcgtgccactgaagttattcagcatgagatctatggttcttagactgggcatattgctgaataactatagttggtagatggtctcgctacagtagacaggaaaggc

SEQ ID NO: 188883 - DNA, 301 bp, Zea Mays
caccatcatgaagagtagagcagcttgacaggtttactagagaggaggaacgacatgcaggagacaaggaatagcgtgccgggcaggaggaatagcgcgtgggggagtaattgcgcatgggaggatgggagtcgtgtgcgggaagaacatgagtcacacatgggaataattgtggtgccataggagaaggattgcagcgtgcctccctactatgcgttttggtggaatctggcactctaatgctaactttaacagcccaaattggtagcataatagcccacctctaaccccagttgagcaa

SEQ ID NO: 188884 - DNA, 1086 bp, Zea Mays
gctagatttgttgaaagatgactgtatcctgtcttaatgcagatttgtaaatctgagggagtgaatgtcactgttcctcagttaaaacatgtaattgatgtttgtctaggtgacattaggagggtggtgatgtttttgcagttttggtaccaagggcatcaattcacaggtttgatgctttaccatgaaattttatccatattttttatagttccccaaaccccattcatgttggagcctcctgcactgggtctgccccctttttatgttgtattggctcattgttcacttctagacctttcagcatgtaaaacttactatgatggtacatgatgaagtggaagatgctggttgtttatgggtattgtgctcaataatagccccccccccatctagaatgtaagatgttttagctttatcctaagtcaaacttagcttctttatttttggccaggtttgccgaaaactgcaccaacatctgcaacattaaattagtttaataaaatccaccatgaaatgtcttgatagggctatttgctattatagaagtttaactttggacaaaactaaaacaccttacattttggaatggagtagattgatggggtttgtcgcagagcatcaccctgcaacagttttgagaattatatcatgattcatgtgtgacatgtgcattagtcaccttataaatctaagctaggcctaggaggttcttaatttactagggcttgttttttttggctaaaatgaatttcatatatagaaagttttatctgcatgttgcagatacttcccttcattctttcagtaaatgatgtggggttagtctgttagatctgtcagaatgaactgttggcaccccacactaacagttgtgcactcttgtgcttccagaagagctattgtagttattttccatgtactgcttaactagttggtagttgaccatgaaatattttttcttttccgtttttgtttcatttgcaatgccgtgctgttttaactctagaagtgctgaactgctgatcatgttgctgttctactttcagagaggccaaaggaatgtttgtgtggtcctttctcact

SEQ ID NO: 188885 - DNA, 364 bp, Zea Mays
tgtgccttcacaaggatagccctttgggagaaacaatccttgaatgctacaactgtggctgtcggaatgtatttcttcttgggtttatctcagcaaaattggagaatgttgtcgttcttttatgcagagagccgtgtttaagtgttaatgcactgaaggatatgaattgggatctcagccagtggtgccctcttattgatgacaggtgtttcttgtcatggcttgtaaaggcaagggtctcatgatgatttcttaggttgttctgtcatgcatttgtgcatagctaggaactttctgatggttggacaatttactttcttcaggtaccttcagagcaggagcagctaagagctcggcaaattag

SEQ ID NO: 188886 - DNA, 379 bp, Zea Mays
caaccagggagcgcattggcctatgtaggagtcgaagccagacccagtctcctacctcaaaagtcacttcccggtgatggttgtcataccaacgcttggcatgctgctgtgcttgaagaagacggtcccgcacctcttccaggaaattgtctcggtcttgtagcaggtcttccacggtttgggattgcgccgtgccctgttggtatggtaccagtgccggaggctcacgtccgtataccaatttgaatggtgtagtctgcagcgctgagtggaaggatgtattatagcaatattccgcccatggaagccagtccagccaggaacgaggtcaatctcctgtgatgcatcacaagtacatagcaattgtgcgattgacgac

SEQ ID NO: 188887 - DNA, 357 bp, Zea Mays
tgctagtgtcatgtgccagtagagaatcttacatatgtcgacaccattgattgttccacctatcgacagatggatgtcatcttctcgtacacacacccattgatttttgtgagctatcaacattgttcttgtaactgtaaaccgctgttggatccaagataggaaattgatgataccctgtcattcaaccatttgatgatgtctgcaaacacaatatctatgttttcctcgggttctcctgaagtcaaagcatggcacatcccagggtacaactttagtgtcttgtccttgctcgtggctattgtatatagtgcctcacttactgtggggtcagttacagcatcatcaccaccgtgg

SEQ ID NO: 188888 - DNA, 366 bp, Zea Mays
tcaggctttgagttttctggatgatcagcttttgcaatctgatatgcagaggaaggctatggctaagttgatggggcttcatttcaaaattgtttacaaaaaaggcaaggacaatgtggctgccgatgctctatccaggattggtcatgtgatgcagattcacacggtgactgaggtgaaaccagcttgggtgcaagaactcctgaatgcttatgtgacagataaagaggctcaagatctattggctcaattggccctggccagtcctaatgagcaaggtttttctttacatcaaggtattattagaaaaggggatcaaatctggatagctaacaattctgcccttcaaactaagttgatttcagc

SEQ ID NO: 188889 - DNA, 309 bp, Zea Mays
ggacgaagcgctgctgtccgccgcggatctgctctcaaccatggccgtgattctccaccgccccgacctcgacaacgtgtgggggatgatggtctgggcaccagggacccgtgtgtggtactcccgaacgatgtgggtcacctgagcgtcgggaatccctcgccggaaacctccatacaccacggtgccgctatccagtgtgggcggccggatttttcgcctccagcgtcggtacaggcactctccatcactttgccttccttccctcagtgtatagcgtcgtccgcgtttaggatttggggtctctgg

SEQ ID NO: 188890 - DNA, 372 bp, Zea Mays
atttgcaatagagccatgatggggagattcaagaagtttattgatgatacaagccttattgacctgcctctaattgggcgtaaatacacctgttctaatcaccaagtgtctcccactttggtcagattagacagagtcctgtgctccaatgactgggaagatatttttcccaataacctcctccaaagcgttgcctctgaggactccgatcattgcccccttgtgcttggtctgcagagcaactgctttggcaagaggtggttccattttgaacccttttggccaaagttggatggattccaggaagctgtcagtgaagcatggttgtctatcgatgatggagtctgcctagttctaaactttgacaggaga

SEQ ID NO: 188891 - DNA, 425 bp, Zea Mays
ctttaattactagtagtgattggaacagtgtagagcgtttatcaactgaaccattctgttgtaatgtccaggtaactgctgttggagtcaacactgaatgggggttgctaatggcaagcatatctgaagattcgggtgaagagacaccactccaggtttgattttgttgttgttgccagcctttgcgcgagtttatttcctttacatgcctttgttgttccggtgcaggttcgtttgaatggtgtcgctactttcattggaatggttggactttctgttgcccttgcagttctggttgtacttttggccaggtaaaattggcatattttagtgtgctaaccgtctactttgtttatctacatcaatctgtatcaccttgttttctcgtaggtacttcactgggcatacttataatcctgacggat

SEQ ID NO: 188892 - DNA, 368 bp, Zea Mays
ccgaagccttaattaaaattggggtttttatttgggcaatgagaagtcagggtaggaataagacgtcgaatgcttctgcaatatacatgaattatcttaccagacgaaggcaatggggaaggaagtaccacaacaactttggttgttattcttttgtataccgctctgatgcgaggcgccctgtgctaatgtttcggaagaaatggccaggatcttggatgaggaaatggttttatgttaagaatgatttgattgagagggaggatgtgaaagatattgttggtccttgttctcgaatgctatacatcaagaacaaagcaacataattgtcaatgattaaagaccttcgttcttcgaaatattatctc

SEQ ID NO: 188893 - DNA, 620 bp, Zea Mays
aaggaaaatgttgatcatgatcttggcactaagctacctgatgattcgaacactctgtttgatgtaccatcctttgagcatcttcaagaaccccctaagccataccaaagcaacaacatggatacaaaagtgggtggccatgctatttatccagaagagttgacattatattatctggatccccaaggaggtgtgcagggtccatttctgggtgctgacataatctcttggtatgaagatggatacttcggtttggagttacctgtacgtctgtctcagttttcagatgatgttccttttcgcccacttgttgaagtcatgccccaccttgtgcaaaagccgcaatcgcgtatacctgtaccttgtgatggaaattctgaatctcttgaatcatctcaaagtaaatttgaatccagtgtccgttctgcttcctctgtgaggggtgaccaattgtctaactgggatactgaaagcaatgctgttgatcctaaaagaggtgatcatgaagaatcaataccttctcgtagtggttggctatcttcaccggaaacaggaaaggatatatcaaatactagtaatcgccagcagcacattcctgaatcagtgaatcaggatgccga

SEQ ID NO: 188894 - DNA, 493 bp, Zea Mays
agggaacgccacataacagtgtgagcacaggatggccggaggcagactcggcaagccttcgacatcaccaggagccacatagaaccaaaaatcccaccagttaccccatttgttcctaacgcaggggactatctccacaacctcatccgaagtctttccagtcctcggtgtgaaggtgcatggtccaaattgggctattttgttccctatcttcctcttctaccaatgcaggcaataattcttagcgaagacctccatagacggctgcccgtcgtaggaagtaactgcccagacatacttcgcaagcgccaccactgcgttcggcatcagccagtggacttggacctcaaatcgtcgcaacacctccaccacaaaccgatgtgttaggaggcgaagaccggcagcaaaaaggcctcaaaaactatcaactcgccttcaggctcggggatttcctccgcacccagggcccgcccgacaccgttaccatagtaac

SEQ ID NO: 188895 - DNA, 525 bp, Zea Mays
cttgggtcaaaacacatgaggtatctacctgatatgatcccttgtttgctgcaccttctgaatgatgagacgcctgcagtcgtcaggcaagctgttaagacaggaaccaacttgtttgccaaagtactccaaaagctagctatccaggtaattcaatttccagcatttccattttgagttgccttcctgtgcaaacatctgtctcaatttgctggtttcggatccagggtttattctccaatggagggattgatgatgcacttaaatcatcatgggaatggctgctcaagttcaaatcaggtgtctcgcacatggcatttcaggcgagcccctcctttctttttgtaacaaataaccctatcttctcggcctccagttgtctcatgtggaatctgaatgtcaggccaccggcaatgaaggtgtcaggttactggctattaagtttgttgaaaaaacagttcttatgtacacaccagatcctgatgtcccatctgatccgccaactgaaacaacagaaggtatggc

SEQ ID NO: 188896 - DNA, 404 bp, Zea Mays
gaaattattagggataaccttcaccgtttgtttcctgtttttgtgtttcgatggcaggcgacgaagaagaagcaaggatccctacagacttcaatgaatgtgttagccgccaagatcttgaggcaaacaacaagctcctgaaggagcaaatggaggagacggtccacaagtcagtgcatgatgccttcattgacatggaccttggcaagacttacgagaggctggatcgacgattgtccgagatcgtcgacagacttgctatgttggagacgcaacaacaagcaccgccaccaccacctcctcgtccacgtcgtcccgatgatgcggtgtttgatgcagaaggtaactatgatgaagcggccaccagagatttgcgcctacgtcgccgtcttcatcaaaacaca

SEQ ID NO: 188897 - DNA, 367 bp, Zea Mays
ccaacgtgagtgatcttatcccaaattcacgaagccgatggtcgaaccctttaaaacaagtgttccccttgttccgcctctctgttatgcgcccaacccacccttagccagcgtttctcataaactgtagctcgagttcttcgaatctcccaaaaccggtcaccattcgccgtgaggtgcttcgccatggacaaatcgtttctggttagttctcactttcttagccctggtcctgacttccttcgatcctctaatttattacggtaccagccgattgaatgctatcgtcgtaaaccactgagaacagcacattaccgtcgcagaacgccactgtggacacccctcacgtcgattggctctttcgtgc

SEQ ID NO: 188898 - DNA, 579 bp, Zea Mays
agatagaacaaccgagggcagcgatgtccctggacatactgctcgtcacaattgtaatagagcccttgccgacgacgcttagccatctcacccgaagtaaggcgcttgaatgtccatggtggtgcaactgttgtgacactgttgatgatgttggctgtttgactggaacatgcattgatggccgctgaggaggtttcatggctttattggaagttgatgtttgatggttgtcgaatgattatcttcgttcataagctcttgccaggctcaaggcatgattgaggtcccatggcgccatgagttctacatcaatcttaatacgttctggaaggcctacggtgaacaactgcactttttgctcctgggtgagtggtgccgtgcggctgagaaggtcccaaaacctttcttgttagtcatccactattgttcggaagggaagttgaggcagttcctcgagaggattgatgcacagttgtggtccaaaatgctgctggcatagtggcttgaaacggccccgtggtaacagtggttggtcgcgctgggttggcagtaccaatgtaccatactaccatgtccgtg

SEQ ID NO: 188899 - DNA, 898 bp, Zea Mays
caagctgctctccgtctcctctcatcagtatgtatccagcttttaaaggtttgtctcatgttgcgattcttgtgctagtcgaatctcgatctagtaaaaaggtcgatgaataaatacctttactttatttggattctgacggatcacattagtattaggctgtgtcggaaagtaaagcctaactatacctttactttatttggttttcagcacggttagtggttgcaactgtagtatgttgtcttccattctatcttctaacttccatgtattcgcagcagaaatgccttgggtgctatgcatttaaataaaaatatcccaaaatcttgcttgctttcatgtacaaattgttgtggtccatcttacaaactttgattcgttctttgccatccaacttacaaatcaggtgataaatccaagattctgccagtaaagatgccgatctgtagctgtgaagaaactatccatgagttcgagatgttaacacgcgatgctgggcgtgtacagaaggatacactgaaaaagatcctcgagttgaatgctgatgctgaatatctgaacaagttcggcctcaatggcaggactgatgtagagagctacaaatcctgcatcccgctgtgtgtgcacagtgatcttgagccatacatccataagattgctgatggtgatagctccccactcctcactgggaagcccgtcacctccctttccctcaggtaattacactgcttgaaaaatgtgtcgtcttatcgtttatattagtgtgtggatgtcggtgttttgtaacttgatgttttttttcttcctttggacgcagttctggtacaacgcagggaaggcctaagttcttgccgtttactgatgaattgcttgagaccacacttcaaatattccagac

SEQ ID NO: 188900 - DNA, 435 bp, Zea Mays
ctatgctgttgactgcttgaagcaccatcaagttctgagtcttcacccaggacagagtctcttgggtgcaaatcagagtgtctaccgacctcttcactttcattctgatgctctgtcttcaaagcagcaagttttgcatggttctcactacagctcccagcttgcataccattttgagacatctctgactttatatctgggcttctagtcttcccaagacggctatctaaagtcttaggaggttgcttagtaggttgcattttaggagaagcagattttggcaaagctgatgacttctggagatctgtggtactggagcctgcagcagtcttagcatcttgcatgctatggtcagtattatttactggagtattcttctcagaattcaaagagcgtttgtctttagagttttcgctagcagaaacctcatttcgg

SEQ ID NO: 188901 - DNA, 354 bp, Zea Mays
gcgcgagtctcctggttgccaaggaagtggtcctcgatggcgagccaggcctcacgagcggatgcgcggtggtcgatcacggcgtcggcgaggtcagcggagacagtgctatagagccatgacttgacgacggcgtccatccgagtccagtcagcgagggctgagatggagtcgctgcggacgtggtccagaagcgagtacttggtgacggcgaggaggaactgctcgcgccaacgggggtagttgccagcggtgtcgagtaccgtcggcaccaggctgcgtgcgttctgcacggagactgcctgggcgtggagattgaggacagcagcggcctcgtggagaagcatggcgtgg

SEQ ID NO: 188902 - DNA, 2853 bp, Zea Mays
cttccccttttgccttgcctcgctcctcctccctcacctctcccccccgtctgcttccagtccccagaaatcaaaacctccaccaccacagagctccgagaccctcaccctcctccccgtctgctcgctgcgtggatctaccggcaggatgctctctccatcgcgcgcgccgcccggggagcgcctgtgaagaaggaacggaaggtgagagaactgccggtgttcttcctccgagttcgtgcgtgcggtgtggtttccgtgggcggttctcgattttttgcttgacttgaatccgcgcggtttttccttgctcttgcgcgtcgctcccccttaccagattcgtcgctggaactggaagattggcgtctgcagactggatctctctctcttcgggcggagctgggattcctcgtgcttctctcgctgcctgtgaccgctagatctccgctgcttttcgtgcttgcttgttttgttcttggctacggccaaagattctcgatcccttgcatctgctttctgcagatttggtacggattacggcccccccgttctcgaactccttcctctacgtgctcccatggctcctcgtccttacagaaatccccgattaggccagtgatgaagcgacgggaaaatcgtttcttttttcttgatttctcgccaaatcttagttattaagctccctttcctcttttcttcttttgctatttatttccccatcaagaaagcactaccatacaagctaccctccagtgcttggcaactgttcatgtctccttcactgctcttcccttactgcaaatcctttgcgagagctgcatgatccgtgtaggcttccccttaatctgctcaaagactcgctcgctcgtccaccttgccccgggatgatatttcatgtgctctgtgctacttcgagagcagccccctccgcgtgtctcctctcctctctggcatccatacctcacttgctgcatctatcagcataaaatcatgccattggattcccaaagaacagctggtttggttggacatgaaataatatgtgccttgctttctctctgcaggtgcctgatgagatagtggacggacaaggaagtgaagtttcttgttctatccacctgttgaacttaccaacttggtatgctggagtgcaagaataagagcaggcccaatcgcttcacagctattgggttctcggtgccgactgtagcagccgcagatctggagggagcagcgaaggcgttcatcagatgttatccagtgagcacccttcaggcccctcatgttcctccaagtctggtggcccgggtgtgagcgctgatccggcgacgtccgcggcggagcagccagcgtgccaggatcccagagatctgatccaatcgtatcccaagttctccataaggtgaaagatatatgtgtatatcctctttgattcaatacctttggagagagattatttttcggtgtttaagttcttgatgctggatctctgtctttctgatgcgtcgattaattattggctgctgctttgagggatcggattgggtatgaatggttgctttcagggttaatccgtgttattgtccgggggtgtttaattagtttaattttctgctgattaatataaaggtggcctttttttccaccccagaatctgaaaataaaaggatgctcctctcattaatctttgtccactgcctactattggttttcttttccatatacgtggtggttctgcgataaacaggcaggcgacatatttttggagatttcagttttgatatgacagcatgttcagttggtccacgttgatgttgttttttctctcttcttttcaacctattgtggagggtttgaatcttatacagtttggcaacactatacatgagtgttcgtcatataggcacgtattaccatatgctaatgggcccatgtttctgtccctatttccagagattatgtttttgcttcaaggagcaaaggcatcaagagaagctggcctttccatccacactcgttgcagctttgcctggagcatggtgtgaaggatccattgcctccatttgagcctcccgatttgatccggtctcagccattaaatatttccacagacattaagcaatctgctgcgtgctcagaacccatcattagtgttggtctggtgaagaccaaagatgccggttcgtcaaacgagtatacaggcgatatcaacttccagtcatgccagccagtagatgagtcacctggaccttcgccatacacatcaccggaggatgggaaatccggtatcgaccaagtgggaagtacaaatgaatcagatcatactgacgaggctataccaatagatctgcaagataatagctgtacaagagcaagtcggcgaactgaggttgctgtgcccttgcggcggttgagaaatcttgactcatcgtgcgagccatctgaaaagaagtgcaaatttgttgtcaagttaggtgcctcggcagatattcggcggccagaggatatagcatctaactctagctcagtttcagatccgatggcttcaaagacttgtcctgtgtgcaaagtatttgcttccacttcgaacaccacattgaatgcccacatagatcagtgcctttctgttgagtctaatactgagcttgttgaaactgtccttgtaaagcctaaagtgaagccaaggaagaagcgattaatggtggacatatacaagactgctcttccatacacccttgaggatcttgatcggaggaattgcactaattgggcagttgagttggctatgtctccagtgagcaaagaggtttgcactgagaacggaagcccagaagtggtatcatttgacagaag

SEQ ID NO: 188903 - DNA, 315 bp, Zea Mays
atgttaatgcttcactggatcatgagaattttgtacagcgctgatgttatcacataaaagagatgtaggactgagccaacgcatccaaatgatttcagcagcagtagtagcaagagctcgaagttctgcttcagtactagaacgagatatggccgcttgcttcttggatttgcaagcaataggagaggattcaagaagaatacagtagcctgtaatggaggtcgtgacagtggccggggagggaggttcaggatgactgacaggaatgcggacggggagggccacaacaacggttgaaggaaaggtcgtgattgc

SEQ ID NO: 188904 - DNA, 598 bp, Zea Mays
ccatgccagcgcggtcagggatgtcaatcatgtactgacgttgagataaaaacaaaccagctgtcgtgtgttggacctgcatccccaagaagtggtgaagtttaccaaggtccttcatagagaattcctgctgaagtgaggtgatgatgcgacggagaagaacatcagtagaagctttcagaacaatgtcatcaacatatagcagtaggtacaccatatcatctccgcggcgataaacaaataaagaggcatcagacttggcttcaacaaacccaagagagggcagaaaggaggcaaaccgactgtaccaggctcaaggtgcttgcttaagaccatataaggaccggttcagacggcacacaaaatccggatgaacagcatcagtaaaaccagacggctgtgagcagtaaactgtctcagacaaagtcccatgtaagaaagtgttattgacgtcgagctgatgtatgggccaattgcgagaaagagctaaggataggactgtgcgcacagtggctggcttcacaacaggactgaaagtttcatcaaaatcaatactagggtgcggtgagaaaccgcggagaacccatcttgccttgta

SEQ ID NO: 188905 - DNA, 409 bp, Zea Mays
gtttctctcctgagtctcctccttatcagagaggagctggggaaagtgctccctccgcctccatccgtccgtcgtcgcccggcgaatcgatcgaagctagcaatcaaatcagaaagagcaagagaagcgcccgagtccctaggccggaaagctatggacagcgccgccaactggcggtcaacgcagggcaccgaccctgccgccggcggcgtcgatccaaacgcggctgcccccgccggaagcgactggcgcacccagcttcagccagaggcgcgccacaggatcgtgaataagatgtacgtcctctccatcttccttccctccttctgatgggaactgtcaagcgattccaattctttcgtttcgccatggcggatccatgtcgcttcttttacgactcgatcgattc

SEQ ID NO: 188906 - DNA, 377 bp, Zea Mays
gtgcaggtgatctgggtgatcatctccctcctcccccctacgctccgtgtcattcccatcttcctctccactcccccttgagagacaccaggagacctaggttacaagcttactagagggaagttcaaacaatttggtattagattcagacgacgcagcgacaaccatgcccgacgttgtactcgatcctgacgacaagaagaccgacgagaagttggattttctcatggacgcaatgaatcggatgttgggccaactaaccaccatgaatggccgccttgacacccatgatcgacggttggcgcaggtggagacagggccaaccgacggtgtttagttggaggaccacacgacgatcgacgacaatgaagttctgc

SEQ ID NO: 188907 - DNA, 298 bp, Zea Mays
gatgagattgaagtcaccagcaatcaaccagggtccagtgcaagcagccctgacgtctctcagttcttgaagaaacaacatcttatcactgttactttgaggaccataaacacaagttaaccaccagcagcgattatgcgcattgcagaattggattgaaatgctgtatctgtcaatcctagacaacccagtcactcccagatgtcgcttccaagcaaccagcacaccaccactagcaccacaagatggtagaaaggagaactggcagaaatccgaacccaaggctgcaagaatggtt

SEQ ID NO: 188908 - DNA, 550 bp, Zea Mays
ctctgccctgagatccatttatcagtccagaaaagggtgttggcaccattgccaacttctgaaactagaacagtggagaagaaggcccggaccttattcgacacatgaaaagggagctgcgcccagggacgagttggatcagttttgtgcaaccacatccatctcatacgaagagcccaacacatctcgggtagactggagatgcccagaccaccaagcctgagagggtgacaaactctcccccaggacacaagacaatgaccacccttggcctatttgcgacctctccaaagaaagccttttttgattttgtcaatggcatcccaggcccaggaagggaaatcgatagccattgctaattagaccattattccagtcaaaacatgctgaacctggatccttctacccgctcttgtcaatagatctgccttccagttagggagctgccttgcaatgttatccacaaaaggttgtacttggtctttagtaagcttgactagggagagaggaagaccaagatactgacagagaaacactgacagcgcacaag

SEQ ID NO: 188909 - DNA, 2077 bp, Zea Mays
caataattttgtattgcatggtttgaacattcttttgatacaacatcagccgagggttcttcgtcaacattcagcatgtcactatctatgaaggatttggacacggccttccatggagctggacaaaaggagtatcctttttcattggcttccctatactatgtgctttttcagggtctaacatctttatatcatcgagacgcattgcgagaacataggatggctctcttaacctaaacaggtttggatgataatttgtgaactgattccaacagtaaacatgccatgcttaccataaagcacctaatttgtgtgtctgcatgttaatctgagaaacatacacaagttgcatattgtttgtcagttaaactgtcaaataacatttaggggggtgtttggttcctttactcacccttctaaagtctttagtccctagaaatcttatttgaaagacctattttagtcaccccgattggtattttaaagactaaaagtgaataaactttagtcgctaaagtttaagaggtgggaaccaaacaccctctttgtcttctcagtgctctcatgtagtgattgttgtccggactcttgcagcatatcttattttctgtgataggctgctaaagtttgacatgaattcatgacttggtgagatgactctcaccatattaggtatgttcttcttattctgcataacatagtaaaacttttatttaatgtaactgtaaaaatgtctattgtcatgtcgcaaatatttagctttagattaaattaaaagttcagatatcatgcagacttcctatcccacctcctataatataggaaataaaataatttggtagaataatctgaaatagtataaagtaatcatttatttgatactaccactatatgctaattaggatatatatatatataaaataaatcgttgttggaccaagctacgagccacctcgcgagccgcagtgaacaaagaaacaagctagacttgggcttgttttcagcccgagccactccgagctatgtcacgagctaattttccacccctaattgtgctccttaatttagttatagcggtttgatggtatggcgtattgagaattttaagccagttcctgtgccaacatcattacatggaaaattttatatgggtgattcatatatcatcttgaaggtatggatttactgatacacttttcacgaacatcttttatttaggaaaattgttggtgcatcttaattgaagggtaaaatagttggtcctgcttgaagcaaaagcttagaggcgctgagaaatatgtgacaaatgttttctctaattttttatatttctcatcttgtatcatttagtttaacccttaatggtgcatgatacactttactgtctaatgtccataaagttctcatcatgatagtacattctatttatgattgatcttagtattgccttattttttctgcactgaatattgtttcctgcagacaacagctttaaaaaatggttcctttcgccatgacatccattattggcttggtaaagacactagtcaggtagatttttaaaccatttgacattgcatcactttattttgctcttcaggtatgatatacaactattttttgttaactaacaactttctaaaaatgtccattcttttccttggtaggatgaggctggaactgctgcaattttaactgtggagcttgatgctgcgcttggaggacgtgctgtccagtaccgggaatcacaaggcaatgaaactgaaaggtttctctcatattttaggccttgcatcatgccacaatcaggaggggtagtttctgggttcaaccatgtagaagtcaatgatcagaagcatgttacccgattatatgtgtgccgaggaaaacatgttgtccatgttaaagaggtgagctatctaaagcactatatttttccaactagaaaggtttgctcattttctgattatgctttctattttataactaggttccttttactcgttcatcccttaaccatgaggacatatttattttggataccaagtcaaaaattttccagttcaatggttctaac

SEQ ID NO: 188910 - DNA, 606 bp, Zea Mays
agcgggttgagccagtgcagggcgctcactgacctctccctcgacggcaactgtttcaccgggaacgtccccggcgacctgtacacgctgcccaacctgaggaggctgagcttacaggaaaatcagctcactggcaacctcggcagtgaccttggcaacctctctcagatcgtgcagcttgacttgtcctataacaagttcacaggctccatccctgatgtctttggaaacatgaggtggctagagtccgtaaacctagccaccaacaggttggatggagagttgcctgcttccctgtcaagttgtccactgcttagggtaatcagcctgaggaacaactctctgtctggcgagattgctatcgacttcagccggctgccgaacctgaatactttcgatattggaaccaactatctgagtggcgctatacctcctggcatcgctgtgtgcaccgagctcaggacgctgaatcttgcaaggaacaagctcgtgggggagataccagagagcttcaaggagttgacatccctgtcgtacctctcgctgacagggaatagcttcaccaacctggcatcggcactgcaggtattgcaacacctgcccaac

SEQ ID NO: 188911 - DNA, 789 bp, Zea Mays
gtaagtaaatcacatttgttctgtgcagtaaaaaaatgactgtttttcatgctttaacaactcagtctaaataattgttcatctccaacatgttctattctcaaccaagaaagtatttccgatcaagctattattgtaaaaaaaaactcactggacccatgctgggggtctcacctgtgtgggtggcttggagggggtcctcggtgtggaccagacacagtatgcatacatcgccagctttgaggcatctgtcggcactggctgtgggcagggtcggcctggactagatctgcaacatcctgagggtgagctccatcacttggggaggggcgcggatgttgactggcctggggacaagcagcgcgaccagcgcagacaggctggggatgggcgggcatgatcagcccagacaggctggggacagggcaaacgggcggtgtggggttatgacggcaacgagcagtgtggggtcttgtgaacagggagtcacatgggggcattttggtcaaatgtacaaatgctctaatttttagggctcacatggggatgcattttggcgtacactgacagaaagcaaaggaagtggcaaataaggaatataagttaaactggatgatggataaggaaccaaaaagaaatcagtggcaaatagagcactgagttatgtacatatggcggataagatattctctttttatggtgatggaagaatagttctcagataccacctagcgtagcatattaattccagtggttttgatgatattttatcagaatctatagcatgct

SEQ ID NO: 188912 - DNA, 462 bp, Zea Mays
gtttgcgcccatgaggaagacaatatccactttgacattgtcatctgggtccatgtgtcgcagaaatttagtgtgcgagccgttttgagggagatgatcgagcagggttttgagggagaaagcatcgagaccgaggagagtttcagatggtcggagctgagattgcgaaaaagctcaagcggtcacctctagctgccagaacagtgggaagacagttatgtataagaccaaacatcgagttttggaggaatactcgggatcgagaccttctggacgagacaatgggagctctgtggtggagctaccagcatctagatgagcaggtcaggcgatgcttttcttattgcagtatttttcccaggaggcattggctggaccctgagtatttagtcaggttgtgggtggcagaaggatttgtcaccagccgcaatacaggggaggaactggaggctgttggtcgag

SEQ ID NO: 188913 - DNA, 399 bp, Zea Mays
ccgcgctctactccaagctggacggcaccgcctcgaggctccagtgctggaagcacaccgccggccccgtatcggcgcagctcgacagattggagagctacttcaacaaggtccgttcgctagctgcactggtagaatgcatgctccgtgcgcgcggcacacgcccaccgctcacgccgttcgctgcgctggcgctggtggtacggacgaggacactgctcatgggttcgacgacgtggacgtggctgcgtgcaggtcaaagacgaggtggacatggtagagcggaacagagacgaggagatgaagcggctgcagtcccagggcgttcacttcgacttcggcgtgctggtccggatcaaggagggcatggtagacctgtcgtccgcctgcatggagctc

SEQ ID NO: 188914 - DNA, 778 bp, Zea Mays
tagtatcacagaatactataaattggaaattatactataaattggaaatcagcaatagctctactgttccagggagaatttctcgaaatcggccgcctattgtttgctgatgctgtcggtgaatagctgaaataacatagaaaagaggttaataacaggaaaatatgagctgtaggcctagtgctgtagtaaggtagagcagcaagcagtcatcaaacaagaaccataggaaaacagcaattagatgcagcaaggcaagtgcagaattaaacatatacagttacagtcttacagactcagaattaaacaagtccatactaaaagagtacgacaatagacaaaaaagtattaagcaagtaaatcgtcatccacttggtagcctcctccatcaatgtttgtcgcaggtcgatctctagctccaccagaatcttcatcgtcctccatttcttcagctgtatttgttccacctataccagtttgctcttgtgacttgtgaggcttcatttccatcttgcccatcaccttcatctccttctacatcaacttccttacttattgctcttgtgtgcttccttctcctgccatatgtattgatggtttgcgtacgagtagcagcatcccttgacccttggcaaatttctccctcttagagacttagactagcaaatttcacctcatgaatttgcgtacgagcactggcagcttgatcaaccatatccacatcatttctgtcggatctttgaacttgttcagaatcggtatccacccgcttattgtc

SEQ ID NO: 188915 - DNA, 303 bp, Zea Mays
aagaggtctctggaccttttcccaagctaccaagcagttacctccattagcttgttgatgtcccttccacaagaacccccgccgctttttatcaatagccttgatgaaccatttcgggagatccaaagctataagcaaataaataggaacagcagtgagaaccactttcactagcacaagacgcccaaccctattcatcaaagaagctttccacccaggaaggtaatctgccaccttatccacaaaggccagcaacacctctttagaaggcttacagattgtgagaggaagtcccaaataagt

SEQ ID NO: 188916 - DNA, 376 bp, Zea Mays
ctgatattaattttgcattgcaaaagaaatgaggaagccaccttcgactattcttgcaaagcagagcaacaaacaaaaaggccttcccacgcagaacatcagttccctgttctatcagagaaatgagcccagggaccaattgtttgtcatctgataatgaaagaatataccggttcatgcttgtcacagtgtgactgttaactaatgccgaattgagaatattgagattaatctgctgttcacgtccatttcccttgataagtgtggatgcaatatccctgaatgatatcttttccagaattaaatgaatgcatgatggactgaagcgggagaggcgggccaaacaagatcctgcaatgagccttgtactctcttg

SEQ ID NO: 188917 - DNA, 303 bp, Zea Mays
gtcatttctcgtcagatggaaaattaattgctactggaggtcacgataagaaggtaaaaagacgtgttgttgtgcttgctaagctatttagtggtgataattatggaatttgttcaaaatcaccattagtgctgtagtactaatatgtaattgctaattaccttttgtatctcgcaatgcaggttttcctgtggaatgctgacactctgaaacaaaaatcaatgctagaggagcattctctgctcataactgatgtgcgcttcagcccaagcactcctcgcctcgccacatcttcatttgaca

SEQ ID NO: 188918 - DNA, 699 bp, Zea Mays
cttctctgcctgaaactcagaaataaaattctgcatctcaaccttggaacgacgaaggtcatcattttcctgtagctgcagttcaaacctagccttaagtgtatctgtctcaggttcagtatcctctagatctgctattctagcttggtacttccatgtcgcaccagattcacaaacttccagttcattagaatgtaaaccatttatctttcttctcagcgcagataactcaagatttctttgttccagctcctcttggcattttcggaacttttcttctagctcacaggtttgagacctaaaatttagcaccttcagctcaaggtcagcacattttctctgtatctcatctgcattagacattgatgactcagaaaaactgtcatctcttaacatttccttattcctaagatcctcctccagttgatgaatccgggatgtaagctttttgaattgcagctcattgttgtttgcaatatgaggaacctgaccttttgtcagaccattttctttcagcttatatataagctccaaattttcatctgttagttcagagcagtccttctcaagctcttgtattttagcccttaaaatttcattttctttctccaaatcaagataaatggcattggaagctgcaccatctgcatttccaatgttgagagcacgatccgatttctccctcggaattgtgatttc

SEQ ID NO: 188919 - DNA, 398 bp, Zea Mays
cttaaggctggtgatactaaaacacaaacacgtaacagatggaaaccacacaagtactaataaacactgcaaagcaataaggcatgacaaggaggagcatttcaggagaaacttggatagcagcacaattagacgcaacagatggaaaatcacataagtactaacaaacactgcaaaagcaataaggcatgacaaggagatgagcatttcaggagaaacttggatagcagcacaattagacgtaatagatggaaaatcacacaagtactaataaacactgcaacataaggcatgacaaggagatgagcatttcaggcgaaacttggatagcagcacaattagtgtcatgccttagcacatataagtacctgtaaaaggatcagtttgcttgttcaatt

SEQ ID NO: 188920 - DNA, 286 bp, Zea Mays
ctctggtattttaccttatgagatcggtaaccttcaaagtttaaacagattacaggttgaccaaaaccaattgtccggccccatacctaaatcattttccaatttaagaagtgtgaaacatctgtaagaattgtttatttccattgtctatttgtctctctgtttttcagtttcatctgtacttatttctaacctcaaccatcctattcattttagtcatatgaacaataattcgttaagtggggccatcccgtctgaactttccacattgcctcttcttcttcac

SEQ ID NO: 188921 - DNA, 309 bp, Zea Mays
ggtttagacacatgccaatggacttttggctgcctactcagcgagatccggcagctgcgccgctcttcagtaccaggatccaggagtccttcttcatggctcagctgttagctcagattgctctgcaagctcacctgcgtctggatttcactgctttccgtacaacggccgacgtagagtcagagggtcactccacttatctgccagggttatactctttgctaacttttggtggcagatatgttgagtgggtgagagcattctatggcacagtttcgatcgaccctgaccatcagtggatgaggtttt

SEQ ID NO: 188922 - DNA, 351 bp, Zea Mays
gctctcagtccattcctatgcctacacatatgcttgctaatgtaaggaaggaggtagcaaatcaagtcactgttggccgcactagatccccacctatcttctctctcatttggtcaagaagtctcccatgcttgtagatgaaccttgacaccttctttgccatattgatacaagtactgaaatcttttatcttagcaatgtcttccaacatcaaatccaagcagcgggcagcacaaggtgtccaaaacaaatggggcatcctatccacaagaatcctacctgctgccttgaagttggccccattgtctgtgacaatctggaccacatattccttcccaatcttgttgattt

SEQ ID NO: 188923 - DNA, 462 bp, Zea Mays
ataaattattctaacaaatgtgatatgagtttctttaaattggtggatttcctctgatgctagaacagtaccatccataacaatcttgaatctaatattcagcttgtcgatactttttattttaccctgttcttgtgttctgtttggaaaagagatttacttttccttttactactgactgtttttcctttcatgccacaaggtttcttccttcagtaaatttctttgcaagaatgtcctaataggatgcaaggctcatgatttgtgtggtctccactattttgaggcaactgagtatcttgtattagtgtcacttggtctgcactttctcaacaatgaaaggctagattagaagctggatgatcttgcaggctgaaaattgaattgtttctgcctggtggtattcattcaaactttctaatagagggaaaagctctataatggtaaaatgtgatgtttgat

SEQ ID NO: 188924 - DNA, 523 bp, Zea Mays
ccgacccaacgagccttgtagcaatgcagagtaccattggccttgagcttgtgacgagtgctccacttgccagtgaccacgttggtgtcagggggacacaacaccaagtcccaggtgtggttggtcagcagggcctcatactcctcgatagcacggcgccggtggggatcagcgagcacgatacgaacgcaggggacaggcgagagagtcatagtagtggcggtcgtgagcccccgtcgatccactggtcagaggacaccggctgagcggtctgtgaccattgggtggacgtggtagggtcgcggtggatggcgacaggatggtgcaccgacgactcgttacgagagcgggccagggcatggagcagctcgtcggaggagggacctgtgaaccggcctgcacatgccgctggtagacgcgggcgggatcggcaaagcgagtcaaagggggtcggagaggtggggacacacgcatggcacggtcgaaggcgtcgggaccgcgtagggtgtggaagaagtcgtcg

SEQ ID NO: 188925 - DNA, 394 bp, Zea Mays
tagatcgatggctctggttccacgaaccgcgcgaatcgttatccacgactccaggtcgtcagatcaagaccaggcggttcagattcggcacgaggggtttagtctcctccggtcagctaggagcggcgctctccgcagacacgacagcgcagtcgctggaggcgaggcagaccggggcttctagggcgctaggggttggtctgggtagccggagaggttggggaggactcggcaaacactatggggaggtctgagtgccaagaatgggactgagacgtgcagacgacggagggggaccctcgggtgaaaccaaggttactctggcgagcataacccgtcgcggtgagggttaatctggcgctctgttgtcggcataggctctagggagagggtg

SEQ ID NO: 188926 - DNA, 535 bp, Zea Mays
cgcgaacagaataagaaagcgaattaatggaatacgccttttctggtatgacgtttctaccccttatcctcataactatgggccaaagtgtaatttgctccggccaaatctccgttcccctccttgtcccctggggttttgctgttcctcgttgctgagcagtgattggaggggctaccgggatttttgctacttgcctccattgatggcttatcttcttctccatcctcagttcacttgctcccagcccccttctcatcgattgaggtaatctctcaacatagtgaatccgttgctgtatatcccaattatcaatgcgagtccgcgtgaaacatgccgtttccccccgtatggtcgctgcagtctgtggtgcgatagaggagattaggagccagaattgtgtctttgttcattctgggactagaaatgcggctctgtcctgtgattcatggacctggatattgtctggtcaagtcatttggattgtgttgtgcgcaggggtcaaatacattacaagacaaacaatatggggaag

SEQ ID NO: 188927 - DNA, 466 bp, Zea Mays
agaaattattagttcattcatcactgaaatacttcttgcattgaaggaggtaatctaaagtttacgtttggttctggaggatttttcaactattagtttataaccaggaatgcttatctcaaccaggtagctggcagaagttttagctgtgcaatattcatgttcaaatgttacattcacctgtattagaacaataaagttgggaagtttttttatgaatggtgtttcagaaattccaacctaaacttaatacttacgttattagtttgcttctcacctttttggacatctatcagtatgatttatataatatgcagtttcatgtttggtcgtccatgagagtacttgtttattctgataggacagcttttgctaatacatgtggcataccaaataaactcatgtgattaacagtgaccggctgatgtttattgacaggccaacaagaaaaccagaaacagagctt

SEQ ID NO: 188928 - DNA, 412 bp, Zea Mays
tgcaccactcatttgtttttgccagtatcatgtttgtttgcatgccttactcaacgtcatatcagtataaaattaccctataatatttcttgtccataatgggagttccgtcaaaaaactaaaacatttttttgggattttattctcttggtcccttgttagggcattactgagtgcagacaagcctgtctgttgtgtcatatagttcaatgtgtggaatctgctgcctacatccaaaggaattatctcgtcatctagaaaccaagtctgtaaacacaatgtttctgaattattttatacccatcctactttgtctgtgtcaggagtagccaagtgattgaaacattgcacattgtgtctccatgtgtggtgtgcgtgtgtgttttctttcctgctccattacagtgacctg

SEQ ID NO: 188929 - DNA, 279 bp, Zea Mays
gtatcatgatccaggtcccaagttgaaatcacagcaaaagaaggatacatgaaggaaatagaatcatagacaaaagtatatgacagaatagaaagagtaatgtcacattgaatggctcagatttgccccaacatcaacacaacactcgcagaagaaacatgaactcctccctccacacgctaaacgaacttttgagtaggattgttcacttggaaatataaacgacaccaccgccacagcaatggcaacaatcagttgcaaactggttgcttgtatatg

SEQ ID NO: 188930 - DNA, 495 bp, Zea Mays
gtggcaagctttggtagcggggcagcttctgatcttgacaactgctctgacaccagtgataggcattccgaagctgggtccatgctctctactgacgaggcccgacagctgagccagaactcggctgatcctggtggtgattcagatggaaggctaagtgatatatcagatggcggtatacccgcgggtgcagaaactgacagttcagcgaacaacgttgtggaccaagaacaagacaaaacatccgctactggaaaagagcggttgtgagtattaccagttctccatgatcttagagctaataatattttctctcatttgacatttagctcttgcaaattctgcggaatggtttctggccttggctgttgtctgtaacttcttcgttctttctcatgcagagccaaagcagtaagtcgagtccagaagctaacagtacccaaagtcggccaagcatcaagcttgaggcctaaaccaagagatccttctgctcct

SEQ ID NO: 188931 - DNA, 414 bp, Zea Mays
cttcaaccacgtctcgtcacggccacgacgagaccaccctcgatcatccgccacggctccaccaggtaaaccctcgctccaaactcagctgatccttcacgctatggcatcggattcgcagagggaggagacgcgatgggatcgggtttttcaaaagttggattctttggaacaacggatgttaacgatggatggagttcagcagcaactcatggcacaagctgatcttgccgctggagttgcacaagaagccgccagagagaggttgttgatgtctcggcagattgaagagaccggcaaggtggtagcgcagatgcggctcgagcgactggcagcacagcttgactctgatcagggatcacagggtgaccatcatccccatcaccgtcggatgcaccatcaagatgcttcttt

SEQ ID NO: 188932 - DNA, 285 bp, Zea Mays
gcccattgcccattgcgccctgcgccccctcccttggccaagttgccatttgccttccctttccctccgcatcggcccatcccagtatcctaccctccccctcccactcacggcagctgccattgtcgccctgtctgcccccctccacgctctccctatccaccacagcacagcacagcacagcgccacgcacgatctcgccggtgccaccgtgctcccccaccttcaaatgtcgggcctccttccaccggcgccccgcggcacggagcactgagcgcagtccgg

SEQ ID NO: 188933 - DNA, 342 bp, Zea Mays
ccgacatggactgacttcctctcgtccgggttaaggagaagagcgagggcgaaggcgacattcacggcggcaaatattcgagactttggaaaaccatagataccggtacacactactgaggaagaagaaaaggcaataataaggtgttggatgaaccagcttcaggcacgggctgactccctatcatctgggttagggagaagagcgaggacgagggcgacattgacggccgcgaagatcgatagactggaaaatcgtagatactggtttgcgctactgaggaagaaaaaatggtcataaggtgttggatgaacctgcagaagctatggaggcgaacgcagc

SEQ ID NO: 188934 - DNA, 282 bp, Zea Mays
cggaggtgaagaagaagcctggcgcgcgtggttacgtgtcctagggcgtggcagtaactccggtgatcaccggacatgcaccgcatgattcaccgcgacgagagctagcgctaaggcacgtggtgtgcgacggtgacagcccgacggcggtgagagttatccgagcgaccgacggctgggaggaaagtacgacatgcttagccgtgatcgagctcaagtggaccagacgctgggatatttactggtttgtgcttatccaaggccacggcgcacgaatcgcag

SEQ ID NO: 188935 - DNA, 703 bp, Zea Mays
tttacagggccgaatgggtatccttcgttcagagtcgtccgatcgacaaccgagggttccgattagatcaagcccacacccgaatcggtatgcgatgctatgcgttggattgggaatcaacgacgctgatttaattaaatgaaacgatgtatttccccctctgatcctaggcgcaagctgacacatcaacgactagggttttacaatgcccagatccgatccctaccctcggatctctaatcgacggtcaggattccattactgcaaaggggtatgccattctaatcttggccttcaaacgcagatctaacgggcacgataaccctcagcctttcctcgacgcggtggcacggcgacaacttcgcaccgacggcggcgccatggccggcgatcgcatcgacccgattgccgaccctaaactttaatccgaaagcagcagcacgaagcggtaacaatatggtatcgcgtaggatgctactcatcgagattcgcagagctgaaccggccacccacggcgcacggcgaaaatcgaaatccggcgacgaatttcagacaccaccacgatcgccacctccccggacggccacgaaaccttcaccagacaccccgcaaagctcccggacacgactcatgtgcctggtcctttggcgaagatggtaatggcgctggcgcacgattcctggtcgcagttcaagcctaagcc

SEQ ID NO: 188936 - DNA, 463 bp, Zea Mays
ttaatagtttgtttggaaaactgttcattggatcaaaagcatcaaaaaccccaagggagttcattctcaagaaagatgatgtgttcctttggaacaaagaaaatatgtatttgcttttacctgtggattctactctggattctcataaaagtgtttgcatcaactggagtgtaattgatgtagtggctacagctgttggattcatgagaagcatttattcagatggcaaatgtaacctaactgataaacttaattatgaaaaaaatggtgaagatcttattcatttggccaacaagtcatgcaagggtaatgatcttaaaaatatggtggttctagcaattcacactggaaagatctatactattgttgttgtatctgatttatgtgccaatagtaaatttgatggtacaactgacaagaaagaagcaaaattccggacatttgcagaatattttgagaagaa

SEQ ID NO: 188937 - DNA, 665 bp, Zea Mays
tccattcctaggatcacatcaatcccttgggatggcaagatggttaagtctgccaggaacactaccccacttaaaaggattctgacttgggagcacttgagctggcatagaaggtctaaccccggggttcgggtgaccaaaggaatttctaggggtgtagaggggatgccatgcttttccacaaacttagtggctataaatgaatgggatgctcctaaatcaaaaagcacagtagcgggagtaaattcaacaaggaactcaccaagcactactcccggagcttgctgggcctcttgagcgtcgacgtggttgactcgtgctctgccctggtacggggtccacctctactgactgttggagggaggtgccttggaggtaggtgacgagggaatcttggggccattcaccgagttggagtaggtaggtccgggtgccttcaactgggggcagttattcttgaagtgactggggtctctgcagtgccaacaggcatttgctggcggttggttgcttgcaacagagggggcctgaaaggagctctgactctgctgactgtagcatgacggagtaggtccagctggtctagtgaagcttggtcccctaggtggaagcccaaaggatcgagctctttggtgacggtcttgctgctaagctcggagaacctg

SEQ ID NO: 188938 - DNA, 473 bp, Zea Mays
aagaaattatctttacttgatctacaatgtccttctcaggtatattatgtgatgttatttgattggctacacatctatttaatgttccaacatttttttttatctcatgccaattcaatttcagagcaaatggttggttctgtctttgagtttggttctcctgctatgctcctcaaaggagagttgcttttattttgttgatactggtgggatggagcaaattattaatctgctttgctggaggacaccaaaatctgcagctaccacattgcttctcctaggtattgtggagcatgctactcggaatggttttggatgtgaagcttttctgggatggtggccacgagctgagcacaccagcatacctgttggcagcagcgatggttattgctctttactgaagcttctactggaaaaggaaaggcatgatattgcctctctagctacatatgttctacagcgcttgcggtttt

SEQ ID NO: 188939 - DNA, 592 bp, Zea Mays
ctcaggatagcttcatcaggtaaatggatagtcaagtggaccatgacatcaaaaaatgcaggaggaaatattttctcaagcttgcatagaacaattgggatttcctctttcattctatgcaaaacatttaacttcaatgtcctagcacataattgctgaaaaaagttacctagttcagcaattgctatgtacatgtcattatccatgattcctcgaagagcggcaggtaaaatacgttgcagtattatatggcaatcatgagtttttaacccttggaggttgcatccatcagctgtaatacatgttgctaggttagaagcatatccatctggaaactttacacttcttagaaagtcatagaaagcaagcttttgctttttatccattgtgtagggagcaggaggagcgctatatgaatctccatcacgcttcaaatgcaaagattttcgtatgcccatgtcttccatatcaagcctagcattaatactatccttcgacttcccgggaatacctagtaatgtaccaagaattgactcacatatatttttttcgatgtgcatcacatcaaggttatgtcgcagcttcaaacctg

SEQ ID NO: 188940 - DNA, 440 bp, Zea Mays
aatttttttcgaccaacggactcgggggctgggccccatacatccgagaaaacgagttgtaaaggcttggtagagacacttgttgacactggataaggtaattggtgactcttgccttgttgacaagcgtcacagacagacggactacttgactcactagaacatatgatctgattattattggctaattttcgaatgatctgcaatgatggatgacccagacgattgtgccatagagatggagaggacttgatggcgccaaatgccccccgccaagaactgtctgatggaaggggataaagaccatctctgcatctaccttgaagaagaaccttcctcgtgtccagatccttaatcaaaaaatgatttggaaagtattcaagtgaggcatgattatcagatgagaaacgatgaacagaaacaagacttttttgtgctgt

SEQ ID NO: 188941 - DNA, 320 bp, Zea Mays
gacgtcgggcccagccgagccgagaagctagctgcggacgtaggcatcggcgatgccccaagaaggatctgtgggacgggcttcctgcagtccgtcgatatgcgagaggagagcgaattttccacagagagaggtgaagaatggttcccactggttgaagttgggttttgccagttcaagagtcaccgggatgtggttcttgacattgatcgtcgcatagggggcgacaatcacagcgggagcaggagtggtggcgtcggtcatggtgaccaggggggaggaggtgcggcgcaacagggaggagttggcgctgcgcacag

SEQ ID NO: 188942 - DNA, 285 bp, Zea Mays
ataggaataggtgtgttttttatggttgtaatcccagcttgctcacgacccttaggatggctagggaagaggcggtgctctggtccatgactggtgccaaggccttgtccttcctccaagtcgatgagttgctggcttaaaacagcggtgtgggtcgtgtttcctccatgttttagtcagtgatccgtagttagtctctagtggtgtatgtgctgtattggggttctctccccctttcttttcttctattaatacaaagatgcgcagctctcctgcgtattccag

SEQ ID NO: 188943 - DNA, 449 bp, Zea Mays
gggaagtacgcattggagctccgagcactggacaaagaactgccacacttactgctgtagctgatgcaagcaggaatggtattttaattagcacaaaggaacctgctgagtgctgactggcttggtagctacacctagtgatgtgggggctgggactgggatcattgaaggcacagggttgatcgctgcctgcgtcgccattgtagtttgcctcaccatgaatccttgcgctgccacctgtagtcgcacagttgcctccatttgagtgcagaagcaggcaagcattgctgtccagagatcttcctcgtcagccagatggcgggaacactcaaagatggcagcaattgtgtggttcaatgatggtgatggatcactggcagcacaagtcatgagaaaggagccctgactcatgataccagatgttatgaaccttagttaatttggggaca

SEQ ID NO: 188944 - DNA, 444 bp, Zea Mays
gcatcacgcacgaagcgcataagtttgttcccctccacccgataagttgattcccctcccacgcttctcgcctaacaaaccagactagtgtaaccaaccatgcaaccaccacgagcgcttcctcctcatcgttcccgtccaccgcttctcgcctaagcctttatctattgcttgattgcatgtgtaaccaaccatgcaaccatcacgagcacttcctcctcgttgttgccatagtatattaacccccaactttacatctcttttcctgtctccgcctgcctcaccaagattctttcacaccgccatagaggacatcgagcaggatggacttgctacttgccgccgccacgccccactcgtggcgccgcctttaccttccccatcgacaagcgtatcaaaccattgacgtgactcttcgtcgccatgcgcttctagaggcaacag

SEQ ID NO: 188945 - DNA, 585 bp, Zea Mays
acataaattggcaaacccgattaacactgaaggagatgtcagggcgagtcaataaaagatattgcaaggcacccacagcacttcgatatttagtcgcatcatctgaagaaagcttttcaccaccatcaagagataatttttcagtgggaagcataggagtgggcacaccgttagaagacagcatgttggtgcgactcaatagatcacgaatatatttgcgctgtagcaacacaataccatcagatgtgtgatggacctcaatgccaagaaaatagctaagctgtccaagatcttttactgcaaaatcatcccggagttgaacgagaagattgtcagtggccactgttgatgaactgagaataataatatcatcaacgtagataagaatgtagatctgaataccatcttgattaaagatgaataaagatacgtcggccttggaagcagtaaatcccaattgtatcaatttggagctaagacgggaaaaccacgcacgaggcgattgcttcaagccatacaaggctttgtccaatttgcaaacatagtccggatgcttggagtctagaaaaccaggaggttgcttca

SEQ ID NO: 188946 - DNA, 277 bp, Zea Mays
aacgggccgagcctgacgtaaggcccatacagccgtgcagcctctgcatttattgcggagaggacgcgccgcctgccactgcgcagacaggcgacaagccctctcgacattaaatgcgccctatcccatccgttggcagacgacgtcaaggtcatccagtagacgacgtgcctgaccagtctgttggagaacaatgcgcgcgttccgagcagcacactgtactcatcatcccttctacaagaagcttcccctgcacgcggaggatacacagatctcg

SEQ ID NO: 188947 - DNA, 464 bp, Zea Mays
cgacaacgtaacagcgaggtcagttcagcctggagcgcgcgcgcagctttgcaggggctcggacgaggaacgagcgggggctttgggcgccagcactcggcaccaggggctgccatggctgaagtgtagaggaagaagaaaagcctgtagaagaggggagaaggagatgatttgtcacctgcgcatgaagaacaacggagcaggcacgcaaggaagagggtgacgacggggctgctcctctagcgacacgaggaagatgacgaggcggctcctccaaccatggcgacacaacacatagaggagaaagggcgtaggttgctgctgtgcgagaaggaagagggagggggtgaggttgctgtgcgcagacggttttgcgcgaatccgagaaaaatgggatgaggcgcgtgcatcgtgtgggagcagagggaaagttggggaagagagagatggcagttgggtccaca

SEQ ID NO: 188948 - DNA, 348 bp, Zea Mays
cgagacggccgtaatcagcagcaggtgcacaatatcgccaaccagccccccgctggtgaggcccctcgccgccaggagtatcccccccagggccgaggaaatggaactcacggtcgagggcgggggcgtgcgcagcagccacgaagattttactgcctgttccacggcgaagactgcgcgcatcccacaaaggactgcccagagacgaaggccaccagagacagaatggcacgggcacagctagccgacaaccccagaattgtcgcgcacgcataccagcaaccccctcaaccatacaaccacggccccgctccgcctccgccgcaccacgcataccaacaccaccag

SEQ ID NO: 188949 - DNA, 284 bp, Zea Mays
catttatcatagcggaataacaaagtggttcagactgagatactagattccccctccctcctgtgccgcacactgtccctgcccctgctgcccaggctgccagcctcctacggcacgggcaccatggccaccgccatgtccccgtcgtcctttgccctccaacctccttccactacaatctacgcttctcatcccctaccaatctaagcccatcacaaagacatatatagtttatcattatttacatttagctattcagtccaatattatacaccttccaagtg

SEQ ID NO: 188950 - DNA, 359 bp, Zea Mays
cttcggatttgaacctagccctggatattctaaatctctttggtgaagcctctggtttgaagaccaacttgcaaaagagtaatgtttttccgatacaatgtgcagaggcagatgcggctgtggttcagaacagtttgccatgtgagctgaaggatttcccctgtaaatatcttggtgtgcctctttctccgtgcaagcttacaagggatcaaattcagccatttgttgatcggattgcagaccgtctccctggttggaaagctgacttgttatctcgggaaggtagaagaatcctagtgcaatctgttttgacctctatgttggtgtatttgctaatggctgttgagtttccaccgtgg

SEQ ID NO: 188951 - DNA, 472 bp, Zea Mays
tgttgatgtactggccaagggactcatatcacaacaaggtgtttacaagcactatgttctggggttgctggcatcacttgaaggccgcagtgaagcacaatcgaacaacacagattatgaaaagttgcaggcttccctatgcgaatttgagttgaactatgatagttgcagggagtacatccaagctcttccagccacagatatttcatatattgtaagaaggtattgcaccctttgctttccatctaacttagcacgaagccatccacaggaaccttcatggaggaaacctcttgccacgctactagaattttggtctaaagttgttgatgacataccgggggattcaattgatgcttgctcatatggaagaacagactacttaaattcaaataggttatctctgtgcatgagagctttcaggcagctattaataattgatgagatagcactgcaccaaggttgggatgcc

SEQ ID NO: 188952 - DNA, 378 bp, Zea Mays
gcgcgtcgtctgcgcgtctgccgcccgccgtcggtgtcacgaccatcttctacgtcgactcagcccctccagtgctgttcgcaacgccgtccgtccggctcaccagagacttgagcaccgtcgtggccttcttctccgtcgccgtccacgaagtctgtcacatctgcgaccttctatgccgaatcgctgtccgggcagccatctgcgtccacttcttcgcgcccaggatctcgccgtggtctgtcgccatccacgctgtctaccctattcgctagcgtcgcggccattccagatctgctgtgttcgactacgcatccagctcacgccggccagatctgctggcatttgtttttcggctaagctgcagcggcgtatcca

SEQ ID NO: 188953 - DNA, 335 bp, Zea Mays
ctcctcctccttcctgccgtcgccgacgactgccccacctgtactctcccctgcgtcctcctcctcggctctgctacacgccttccttgcttcctccctccaggcaggccagctccttcctcctcacgctagctcggtgtcttccttttcccttttccagcgcgcgccggccggccggccggccaaattccaatcccatccaccatcttgttcttgtcttctccgacaattaaccatcaatcccaaaacgtcatattcatcttgtcgaggccataaagtcacaacaaacacgtcgtccatgcatccaccaccgcatccatccatgaagcccggcg

SEQ ID NO: 188954 - DNA, 461 bp, Zea Mays
ctaacaatgaggatggtgctcctgtcgtcgagggctcgcagtccaggatggggcgcaagcggcggaggggtccgcgtcgtaggcctgaggcttccagggggcctcctcctcccccttccccgccggccttcgtttctggcgtattggaaagccagagggctgggcggactgcagctgtaagagatgttcccgctctgagacctatatgcgtcatggagttctcggcggggtttgctcgggaggaagttgatctccgacgtgccctcttcgtctccatcactggtaaccgtcctatggtctctcctgacatggttttggacgaagttgcgcggtcatacgatgttgatcgtggcctgttgagaattcatcgatccaaccctgaggatttcattctttttctccctgacgaggagttagctgtgagggttttcaatggcggcagacatttccttgctcctggc

SEQ ID NO: 188955 - DNA, 430 bp, Zea Mays
tctaagattcctccttagtcatggtaggagcaaaccaaacaattactactagatttgaagtcttgtgattctgccatgttctttgtctcactatccctggtcctagcttgtcttggcctagagccaaaataaaactaggggccttggtataacaagcgctcacaatcacaacttgtagtgactaatgagaccaagtacatgataatagaccgagaatagtctttaggcctatgaaatgatctattagatgctttacaaaatcacaatttagatcaactcatgtacaactatgcggtatgttccctaatggactgcttctcaattaataatttataaattacaataaggaaaagggagcctacgatgcttgctttagcttgtgtggactggtgccttgctattagaaaagggaacatgtggtgcttgctct

SEQ ID NO: 188956 - DNA, 490 bp, Zea Mays
tgagtggaggaacatcgaaggtggaggccgtagtcgacagtgccccgaagataccgaaggatccgcttgaccgcacccaagtacggctcacgaagatcatgcacataaaggcaaacctagtgaacgacatatgcgatgttaggcctggtgaaggtgaggtactgaagagcattagtaaggctccgataggcggtggggtcaatgacaggagcgccatcgcaagagtgcttggcttgcatctcgaccggggtcacatagggcttgcagtccagcatcaacacacttgaggatgtctagggcgtactaccattactggaggaagaggccccagagcgagtctcaatggcaatccccaaaaagtgaagggggcccaaatccttcatgacagactcatgctgaagagcggtgatgactcggtacagtagaaccgaagaggtagtgagcacgatgtcatcaacatagaagagtgggtacacgatatcgctaccac

SEQ ID NO: 188957 - DNA, 442 bp, Zea Mays
gttcgttcaaaattcaccaatttgcaagttgtatcagtttatttggagctgccatgtgatgtgttgttttccaaaatgttaggttattacagggtactaaacaagagcaaatggctacaaccgaaccagttcatccacattacagcaaatgagtaaactgcttagaaaactcaactttacatgggagaacctacagtcacatgtcacataggcttgcaaatgcaacttccctatttcaattggcaatattcctcaatcatcccacctatgcccctggcttaataaaatcagtatccccagttccccacctccacacaccgaataaaactttctctgtaatcacccaactgaacactacgcaatgatctccgtcaaatcgaactctggaacactcaaatccgacctaaacctgactttaaccctaatccaccccgaacctaat

SEQ ID NO: 188958 - DNA, 403 bp, Zea Mays
atatcacagtgatgtaagtacaagggtaactcactagctcctatagttcctaaactgcaaacatgtcaaaactggcacccactctagcagtctctattgactacaggaacatttccctcccctgaaaatgtggaacccagacgagtccctgaccgagatcactttaccggtggcagcagaggcgtgctccaagaaagagtgacagtccccacacatgcggatgttcttcacgacgcggattgtctgcccagggcctgccatcagaagaccgtacattgatgctagcttcatgctgtggtacatcaggaagtgcctcttctggtactcctcgacgtcgtgcagaacaaaggtggtgtctggctcgtacccggccttgatgcactcgaggattagcacatccagg

SEQ ID NO: 188959 - DNA, 638 bp, Zea Mays
gtcgtcgcctgctctggcatcgcgttcagcggtatacatgcagcacacgttactttcatcctgattcctgactcccgtcccgacggctgctctgatgaaaatgacgcgtgaattaatccggcaggagggttcgggagctacatgttcgcgatgagtgagaggattagcgagcaatcgggggagacatgggatgcgcacaacatcaagaaccccggtctgggctggatgatcggtttcctcttcatcgtcagcttcctcggcctcttctccgtcgtgcctctcaggaaggtacgaacgcacgcgcacccacaaactctgtgtccgacgtttattcatcacatcatgatatgatgccggccggctgtgttcagataatgatcatcgactacaagctcatctacccgagcggcaccgcgactgcccacctcatcaacagcttccacactccccagggcgccaagcttgccaagtactcataacccggtcacccctctctgacgctgctgtgacggagctgctcctcctccgacgatcctcaaacctgaaacggtccttgcatgcaggagacaggtgaagacgctggggaagttcttcgccggcagcttcacctggggcttcttccagtggttctacaccgc

SEQ ID NO: 188960 - DNA, 452 bp, Zea Mays
tcaacatgtatcatttatgatcatcaacaataagtaggaaatagctcttaccccatggcgtcttcagtctaatctgctcacgaagatctgcgtggaacaaatcaagtggcttgtcagccctataatttgccacttgtgggaacagatctcgacgttgttttctgagtgcacatccgccatagaattcttcctcttgattcattagtgacagcccttagaccatccctttcacaccgagttgttggagtgaccaaaaattgagatgtccatagcaagcatttcatagccaagcctcatcatccgcctttgccaccgatagacaggagccgcaagctgcatcttcaacaaatacaaataattcttgatatgaggtgctcgagtcggtagtgagcgcttgacatcaaacaaactgtagaattcatcctcaattacgatcttgcagctagaagtgg

SEQ ID NO: 188961 - DNA, 363 bp, Zea Mays
tcatcagttgcctggtgctgctcttttaactctcaattttactccaaaggacatacttaatgaagggaaacctaaggttagaaatctttactgtcattttctttggtgatgctattttatctagtcaccgctcattgaaaaagctgaatccttctgatattgtatgttatttgtgtttcctgatctcattcacaggatttgcctagagttcattccgcttttgagcaagcttttgtggaaattgctgaatctatgtatgtgtcaagaaacatagtggtagctcttcttgccttgcagtcatggaagtcatttgtttccaactggatgcaagcagttgtggcattgcttgacactaaagactcg

SEQ ID NO: 188962 - DNA, 617 bp, Zea Mays
aaagaatcctcaggcattggcaagcgagaaactgggaaatctacaaaaaggactggtaattcaatctcttagccctgacacaacatatgcacattgtgtgacttggtgaaaacttatgcacaaaattttccagctcctatagacaaggctaagactgctaaagaggaggccagagagttgctcttgaaggaggaagcatctgtgcgtatgaaggttgggcaagtgcagaaggatctctccttaatgttggatgctcttggcaagttggctattgctaatcctatatttactcatggtcaactgccgtcactggtcagcaatctttttcttccctctgtagcttctttctgttttcaccgttactaggcagctagcccatatattgtgcttgtcaggacttcacgacaatgaaggttgctagatagagggaacaatatgcacttctaaggataatattcaacacagtagcataccttgtttactgaaggttgaatttcgaacctacaaaactacccaaaaaattgaataattgatctgaagtaaattttgaacctacaaagctgcaccaaggtttacattttttgttatttttttctctcgaacacgcaggagagctg

SEQ ID NO: 188963 - DNA, 298 bp, Zea Mays
tgagaacaaccaactgaccggaactgttccttcctactttggcagcttgccaaaactgagcgagctgtaagtataatagtatagtgtacttccttcctttcctctctctctatgtgtatatatattggttgaattaagattccttcaattcaccaatacaacaactgttcaggtaccttgagaacaaccggttgtctggacccattcccaaggctctgctaagtcgaagcattattttcaagttcagtttctttcttgatcaataatatcttcagtttatttcttgatctgatatcat

SEQ ID NO: 188964 - DNA, 532 bp, Zea Mays
ctcaggttagtttaccccatttccccgtctctcatcctcgaatcctaccccctttctccgaaaacctagcgtgtggcaagaagccccttcggaaaccgcggttcatgaatttgctgctcgggaatgaggtgcagtggggcttccaagcgctgggaacgcgtgaggctggtaaccggttgtatgtgggggcttccaaggcgctggcgacgcatgaggttgtatgtgggggcttccaaggcgcttgctccagactttgtggtgataggtttatgtgtggtgctagactgttggtttattattcaattggcgttgggattatggacttagcatggatcagcttgcttgtgaatttaagagattagtcatttggaaattccttgaagtgcttaagtatttataggttagtcgatcagaataatagggttttttcataatcgacagtcaaagcaaatctgaacaaaacattccaagcttgtgttctggttcaaggtagcagtttcagcaatctgattgctttacctttagataagcc

SEQ ID NO: 188965 - DNA, 295 bp, Zea Mays
cttcttcaagcagcagacagggcgcggagaggagggactagggagggttctagaaccttctagaagtgaacactccttgccgggggcagctcctgttgctctgcgccttctgcagcgtctttgttccgccactcctgttcctgagctcctccactccactcaagtggttcgaatcgagttcggcgcgatctgaatttctccatccaaattttgaaatctcctgttcctctgacgcggatctcctccccatgctccttcagctctcagaaggcggccgcggcggcagacgatagag

SEQ ID NO: 188966 - DNA, 662 bp, Zea Mays
ttgcttgatttttttttctggagcaggcatgaaatcgttggatttttcagatttgtctaccacggtttcagaagttgcattttcggtgtttgctcccactacaatgctctcatcattgtgggtgctctctgatattgtagtattctcggaattatcttctactgtagcaggaatgggatcactggaatttttggatttgtcaagatcaggctcagcttctttctgctgcaggagttcctttatagttgtcgtctgatctgggtttgaagcaattgcgttctctttcatttggttgatatggctctctttctccacaagagctgcttccaattctttctgcgtgttggtaagatatgtcgtggtagtttctgaatccatgagcttgtttttcaattctgccctctcaatacttaggacaaatgtttttcaattctgccctctcaattctgcttccaattatatttgtttgttacaaaatactttaaattgtcatttcatttaaactgtttattgtaaactagaaagtatacatacatatacacagatttgtacacgtaatcatgtacaaaatttgccacacctcaaattttgtgcgtcctccgccactgctcgcccccacacctcgccctccatccacctccccaaatgacgcgccttcctgg

SEQ ID NO: 188967 - DNA, 339 bp, Zea Mays
gccgcgtgtgctgctgccacatctgacagggaggaaggtaacgttccagacggagttgccaacacagcgtcaacatctgaaacaggatactcagatggagccgtgtcagcagctgccacgtctgtgggggatggaggaagcacagtgacagaattgggagctccagcttcctccaggttcaggacattcttgaatctttgacgaaagtaaactttcagctgcttcgccttcaccggtgaaacaagaaccctgtcatcagtcatctctaacagcctaggagacaaggtccccccatcagattccaaagttcttaaatctgaaactgccacctccgagcta

SEQ ID NO: 188968 - DNA, 398 bp, Zea Mays
ttgttttgaattctttatattccaactttttagcaactgtatggtggaaacctgttatcacaaaaggtcattagctagcccaataatgtcttcatccactagttgtactctaataccctctagtctgaatacaatgcccacaatatcatagaaacgtcatttgaggtttaaaaggtgatctattgttttgaattctttatattccaacttcttagcaactgtatggtggaaaaaagttgtcttacaaccttaacctatgtttggacagttcactcacgcaatttggctaaattttccatagtctttattttattttgagaaacgatgtggtataatgatgtgcgatgttttacttgagtggacataaacaccatttaggtatgccttgaatagagaga

SEQ ID NO: 188969 - DNA, 409 bp, Zea Mays
aaaatagtgagaattcatattaggtcaccacatcaaaattgtaacctgattatagaagaacaactttgcttaaggtggtaagctcacttgttaagaaaaatccagagataagtaagcccaaagttggactgtcaggctggtggaattctgaaattcagaacttcagtgaaacagagctaactttggacttggatttaaaaatgatccagtgcaagtttgggtatgattcccataacaaatttgtagatggtatattactctacaaatttgctgcagagtgtggatcacgttgccatagaaaatctggagaaaaagagttctgaagttgctctgtcaggcatgtagcaagaaactgaaactgaacttctgatggtacagtaactgaagaagaatctcatgtttctttccc

SEQ ID NO: 188970 - DNA, 571 bp, Zea Mays
gcaaagtacacgctgcatgcacgtaccgtgtcgccagaaacgtgttacatgtccaggaccggagcgaggagagagtggaagcttgtacggcggcacggtcaaggagcggtctctagtctctactcgtcatttcatttccgcttcaaacatccacgcgcgccgtctctcacggagtcatggtcgctccaccgtgtggcgcacactggcacttgcatgcatggggtatgggcatctgctttctactgtagctgcatatggtagtcgtgtgctttatactcgtcagtcgttgttgggcacccatacgcgctgaaacggtgtaagcggatcctgacacaaacgatgggagagagctcacgtgcactacaagataaatgataggaaaatgtagcttcccgttacgtgtcttaccccgctacagggtggagatatttataggctttgcccggagataggtggtccaaagttcgatcctaccccggtcaccaactatatccggggaatattccgtgtatcagggtaacaacggtaacaacagcagtgcacgcgcagcgaccaatgcacaccgaataac

SEQ ID NO: 188971 - DNA, 522 bp, Zea Mays
ctttgacaaggggcggtgtcaaggctggcggtgacaggttctgtgctgcaacgagcaatcgctcgcataccaatggagcgaggagctggacagagacgaggcacagggccaggagccatgcactccaacagtgcctcatcttttctgcttcctacactactgcgaccatgccaatgcacctgcccgggaaatgcaacagcaattcttctcccccttcagaaattcatggggatggccaatggacaacaatctcttagcaccgtggaaccgattgctcgacggaatccattggttttgaccagagaactttgcaacagccccagaatggcaccaccttcggggaatacatgcatgcagaacgcgtgaaattggagcaacaagcgagagcttgtgcaacagacacctggagatgttcggagaaatgcacgagcccgggtgaggaagctcagacagaatcgcgaacgtgggcgaccaaggcaaagatcgttatgcaatgcaaagctgcaatgcgcccacgaaatc

SEQ ID NO: 188972 - DNA, 719 bp, Zea Mays
caatacaagtaactatggtatctcggtggttaatgtgacagaaggaaagaaccaaaggacagaaagtcgaagcaagcctaagacattgcaaattgttgtgcctgattttgatgctctggaagtcacacacagcgcattgacagctgatcggtgtgatggtaacagtaaaaggttgcatttagcttcgactgatacacaaacacggcaactaaaggataccaccccagctgctcaaaggttggatgtgaagaacaaaaaatcattaagtgttacaaaccgtaacaaactgcaagttcttacatctgatttagacacacgaccacacaattatggaacatcaacatctggagtctataccaataaaagtcaaagttcagaatttttgttaaaccacaaaaagctgcgagtttctactgacatgcagtcgccactctcaagcgaaggcctacggagtccaccaatatcatgcaagagacatgcagagagtatgtcgtcccctaagcctaggatcgtcaaggcgggtacccttggaaaacaagatgtcatctctcgtgcgaactcatttaagaaatctaacaagggaggtttaagttcagttgataatattccagtgagaactacccaggctgtcaaaagttctgactctcagacattgtcacggtcatattccttggggaacatggtgaatgctaaagctccagttccttcaccaagaggtt

SEQ ID NO: 188973 - DNA, 336 bp, Zea Mays
ctgctgaccacccatgcaacttttaaaggtctcaaaaagccacctgaatgtgtcaattgtttcatcccgaagaagtgcttagccaaaggactcattcttcaaattattgctgcaacccacaaacatggccaatggcatatgcttgctgttagtcttgtgtgttgtgtcaaatgtgactacatccccaaaatccttgtattctgcacgctgacttgcatgacaccaaaaaatgctctgaagcacctttgtttttgggtcaaaatccacatcccagtaaaagtattcattgtgttctttgcactccctgaaaaattggaacaatttatccatgtcccc

SEQ ID NO: 188974 - DNA, 1592 bp, Zea Mays
atagtactctgcatctctcaatagggagtaagaacgacagcgcattgccaggatagaaatcgtcctgatgttcttcgtaagtctggcatttagaccaggctgacaatgtcagcttccgagttcaggattccataccagcaagtaagtggctcatatgtttcaaccgtatttttttaatgttttgggctggagtttggctatcaatgtgtatatatagcccgttgcattattcaagtgctttacttgggtgataaactggatatgactgttagcaatcacaccgtatgagcttttactttggatggagttttagttatcaatcattggtacataaaagagtaaatcatggagaatatgccacataatgcatgcctatggaggatatgctgatacaaaattcatgtcttattatgctttattggataataactgtgagagagttggaagcgtgtgtttgtatttattgatgaagatagacagcacatgtacaggtatatataggggaggaaggtgagaggtaaaaggaagccttctacacctaaggaaagatctagagtacaatcagatcctcaatcatagtgattgagatcctcaatcagatcctcaatcatagtgattgagatcctcccctaatcctctctatctatatcagacaatacttccatatagggcggccggcatatctgccaggcgacagccaggatacagtttctaacaataacaataataaatttcaatatgtaaaagcctcttctccccccttccttttgcactaaagtcaagttcacaagatcactgtttagttgtttggccgaggcactgttctacatgtccacttcactttgtttaattctcttgataggtttcaccttcgcagcctgctgagaatgtaaatcagtttaagacctgtcgatgtggggagggagacccgaactccacttctgaaactggtgacagtccaccggcctcttgtcctaattgccaggtttgtatgatcttcttacaactaaaggctttgtgctgcagtaaaggaaataaaagaaatggcctttttatgatcaacacgtatgagctgactttatacagtttgatgttttcacaagatgtcattactatgcatgtctgccactgatgcttatctgcaacttggttgtgcctcagcacatggccaaagcaaaatttatgagaaacttattttattattgcaaagtatactattattcaagttatggtagacagtaaaaatagagaaaaaaaatacctggttattttctccatcctttgtaagaaaactttcgaggacaatgataaatattcttctagtgcaggtccttaagagtggacatttactactttcatctaaaggtatgttttcctgcaaatatgtatgatattgcataaatagtttatttatgctatccctttttggtgccaaatggtcatattttgtttaagtgtcaaagcttggctgcccccacttagtgaccgtccatagatgatcacattttactttcgagataaaacaccacatattaaatcttttataatcaggaattggatggacatcatggaaaaagcgctggtttgttctt

SEQ ID NO: 188975 - DNA, 1020 bp, Zea Mays
ccagagatacaacgacttttcgcggtaaaatcagctcggataaatggattgatcatgtcagaactgcttttgctgttgatcctcgaattgctctttctatgcctttgaggtttccaacgaatgctacaatgcaatctgagattactcagttggtacaggtatggttcttttctgtggctactaactttttcagatattataatttcttctagatttttttctatcttcacaagcaatagatcacttgttggtacaagtatagttgcttcctatagctgctatcttttcagatattataattgctactaggtttcttttttgttttcttcacatgcaaggtctgtttcataatatctttgctttgcatcttgttccgtcagtatgtgtaaagatttgtagtcctgcaggaatatactagtgaatttaggctccacccatgttgattgagtaatgtacttggtttctgagtttagtgacttattatgcgtatttgacatctttctaatttctgcttcgtttcattgataagctggctgatgttcacattccttttcttttatagacacgattactggagcttcgtacaattcctgaagcattaccctttttcattactccaaaagcagtagatgaaaattcagtgctgttacagcaactaccacactgggctccatgttctgttacacaggcattggagtttcttactcctccttataaaggacatccacgtgttatggcctatgtccttcgtgtcttggagacttacccccctgagactgttaccttttttatgccacaattggtacaatctctcagatatgatgaaggggtgagaattctttcagtgatatgcatgtttctgtcatcaatgtacacaaaggacaacttcagtctacatcttttgctttatcattgctcatagaagccatattattttcttaaataatctattacttgtatcttatttcttatgccttttaactcaatcagaaactggttgaagggtacttgcttggagct

SEQ ID NO: 188976 - DNA, 274 bp, Zea Mays
caaaagaccatggccgaaagggtaaggactgctctgggccgccagattagaagtctacggttcagattggactataccattttatgaatccatatgcatccatggccataggatcaaggatccacggcccaaaactttcgtaaatcgaaggggtacgcgatctaatctcgactgtcaacacagggatcaacgacggggatcggattcagtcaaaccactacccgacccaatccgagccgtcactggagaatccaacggtccgcgccccatcttc

SEQ ID NO: 188977 - DNA, 383 bp, Zea Mays
caagttccaagtaaggccaggtccttttctgttgtgctggtcactgaggttggaaatggttctaatactcttttttggactgataagtggactaatggaaagagagtttctgatattgccccaagattattcagtttaataccaaagcgaattgctgctaaaagaactgttcaggatgctctgcctaatagaggatggattgctgacattagagggaccttgactgtgggtgcactaactgactatcctcacctctggaattctctttcttgtatagtactgcatccaaacaatgaggaccatcatatttttctctgctgcaactgatgggaactattctacacgctcagcttataagggtctatttacttgttcaattcctt

SEQ ID NO: 188978 - DNA, 530 bp, Zea Mays
tacctgatttcattgggaacctgactcagttggaagttctgtaagactactgttaattccttcacacaatcattcggtacaattattcatgaaccaatatttcttggaaactgtgcaataggactttgtgcatttgttcttttcttatgcataagcacactaactcttttctcttttcactcctaataaaaatgtaacacattttcatgtgatcagatcaaactggccgataaaaagtcttgatactgtgtgcttaataacattttcaaatggcaaattaatcttttagcaattggcttaatacgaacaaaaacttatgaacttttaggagatttcaaggaaattcttttgaaggcccaatcccaaaaagtctgtccaatctaaccaaattgacaaccttgtaagtacttctttcgttgttgtccctgttcctttgatagttgacaaggtcaaacttgtcatgggaactgatttgttagagatcttgatgtgcagacggatcggtgatgttgtgaatgggagctcttcat

SEQ ID NO: 188979 - DNA, 314 bp, Zea Mays
aaatccacggagaacccagcgagccttgtacctttcaagagagccatcagcattaaatttgtgcttgaaaatccacttgccggtcacaatgtttgccccatggggtcgaggtaccagatcccatgtgtgattctgcaatagtgcagcatactcatcttccatggcagctcgccaattaggatcagcaagagcgccacgaaaggtcttcggaattggagatagaggggcggcttggaacaatgttggcacccggaagccagccttggcgcgcgtgaccatgcgatggtggttaatcactggggagacagccaccg

SEQ ID NO: 188980 - DNA, 544 bp, Zea Mays
gttctcttggttcgtgtgcacaagtttatgcgcatcgacatcacatttaatcggttggtacggtgttgttgtcattgtcacatagaaattatcacatgtatgtacttcctgtagcaacgcaaagtccattcggtcgggcggtacatagttttcaatgcctgaacggaacgggcttcgcgtgcaattagtcataccttgactgtacgtcatgctgatggtttgtgcagatcgtgctagcgtagagggctgtggtagaatactaggatgtctgtcaatgtcatgtgagctttacattccctaagatgtggtattgttttcactgaatagactgatgcatgttaaacctgtaagatgcgcctttaccttgtcgatcagagtaagaggccaagtacatgcaacgagtatgagaatttcgagcactgcttattgcaactccccgcgtgtgcttttatcaatgatcaacatactcttttacaattcaatagattgtgcatgccatgtactgggagatgtgatcgcatggtattttgatgcaaaatgttag

SEQ ID NO: 188981 - DNA, 357 bp, Zea Mays
ctcgtacgaagtggatgtcaatttcaatatgctttgtgcgacgatgatggacggggttggcagtcatatagacagcactgacgttgtcacagaagacgattgtcgccgaagagatgggtgcatgaagctcctagagtagctgacgaagccaacaagtctcagccacagcgtgcgcaacagcacgatactcagcctccgcgctcgaacgagaaactgtagtctgtcgtttggaggaccatgagactaagttgtcgccgaggaagacacagtaccctgaagtggagcgccgagagtctggacagcccgcccaatcagcgtcggagtaggcagacaaacccgtaatgctgctggtgccga

SEQ ID NO: 188982 - DNA, 453 bp, Zea Mays
gttagaggagcggaaacaaatggtttgaatggcatggtattactcctgttttaattgatgagttcatgccacttttccttttttttttggtttccttattttaaacatacacgtgcagttagactaggtgtaggtgaaatgacttcctctttgcattaaaacattatgaagcattttcccctctttttgtatataggttactggtttccaccagggcatgttgaggttggcgatggagccatctgtcttagggcaggctataatggagggaggtcctgacagaaagatcaaacttgatcatagccctggacttgatgaggttctccccatcttttactcactccgaattttatccgaatgatgttaccgcttcaaatctataacatgccctgtgccattgttcagctatacattgaagggtacctgcaggctatgttggatgtcatgtataag

SEQ ID NO: 188983 - DNA, 461 bp, Zea Mays
cggcgccagcggccgccgccggcgaggtcaaggaggtggtggtcgtggaagtgcacaaggctgcggcggcagacgcgaagaacgtggcgcgaggaccagatgaggagttggacgacgacgacgacgaccacgacgacggcgcggagggtgaattgttggacgaggagcaggagacagacgaggaggaagaaaaagagatgctggatctgcaggatcacatggccattgacgacgacgagcaaactgctccgcaccaaggcaaggatccgtagtccccagtccccaccaccactgtcgtagtagcgtcttcgcaagattcacttgtcggttgaactaataatgacactgtgctcttcaattgctgccgtattgcagtggacgacgacgacgagcaagatcttgagccaccgacaaaaggtgcacgaacacctctgccaatttcgtccctattttccccctct

SEQ ID NO: 188984 - DNA, 483 bp, Zea Mays
gtgcaacaacatcttcttcgggcacagcaacgaatgaagaatcaggctgataagcgtcggtccgaacgcgagtatcaagtgggcgatatggtgtatttgaagctgcagccttatgttcagacatctgtggctgtgcgtgctaatcacaaacttgtttacaagtactttggtccgttcgaaatcttgcagcgcgtggggaacgttgcttacaagttgaaacttcctgagtcggctgcagttcatcctgtgtttcacgtatctcagctcaagccctctcttcatcccaggcatttggtgagcagctctcttcctgttgttccggatgcaatacgttttccggtacaagtcatccagcgacgtgtgattgctcgtggaggagctcaagtgccgcaggtgctgataaggtggtcaggttgtgatgctgctcttgacacttgggaagatgagttcgacgttcgtcgccggtttcctcgggcagccgct

SEQ ID NO: 188985 - DNA, 705 bp, Zea Mays
ggagtggacggtagagaggggtgggaagaagagagtatacccgcatctagagtggtgtggtaagaggcaccagaatcaacaatccagctagtgacagcaggagtcagggccatcgtgctgaaggagctagcgagtaactactgatcccacccaccgcgccaggggttctaggacgaaacaaagtggggtgggagaagcaggagtgacagcagaggtgtcaggggcgcaaaggggagggagccgaggtgataccctggatcaggcattatcagatgagtcggctagggaggaggcagacacttgaagggtccacctagggacgggccgagccatgtggagatgcagtcaatccatgggttgtagagaaagggccaaggagcatccccctagccacccccaccaccacggccaccctcgctccgagcctccgacggcaaccaccaccccagacccccccccccccgacccaagttggtagggaggatgtgcagagccagaggagagagggacagatgagcacggcgacaaatcccccaaggctggagtagaggagggcgaacgcaaagtcgcccatggcgtggagttgtagagtggcaacgacgtcggagcgaggaggggcccccttagtgagctcctcaaggatgaggacgttgcataccttgtggaaagacaggaacatgacaaagtgagtgatgcaagtccgaa

SEQ ID NO: 188986 - DNA, 306 bp, Zea Mays
aagggatcaaactccacaggatagtgattatcgatagtaaattggcgaacgaaaattggattattaataagattaggggaaaccaaaacattatttagaagtttataaggatggtggtgccaggggaggtggtaggaaggagattccaattaacgataataatggacgagagagtgactggaagaggggggaattgaaagggtacatgcgtcggatgcgatgtgattggtggcgactgtatcaaagaactagtttttttgtggaggttgttggagtgtcgtggtttggaagttggttgctagagcc

SEQ ID NO: 188987 - DNA, 397 bp, Zea Mays
ccccccagatcgcactgctaagacacctcgagttcacggggtgctacttcatggctggaaccttcacgactcacgcgtatgggagctgcaccagcagctcccagtacaagaacctggcgtacgtgctttccttcctgccttactactggagagcaatgcaggtacacatcatcggatctagcaatctatctgctcagagtaatgcaaactaattgatgggctactgctgctacatgtatgatgctagtgtctgagaaggtacctggaagaaggccatgacatcgaccagctcgccaacgcgggcaagtacatatcggcgatggtagcagctgctgtcaggttcaagtacgccgcggcaccgacgccgttctggatgtggatggtcatagtgtcgtcc

SEQ ID NO: 188988 - DNA, 612 bp, Zea Mays
cttgtttagagtaagcatagggatctgatacttacaatagcaccatttggggtcaagtaagcagtatcattcttggcatctgggacaagatcctcctcgtcatctgaatcttcaattctatcaaatgcactgatagtggggacagaggatttgggtgtagtcggtctaacaataggtccaactcttttagtcgaacctggagaaacaactggcctacctgaaagataaatgaaaaagacaaacattagcaggataactggttccatgttacagagccatgctaagtgctagaaaccatgctttcatgaaggatcttccaagtcctaaataatcctgttttttttgtgtgtgtgtgtggttgctgttgttgagaaatccctaagtagccactggtcagtgcttacattacatacatgatgaggataaactacatacacctagtaagtaggcgaggcgaccaacttgaatcgcaacttaacttggaccggcaattatttctccagaacaaagcaagcaacactgaacaaaatcaaactatcgtgcacattgtgtgatctcatttaccaataggaagttgatggtcaacttaagcagaacgcatcagcgcgccga

SEQ ID NO: 188989 - DNA, 444 bp, Zea Mays
gtcacggtggacgagatcaaaggggcgagcggttcagggcatggaagaggggaagagtaagcgagtgtggcacccaagataacaagcatggtaaagcgaggcggtgttgccgtggggtaggggatagccgaagtgcccgagagtctagagaggatgtcatgaccggggtggccaagacgacggtgctaaggggtggcagaggtagcaacggcgagggcgtagggtgcggtaacacaggatgagggaggtgggggtagcgaataggatataggggggccagagttgttgcatggggcgaccacatcacgagtggtaagatcccatatggtgagcccctagggatcgtactccatggaacaatggtttgtcagtggtgaagcgacagactgagagaagattctacatgatgttgggggcaacaaggatgtggttgaggtacaaagg

SEQ ID NO: 188990 - DNA, 342 bp, Zea Mays
gcgacaccgttttcttttcttttgcgtgggggcacagattcgatgatagtatactggagtacgtggcagtagctgtagctagtatgcctgccccaccagctagtccaccaccaaccgcgtaactttcctgggctgttgagcatcgggatcgagctgctactgccctccattcaaacgccggggaatgtctggcgtcctcgaatgatcctgctgatccgtttttgctgcgtgcctgatgcctacggcctaccggagtttggcggccacctgtatctgtatctgtatttgtatcggctggggatattgcctgtcttcatcatggctcctcgatctggcaggcac

SEQ ID NO: 188991 - DNA, 368 bp, Zea Mays
atgaggtctttgacgacttcgagtacgaggcgctccgccgtcgagccaagaaaaatgggcacatcgccaagcttgccattatggcaagggtaaaacttttccctacccacaaccgtgttgcattccatatcaggatgagctacaggcttcgcaggattgttgacaccttcaaggaccttgtggaagaaatgaacacctttggattcaacaagcttgagcccgaggcaacaacgacatggaaggagtggcgtgagacagattctattatcgttgatcctgaaaatattgttgccaggtctagacatgatgagaggaagaaaattgttaacttattggtcaatggtcatgttaccgatggtgatcttatg

SEQ ID NO: 188992 - DNA, 489 bp, Zea Mays
gttttgacgtgttctttgggctgcgttccctcatggggtctgtatggatgggtggagatgggttttcctacatcgtgggtcggggtggattgggtgcaccattgtcacgatagtcagcaactcgccattgagtgactctttcgctagttgcggaggaccatgtccctctcgctgcagttcgggtccgcgcttctttgcaacattgtcgagctcggaggaggttgaagcgttgccggtggagctggagtagtatgggatggaggcagaagagaagcaaggaccaagaatgggcatgggccctcgttgtcctccgcatacggctcgctgtccgggtgtgggaagcagcagcatctgagaagggtccagggaagcaaagtggcacgtcagcgtcgatcgtggtgactgtctgacatggttgtttccctcgatgcgacttagggtgtaggaggctgaacaccgtgcatgtctcacaaacacaattttccccca

SEQ ID NO: 188993 - DNA, 300 bp, Zea Mays
aagatggagaaggcgaagatgaagactggactggtgagagtgaggatgaaaaagagtccacgggaagagttaccagtgtgaagagaccaaagtatgcgacaagatctaaaagctcagaaaaatatagtagggaaaactcgaagactggaagtggcagaagtatcgacgaagatgacggcactgaggatgagcaagatgagactctgggaggttttttagttaacgacgaggatgacgagcctgcagaagagctgagcgatgaagaggaggaatttgacgatgaggaagatgatgattgat

SEQ ID NO: 188994 - DNA, 353 bp, Zea Mays
cgccggtgaggtcgtcaccgttgctgtgggtgcaccgccctgattggacactggtggtagaagatgatctctggaccgtaggatcaaaatccagcgatcaggggcgtaccgagtcgtgggggtatctgagtcgtagatctaagtggctacggttcagatcaatgagggggaaacatttcactattttaaatctaggccatcgatttgagatccgatgacgcgaattagtgcgtggtgtgggtaatatgggggccatagatctatgatccatgggccacggtcgctcgttgtctcatttaagcgctgatgtaatccaaaccataggatctgatctgaacgaccctcatcagcgg

SEQ ID NO: 188995 - DNA, 353 bp, Zea Mays
tataagagacaagaaacagctgaaaccagatgtcatcgacaagatgggcatcttagacttgaagagtactttaaaagcagtcctgaaacataagagatatatagttgtgttagatgatgtatggaatcgttgtgttcacgatggaataagcgatgtgtttgaagattgtgggaaggaaagtcgcattgtcatcacaacaaggaaacaagatgtagctgcacttgccacaccaggttaccagctcaacctaaacccattagatatcaaagatgctctccagcttttctgtacaaaagcttttcccaacaaaaaccactttgattggacatcagtacttcttgaacatgctaaag

SEQ ID NO: 188996 - DNA, 336 bp, Zea Mays
cccgttgtcctcgcttcctccctccaacgcctgttgcctgtctcactccacgacatggatttggaatggtgaatccctcactgaggccccgaatcccgcaaccaatgccgccttcttctccccctcccctctgcacgacattgcctccccagccggcggctgaggtgcagcgccaagtggccaagtggcgccgccaatcccccatgtgatcacatccctactcggcaacaacctcctttctcgcaccgctgacaccgcgcatcatccacatccacgcctctgtgccagtagcagcaccgtcggctcccgctgccagatccaggtatccagccacgc

SEQ ID NO: 188997 - DNA, 402 bp, Zea Mays
gctgccggtgatcgccgaggtggaccgagtcctgaggccggaggggaagctcatcgtccgcgacgacatggcgacggtcaaggaggtccagagcattgcgagatcgttgcactgggaggtgaggatgaccgtgtccaagcaggggcaggggctgctctgcgtcaggaagactatgtggcggcccacgcaagtcgaggcgctgagctagtgtaagttcatggtgatggctgctgatgttcttgttcttcctagcaaaacacagaataaccaagatagccattgggtggtatactaccgagtttcgtagctctctaacctgttattagtagctaaagtattagctctatttacaacttgacttgagtgctgttggggaaactgaagatggcgatttgaaactgc

SEQ ID NO: 188998 - DNA, 392 bp, Zea Mays
cctccccgttgtcctcacttcctctctccaacgcctgttgcctatctcactccacggcatggatctggaattgtgaatccctcactgaggccccgaatccaacaaccaatgctgccttcttctcccccctcccctctgcacgacattgcctccccagccggcggctgaggtgcagcgccaagtggccaagtggtgccgccaatcccccatgtgatcacatccctactcggcaacaacctcctttctcacaccactgacaccgcacatcatccacatccacgcctccgtgccagtagcagcaccgtcggctcccgctgccagatccaggtatccagccacgcccactagaggccaagattcttccgtggaggaggcgcacgagaggagcaggc

SEQ ID NO: 188999 - DNA, 450 bp, Zea Mays
gccggtcaaatgaagaccaactagaacttctaaaaaagcaacttgaggccaatgaatcacacaagtctgaatatctaaaacgctacaaagctgctataaatgagaaacagaaagcctctgttgatcttagtagtaatcttgcaaacctgaggaccaagtgtagcacattagaagaacgatgtgtaagcatatctaaagaacttgatcatgtccgacatgaatgcactgattggagggtgaagtatgagcaatctgtttctcagcacaaggctgaacaagatagatttgtcgctcagttggcatctcttgagtctaggcatagctctgcagaaggaaagttgggagcagctcgggaacatgcagcatctgctcaagatgaggctgcagaatggaagaagaaatatgaaatggctgccgtgcaggctaaaactgcattggagagactagcat

SEQ ID NO: 189000 - DNA, 908 bp, Zea Mays
gttgtgtcagttatcaattactgcttgtgcattgtgcaatttacattacttatgtatatacattgcatcttcatacaagcatccttagtcttttctctgttttgtcctatcatttgtgttattcttatctgattatcattatatggtggcctttgcttaggtcgatcgcattctaggctgtcggcttcaaacaaacaaaatcaacccactgtcccatgcttcattcaagcagtttgaatcagctaatctccaggtggaagatatggctcttccgcttgcttccgctggcattcctaataaatctcatgatggaactgagtcttctagaaatggtacagtcgaggatatatgtgctgatgaatcagccaatcatagtggtcacagtttggaaatgcagaaggataggaacagtaaatcccatgaaaacgagtcatgtaaacgagaacaaggcaataatatattgtcaatatgttttgttgatgagaccagtataatgaaagatgatcaagtaggcagagagaatgttgcagcttccaaaaagggtgaagatgcgacatatgatttacctgcagaaaaggatgataccaaactaccagtcactagagctgatgcaatgaccaggaccaatcaagagcatacagatgagagcaaacagcatgggaaaataaagcaaataacagataaagactacaatgatgctggatatgagttcttgatcaagtgggttggaaaatcaaatatccacaacacctgggtttctgaatccgaggtaaaaatattagcaaaaaggaaactagaaaactacaaaacgaagtatggaacgagtttgataaacatttgcaaggaacagtggtgccagccacaacgagttattgctcttcgagcatctgtagatgaagtggaagagg

SEQ ID NO: 189001 - DNA, 772 bp, Zea Mays
ttagaaaaacaacagcgagaatataacctcttttgagtccatattgcctctctcctccaaggaatttcaccaaatcattaatcagtgagggtccgacataggatgcgctggcacttaaaattgcaaatcctgcattgataattgctttccgtcctataaatagaaacattgctctatagatcgataaagtacttaaaccatgcctgtgttcaacatcacctatgatctttttaaatgaatcagaaagaaactcagcagcgtctttgccatcaacatctggcacctcattcttctctagaggtttcttgtatccgatagaaaagacggggttcatccaggagaaggtgacaagttcaagaatatttgctcttccatatgggcatggccgtttgacttctgcctgctgtcccacagatggattcaatagtgcctctgttacgctgctgtctgtgaatctgattcctgttttccccctgactgaaattgcaaacagataagtgcaaacaacaagcatgcacatatcgatccattcttcaaatcctatatcttcatgggttgccaaaattgacctgagatcaaatacaacgatggcaactgattgtagaaagctaaatatccaccatgtccgaattacctttggaatttttgtagattttgctttctgaaaactgaatactgctagtgacaatattatccacgatagcacctgcaaaccttcacaaataataaagggtggatacttgcaatcacttattctttcatgtaactgtag

SEQ ID NO: 189002 - DNA, 448 bp, Zea Mays
gtggaaactgatgcttgtgatggagtaggagcagtgttgatgcaaaaacacagacccattgcttatctgagtaagactcaagttgcccatttatgaaagagttcttggctttgttattgacttgctggcagtagaaaggtggcgtcagtaccttcaccgtgctgagtttgtatcaaaaccgaccataaagctctcagtttttttgatgatcagttactgcagtgtgatttgcagaaaagggctattgctaagcttatggggctgcagttcaaggttgtttatcggaaagacaaggacaatgttgctgccaacgcattgtcccgagtggggcactttatggctttgcagacagtgtctgaggtgcaactagggtggattaaagaggctatcaattcttatgtgactgatgaggatgctcaaaacgctcaaccagcagtctccagcccca

SEQ ID NO: 189003 - DNA, 323 bp, Zea Mays
tgtatatctatttctgttttgtaggattattaaggatttggaaggatcctagggaatagttgaatcaataattttggggggaaattaccctcatccctccagaatggagaacaagtcagatgaccttcagcacgagcatggtatgcccgatcagacgtctcgtcccttcacttcactcttactgtcggcaacatctgtcgcccaagcagcacaacaagataccggttctgacatcaaatcgcttagtctgctgcatggaagtagcttactcccacctgatgatggttacatctggaaggcgcgcgcgcagaacattgttccag

SEQ ID NO: 189004 - DNA, 333 bp, Zea Mays
ctagactactggtaatcttggtcatgacgtcgggtccagggtgtccgagacgacgatgccaagtggtggaggaggtggtggagactaggacaggaggtggatacacgccggcggtggagggttggagcgtgtagagcggccccgagctgtcacagcgggcgagaagggtcctggtggccagatccttcacagaaaaaccagaggggtcaaactcaatggaacaggagttgtcagtggtgaatcgacgaacagaaaggagattgtgattgatgtggggagctacgagaacatcgttgaggtaaaacggcccagggagaaccgaggcacctacag

SEQ ID NO: 189005 - DNA, 295 bp, Zea Mays
gaaggtccagcttcgtgaagaactgtgcaccatgcagctcgtcaaggagctcgtcgacgatggggatggggaaggcatctttgacggtgagggcattaagggcgcggtagtccacgcaaaaccgccaagccccgtcctgcttcttgaccagcagaaccggtgaagagaacgccaagtcgctgcggcgtacgatgccttgggccaacatgacggcgcattgccgctccagctcatccttgtgcgccaccggctagcggtacggccggaccgccacaggtgtagagcctggcttgag

SEQ ID NO: 189006 - DNA, 319 bp, Zea Mays
ctgagctaatctaaggtcggtcacttaacagtgttaaggatggtgaaataaacttgaccctactcctataaatatgttttgacctaaatcgatgctccagactaacttgaccatataccactacctgaccatatacaactaccttaaccacctgatagttgcataacccctcgattttaacctagcaagagattctaacctacctacaccatataatccattctactcacatatatcctaaccatatgtccttaactcggatggcaactccaagatgaaaggccaaaggagaccaaccacgtcaaagaaagataagcat

SEQ ID NO: 189007 - DNA, 306 bp, Zea Mays
tgctccaccgcataacatggattttagttgtgggggatagattcacaattctgcccccatcaaaagcacggtccgccatttctaaacttggaagaataagaagcagacatgcaggacccagacgacacatagacagcgagtcatgaacaagcgccagtcgccgcgcaaagctgtccaaaatagcttcctcaactgcttcattaatagccacagttaccgtgagaacaatggcacgatcaagcacttcagtcctctggttgaaacttggagaccaagggatgatccgggtaggagcaaactgtggct

SEQ ID NO: 189008 - DNA, 329 bp, Zea Mays
gtttggctacatggacggcttggacgtggtgtcctggaacgccatgatcggcgggttcgctagtgccgggatggacgaggagtcgtgggcctgcttccgggagatgcactcgagaggtgttcgagggaatgcccgcacagctgtggtggtgctgggatcttgtgacatggagtccggcaggcaggtccatgggactatagtgagtagtcatggtggttcttcaaacgccattttgtggaacgcgttgatgagcatgtattcgcgtgccggctgtgtcactgatgcagagagggtgttcctggagattgtaaagaaggatgttgtgtcat

SEQ ID NO: 189009 - DNA, 322 bp, Zea Mays
tgttgatagtgcaaagactgatttcaaatggaaacgaattgctttcatgcaggctcgttcgtggcccatgtcgcagcatggcagcacagctgagtgaaaattcggttcactgctgagataagcaatgcagatatacaaaaacgtcatttttcagaattaacaacactaacacagttgccacacattatttttacacaagttcaaaggaatataaacatactgcttgtcacttgtcagtatcagttcatcactgagaaggttcttttttgacgtggttatcaatcatcatcttcctcatagtcaaattcctcctcctcttcat

SEQ ID NO: 189010 - DNA, 319 bp, Zea Mays
ctaagttgtccaaatgtgatttctggctgagagagattaaatttttgggtcacaccatttctcaggatggggtatcagttgatcctgaaaaagtacaagaagtgatgaattggaaacctcctaccacaatacggcagatccgtagttttctaggattagcggggtattatcgacgatttattccggatttctccaggattgccaagtcaatgactgaattgttgaagaaaggagtcaaatatgagtggacccaaaaatgtgaggatgcttttcatacacttaggcaacatttgaccacagcacccgtgctagctcagcc

SEQ ID NO: 189011 - DNA, 709 bp, Zea Mays
aacatgtttatgcaagcctgacttcataccaatgttctggtctttaactatcttttcgatgcagtcaagtttagcaacgatttccctatacagatgttccttcctagcgcatacctgcaagttaagtcataaaagattacctagggcaatacatctcccaaaatgatgtcaatgggttggcttttagagccaaattagacaagcttagataaaactaacataaacatacatcaacagcttctttgatgatccaatcttgagcttttggacaagcaaagtccagtactgaggatggcaagttgacagaaagaatgtctactggtgaataacggaagacagcaaccatgctcccaagcctgtttgattgagaacgctaactgttaggttggtcattattagataagaaactgaatagtatacaataagaagcaacaaacccatagaaacgaaggcagtccctttggagggagtgtccacagcaggcaattcgattggctgttgtgtgatttgaaaaactaagttccagaaacttcccaaaagataatccacgtgctgcatctgacatgactatcctttgtgtggctggaggaattccatcttttggtttgcacctgagacacctgtgccacatccataccttcccatcaagctccccgggtagcttcacagatggaagagttttgacactgattgtgagactgccttgttg

SEQ ID NO: 189012 - DNA, 404 bp, Zea Mays
aagaaacttaagcttctgaacatatcatattgttttaaggtccgtatccctaatggcatagccaatatgtctaacctgaaatgtttgatggcggttgggttggacggttactcttgtgggaataaggatgatttcaatattgtaagtagcttactgtgtatgcctaggatagatttgagtaaaaaggacagccccattggtgacttccatgggatcttgaagcacaaaagactacatctttttggtctcggcaacgtgcaaagcattgatgagtttgagaacttgggattatgcaggcatcagcagctcaactcactaagacttagtagctcctacatgaatggtaatgaagtggctaaatttatcccagatgacattgtacttgaaaagatcatacctccaag

SEQ ID NO: 189013 - DNA, 272 bp, Zea Mays
ctccatacgccaattgacagggcatggaaacggaagagggtgcacacctggttcttggcattgcgccactagaatcttgccactctgcctcttctgttccatcaattaatgcctctttgacaatttgagcctcccttcctcttctccactggtttgcgaccctgatttgtgcctcctctggtcctccctcttctctgctggttcccatcttcttcagcccagcatcgcaagatcgtgggacaggtatgtaagcatctcttcctctcccttgg

SEQ ID NO: 189014 - DNA, 710 bp, Zea Mays
gctgaccataatatccccactagccaccctgaccttcactgggtcacattcttccacctccaactttaacttttccaccatctgcttgctaatgaaactggtagaacttccagaatcaaccaacattaataacatctgatgctgaatcaatgctctaagtcggatacattgagaatcatcagccccattaatagcattcagagacagcttcagttcctcttcttcctgtttctcctcttgctctatttgctccaatacttcaggagttaaaaccttctccatatcctcaggaactagaacatgtaactggactgcattccctttctggcaccttgcttgatgaccaggttcaaatttctctccacaagtgaagcatagaccattcactcttctatactcctttagttgtctctccttactccatcctcccatctcaacacctttaccatctgctctatttcctcctcccaatctaccaagaacaggctgcttgggtaaaacttcattcctcccttatcaataatatcctgttgaacttgagccaatagttgtgccttgtgaacagtagcaggaagctgggacataactggatactgaatttcattcttcagtcctttgacaaactgactgacataaaatgtttcatccatcataggattatgaacagcagtagcatatcttgcttcctcaaactccttcacatattcttc

SEQ ID NO: 189015 - DNA, 475 bp, Zea Mays
ggatggggtagaggaggatgcgaagggcagacctgttcgttgaagacgacatgacaggcgatgatgacaatgagtggcaaggttgaggtagtggtatcctttatgcgatgagggatagccgatgaagatacaagccatgtatcagggagcaagtttattaggggcagtggcagagaggttaggaaagcacatgcggacaagaactcaaagataggtgaagtgaggtcgtgccatggagaatcttgaagggcatgtaattgtgggccatgtgattgtggatggtgggtgcctattgatgaggtaggtgtctgttgctagggcctcgacccaataaggggacgatatggaggcatgaaggaggaaggggcagatggaatttttaaacgtatggaggatgcattcaactttcccattttgagtggaggtgtatgggcaggaatacaagataggcgtaatagggtgccatgagaagcat

SEQ ID NO: 189016 - DNA, 405 bp, Zea Mays
gttccaatctggacgctggtttatggatctacggctaccactcatcttctagctcctgacaccgagtcccgatgaccaaccagagcaccgtggcggcgccaaggaccggccacctctaccaactaccatgccaccccaatgccccaaactcaacaaaatcgggtgctaacctacacggaatcgatgatggctaatacgcgggaggaggacataccggcgagcggcgatggcgcagcagagacccccggccacgcaacacggtggatacacggaggagttcacaccctggttgaccaaattctgggctcccgatcgccaaaccttcacagcgagaacccaggtactgtccttggggcgcggcgaggcttctaagctcgatccccacgacgaattaacggattgacc

SEQ ID NO: 189017 - DNA, 402 bp, Zea Mays
actgcggttgcgacggtgtgctctgtttgtcgttgtcactggttcaagaccgagggtggctgctgagactcttgctgatgaggtggctgctggttttgggctggatgcgtcgtccttctccgttcatcgttcgtgcccagaagattttgtcttgatcctgaattcggaagagttggctaatcaggtgtacaacaatggtgttgttttcgattctccttctgggtctttcaagttcctgaggtggtctagacttgcccatgccgaggtggtggcctttccatcccctgttcttgtggagttcaaaggggttccaattcatgcttgggatttggctactgctcagaatttgttgagggatcactgcactgatgtggagctccatcctgacacggtgaatcgaca

SEQ ID NO: 189018 - DNA, 410 bp, Zea Mays
tgacaggatggtacatggggggttgcgccctgacgctgttgcttatagtgttctgatcacagggtactgcaacgagggacaactaaaggaagcgaggtcgctgctgatggagatggctgggagtgggctcttggacatagctttcgctctcagggttgtcgttcagggtcatgtaaaatttggaaagctacttacctgcttgaacatggtggcaccactaaggaaatatggtatcgtcatcccatcacagagttatagctgcttgattggtgcattgtgtgaggatatgcgccctaatgctgcgaggggcttgctgcagtggatgatagaggacgggcactgtcctagtttgcagatgtacaatatgattgtggattgcttctgtcgatgtgataatccaaaggaggctt

SEQ ID NO: 189019 - DNA, 635 bp, Zea Mays
ataacatgataacaggtatgtttctggaggtgctagagccttatatattgaaggatatgcttggttctctgccccctgaggtgagcagcatcagaatttatactagtgctagaataagaatccataatgaatttgcatgtaatccaattgtacttgtagattatgcaagcactagtggagcattatagtggcaaagggtggttgcaacgagttgaacaatgcatccttcacatggatatttcttcattggactttaatcaggtataggaagcatttgtaatttatttatgtgattagtgcaataaattcttatgtatcgtttttgtccttttgcctatattgacttaggaaacagcattttaatttgctattggatttattttggttccatttcgtagcttgagctatagttgaaacttgccaacacattttgtgcttatgttgtgtgcaggtagtcagactttgtcgtgaacatgggctatatggtgcactaatttatttatttaaccaaggcctgaatgatttccgtacaccactagaggaacttctatcagtcgttcagaacaccaacagtaaagatgatgcttctagtgggtatgaaatattctggctagcagcagatctatgaagcaata

SEQ ID NO: 189020 - DNA, 680 bp, Zea Mays
cttgtccatcgtttggtgtctttaaaaagttgcagcacaaattgaacaacgtgaggagaataagataaaggaggcaccaagcaagcacccgatttttcatatctccatatattaggactgaagatttccagcatggatgaaagaatgcatgctttaactgtacaacagatatcactgttgcaaacactaatattttgcactacctgtaaaaattcttccagtatctgcagcaagatagtgccaacaccatctacagaaaagactctgtcatgattagagaaattgaacctcagtctaaacaaggctggaagactatcagcacatctcgctactgaggataacatcatggcatcagaggcatcaggaggaaactcaatagtgagaccacagactaatttcaaaatcctttgggcgaaagacaacctcaagccaatgtttacatcttcaaccatttccaaagcgggagactggcaaagcttctgaaccagtgtaagaaggcgtggcatacaacataagtgagcaaccgcaaaatgctgtgctaatggcaccatggcatttggagatactgcactgcatgattgggaattctctaaaataacataatctcgctgcaagtattctggtaataaggccaaatgaaactgtttaaggtcatcttcacttttcgagcagttgaagcc

SEQ ID NO: 189021 - DNA, 303 bp, Zea Mays
catagacgctagataaaaatgacgacaactttattgctattgttaagtagttaacctggatcaacacgccttgaatataagcatggtgaagcgcggctatcttgtcaaacagttatagcatgctaccgaggaaggtcgcaggtccatatgttgtcatttgtcaacattttttatttgatttggtgcctccatggtctatgtatggatgtcatatttctcatgacatgatcattgctagcttagccatattgttcatttgaccatattactcagcagttaagtctgtactattttagttattat

SEQ ID NO: 189022 - DNA, 631 bp, Zea Mays
catttttcttaacccggacatacaggacatgcaggcagtcgtggcgattctctaggcgtttgggcagttctccggcctccgcataaacctagaaaaaagctatgttcatccaattcgttgtgaggacgtttagctagatcttgtccttcagcccttcaatgggaccaaagaatccttcccctgccgctaccttggtctgcagcttcacacgaggcccttaaagaaggtgcatgttcagccactcatcgaacgtattgcacagagaatccctagttggaaagagaagtggctaaatagagccagtcatctcactcttgtctcatcagtcctctcttccataccaacctatcatctgacagtgtttcagctcgcggtctgggcttgtaagaaaatcaacagaatcagaagatccttcctttggaaaggggaagaaaacaccaacggaggccattgtttagtgatttgggcaacgtttacaagaccaaagaacttgggcgggttggggattcctgaccttgagaaatttggcagggctttacgccttcgagggttttggcaggaatgggtggatgataccaaaccttgggttggcttggatacaccgacggatgacactgatcgcgcacttttt

SEQ ID NO: 189023 - DNA, 344 bp, Zea Mays
atctcatcaagcatccgcactgctgaaccaaatctcccaagcttgcaaaggccatgcatcaaaatactgtatgtgtgcacatcaggcgggcatccttttgaacccatcatctcatacaactctgttgccctggccagcttcccctccgtcagacatccacggatcaccgtgttaagcatcaccacgttcacctccggcaacctcccgagcatggcgcacgcctcgtccgcctgccttgttcggcacagcccttgcaggaggaacccatatgtcaccacacttggcatgcatccctgcgtcatcatcctgtccaccagcctggctgcctctcgcacgcgcccgag

SEQ ID NO: 189024 - DNA, 904 bp, Zea Mays
cgcagcttttaaaggtagagccatacatacatatcacaggtatgaaacaactgaagtaaaatgcaatcattctattttatttatacaggttaatttgcatctgaatttctccttgtgctttgtcataaataccctcatttaaaaaaactgtggaaattattttaaaaatctttttttgttgaaattgtgactgcatagattcatagacaaatacatgatctgtcatgtgcagctcagctaccaaaggaggaaaaaaagcatcagctgtaggaaaggcatctaaggctcccttcgtatcttagtttgttgaaactgtcaaagatagatacatgtatttggttagacatatgatcaaaaattagttgaagactgttatacggagagcaaatggtacccatttgattgatcatgcggttgatctatttatcttcgcaatcttctctatccctgcaacccagcctcacctatgatgtagccatccactacaccaaagagttccagaaccacaaatctgcactatttagatggcctcttatcttctgagaagacaaattttctcgtccaatattgttgtctactttgtagtgtcaatatttatctgtgatatgtgttaatggattgtacctgtcaattttctcatcatgttcttactgtcttgtggacagtgaaggtgctggtggcggtcatgctccagacatcatcaaagtttgtggggtaaaaaatgtgttgccctcttcaacaaatcctacccggccatttacttcgaacactgtagacgagcaccttgatatgctggtatgcaattatccaattcagcactgtagatacagtgtacaattttcatggtaatatgttgtgattatagtgcagatggtttgtcaccaccttgataaaaacattccag

SEQ ID NO: 189025 - DNA, 542 bp, Zea Mays
tgcccatgcaccttaaacatacatgggcctatgaagctgtctacccccctccccccaacacacagtcatagcgtcgaatccacgatgtattcctagaagacgtttgatggaagccctttggtgaagatgttagcataccgtgtggacattgaaacacgcagaaccttaaatgcaccaagggcgacatgcttctaaacaaaatgaagaacattcaatatatttgtgttaccagcagggcgccacaagctgctgaacctgaaggcgcgggagccaaactggacaatgtgggccgttcaaaggagaaagaggagccagctgagccaaggagaggtacacgtgagcgtaagttgaaccagaggctgttgggcccggagtgggtgaactccatgtaacgtgtgcgtggcctatgggggatgagatgccggcgtgttgccttgctgcataaaggagtgagtgcataagagatggggttatgaaaaatgtaacagaattatattcctctagctactctctgatcaacgtgttcttcacgttgccgcctg

SEQ ID NO: 189026 - DNA, 1343 bp, Zea Mays
cttgggaatgcttcttcagaaggttgatgataggatttatgtcagcgagaagattgattggatgtgtagacactcaagtatgtctattcctattaatcgccttggacttgctcaaggcatcgggctggtaaggtgccatcagtgaatccttctattttgagcttattttgaatccttttagcactaaagttcccattgcaggttgcggcttctcatttagatacagtgttggagaaactgaagaacatactagatagtgcagagcaaagtgctttccagaggtacttatataatcttttggcagaagacatctatttgtcatcttaccgccagtcctgtcttgcagcattgcagcaatataacctaaaccaaaacttggttgtgttgcttcacatgtacactcctttgaccaattttgtgccaaaatggaatcctgtacttcattcttaacttcaatgtaccaattagtttcccttcttttcagttattggtttggcatattttgtgaaacttcattccatatcccatcttgtatttggaaaaacagaaatggagactggatcattcaaaagtgaatatcaagcaaccactacttagctggcgtatttcatttatgtaggccgtctatcctgttatttcagtattaataagtttatggcatccaattctgcaggttcctctcatttttctcattcggcccaaaagtggaagatgttgatgacacatatgcagcattggcgttgatgtatggttatgccgcaagatatgctccatcaactgttattgaagccagaattaatgcacttgtggtatgatatcccatttacaaactaacttttgtttcttacatgaacaattccgatgaataataatatgtgtatgcatttgagacaaactcttgcactccatagacaaatttattttgttcagtctaatactcaagtttggtagtttacaaatattgaaaaccaatctgtcaccattatttcaattttaacccaaaattctatcccctaatctgtccttcccaactgccacatctagtacattgctggcatttatttattttacattatatttatgttgatcacattttacattgttgtattttggggcacttacattaaaacatctcagcgtctttgtacctggtcaatggaatattcacaaacggtttattacattttagcttgatgaatctcattctcttgaactcaggggagtaatatgcttggaaggttgcttcatgttcagcatcctactgcaaagcaagctgtgattactgcaatcgaccttttaggtgttttccttcataacatgctgcaaatcacatcttagtttca

SEQ ID NO: 189027 - DNA, 483 bp, Zea Mays
cccaccttcataggactctctatcttcggaatcaaaacaatgaatgacccgttaatacttctgaggcaaacctgatcatgataaaatttatcacacagatcatagaaatccggggcaatgacatgccagcacttcttgatgaaatttgtattaaaaccatcagggcccggggatttatctgaaggtaagagttttatgatgctatcaatttccagtttagaaaacggataatctagtccctgaagttgctcattgctggttaaaagatctgaaagatcaaacccgatatctgaaaagtcggacgaacccagtctgcacttgaaagcctcctagagaagattagatttatgttcatgctcaaagaacatggtcccattgtcatcagtcaaagtagggattgaatttttcctgtgcttaatggtggcatgggcgtggaagaagcgagagcaaatgtctccatcagtaacccacctaatagccgca

SEQ ID NO: 189028 - DNA, 997 bp, Zea Mays
cgttggtgtacctcgacttgtcaggaaacgagcttacaggagaattcaccattgccggccggttccagaacctgaggcatgtgaatcttgcacacaaccagttgtccaatgctaatttgctggtgtccatgggtgggatatctgggctagagtatgttaacctttcaagcactgggctgcatgggcaaattcctgctgatttctcttcccgattggttggattgaaggttctcgatttgtcacggaacaatatcagtggggtagtcccagacatgagttctcttggcctacacttgctggacctgtcggtgaacaatctcacaggtgagatacctgtggcattggtgaagaagctgacatccatggatcggttcaacttctcatacaacaacctgactgtttgcgcatctgagctctctgcggaggcgtttgccactgcatttgctcagtccaggaatgactgcccaattgctgtgaatccagacagtatcgtgaaaagtagagggaaacataagggaatgaagttggttctggctgttgtgctctccttgttcttctctgttcttgggttgctttgcttggcagcggcatgtcgaagggggaggaagaggtgtgatgagctgcctgtggttaagcaggtgtcgtcgttcgatgagcctgctgtatcagggccattttctttccagaccgattcaactacatgggttgctgatgtgaaggttgcaacttcggtgccggttgtcatctttgagaagcccttgctgagcctcacatttgctgacctcttggcggcgacatcaaacttcgacaggggcaccttgttggcagaaggcaggtttgggccagtgtacaggggattccttcctggtggaattcaagttgctgtgaaggtgttggtccatggatcagcaatcggagaccaagatgctgcaagggagctcgagcggctgggacggatcaaacatccaaacttagttcccttgactggttactgtgt

SEQ ID NO: 189029 - DNA, 293 bp, Zea Mays
gttcactggcgcgtgcgattggtggcaaccatcgtggcaaggccttaggtaatagaaagacggtgtgtggcgatcaactgcgacgtggtaagatggctgacagcgtggcataaccgcgaagaacggcggcacgccggtgatggacatgcggccacgtcgccggtaagtggaggagcgacagagtggttactgtgccccaagatcatccatggtgagatcttttctctagaggattatctatgtttagctgggcgggaatcacgacgccggcatgaatccgagcgcacgatcac

SEQ ID NO: 189030 - DNA, 386 bp, Zea Mays
tcttcagcagttatgcggacgtcgagaagctattgcaggcactgtccaaggaggaggaggaggtcgtgcgggtgttcctggtcaccttttgcgccaacgtccttctcaacttctacgtgaagctcgatcctctagccaccacgtgtaggttgttagtcggaataccagagcggaatatggtgtccttcgtcatgctcatgcagggctacaacacgcacgctgacatgcatagagcatgatgatgctggcgaacacctggatgagagttgggattctgcatcaccgctataaacagcaagcgacacggtgcgcgtcgtctgcatatgtagcctttgactgtccaacttcatggtacatgttaattcataaatatttatatgcaaacg

SEQ ID NO: 189031 - DNA, 817 bp, Zea Mays
ctcctccgatccaatggggtgggcagaggcctcagaagatatcccgttcagcaaggaagtcaaatttagtccctataatcactactgatagtgcactggtaccaggttcgctggacagtcctgtcaatgaagattgtgcaggtttaccgaggcgtgcatctgtaaatagccttcaacaaacaaaacgaggagatcatgggctctcaactggacctgaaggcaatgagcctgtagttgctgagaaaaagctaagggacaagggcaaaagggctggtgaactggatgatgggcatggctctggttttcagaagattgctatgcttgggcatccttccaaaaggaataagttgcctgctgatgaggatattggagatgctttaaggagacaagcaagagttgtcccgggttttactctgaccaggcctgggactcctgtatccattgacaagcttgaaaatgctccgattacaaaacaaagaagtgtgaggacagtctcagagagaactgagaggtaacttgtttccttagctgaaaagcagttttatgtggctaaatactctaaccctgaattctccctgtagtaaatctgggagaccactgatgaagaaaatatctgagcgcaaaagtaatgcacggcctaggcatacaagtagcagtgtgcagtcagactctcctggtatagcgtctcttggtatcaatcagagtgctttatgcaacttgaaacagttccttttgaaccatacccttgaacttgtgctgttcacttttcagtgcaatctgaagatgatcatgaggaacttcttgcttcagcaaatgc

SEQ ID NO: 189032 - DNA, 913 bp, Zea Mays
tgccaccctggaagccctggacctttcagccaatgctttcactggtgtgatcccgcctgagatttccacccttgcaagattgcagtacctgaatttgtcctcaaattccatgtcggggcagcttcctgcaagcattgggctgatgctgatgcttgaggtgttggacgtgagtgctaacaagttggatggggttgtgccactggagatcggaggtgccgttgcgctccgacagctgctgatgggtaggaattcacttactggatggattccggtgcagattggcacatgcaaatccttgattgctttgtaagtgatccttttctctggcattacccagttcctagtgcatgtgcatgcatgcttttattggttgactagatgactactagttccatttgttttttctcttgttagtttttactagttctctgcttcctaggttgcaggtgtcacttagaaagcgatagatatgtcttatttgctgtttggaagcactaaaccgaaaacatgggtggcatctttgtcttgctgctttgctcgtatcccactgtcagattccgtgtttctcttggatacactaaaaaacacgagtcaaattctgcacggattttattgctgattaaaaaaaaactattgcaacaaacaaggcgaagcacttctgtcgattgctaggcactaattcaggtgataggttatttaattctcttctttctttgcagggatctatcacacaacaaacttgcaggatcaattcctatatccatgggtaatcttactagtcttcaaacagttgatctctcagataacttgctgaacggcagcttaccgatggagctctcaaaacttgacagcctgcgtttcttcaatgtctctcacaattcgctgtcagggagccttcccaatagtcgcttct

SEQ ID NO: 189033 - DNA, 1483 bp, Zea Mays
tccgaatgttctcatctgataggtgcgcgattgtgctcgtaggttggtttgggtcgcgtactcgtgttattatgttatgcgaacgacgaggttcaagttgtagaagattctaccaacctggtagcgcctttttgttttttttttggtcggcagatgactgctgtgtacagttgctttattggtgtctcactgtctctgaccatgttgccagctttcccatgcgcgcgccaccaaaagctcggtgctggatttctgaatcttcaagcttgggctagctgcctagcttcaaaacggggcctctatttccgttggttggttgaattgcctgacgtgattcgtctcagcatcatcaaattgttgtaccgagtgacaaggtaccacgtacatatctgtcatttactggttacagactgacattacgtttggaaacaatctctcatgcttaattcacctcaaggtttagggtggtgactgcaagtcaccgagatgacgtccttgtcacgcacgctgtctcggggcgggccgatgcagtcgccaggggctcgccgcatccaaaggacgcagactgctgtgaattttggtgagcccatgtttgacagcgaggtggtgccgtcgtcgcttgttgagattgcgcccatcctccgtgttgccaatgaggttgagatggccaaccctcgtgtcgcttatctctgtacgctatccctctctgttcctcccatgggacactacaactttcagaaataaaaaacccattaaaaggacatggttaaaaatgttatcctacataatgtttccagtatactgattgatgtgtatatctgcaataattgataggccggttctatgcattcgaaaaggctcacaggttagatccgacttcaagtggtcgtggtgtccgacagttcaagacagctcttctgcagcggcttgaaagggtacgggtttgaaatagtgcttctagtctgtggttgtttgcatctatgttcattctgtatttgtcacatctgcactaccaatctgcctctctgtgcttcagtcctttagtctgcctttcagttttctgcatctgcatatatgcttcagtgccctgtgatgctgttatgtgtcaacattgacatatcttctgtgtactatctatcacatgctaataatggcaccatttccatgagccatgatcttgaaaattagtactttattgtgttaacaacagttactggaaataccgtctcattagaaaatttggaaagttaaaattgtttggttttggttttaaaaagaaaaaaaaatccatgtgatgtttagccaactgcatagtttcctgtcaagaaaaaagggaacttttatcttatatacatttcttacctcctgattatttgctttgttaggagaacgagcccaccttgatgggaaggggacaaaagagtgatgcacgggaaatacagaccttctatcatagctattacaagaaatatattcaagcact

SEQ ID NO: 189034 - DNA, 351 bp, Zea Mays
ttgttgaatgaattggtcttgcgcatgtttgcaggcctttattggcccactaatctttgatacccactaatctttgtgctctcaattagctctaaactaatctttgatacccactaatatttgtgctctgaattggcctaattaatgatcaagtggtcatggtgtatgtcaactaatcactttctcttcatgtactactaggttataattatttgatgtggagtataaacatgcttcttgtaacatacatactgatggttaggtacctatcctagtcgtgtttgcaggcctttcagattgaaccgattacttcaacggtgtcatacatgattggtagggatgtgatggagg

SEQ ID NO: 189035 - DNA, 827 bp, Zea Mays
tctccggcatctgagaatgttaagcggaatgcaacaaaggctgataaagaatcagctgtcaaaggtcttggaaagcattttgaacaattaaagaaaattaaaaagaaagaatgcaacattgacggttccagttctgagaaggaagaatgtaacagtaactgctcgtcaatgaatggtatgcaagtatcagataagatatctgttgatgaaacgaataagggagctgatgtaagcaagttaatgtcagaggatgctttctttcgcttgaagagtttgggagctggccttcatgaaaaggtggtttgattatgccattcgctcccttagaatttttttaatatggttagaagtacactttttattggcttgtaaattctctctaacaatgcctgtacaatatttctcttctactactattaatatctagaacaataggggctgcccatactgtagtgctttaaaaagaagcaatttcagagttattttagaattttgaaaaccattttattattatgaaagcaagttattttagaacattcaaacacaatcaatgatttttttctgtcatgaaaagttcattcatgttttgatgagttttttaatgcaaattaactttggatcaacatagcaacttagcaagcaatttattctacaacttttttgttctcttttatctgaactctgaagtagcctgtgatgtgggaatagaagagctcaccaagaacatgttggttaacctttattatgtagtttcctcagtttattatttcttgatcccagtccctcgaagagctcacaaagatggcccataatttctatgatgagac

SEQ ID NO: 189036 - DNA, 371 bp, Zea Mays
ccttgctgccctcgccaaatcccagcgcctctgtctggtgtccccttgccctcgccgaatgccacacagtcaccgcgccattgttatggcctgttgtactcgtcgttcgtgcctcaccaatcgtcgccatgctccattgctgcctgcacgcactgcgtcgttatctgttctcgccgttgacgctgctgacaatgaccgctgtgccaagtttgccgaagcattctacgtctacgagtcctctcgctggagtgcgctgccgtgccggttacttgcccaatctcgatcccaccagcagcagacaccattcttcgctagcaaccttcgtagctcgtcgaggcctgtgcacatcgtcagaacctcgcgccgtcgac

SEQ ID NO: 189037 - DNA, 935 bp, Zea Mays
ggtggtggtgtgaatcatacgctcgacacaaccattctgagcggaggtgtgagggcatgacatccgtagcggcacgccttgggagagaaagaaggcatgagacgtggagttgtcaaactcctgtccattatcacattgaacaacctgaatggtgcgaccgaactgagtcgacacccacacaaagaagtgagaaagactaggaaaggtgtcatacttacgacgaagaagaaaggtccacaagaagtgagagaagtcatccagaatgactaggtagtactgataaccggagatgcttggaacaagggatgtccagaggtcactatgtataaggtcgaaggggcgagtagctctggacatggaagaagagaagggtaagcgagtgtgacgcccaagttgacacgcatggcaaagcaaggtggcattgccgcgggggcaagggatggccgaggtggccgggagtctagagaggacgtcgtggctgaggcgacggtgccaagtggaggcaagggcgtagggtggtagcatgggcggaggaaggtggggtggggaagcgaatgggatataaggggctggagctgtcgcatcaagcaaccacaacatgagtggtaagatcccgaatggtgagcccccaaggatcgagttccatagagcaacgattgtcagtagtgaagcgacggactgagctaaggttctggatgatgttgggagccacaaggatgttgttgaggtacaaaggactatgaaggactgtgtcatcaacggaggtgacaggcagagtcgacccattaccgacaatgatggaggaaggagaggtggggttatggggatggggtaaagtgacagttttggtgtcaggagtggtgtggaacgaggcgccgttgtcggcaacccagtcggtgggaggaaggggcgacaaagatatggaaaaggatgag

SEQ ID NO: 189038 - DNA, 412 bp, Zea Mays
gtccgtgaatctgctgggttagcgtttagtactctgtacaaggtatttgagctcaaacctattctgaatttctgatgttacagatgatttgttattttttccttttaaatttttttcttattcaccttataatagagtgctggactgcaagccattgatgagattgtcccgacattgctacgggctttggaagatgatgatacatctgcaacagcccttgatggtctaaagcagattttaaggttttcttttattatctttttctggttgtcattaatttggtgagatcagatgtccgacttgatgtctacaactcacaaatattgaccttttgatgtgattctacagtgtccgaacagcagctgttttaccccatatattgcccaaattagtccagccccctctctcgtga

SEQ ID NO: 189039 - DNA, 451 bp, Zea Mays
tagataaagagaagaatagtgaggattacaaagcagaaaaagctgccaaagagaagccaaaaaaagccaaaagaactggtaggactggaacctatacattcagggccctagctaaacctagggatccaatattttttgccccagctaaaacccaacacctcagctcatctaagaagcatctctgcagccttgccaaagaagattccccattgaaaactgccttgttacgatgaagccacaaacaccatgcccctagaatgatggcactattgagcccctttctcttgtctctatgcacgctattatccagacgtttccaccaatccgcgaaggagggctcgtcaatggaaggagtgaagtgacccaagccaaaaggggatataatattgttccagaactgacgagtaaagatacatgtgtttaaaaggtgctggatcgtttcttgctgttg

SEQ ID NO: 189040 - DNA, 305 bp, Zea Mays
gtgaacatgttatcttttatctgtatcatttctgagttctgtcttcagatgggaattatcatttattttggttacattggatttctatgtggaagtgttacagacttcccctctggtaagtccgtaacttgtgtttcctggtgtctctcaagggtgagtggaggagaagattggaatgacacaatgcgttgggagaggaggacgcggaccttctaggttccctgtgccggcgctgtgcccagccaggatgacccaagatgatcccgccctaaggaggatctttatttcttggatcctaatacaaa

SEQ ID NO: 189041 - DNA, 542 bp, Zea Mays
tttgggcactatctgtgaagtgtagcaggaccgcctctgcttttatgctcggtagacttctgtgatcaagtattcaagtactggtaaaaggtacttgccaaaaaccatgccctttggatgctccgaattgttatatttatctaattttagttggtgattatagttcttatgacttcttgtctcatatatttacacaaaggaaaatcatgcaggtagaacgtactttgagtacaaatgcttctggcatgagtatgtcgaaattggcatttgcataagtggggtccaactgttttcttgtctcctccctgtttgttttcttcttagacaactgtacttttgtgaaactagagtttgaaactgttcatcagagtttggaagatatgagcaaatatgagtagtggggacttgtgagtgcagaaaatgggaagcttttctgtgtttgtatttctaatctggatcctactacaacattattcttactcgcttcatgcatttcttgctttcagattataagcttgtctaaagcaagcccttagaaggaa

SEQ ID NO: 189042 - DNA, 444 bp, Zea Mays
actccatcgccttaaccatagtgttacttcttaaaatattcccattggccacccggacccgagcggacacacatggaaccaccttcagacccactctctcaacaaaccggctactgacaaaactagatgagctgcccgagtcgaccaagattaacataatctgattttgcaacaaggctctaactcccatacactcctcattagtggtaccactaatggcattcagtgacaataagtaagtctcctcttcctgcttttcctcctgctctatgtgtgtcaacacctcctctgttaacatcatctccaaatcttccttcgatagggcatttaactgcatttgcaccttcttcgggcatcgagtctgatgaccgggttcgaatttctccccgcaagtgtagcacaatccattctgccttctgaactcctttaccagccgctccttgg

SEQ ID NO: 189043 - DNA, 447 bp, Zea Mays
aaattgtcgaacagaaataaggttcttgataagaggaggtgaaacaagaacgttatttaaaataagagggccaagttgcgccttgccggtggcagtgacgggcaagagcgaaccattaccgacaacaattgatgtgagagaaggaaatcgaggtgttgaggagtgagagagggtaccgtcatgagaggtcatgtgagaggaagcaccggtgtcaaggtaccagtcgttgttcaccggtggagtgagcgtcatggtgctgaatgtagaggccagcgagttttggtcccaaaccggagtgccaaccataggctggtattgggccggcgccagctgctgcggctggaaggcctgctggacggagggcagttaagtctgctggggaaggtgcatctgctgggccagcagagcttgctgcagagcctgctgttgagggccggcgcgtccctg

SEQ ID NO: 189044 - DNA, 942 bp, Zea Mays
atgtccttttcacactgtcgcttatgtacctgaaccgtaagctctgaattattgtgttgattccttgcttatcaccttaaaatagaatccgaatcctgccaatgatattttttgtgttaatatcagcaacatatgttctttaattctcagctctcggcaagccacaagctgttatatcagaagaaactgcaaaggaagcggaaggcaacgggcattcaaaaggggcaataagaaatggaagcacaaaaccaaaggacggtagtcataacagtaagcaactctgacagaagtcataactcataagcaaatctgaaaaacaagtgacatcttctaatctgaggtttggttatttcagaggaaatgaaggagatgaggttgagtgcacgtttgagcaactgttcatcaaatggggtttcacgactcatgtccattggcagcaatgaagctgctccaacaagaggaatggttcttccattcaaccctcttgctatgtcttttgataatgtgaactactatgttgacatgcctgcggtgagttgaccttcgagtattctcagcagttgttcctgtcccatttcttaccttcttcaatgtgcttgtacggtaaaatatggaaactgatggggaattctattgtttgcccaggaaatgaaacatcaaggagtgcaggatgacagactccaattgttgcgtgaggttacaggatcattcaggcctggagtgctgacagcacttatgggtgtcagtggagctggaaagactactcttatggatgttttggctggaagaaagactggggggtatattgaaggagacatcagaattgcaggctatcccaagaaccaagcaacattcgcaaggatttctggatactgcgagcaaaatgatatacattctcctcaggtcacagtaagggagtctttgatatactctgcctttttg

SEQ ID NO: 189045 - DNA, 1023 bp, Zea Mays
taggaaatgacgtctcttcagaagaatcaacaacaattgatattctgcagaagatgttccttccatcaagtggtccatggcatgcgaataacgaggttgtttctgctgctctcaaaaagttgccagaaaatggtttgttctgctccatattttctgttgtggaatagctttcatgtgtcatttaaggtacgctaaaattttccttaatttgttcatgttctctagaacacagcaggcaattgcacagtgctaccaatgatgtgttatccaagcttcacgtggtgatgcgtgcagtagataatcttcacttgaaacacatgcagttagcagggaactatcaaaaacaaagagattcgagtgcctggaacagagctgaacagaaacgtctgaaaggtattttgtatttgttttgtggacggtaattttgagggggttccatctcttagtagtatttgtgttcttaattgaaagttctttagcaatattttaagttttgttctataccctggatcatcaaataagttaatagtaatctcagttaaaatggtgaatgccttgtggcaataatatgttcattatgtcgtgaaactgtaaatcgattgtttcttgcagtggcactgccaacacatgcataccgatactatattttattctattatgtgtacctagctgtcgtgtaatagtaaactaacccagtatttatgtacctctcaagaggagttgactagtgttgttgccaagttggaagaaagcaaacaaaaactggcagtactgaaagcacagggagacaataagcaagcaacaccgatccttgttcctatgctgggaaagaaaactgcagaaaaggtgggagataaacaaacagaactgcaagatcttgaagctacccacaaggagttaatggtaatatcaacttcttaatttaagagctccaaactattggcgagaatgctagatgtgtatggacttttaagtttgtcgtacactaatatgagcaggaatcgatttcaaagcgtctggagg

SEQ ID NO: 189046 - DNA, 346 bp, Zea Mays
gccaacgcggacgtgaagacgaaggatctcgacgaggagaagctggccaagtgccgggaggtggtgcggctggaggaggaccacgaggcgtacggcgccctgctgcgcgacgcggaggggaagctggagcacgtgtaccagatggcgatgcacgggagggacatcaagaaggtgggcggcggtgatggcaaaggggaagagggttccggggcggtggacgaggaggtggtgcgggtgctcaaggacgcgggggaagggaaggtggtggagcgggtgaacctcgccgatcggcagatgcgcctactgccggagcccattggccggatccgcggcctcctcgcgctcg

SEQ ID NO: 189047 - DNA, 292 bp, Zea Mays
ctagaactcgaccagaattttagtacaatagaaagttgccaatttggtttcttttcctataggtttgtttagatacttgctttatgacctttttcccaccaaaagattgcctaagcattgtgttatttttgaaggaaataattggaacgacttaagcccttaggctattggctgtgcttattatatattttgtttatggctacggggtggaggaccaggattccttaggtggtggtcgtggactcgtggtccgtttcaggccgaggtttgacaccccttcaccctgtagtgg

SEQ ID NO: 189048 - DNA, 972 bp, Zea Mays
cctgagaagaagatgacaagggagatggcagcgagggagtctccccgacatttggcaatactggaatccatgtctgcttcctcagtcccagtcgctcccgaaaccctaacctcggcgatgacagcagcgacagtgatgcaggataaggagcgcaagagggagaatcaggaggcgctgccggcagctccattaattgaggaccctgtgccgaaggtagaaaagaggcacaagaaaaggaaggatagggaggctgcaatgattataccatcggtgcccactgctgctgtggcacaaatcacgcagatggaaaagaaggtgatgacagagggtgcgacggtaaggaagaaacataggcggcggaaggtggagcaggagcaatctggcgaaacaccatttctcaatgatgtctattcaagggcaggggaagaagctgctgctggtggcgtcatgggcagacagtgtgtcaagaggatcaaccgcagcaagaattccaaggttttgaagaagcagcagacactgccccaaggctttttccctcccatagctaatcccgatttcattgatcaggaccccaattattgttcaccttttggtgcattttttgcccaattcgcctacaaacctgagcgccggcaagatgggaatggttcgccacttcctagtaccactggtcgcacagcgaggctgcctcctcgaggccacccgtcatctgggtcttctctgcttactgcaaaagaggtctccaaggctgcccggacaacaaccttgaacaccaagcaagcatgcccagcctcagcatcaatctcaagttcacaagaaggtgtaagggtcaagggaaagaaaaaacctgaggagaaaacgacaatggagaaaaagccgaggaaaccaccgatattacttagtcctgccgagaagtggtcagataaataccgccgcctgccgctggatcagctggtgcccccaccacgctcc

SEQ ID NO: 189049 - DNA, 317 bp, Zea Mays
ggcctgatgagtccttgctgcatcatatcactcacttgtttctcaatttcgtctttcaaagatggaggatagcgatagggtctaatgttgaccggctgagctcctgctaccaacggaatcgaatgatcacatgatctaacaggtggtaattccactggggcagaaaaaaccacagcaaacttgtgtaacaaggctgatatttcaggcaacaaggcaggagctgcagaagttatcactggatgagacacctgagatatgtgaatcaagacttcctcaaactgtgtatggtctgatcccagcaagacaacaggagagtt

SEQ ID NO: 189050 - DNA, 462 bp, Zea Mays
aaaagcgcgaggaagcaacttatgaggaagcacgacaggctcttgaagaatacgatgattccttgaagaaattagaggacaataacactgaacaaaacgaagacaaagttaaggtgtcaggtaaaagaacgtttgggcctaccaaaaatacgcacgaagagttagtgaagaggaaaaaattacaagatactgaaaacagcagtgatagcgagtatgattctgagccagcccagcctttgagcaataatgaagtaactatgaaacatgatgatacccaatttgggagtgcactactggatgatgaaccacagaatgatatatacagagtaagacattcataccttcaagttattgtaccatgtgttttggataatgtaatctgatatacatttgttgcattatgtagaactttactgatatcataaaaaatcctggtcctaagacaactttcgaagttggaat

SEQ ID NO: 189051 - DNA, 279 bp, Zea Mays
cactcagttattttttgggcattgaggttttgcagactcaaaatggtatttatctttctcaggccaagtacatacaagaccttcttgatcgttctggtcttagtgatactcgcactgttgccacgcctatggatcttcacttatctcttcgttcgactgatgggacacctttggaggatccatctcgatatagacatcttgttggcagcttagtttaccttactgtcaccaggccagatattgctcatgcggttcagatcttgagtcagtttgtctctg

SEQ ID NO: 189052 - DNA, 623 bp, Zea Mays
caacgtgctaggaacccagctcccatcctctccacagaccatcggctcttcagcaaggagatccaccaccgccggcagcagcacaggtgaccggcaccataccttcaatctgagaacagacatatcttcctccttaacaaagccaggcaaaaaaccatgaatcaaacagaatgcaccaagaacagcctcagccgcctcaatcccccagagatgcgcaagaattccacgaagttcaacgccaacgggcacaagcggttgtccacctccagaagcgaaagcctgacgagaccaccttcgaatatgcaacctgagcggagggacatgaagagattgcccctccccaaacacccgatcagccacggcaaccgaggggaagaagactaggaaagaattaggcgcagcacgacgtatgcggagcgaccctgcttcaaggcaaaacctcaaggcgatcgcgtcacgcacctccacggcgcagccagaatcctccctgcctacaacactgacgatcagtgcacgacggagttcctcctcagcccgatcaattcttccacaacgcccgacaaagctcaccggcttatccaggccaaaggcaggcggaggaggcaactgctccccagcgcccg

SEQ ID NO: 189053 - DNA, 351 bp, Zea Mays
tgttgagccagttgacacaaagttccaactagcagacatcctgacgaaggcactagggcgagaccagtttgttcagctgcgttccaagctcgacctcgtcgacgccagtcaagtgaacaaggtttagggggagacttgttggaataataaaccttgtcacgttagtttcgtagtcagtaagttaggtgcatgcattagttggtttagtgctgcacgagctccagaatttgtggacgccgtgcgtagtgtggctgtggtggagcgagtcacgcggtcacccagagacgcggatgctttcgagatgtacgagcatggggatggacgcgctaaaatcgggcatcgtggagacac

SEQ ID NO: 189054 - DNA, 327 bp, Zea Mays
atcttgttctctcctcatgcacttaaaacctaaaattagtgcattagaccaactctaccgtgaacataagagctaacccaaccaatagtgtcatgatggattgcataatctgtctattcccacttaacatcaaatgaactttagacctacatcatgtagcctatctcatccaaatctatcttaaccacattcccccacccccgatgatatgcactcaccgcgaatcaatgagctcaagaccggagaagaaaatatcaacctcgtcaaggaaagagaggagtcaaacacgatcttcagatgcattaccactcaacacggaattctttc

SEQ ID NO: 189055 - DNA, 395 bp, Zea Mays
gcccggcatggaggaggtgatcgtcggccgaggcgagatcgacgagtagacgggggcggccaccgcggcagtgccataggcccatgatggaattggtgaaggcgacggtggaaactagatgtggtggattggggtggaagattgcagcggcgctgtggatgacggggtcggctctatgggcatgccgtaggggtaggagatggggtgtagtggtgcagattgcagcggtgcggatggatgagtgagggtaggccgatccacggatgatagcggcgcggataggtttggctgtggtggctgggcatttgggggagcagggatgctgatctggcccgacagcagcgtgcccaaggtgtcctggacgttgcgcatgcagtggctcaagttgaccaacg

SEQ ID NO: 189056 - DNA, 471 bp, Zea Mays
accgaacagcagcagctaacctgccccttttcttttcttggcacactgaaacgaaggagtacaagtgctaaatataggccagggagtctccgcctccatgcaggccggccttcacgccatcatctgcacgtcctgctcagcgacgccggagagccgttcgctcatcccggacgttgcggcaaaccccgtgagaaccggcgccacgcacgcacactactcctacacacaccctggcagaacatgcaagtacatgcaccacctcccttgcgacccggacaagctcggacgtgagccaatctgctcatccgtgcaggctgtccacgcacggagctcgggatgcatctgcacacgctgccgttacaacgactaaaacacacacacacgcacaagacagtcctcgtgcgtggtttattccaacaatcaccccctaaactacgacgcggggatgtccgcctttcacaggagcgtcgg

SEQ ID NO: 189057 - DNA, 850 bp, Zea Mays
ctgaaatatgccaaatcatcaacggtgtcaatttcagagtcgaagagaatttgaaaatgaactttatgaacgttttggctcccttgttaagatgcctctcctgaagccagataggtaggatttttttgcattgttttgttctgtttttttaattcaacgatgagctgtgcttatgcagttacaggaaaaaattatggttattttccaagaaaatgacccccttcagtattgtgcaagaaaaataaaatcacgctgatgttactagtactgtttgctcctgatttcagagcgccattgcctgatgcggtgaaagccatcttagatgaggggattagcttgttcaagatgcatcggagcaggcatggaaggtatgaaactgaaatgcatattaatattaaaaccccctttttagcacgttgtgaacagtaaacaacactctggttgtatagggtcgaatgcctttgttcaatagcagattaacattcctcaaaaacaagcagactagcagtataacccttattttatacatagtattacttcatatttatgtcgtcgagggaatacttttgtccaatcttcaatcacacttgtatagagaagaatgttctccaaatccccttttctgtagaaacagttaaccacacttgtagcagtattacttcatctgatgatgttgacataactagtggttttcacatgtctatatacattgcctgatgttttgcaaaacgatgtcaaatcagagcagagccatcaaaaggttcatacgctaaagaatgggcacaatgggaacaaaggttgcgtgcgaccttgtttgggaatgctgatcatcttaactcaattcaggtaa

SEQ ID NO: 189058 - DNA, 582 bp, Zea Mays
actctttgtagtttggcattaatacaaacacatcttggtattcagtgttgtttagttctaactagttaccacttgctttgaagatagtctgggatcaacattggcatgtaatactatttatctggatgggcatactaaaagcctcaagttttgtgtaatacttttagtttatctttctggtttgataagacggatgagcatcacaagccttgcatgttttcaattgtctatacctcttttatgcactgcacattgctgatactcacatttcccaacaacagggcacacagctatatgatcctaaagctggtgggtggcgagacttggggatgcttgatgtgatgcaggtgtctatctaaacctgtcatatatctgtgctattttttttccttttgaagtaaaaatactgttctattatgttcatttcttcagtcaaccactcttatgtttctgatgtttatgcattcatattctattttgtgctagatctttggacgtgctggaaggccacagtttgataaaagtggcgaaggaattattatcacaacacatgacaaattggcttattacttgaggttattg

SEQ ID NO: 189059 - DNA, 654 bp, Zea Mays
tctttccatggtagggtgcgatgacgaggtacacacaaccctgatcaatcgcctccgatggcgatctgatgttcaccttttacctttggttcgtattcgctgagcatccgatcttcttcatctatcgaggccagcattttttgtttctttttttttcttgctcggtttgctttggatcgagggacctggggatccgccgcccttcttcgtgcggcgtcatccagtttttacccctcgaatacggcttgcaggcgcgtcctagccatctcgctctctgcataatcctctgcgagacccgggctcgtatgccacattcgtcgttgtcaaactaaacaaaaaaaataggcttttgtcgcgaagatcccagcagagaggtgcgctgatgcctccctaacaatcataatcttcgcagagaaacgctcatgatccgtggtttcgtggatgtgtgatttggatttttgttccattacatctgtttccacggcgacattttcatgattactgcagcgaactgaacgagggacctatggatggactgctctttgtccgtgttgtgccgtccaagtttgccttcggatagtaaaaccagcaatctggtcacgagatctcgcaagccttttcatgtttgtgggaatggtgtgccaatttgccaaa

SEQ ID NO: 189060 - DNA, 767 bp, Zea Mays
tcaccttggataatggaacacaagtaaaaatcacatctgggaagacaagctccatagcggactactaccatcgtgccacacttgatccagatggcgttttccggcaatatatgtatccaaagaagttcagcaaccacctgtacactcaggcatggtcagttgtcgacttcaaagctccaaatatctatatcccaagaaggtcaatagcagagacacaggtcagcagtggaacatgcggtttcaacagttacagcaaggtggatgtcataaacaaccagactacctgcgtgtgcgtcccacagtacacatttaaaggtggaagtaaaggctgcacgcctgacttccagcaaccaagttgtgacttggatgaagcaggtgccacgaagcagtttcagttagtaacaatgagcaatgtggattggcctcaatgtgactatgaacagcatgacaacatacctaacaaccagtgccagcagctctgcctgacggattgtttatgtgctgtcgctgtgtttcgtgatagtgacaatacatgttggaagaagaagttgcctttaacaaataatgttgtaggggatagtgtgcagaggacagtttacatcaaggtaccaaaaaacaacagtcaacaacctgagcttcttgattccaacagatggaagaaagataagaagcactggatccttggaagttcattgtttctaggaagctctatcttgctgaacattgtcctgatctctgttatactcttcggtacttactgtactata

SEQ ID NO: 189061 - DNA, 1332 bp, Zea Mays
gggaggaagtttggctacacgtcttgatcttcttggcacgaagttgggcgggatagactttctggctttaagctttggagatgaaggaaccggcaacacatttgtgaggggctttacgatcttgttaatgaatgtcatagccacctcctcctctgaagctatacgactttgcttggggagttttcttcgagaatacacttgcaagaccttgcaaggctgctggaccagggtaggagatggccacataaagtccaaggagctgtgcaggttatcattctgctcaaaagacaaatcatcagaatccactgagatctgagaaccgactgtgtccagatgagccaatccaccattctgagcaggttcagacaccataagagcagaagtcaaagagtcatgagcttcaccaatctctgacagcaccaacgagtcatccacttttgaatctgcacgagatggcgccaaaacagcaggcaccaaagcagaaaacagggagccagaactagaaacctcccacaaggtagcagagtaacgaaatctctccaccctaggcgtcatccaactaatatccgaagtcattaatagcactgcctgattaaacatacgggccaaggcattaactgccgccgccccacccaaaacgtccgtattaaggcatgcaaggggggacgccaaagcagccgcccttctgacagaacccgaggagccattcatcaatgaatcagagataaagggtctaaccccaggcgccgtcagctcagcttccgaagcaatcgggagagcgaggctatcaactgggccgcccttaacagagtaccagaggtcattaactgacgtctcaaccgagataccctcattaaagcatgcatgggggggcaccaaagcagcagacaaactgccaggacccgaagagccaatcattaatgaagcagatatcaagggtcccatctcaggcgccatcagctcagcgtccaaaacaattgggagagcgaggctatcaactgggccgcctttatcagcactaatagaaactcgcggaccaaggcgagacttaaccgaagcacgaacagtcaagtcatggaaaccgaaccgtctcttccgctgaacaatatctcgatcatcatcagactgatccggcaatggtggatgagaaaggattgtctcacgtaccagccgatcatccaaacatgaagccaaaacagagataggatataccagtgatcggggatacgacgaatccacctcaaaagccacaggtggttcctcaacatgcagatctacaattgcaggcaacaatgtcggtacaaggcaccatgcacgaagcttgaaaacaac

SEQ ID NO: 189062 - DNA, 400 bp, Zea Mays
gttggactgaccggaaaaagggctgacgacggggaagcttgtttcacggtggcggaaagagatttgggggaactgtgaaattcaagctcgctggtggatgattgtggctgattagcggtggctagttagctgacgacctcacggagctagtcacgggctcaatttatagggggggtaagacggtggccgtgaattttgaggaggacgcgcggcggccggaggtggaagaaagtactagcgcaatggattcgtggcttctaccgtggcggtcattccggcgatcaacggagagtcactaagacttactacgatgtggtggagatactcaggcacgtggcacaaggccggaaggcggctctcgtcggtgaacttatctgccacagccgcggagcacgagggg

SEQ ID NO: 189063 - DNA, 308 bp, Zea Mays
ggctgcagcttcactctttctaaagcctcccaacaaacacagaattcctgcaacacttgccaagaaacaactccctgaatatcctggatccatctcatgtttgttagtgcttccaaaaccgttctccagttagcagtactgcagtactcttaggaaccatgctgaaaatgagaggagcaatctcaacaatgcgcagacccatcagccacctgtctttccagaacaaggtgctgctcccatctccaataactgtcgccatggccatattaacgatatctcataccaccttgcaagactgcagctgaaag

SEQ ID NO: 189064 - DNA, 539 bp, Zea Mays
ccgagtccgtgccaacgttggtcgtagagatgacgatgaaaatctcgtcggcgttgatgataggcgggagcgttgacgtgtctgtcttaacgatggagacgttataccggatctggttggtgtaaggtctggtaccgtatacgtagccactttcgaggtgccgtggtgtgtaataatcatgggaggtgaaccgcttgccgttgatgttgatgttgaactggcgaacaacgccggcgcccgcctgcagcacctcggagaagtggaagaccggtatgtacccaagcgacgagcccttggagttccaatagaagttgatgctgctggtagcgtcacgcggcgtgatcgccgtctgcatcaccttcgacggcacctcgaagaggtcatcatatatgttccgcaccttttccgtcgtggatagcaccagccagtcgatggcgtcaataatcataggtgtccataatctgtcgtattgatcgtcagggtacctgctggccgttcaatttttttcacgggcaacacttgctcagtttaattaaatt

SEQ ID NO: 189065 - DNA, 795 bp, Zea Mays
caggagtacttatagaattaagtcatcataagggggagctactgcatactgagtaatgttaatgcccctatttgttaatgagctggtgctcataatgtgaaaagcatggaaggctgtttaaatcatttagggaatacaattataatagtcatgtggaaagatcgcttaaaactgcatatgtaaggtaggaagataccttagagaagagacccattgaaggaagagctcttcgacctgtacattttgtggaatctttagacaactcccttttggaacattgatattgaagctttccttgaaggtgttcccatttccatttctctacaccaacaaagctgaaaaacataaacactacttggcttctaccatgcccaccagatatctgaaatctgactgaagtacaaggtattcttgattccttggtagttctctgcctagaacactgcttaaagcttccagcaagtaaacagaaaagtgatactgccgatctcatgcatgtgtcaagaaggaaacgtttcaagcctaaagcactatcaataagaagtatatccagatgtacaacaggccataaggcaaccattgtaccacattgaagaagaaagaaagcattggaaaccgaaacacaacaggcttcacaaagcaacttataaacaggtttcagtgggaggctcaatgcaggtatgacatatgtaactgaagcaccagttgcaatactagatttcatatcaggacaagaagcaagaaccatagaacttgctcttctttggcaattagaatgctgttcggaaatgctaa

SEQ ID NO: 189066 - DNA, 296 bp, Zea Mays
gtttaaatgatcatgaatatcctgccattttgagatgctccttaagggagcaagtgctcatggtttgttgtgcagagcccagatcgataagcgaccctagttgtaattctttttctctgcagctcaaccagccttaaatccttaattcatgcctgttctcgtgatttatttatgttatgctcgttcattgttttaaatttgaagcaatctatgattgtccctggtgagtttgacgctgtccctttttttcacaccttcaaagtgtgaccttgacacttgaatttcataattctata

SEQ ID NO: 189067 - DNA, 582 bp, Zea Mays
cagaagtactccatgtccatttggatgggtgcattcttggtactattgcttctgctatgattgagaaagcagttaattatcttcgtacattgaaacttctggcacactcaggggtctgttctattatgttatcatgtttttgtttattttgacttttatttttgaaatttataccatgatgttattactcagaatgtgcttaattttttattagattcctgaagatctggaagttggttatgtcccacctagttttaatggagcttttcctggcctgtacctttttaccaatccggctagatttgtccgacctgtcagaaatctttttattctatctgatggaaagcaaagtattgagctcattgggccattcgaacaggttgcttttgatcaactccttattctttataatcttcttaccgatagctcagtaatttattttgaaatctaatttaggcatttatggagatacggtgtcctgatggtggggatggtgggagacaagaaccatttcctgcaactcatgaagagatccaccctacagctattctcagtgtagttgccaatctgacaccttggtct

SEQ ID NO: 189068 - DNA, 456 bp, Zea Mays
aaaaggtagaagcagaggggaaaaggagggcacatatccgtttcgcagccactggatattaccgatacatcacaacatcaaatgatggggaattgttggaaccctaactttaactgagcaacaagaattagaatacatggaaaggaagaaatcaaatttaaatttccctaagagagagacacttgtcagtgggtgaatcagtaatcggagaaccgatcgagagtagatctagaggggaactaactagaagatgtaaagagggactaacctgagaacttcacgaagctgatgaggaggacaacactagggagatgtgagagtcgcgcgagatcgtttgcgggcgcgatgtcgtcaccaaggttcgagagagaggatgacgacgagcacgtgagcacgacgatagagatgagagccacagctgcggctgcgagtgaacccagagacgagaaagaggcg

SEQ ID NO: 189069 - DNA, 875 bp, Zea Mays
acaaaatctcttgtaagtagtttatgtgtcatgcacttgcttattatgaataaacacaaattctattccatgagatttatacatatgtatggttgtctgctatgtagctttggaaattagattcatttttacacttttgatttttattttttgttgcaggtgcatggcagttcataccaaaggaagcttggtgtcctaaagggtggagcacctccaacagtggatgtaagtctaaacaaacgatcttctagtagctcggtggaaatcatcttgtactcacatatgaattcagtatcagtttatatcacaatatttggttgcaagtttttattcatgatctccatgtttgttgatactcttgcctttctcgacactaataacttcttatgcgagtatataaataagcacaaattcaggtttttagcaatgtaagtagaaccagtatgtcaattttatgactgaacctcaacatatatagatttatgttccatagaagaactaccgggtggctaaactaacatctgaattgcagtccttctatctaaaagcaactatcttactatgaccatgttttcagaaaccaaaacgacgaacaccagcatttacaggaagaagttcaggacaagataaatctcatcgttcaagaagcatgtccactagcccagatcgtccacgtgttcgtggaaggtctccagccttcaatatgttaacttctgcctttgagaacacgagcaataccaggaacctttccacccctccccctgttgtgagaaagcctttctcaaaatctggatgtcctgaacactcaagggtgtcacccaaaaaatcagctatcagttccctcaccaggtcttttgaaggtcacatgaaaagta

SEQ ID NO: 189070 - DNA, 536 bp, Zea Mays
tatcaaatcaacgccggtgaggttgccacggcgtaggacactaattcacgtgcgccagtgccttcttcctcatctccgaccgccgcgtgtctcgtccaaattcgcggccaccgcccgtcctctctataaattgagcccgtgactagctccgtgaggtcgtcaggtaactagccaccgctaatcggccacaatcatccacccatgtgctcgaattcggagtttcccccaaatccgatttccgccaccgtgaaaccaagctcaccgtcgccagccatactccggttagcccctcccctctgctcccttgtttaagcattcttatacgtctacgatgcttgccgagccattgaattgaactaagagccctctggtcgccgggaacacgaccgtatagtcgccatactcacggccaccgtggccagagctccatagttgatcaatagcgcaattatgttaggggaaatgatcatggtgaccccgatttcatgtccgccgctcggagaacccagccatagccccaatcggccggtccaggg

SEQ ID NO: 189071 - DNA, 517 bp, Zea Mays
cgggggagttgatttcacttctcatctgcctgcttgcagtatgtaactgaaattcccgctgcatctgctgcaggatgtagttatttagcaggtagtaactaatttccatttctgtggtggcggtggagagggagcacggcacttccattttatttctggcacgtctgcttggatgagatgagtttctggttgtcgtgcagagatgtatgctaatgaattctggcacgggaaggggaagccagttggatgacttgcgtagcagattttgtgagctcttttcatgatgatgcctgctgcagctttgatgtttttcccctgtattggttgatctattgtttgtggtccgtgttggttatatgtgcttgtctacaataggttacatgttattctctttttcttcgcatatgatcttgaggtgtttgcaattgattgtctagtgcccctgttatgatgttagctagtggtctatagttgtcttttctggtggttgtggtggcatttacttttccatcttatg

SEQ ID NO: 189072 - DNA, 1255 bp, Zea Mays
tcctcatgtaagggtggtagccctttgtaccgatgtcgagatagctgggcttaaaggcaaagctatgctgaagatagccgaggtcgacgtagttgtggtcggtttgtgttggtggagcttcaagcacatgagaggcaacagagtgatgaaggagacatgtcgaggcaattacgtgtgggggggatgctgaggtcgatgcagttagggtcgatgtagatgaaaggcgataatgcaattgaggctgacagggaatcagggatggaacaggagggttgatgttgacatcgatgcagtcaaatcgcttgaatcgaggcatgggttgggtttgccagacccagcaatgtgttcggaacgaaaacgtgtgccaatgtagccaataccagatgaacgaggtagagggcctcaatcatatatcagcatccgagggaccaacagagaaggtctcaatgacgattgcggtgtgcagaataacaggtagaaggtgctgatgtagcatgcaactgtcgaagtagatgatgttggtatggacgaggcgacgacactaacaacgtggttgtgctggatatagtgtgggagcggacgaccggacgcgtcaaacccgaaggtgagcaatttgtgtgggcatggtcgagtagtccggacgtagggcatggtcgtagtggtgtagcggtggcctcgcggagggcggcgacgttctcatgctcacaggtagcgctctgagttgacaacaaagactcgatgagtaggacgaagaccttgtgcagatagatggtgcaacaaagattgcacatctgagtcatcgatgcacggggaacgacgatgtaggtgtatcgatgaagcgggcaacaatgttgcgacttgatgaggcaacacaacagaagccctgttgctcagagaagatgcaagtagtactcgataatggacgtcacaggagttgagtggatcagacataatcagttgtacggatcgagtgcgaacgaggtggagcaatgatgggagaagttggctgagccgtccgatatgtgctggcaatgacaaaccgacgttgtagacgtgtggacaggatgatcgagaagcaatgtgggaaggcgccccctcgacattgcatgctctaccagccacatggttgaagaagtatattgcggtgtagtcaatgtcgatcccaatgctggagtagtgcgcgaggtcgacgggcggtgggcaactcaatccagattagtgatcggacaaactaaaaaaggatattgtagcagca

SEQ ID NO: 189073 - DNA, 829 bp, Zea Mays
ctcagctcgaaagtcccttgggaactgattattcacattccaagcaacatcaatatcatcacgattcagttcaaggatgtttgattgaacgaatgcagtgttgaacatgacccggaacattgtttccttattctctatattatcgccaatatggatgaattcaagtaccacatctccatgaacatggcaggacacacttaattttatgggaacctctgcctgcattgcaaccatatgtcagtagattttggatttgggtataaacatactagtaatttaggagacagtcacctgtccataacgctgaaggtgcttctttgtttttggcatctcataaaggacctttgcactcttgttaccaggacttgagtcttgcccatgtacaatcaagtatggcctacaaccaccatctgtgtcaaaccgcggaacaacatggagaactattgaatccaagatgaggggtctgctaataggaggccattctgaaccacctccttgtcttgttatatagtgcagatatctcaaatgtgaaggctggggattcaagggaaagaactgctgtataaagtccctgcgagcctgcttgtagaccatttctagtgtcctctgctcgccagtatatattttgcgatacaaaagcagtccggccaacatgaatgcaagcactggccaaccccctctctcgcaatgcatcaaaagcatgttatgttgtccttccactgatagccaattttcacatgatttcaagaaatggtggatcatctcgagctgaagcaacggacatccttcatactgttgtgggtagtccattactgtcatgtcatactca

SEQ ID NO: 189074 - DNA, 498 bp, Zea Mays
gtctccactagtcacatctgtcttagatggctacaatgtatgcatctttgcttacggacagacgggaacaggaaagacttttaccatggaagggactgagagtaataggggtgttaactacagaactctggaagaactgttcaatattgcagaggagaggaaagaaagcgtcacatatgacttatctgttagcgttcttgaggtttacaatgaacaaatcagagaccttcttgccacgtctccatctaaaaagtacaaaaaattatcttcaggtcctgattttttgtttgtagtagtaggagctcgtgttaactcaacattcacgttttgcatttaggctggagatcaagccaaacagtgaaggacaaaatcatgtccctgggttagtggaggccaaaattgagaacataaatgaggtttggaaagttttgcaaactggaagcaatgcaagggctgttggttcaaacaatgttaatgagcacagcagtcgctcccact

SEQ ID NO: 189075 - DNA, 1659 bp, Zea Mays
ggaaaaggtttatcctggccaactcccagtgttgacctgggaacataagctaacccatgttagacatgatttgccgccattcagacttacatggagagagataatgcagctggtacttcttttacactgcatagcctagcctattccactgcccccctccccttcccccactcaccacaacacacctacacacacatacttaatcttcatcttaccattgcaggctggtattggtttacgtcttagtcgacatatccttgaggaaacttcaaaagggcgagtatgtttcattattttcacatgctcatggataataacaaattattatgtggaaaattgaatgttccacatgcttcagttttcacttggataccatgtaagttctagcttcgttagttttctacagattgctgttattgatcctatgaaaaagcgggctgcaagatctggtcagggtgtcccacttggtggtattgggtatatcttcttctctttgcgtaatatgtgtttcctgtaaatattgagtgtatattcatcaaacttttatgttaaaaggtctaccaggaaacttatgttcaccagatttaccgtgctcttactgcttgatactgtaaagagcttgcgaattccctatgcatcactttgttgctaaacatgtctgcatatcatttggtagttcaagtgtcatgaagaaagaataagcatattatatttactttattgtttttaaatgaagctacctacattaattctcacctgccatattaaacactacattggtaaatcaaggttgctctcagcaactcagccatctgttttattatttcccctttcggtagtggtgccactgtgccaggggtatcaccacactgaaatatgcaggagtgtgtgccctactgggcagaaggttgatataaataacagtttcaagtagtgcacacactaaaaatgttttcctcttgttcgatgaagcttgttgccatatttatgtattttcctgattgttggaaatgtagtgcaggaagtattggaagaagctacaaaggcgatttccaacgttggcaattgtttccaggatcttgtgaagataatgctgtattggcaaatcaattttctgtaagtttctagttttctccattatttatttctggctgataattttcttttgtgtctgacgattcttggaatttgagatactcttttctaatgcaatctcacttgtactggcttaatgtcctgaggtgctgatgcacccttgtcagacttcgagtgtataagaaattgaaagacagtactttaattaatgaactatggtgtattgtgatgcttctcaagctcttatctgctggattaacacatgcattagctgatgagaactgcgataagaattttaactacaatgtttactgtttgtttgatatttaagtgttgtccatttaggccttcatttcccgccaagatggtaaaaaatattccacagtgttgcatcctgggaaaccagatttgccgaagtaagcacacttgatgtttacttcatgagtttcctatatacaggaaatagttttgattttttagtgcttgaaaaattccttagagctttttaaatgcagaggaagtgacatttcaggaattggatcctgggactggaatatgagtgga

SEQ ID NO: 189076 - DNA, 845 bp, Zea Mays
gccaagcaaatgggtttattaaatgttccaccgaggccgtctcccacacgtgcattgggatgccatctaattccaggtcaaccagctgaggaagagttctgccagaagagttgaaaaatctagaccatcgcttgcagaccattgtgaaagtcgcagcccgctaaatggaccacctcgtgtcaagcctttgagccaaatcgtcagacgggagaaccagcaggaaactatttggtgataaacaacggagaacaagggagtctttaatgatttccaatcttggtgagagcagggatgccacttcgaattcagatactgggtcacgattgctgatcaccgagacaaccactgccaagcgaagatcttcctcggcaacagtcatggcgtggttccaacccagtaagcatgggggtacaagtcctgaagaaggcagacggggctgcatataattcctgctcccatcatctctgggaggggtgggggggggggggtttcgcctcttgcgagagtgactccggcgagaacggcccctgatagtgacggcatcagtgccccctgcatggtcagtagccattccttgaatcaaatactggctgcctgtgactgcagccaccgaagtcttcctccgccacaccttccgaggcgttgcaggatgaacaaatcgcctcgtctggcacagaccaccagatgacggagaggaaagtctgctccagacagactacaaggtcccaagaggttgctgattctgaagacgggaccaaccagaggctctgcctggaacgacaccaccaagacaggaccacaccgtctgcttgggaacagatgtggagatctgagcacgaactggt

SEQ ID NO: 189077 - DNA, 314 bp, Zea Mays
gccgtatatccatctaggaaggcaagccatggccattttttgaaactcgccgtagctcgatcttgctccgccatctccctcttcatcagttcctcgctttctgctgcatgccctggtaggtagattgtgttgtgttgtctccaagatgaacgacctgttctcgtcgagctcgttcaagaagtatgcggactccagcccggcgacgtcggcggggggcacggaggccggcggcggcgagagcggggttgacctggacaagttcttcgaggacgtggaggcggtgaaggaggacatgcgcgggctggagggcatgt

SEQ ID NO: 189078 - DNA, 425 bp, Zea Mays
tatggtaaatatgcatatttagtagtaattggatgcagtcgatgtttgtgccgtgataaattttatgaccaaagtgggtatcttgtgcttatgtatggtgaagtaagtcatgatactagttatgcgaggtgtatgtgtagattactagttattgttgaaatgacttgtttcatgcactaatgtaattgtatacttgagtatgacgtagactactcaatatatgtggttatataggtgggttagctctatttaatcataaggtgttagagtgttctgaatgtcaaaagcatgataagtgtagaagccaaataggagttaaattgaatgtattgctgtttagggctgcaggtacagttttcgttatgcagctagttcaatgaagcaaaccatgttttctgtagagatgatatacatataagttgtag

SEQ ID NO: 189079 - DNA, 846 bp, Zea Mays
gatggtgaactagaacctctgtcttcaataggggttgctggagcgcagctcttaggctttgcggaagcaatagaataatgaagttcatcgagaaagtttggattagttgttgaacttaagcaagagccgtcatgttgacttgaagctgtcctcgactcggccggactccaagcacaagcaaacaaaggactggagacatctttccctatacgttgagtaggtaggtttttcgatagatcccgccttgaattcagatctttaacaggtcgttgtgaactatttttagattcatgttgactttgtgaccaggaaacatgctggctctgatgagattccacattaccatgtccacaactcacctgtaccacggtaggactccatagggctccgctgctgtgatggtggtttgattcaccagagcatcctccctgtattccatcatggttcaagtctgtgtgcccatatgcacttccaggagattgaatgaaaacagaatgcttattctggcagtgtgtttggctattcacagtacaagcatccttcggcggaaccgaactagttgacagcgacaagctatcatctggagagtacacactttccctttctggaacagaatacttattatactgaacagttattcctgaagaactaaccacactatgaccagcaggggagaaagcattggtctgatccacactagggttgttccttgtatgtccagtgccaaccagcgttgccttgctgcttgtatgtgatgcagcctgagtgaaatctttctgctgttttgaaagcacttcagtcaacagcaaagatctctcctcactctcaaatgtaagccatactctc

SEQ ID NO: 189080 - DNA, 285 bp, Zea Mays
tctgtacataatgaaacacacttttgtcatttgttttcactaccaaaagtgaagctggcattcaggaatgagggttgtcaagatattcagctggtgataatccttgagcacccaatctgacgaaggaacactggttagccctagatccaagcatcttcacttagccttcacttggtaggcattgacatctatcacaatgttattgtagcatttgacttcgttggtgttctgtgcgacagtttgtgtttgtgtagtatttatattagattccagtgcttttgtaaa

SEQ ID NO: 189081 - DNA, 361 bp, Zea Mays
tttataattgagatgttttgatagaaagcagtacctgtatatcttgtgtctttggctctattggtactaggggtggtagctttggaagttgagatgagcttgcgctgtggagaacaacaggctcttcttttttgaacacggaaaggagtaggtcttttccatgcctctttttgatactaagaatatcaaatgttggatctttgttgtccttattaggtcctctctttttaatactttttcctggaaacaacttggtcacaacagtcaatttctcacccacaattgctttaatctcttccggcaattcagatttgttgctttgtctcagtaatttctctacggttttcccaataagtgatgt

SEQ ID NO: 189082 - DNA, 306 bp, Zea Mays
attactgtgacccaggcattagatgcattaactgggtttgatgactcgactcaaatggctgtcaacagtgtttttggagttcttgaaaatatgattgatcagtttgagaaacaacaggactctgagaatggtgaaagtgctgatggaaatgatggtatcacttccgtggatgagacagaatctcatgtgaaagagaatacagagaatgtgtcaagtggagaagatataaaccactcatctaaacaaccagaaggtagcagtcctggaaaaactgattcaatcatgtccaaatatgattgtgctttt

SEQ ID NO: 189083 - DNA, 697 bp, Zea Mays
acgcccacgacttgtgccgcttatcttcttcggcgtcctcaacagctacatcgaccacaactatccgacgcacggcaactcgacaacagttgggcacccttgcactcggttatctcgacataatcggtacaaagagctatcatctgcatgggctactctagtcgcagcattcgcatcggcgttctgactgggggggatatctccattattctctagtttgtccgttcgtgttgcttattaggatatgtatataccaggatcaatcagagcctgattgcgattgattgtaatcccctagattggctagcttccttgtatagtctaggattactttctatatatagcctaggtctgtttccttgtacagggaatagccttccatacatgtaccttccatgcatgcctattggctatatatgacaggctccccaccctcaatgggtgtgtggtgattcagtccattcttcctttctacatggtatcagctctctagatcatgcgcttccctccctgctgctgcaccatccccaccctgttgtgccgcagcgccaccacctccctgctgcgccgcctcttctccctcccaggtcgccatgaccgacgcagccaccaatcctgcccccgctgtgtttgtcgccccctatgcgacgatcaatgtcaagaatcacatcccggtgactcttgaactggcaaaacc

SEQ ID NO: 189084 - DNA, 292 bp, Zea Mays
ctcttgtagcaccaatgtccatggacgacaagaagtctctcaagaaaccgaaattgagaaatggaaaaatcactagccatcactgcctggtaaaggacaaaaaaagtttactcatacctaatcaccaatccttgatgttaaatgaaagtagcactacactagatagggattagatcatgataatctgaacaactcacctgcattccctctaccccacttataccaactccaatatcagcttcttgaatcatgcccacatcatttgcaccatcacctactgctaaagtggttt

SEQ ID NO: 189085 - DNA, 488 bp, Zea Mays
aaaagacccagtacaaaggtgccaagaaagcaccctaggaaataaaaccaaaaatcaaactacagccaaacctgcctaagagcaacagccccaccaagaccccataacaaggcctcatcatggatggacagcaaaattgcgtgaatatttggggaagcattgtcaaacacacacgcatttctatgcttccaaatctgccaagctactaaaattacaatagagttgaaaccttttttcttatgcttagacaccaatctttctgcctcactccaccaatcttgaaaccctgtagcatcagacgtaggagcaagatgttgcaaacccagcctgcttagcgttctaaaccatacttccctcgtaaagacacaagccaccagcatgtgatgcactgtctcgtcctgctgatcacacaagggacaactatctggatgatccattccatgacgtgccagtcgatcagccgtccaacatcggttgagagatgcaag

SEQ ID NO: 189086 - DNA, 279 bp, Zea Mays
ctatagttccaacgacaagcataggcactaaactccctttcgtcgtcatggctgggggatgacgccgtcatctcgctgggtgcccaaggcgaaggtcagatctgtctcttttgcagaccccattgttaccgttgtttggctgcaggtggaaagacaagggctatctgaagatgttggaggcaagtctggttcgatgggcgctgatatccaggaatcattgcacgaccctactaccaccacgtgcaaggtaaccaatactgttgatctcgctaatgtttt

SEQ ID NO: 189087 - DNA, 1516 bp, Zea Mays
caacaaggcagtctcacaatcagtgtcaaaactcttccatctgtgaagctacccggggagcttgatgggaaggtatggatgtggcacaggtgtctcaggtgcaaaccaaaagatggaattcctccagccacacaaaggatagtcatgtcagatgcagcacgtggattatcttttgggaagtttctggaacttagtttttcaaatcacacaacagccaatcgaattgcctgctgtggacactccctccaaagggactgccttcgtttctatgggtttgttgcttcttattgtatactattcagtttcttatctaataatgaccaacctaacagttagcgttctcaatcaaacaggcttgggagcatggttgctgtcttccgttattcaccagtagacattctttctgtcaacttgccatcctcagtactggactttgcttgtccaaaagctcaagattggatcatcaaagaagctgttgatgtatgtttatgttagttttatctaagcttgtctaatttggctctaaaagccaacccattgacatcattttgggagatgtattgccctaggtaatcttttatgacttaacttgcaggtatgcgctaggaaggaacatctgtatagggaaatcgttgctaaacttgactgcatcgaaaagatagttaaagaccagaacattggtatgaagtcaggcttgcataaacatgttgctgatcttaaggagttggttaaagttgagtggaagaagtatgacgtaagtttaaattctacttttttatagattgctattgaactgtacctagttttctacttctcttgtagattgctatcgaaaatatagttacagaccagaacattgttctttactttttcaggttgtatcagcgttttctatcgtagataacttgcagacatttgaaccgtatatagatgttctagagctcaatctcctgaggagagagcttgtacatgatattcacgtatgggatcgcagactgtacatgatgcactccctcacgaaagagaactgtcgtactatgccaaatgacgcacaattttctgagaagtttactgaaagctcattagaacaatcaaaggatgtgacatctggtaaacatttgaatgctgagagttctctagaacagaatcaaccaagtacgttggaagtggctgcagtttcagtgaaatcatcccctatgacggaacaaaccaacactagcatttcacatttggcattggaaaccaccattatgggtgatgcatccatgcattctgtctcaactgttatcagctttgccccaggctcgtatgaaatgcagagtgaaggagtgctggctgaactagaagctggaaagactttgcagaaatcacaatcttctgcctccaatctttctgatagaattgacttagcatggactggttctggtcagcttgttaacgattcatcaagtagcatggaggcagtttcattcatacctgctagtctgaaggataatcctgcataccagaaggttat

SEQ ID NO: 189088 - DNA, 538 bp, Zea Mays
gatatttcacagccaaattctgaggctaatccacctgatggggttttagcggttcctttattgaggcatcaggttaccttgcaactcatgttgtgttattttatgatgaaaaatagtattaccactcctttgttaactgttattacttcggacagaaaattgccttgtcatggatggtgaaaaaggagactagtatctcgctttgctatggtggaattcttgcagatgatcaggtataactagctaacaccttccatgttgccaagacaaatggtcaattgtgtcttaaggtcatttggtatttttcagggccttggtaaaactgtatcagccatatcactgattcttactgagcgcccaccagttccacagtcatctactaagaacgagccatgtgaagctgtaactctagatgaagacgatgactgtattggacctcattcggaaaagctgatgcggacatgtagctctcaagtgacaagtaacacagtgaagcaagaaaatcctattgtagcggttaaggcaaggccagctgctg

SEQ ID NO: 189089 - DNA, 404 bp, Zea Mays
cgctcatcattaatctcaaagataaagtagagcggcagcaatccgagatggaaactcaaaggctcgagtttaagcagaaacaacaagaatctcaaagaagattgtcagaaacacaggatgattctgaagttctgagaagatctaattctaaactacaatctactgttgagagccttattgaagagtgcagttctcttcagaatctaactgctgatctgaaaaggcagaagttggaaatgcatggtcatcttacgcaaaaagagcaggaactggatgagtcgaaaaaaaggaactttgagtttagcaaaacagtggaattccttgaggcaaagctttcgtcactacataaggacgtttcttctaaagagcaatctttattgtcagaattggagagtatattccag

SEQ ID NO: 189090 - DNA, 805 bp, Zea Mays
aaaatattgcagaaatgctttgctgggataaaatctttgagaaggatgatattgctatttggcagaaacaagggaattcatattcatgtcatcaaaaggatggtcatgctagcaagatgtgcaaagttcaagattcagatgatgtctggtatatcttctgtttatacgaagttatgaagtcaagctttattttctttcctatttccaagtgaacttgactaaaccataataattcacagctacaaaaatcctcataagagaattcatataaaacaatttatgttttttacacactggaaaaatataggatgaataattgattgccttatgtaggatagggtaagttgagatagtgattgcagaaattactacttgttcacagtggaagaacctgcgcttcttttctgtcatcatttgaagcttgggcaatctgttctgtttttatcctctaattacatcagttttaatttgtgtttcatttttggtttataatttaggtataagaaattggaatcttgtataacacctcctatagaggcagcacagctaaagaagtttccagagagactatctgccattcctcccagaattctggagggtcaggtcccagacataacagaagaagtctatgaggaggataataagttgtggaagaagcatgttaatacttataagagggtgaacaagctgataggttcttcaaggtacaggaatattatggacatgaatgcaggccttggaagttttgctgcaactcttcattcttccagttcctgggtaatgaacgttgtgccctctatatcag

SEQ ID NO: 189091 - DNA, 381 bp, Zea Mays
caaagaggaaaaaaggcaacgaccaaacaacaattctcagacgaggttttactggaggcaagaactgagggccaagaaagaacaccgacgagaaagtttaacaggaggcaagaacagggaggaggaaaaccataggtacatgttgatcaacaaagatctcttttttactcttctcatcttcatcattcggtctttgaacggcggctctcgtcgatgaggtgctgatgccgtcgcacgcctccttctgcgtgctacgcatcaatatggacaccgccatgccaagaagcgccgcagcaaggacggtcgagccacacttgaccctgagagtattagccggaccggtggcgatctcggcgccgaccccagcaacgctgcggcaac

SEQ ID NO: 189092 - DNA, 859 bp, Zea Mays
gaaatttattgcagggtcatgatggtgagaatgttatattggcacttcgaaatggtacagcagcagtgaatgctgttgctaagatgaaggaaagaggttacaccaatcgccgtagatcccgccaccgtctgactcctggaactgtgaaatttgccgctttccatgtgctctcgcttgaaggaagtaatggtctcacaatattggatgtagcagaaaaaattcaggtacacatatatatcctgaacccccctcctcccgcccctaaagtggttatcttcaattttctaagctgattattttcctgttcagaaatctggattgagagacctcacaacaagcaagacacctgaggcatccatagctgctgctttgtctagggatgcaaaactttttgagagaactgctccttcaacatattgtttgaagtcgccttatagaaaagatccagctgattctgaggccgtgttgtcagcagcgcgtgaaaaaattagggcctttcagaatgtgctttctgactctgaagctgaaaaggaggcagatgaagctgagagggatgatgattctgactgtgatgatgctgatgatgaccctgatggtgatgatgtgaatattgaggtggaagaagacaaggatcctcttcttgccgtcaaggcacaagacgaagtaccgagtacaactacagttattggcataaagaccaagttagatagtgtaggtaatgcattgaactcatcaagtagttttactaaatcagcaaaaggtgctcctctcccttatttaggcaggtccagtgcagcagatacttctaatgattcacctcttggaggcccatcagctaatcatgaagtaacccctggcg

SEQ ID NO: 189093 - DNA, 401 bp, Zea Mays
gtgaaagtaaagaaataatcgatgatggatcgaaatggataaatgtgagaaaagggacctgctgcatatgctgtgagactccgattgactcccttctgtacaggtttggctcgcattgaccacattctattatttattggacgagtgttgaatcatagtctatatgttggtagtagctgtgaacctgttttttgtgtttattactgatcagatgtgggcacatgtgcacttgctcgaaatgcgcaaacgaattggttcgaggtggagggaaatgcccgttgtgccgcgcacccataatcgaggtcatccgagcatacttcatcatgtagatacaaaaggaagacagcaagaagatagaagaggcccaaattgtttttggtctgtgtggagtcgttagcggg

SEQ ID NO: 189094 - DNA, 585 bp, Zea Mays
ccgaactgcttgaaactgcaaaataattgacatgctattaattataattacaacagtgaggttaaatcacagtaatatcaccatgctgggtacaatgaccatggtgcacatcaatctttagtgtgcatttaagtaggagtatacaaggaaggatgaagcaaaaagttgcgatggaattattttggatttttatttggtgtatattttctaatactatatttttgtatgtagggggaataaaagagaattaacccaaaaatcttaaacaacaaaaaaagaaaatcagtacctgtagatcctttctatgaacaacaacttcagatctgaaaacgtagctagagtttgagtggttggtttcgcatagtaggagcataggagaaggggtgcacgtacacctgtgggaaaatatttagtggagcggtgtttggaattccaataggagttcgatcagttgtgtctgctccttgatcatcgattggaacagtaacttcagatatgaatacgtagctagagtttgagtgcttggttttgcatagtaggaacagaggagaaggggtgcacgtacctggtgggtgcgtatcgcca

SEQ ID NO: 189095 - DNA, 524 bp, Zea Mays
gaatttcttcaggttacttcgggtaaaactttatgcacgaggagagagcagagatttaacttatctgtgtttcattgtatttcgatttaatttcccagatttaatatagttgttatggccacttggcgatatatataaatatacgatgccacacaacacaatcacacaaaatataaagtgaaaacaaaattgtttacgaaggttgcacataatgtgacttcaggaccttgaacaacccaccacaatccacacgggtacaagctctagcgtatcttgcgtcaacgcgtgtgcggccatcagggttacgacagtatagcaagccttcgtaataagcgcaacaggcacaattatggctcggtaattggggtacacgataaatccacgcaacgtgcgcaacaggcgcaattgtggctcgcggcagacagacaaacaatgtcgacatggcatacgaaaaatacgcgactcgataatgacgtccgactcaacaggagtggtccgattaagcgagagtgtgacatagcaat

SEQ ID NO: 189096 - DNA, 1555 bp, Zea Mays
gtccacggttcgatcaggttttaccttctcttcgtcgtgcaagatcaatccttcattttctccgtcgtgcaagggggtcagttgaatcagatgctccacgttacgtccacccttgagctcgatggcagaaggaagcagtagccataggaggagtgcattctcccctgggctggctgtgttattatctggcgatgaagctaagattagctcccagaagtcgcacctggtgtcctatcatgacgaaattgggcaccaggctgttgagaggacgatagagcacatctttgatctccctcacaagtcagtggtccggcctcctggaccagttgacacaggcttcgtgcactcagtggtgaggaatcaagctagaaaatttgatcttgactgggaaaactgcattcggggataccatcgcagcgtcttcattgtggacaaaggtgctgggcagaggaaggtggttcttgatgattcgagcatttgtggtagcttcaggaatgtccggggaccttcacttgttgagagttccgcccctttcagcagtgccagggctaatgcttgtgtgtggaaaggcaaatggatgtatgaggtgacccttgagacgtctggagttcagcagcttggatgggctactctctcttgtcctttcactgatcagaaaggtgttggtgatgctgatgattcatattcctttgatggccggagggtgactaagtggaacaatgacccaaagccatatggccagccatgggcagtaggtgatgtcatcggttgctgcatcaacttggatgcaggagaaatttccttttacaggaacgggacttctcttggtgttgcatttgatggaattcgcagcgtggaacctaagaagggatattatgctgcagtatccctctcggaaggagagcgttgtcatcttaatttcggctcacatccattcaggtatcctgttgatgggtttgatccattagaggcgccaccacgctcttggtcgtttgtcacataccttcttagatgcctgttccggttgctagaagttcacaacctggagaaatctgaatcagcatacttcgagaaactgaggagggtgaaaaaatttgcaccactacaagaactctttggacccatttcagaagggatctgtgcagaaattttcagtgctattgaagcaagccaggggtgccttgagtatattgcctggggctcgttgatcactctactcttagatgttttcagaactcgtgagccgcatgatttctcatgccttgatcaggttcttgaccttttcctccggttcccaggttgcacttcattatttcaggagctcattgtggccctttcttgcatgtgcaaagttgcaccacttgtgttgacagaatgcccatattctgggtcatatccatttttagcgctggtttgccaccttcttaggcataaggatgtaatgtgtttatggtggaaagcagaagatttcgttttctcgtttgaaggcttccttacaaggaagattccaaataagcaggatctacagtgccttgtgccatctgtttggtggcct

SEQ ID NO: 189097 - DNA, 608 bp, Zea Mays
gacacatcctttttcaggagccggcactcgtgtgcgagttgtctcatgtgctagcctacttggggatccgccctttgatagattgcttcgcggagacgaagctctggccacgggctttgtagatgatctagaagcaactgcaactgcatttctgtcatctctgctactgattgctgcatcatgccccaccttcctccctggtccccttttatgtgcagatccattgcttaaaatcctacttgtggatgataatccattttggctgttcaaatctctgcgtgtcattctcccttgcccaacgatccgtcccgcgagctctcttatcggaccagaaccaccgtgtgcgaccttcctagtagcagataccgattcacgagcgcgtccaaccaggcgcgtcgatccagccaagcccccaggctctgtaatcccagaaccagaaacctccggccgagtaggtgttgctcgtttgcgcaacgacctctcgtctccagtttgaacggcagcaccgctcgatctaaccctggcacaagtgcgcactacctcatctcttactccactctcattgtgcttggcatccatatcagagccccgtttgctcctgttcccat

SEQ ID NO: 189098 - DNA, 1418 bp, Zea Mays
ggcttctccgtgagcgcggaggagctggccaccgtggtgcgcaaccacgatgccaaggccctgaggcaccacatgggcgtcgacggcgtcgcgcggaaggtgaacgtgtccctcgccgacggcgtcaagtccgacgaggtgggcgtccgggccgaggtctacggcgccaaccagtacaccgagaagccgccgaggacgttctggatgttcctgtgggacgcctgccaggacatgacgctcctgctgctcgccttctgcgcgttcgtctccgtcgccatcgggctcgccaccgaggggtggcccagcgggatgtacgacggcctcggcatcgtgctcaccatcctcctcgtggtcatgatcaccgcggccagcgactacaaccagtcgctgcagttccgggacctggacagggagaagaagaagatcgacatgcaggtcacccgcgacggctaccgccagaaagtgtccatatatgacattgtcgtcggggatatcgtccacctgtccatcggcgaccaggtgccagcggacggcctgtacatcgacggctactcgttagtggtcgacgagtcgagcctctccggcgagagtgagccagtgcatatgtccagtgcaaaacctttcctgctcggcggtaccaaggtgcatgacgggtcggccaggatgctggtcaccgcggtcgggatgcgaactgagtggggaaacctcatggaaacgctgagccaaggcggtgaggacgagacgccgctgcaggtcaagctcaacggcgtggccaccatcatcggcaagatcggtctggtattcgcggtgctcacgttcaccgttctcatggcacggtttctcgtgggcaaggcgcacgcgcccggcgggctcttgcggtggaggggagcagatgcgctctccatactcaacttcttcgccgtcgcggtcaccatcatcgtagtcgccgtgcccgaggggctgccgctcgccgtcacgctcagcctggcgttcgccatgaagaagctcatggaggagcgcgcgctcgtgcggcacctctcggcgtgcgagaccatggggtcggcgagctgcatctgcacggacaagaccggcacgctcaccacgaaccacatggtcgtcgagaaggtctgggcgtccggggcggcgcagacggtgagcaccgccaagggcttcgacgagctcaggtcgtcggtgtcggagaacttcacgagggtgctcctggagggagtcttccactgctccggctcggaggtcgtcacgagcaaggacggaaggactagcgtcatgggcacgcccaccgagacggccatcctggagttcggcctcgaggtggagaagtacaccaaggtggagcacgcggacgccaagaagctcaaggtggagccgttcaactcggtgaagaagaccatggccgtggt

SEQ ID NO: 189099 - DNA, 371 bp, Zea Mays
gcccaagtaggctgcggctgcggctgcagtccgtcgcacggctgctgctgctgctgtcggatagtggtggccttcatggtgtttgttttagcgatcactttaattagctccggatgttacttagtttcaggaatgtttgtctagttttagttgatgggcactcatgtgtggcaatgatcttgcgatgaatggataactagctagatggatcgatcggtcgatcgtcggggggtatagagaggtgtgcgtttctgaactctgatgagagcggagcttcttcagtcttcgattcgcaaatggtttgaggagagtggcttcctctgaaattcctttgtcatcctgcaatctcttgtcggtacacgtcgtcagtg

SEQ ID NO: 189100 - DNA, 495 bp, Zea Mays
agagcagctatccagttgcagtgttcacttttaccgtaatactacatacatgaaattccttcaatcttctattttacctgttcttaactttatgatatagctccacacctttagcaatcacgtaaaaaaatttcaggtaacaaactcaggacatacagctgctgatgtgactttgctttttacatgggctgtaagtttcagtaaagtttttttaacagatatttcgtaacttctatcataattgaatacttatattttgtatttctttttttctctgaaccttcttgccttatgtttgaacatgcagaactctgttggtggaaaatctgaactcaccggatatcattccaactccagtatgatgtaagaaaacaataagtataaatgtttagctggtttttgagcttttctttaataaacaagttgttgggttatatttttaatatatcctaatggatgacagagaaaaggatggtgttcatggcatactattac

SEQ ID NO: 189101 - DNA, 402 bp, Zea Mays
gtcaagaatgccgccatgtcaagtcggattccgcgccgccatggagacaaacggggaggggtcacggaaactgcggtggcgcgaggagtagcatgcttcggggcgacgacacgagaaggagagaggagtatgttaggacacccgaaggagagactactagggaatggcaggtgacacagacgcctcagctgagagatcgagaacctcgaagaagagaggagtaggagaaacaacagtaccatgcgtgccgatccgagcagggagaggggcagcgcggagaggaagatggcgggatggggccgacgtttgctgcggtggtgcggggaggaatagtatgcggaagggggcggtagaacttctcaaaggatgcaaatgcactagaacttctcaatcactcactag

SEQ ID NO: 189102 - DNA, 562 bp, Zea Mays
agtcgctcccgaaaccccaacctcggcggcgatgacagcagcgacagtgatgcaggataaggagtgcaagagggagaatcaggaggcactgccggcagctccattaattgaggaccctgtgccgaaggtagaaaagaggcacaagaaaagaaaagtggcacaaatcacgcagatggaaaacaaggtgatgacagagggtgcgacggtaaggaagaaacataggcggcagaaggtgaagcaggagcaatctggccaaacaccatttctcaatgatgtctattcaaaggcaggggaagaagctgctgctggtggcgtcatgggcagtcagtgtgtcaagaggatcgaccgcagcaagaattccaaggttttgaagaagcagcagacactgccccaaggctttttccctcccatagccaatcccgatttcattgatcaggaccccaattattgttctccttttggtgcattttttgcccaattcgcctacaaacctgagcgccggcaagatgggaatggttcgccacttcctagtaccactggtcgcacagcgaggctgcctcct

SEQ ID NO: 189103 - DNA, 1536 bp, Zea Mays
ttttggccactaagacaggtaaggctgtttttggcctcgcgtgagctacaacacatgttttcatggccgaacaaccaatttagtgtccaaccatagtacactagtgttaaaaccatagtacacatttttgtccccggaggcctgtaaggctatttttggcgtcccgcgacacatgttttcttcgtcgaacaacaatttcatgcctcccgcccgccaaacatgttttggctactggcatgggaaaggttgtttttagcatctattgagctacatcacacaaaacacttaaatcctaaaccccgagccccaaaccctaaaccatgaacccgtaaccgcgaacccttagactaaaacccgacccccaaaacacaaaatcacaaatcccaaactccaaaccctaaacattaaaccccaaacgctaaccctcaaatcgaaacccgaaatctcgaatcccaaaagcctaagctctaaacctcgagccccaaacgctaaggcctgaacattgaaccccaaaccctaatttgtgaaccctatacctcgaaccctaaatcaaagacccgaccaccaaaacacaaaactccaaaccccaaacttcaaaccctaaaacacaaccctaaaaagtaatgtaaggctgtttttggcctcgcgtgagctacaacacacgttttcatggccgaacaaccaatttagtgtccaaaccatagtacactagtgtccgaaccattgtacacgcatttggccccggaggccggtaaggctatttttggcctcccgcgacacatgttttcgtcgtcgaacaacgatttcatgcctcccgcccaaactctaaacacagagccccaaaccctaaagcccgaaccctgaaccctgaaccctaaattgtgaaccctataccccaaaccctaaaacgaaaacccgaacaccaaaacacaactccaaacccaaaaacacaacactaaacagtaaagtaaggctgtttttggcctcgcttgagctacaacacacgttttcatggccgaacaaccaatttagtgtccaaaccatagtacactagtgtcactgtaaaccctaaactccaaaccccaaactccaaaccctaaaacacaaccctaaaaagtaaagtaaggctgttttgggcctcgcgtgagctacaacacaagttttcatggccgaacaaccaatttagtgtccaaaccatagtacactagtgtccgaaccattgtacacatttttggccttggaggccggtaaggctatttttggcctcccgcgacacatgttttcatcgtcgaacaacaatttcatgcctctcgtccacactctatgttttggccactgaaacaggaagcgcggtttttagcctccggtgactaacttgtgaaccctataccctgaaccctaaaacaagaccccgaactccaaaacacaaacctcaaacttaaaactcaaaacccaaaaacacaacactaaacagtaaacgacgaactctaaatcctaaacccaaaccccacacaataaaccctgaaccccaaaatc

SEQ ID NO: 189104 - DNA, 372 bp, Zea Mays
tttaaataaacaaattctctcggttggagatttcttatttcttaaaatctttgcattaatttgagttttgatacaacccctttcctctcgtattgccagaagtacttatgttgcaacatgaaatgctttctagtctccttattaattcctcacattcgtttgtgatgcaaatacactgagctgtaatgttgtatatatctgaaaggaacttgagcctgtgtactgtttatgtgaataacttgtctatgttgatttctgtagaaatgccctatatcttatgccatacaatgcctgcactgcattgcattacacaatgcattatgcatgtagttgtgtatggtttttttaattcagcatgctcatatgtcacag

SEQ ID NO: 189105 - DNA, 640 bp, Zea Mays
gtgaagggtatcgctagctcaaagagacaacagttcgccaagcactgttgatgcctttttgagctgagaccgacccctgtgatcataagcagccccgcgagaactctcccctacccaggctatcgggccttgtcattgtgcggacgtctgaggtcggagcacttcatttgtttgggagctggaaaaatgaaggtgcactggttggtttctctgaacttgtgaaagggttagcgaaggaccgtactgtaatgttcatggcctggaggaatgatgcagcaagtaggatcagaaatcagaactagccagcgacaatcacgctccagcttctgaaacgttgctgtagccttttgttgatgttcaggactgggagctagattgtcacgatttgacactgaggacgttactgtgcctgcaagcctaacctaagatgtatcaagcatcaagtgctgctgctgctgctatggaaggtcttagccaaaattaaattatgtttctaagctctgcatgcatcttaacctgcgctaataggttttcttgatggcctcaatgggagcagcaggaacctactactttttatgcgcataaactggcacttcgcatgatgtacttgttcataagttggtcaaaaagtcggttccgt

SEQ ID NO: 189106 - DNA, 555 bp, Zea Mays
ggcggcatggaaggtggaggccggcagccgtagaggatagagcgggccggagctgccgcagcagacgatctctctccgacagtgaagatccttcacagagcaaccaaaggggtcaaattccacagaacaattattgtcagaagtaaactggcgcatagaattaggttcttgatgagacttggtgaaacaagaacattattaaggcggagggaatcagatagagtggtggaaccagtggaggtaacgagatggagttcccgttaccgtcaataattgaagagggaaagggatgatgtgaaggaaaggaatgggagaaagtaccaacatcagaggacatatgtgtggtggcaccgaagtcaaagaaccactcgttttggcgaggtggttgaagcgtcatggcgctgatgttggagagtagcgcctgctgatcccaggatggagtggtgggagtcggaaatcctggcggcggtggtgcagaccatggttgctgtggcgccccaggccagggaccttggatgccagcgatcagggactggggcagaggagtggccggct

SEQ ID NO: 189107 - DNA, 341 bp, Zea Mays
ccgtggtgacccatgtttgatttcctgcgaggtcatggcctccgatccatatagcaggcgaaagggagtgaacccagtcgcccgacactcggtcgtgttcagcgcccagactgcttcaggtagcaggtcggcccatttgcccttcttgtcgtcgagaagcattttcttaatggcagtgaaaatcttgctgttggcgcgctccacgacgccgttagattgtgggtgatatactgaggcgaaggctagcttggtgccgatggagaagcaaaaatccctgaaatcctagctgtcaaactgtttgccattgtcaactgtgagctcagacgggactccgaattggt

SEQ ID NO: 189108 - DNA, 1144 bp, Zea Mays
gaatatagcaaattccgttcaatgccattggtggaaacagccatagcattagccgaaagtggcaaaattggggctttaaatcttatattcaagcgtcatccatatactgtctcttcagatattttacgtgttttgtctgctatcccagaaacccttgctgttcagacttatagtcagttgctgccagggaaatcccttcccagtgttgtcatattaagagctggtgattgggttgaatgtgaacagatggcttcatatataaacaattgccctgccgagttggacaaggtcgaagagatcaaaacggaaatacttgtaaagcactcaaaaggcttttcatggccttcagttgctgaactttgtgagtggtataagaacagagcaagggacattgactgcttaagtggacagctggaaaactctctggccatgatagagcttgcatgtcagaagggcattgtagagttgcagccattctttgatgatattaaatgcctctaccaggttgtatattctaatgaattgaatgagtttacaatgaatcttttgacatgggaagatctgcctgattatgaaaagttcaaaatcattctcaaaggagtcaaagaagatacagttgttcaacggctagaagaaaatgctatccgttttatgaagaaattatatgaacacaaacaagaatcctaccttgttagttggctgaaagaggtagctgctaaaaatgagcttttgatttgcttagctgtcattgaaaatggttgtggggaatcaccaatatatggtctcttcaaggatcttgctgagatgatagaaacctctgttcactgcatttatatgtgcagtgcaactaaccagtggaataccatgtcatcaatattatcaaagtcactctataaaacaaagagggagaaatcgttagtggctagtgaagaagactgcaatctgaaagatgctaagcatgctcttggttcttctatggtttcttatgaggagatgcaatgtgtctgtgctgatatcttatctggtctgggcaatgctccagaagatttttatcactatgattcagtacctgacaaacctaatgatgtcaaatatcttgatatattggagaagaggctaaaagttgctgaaggccatgtagaag

SEQ ID NO: 189109 - DNA, 321 bp, Zea Mays
agtcgtgcttggctcaagtttaggtgcagacttctgttcaagtgaaccgctgttgcttttaaggttaacaggtaacaagggtgtgttgtttgttggggttcttgcccccttttcatcttaacataaagctacacagtgctcttgtgtgttcgagaaataaaaggttaacgagtaactaccatatcgtggtagtgtttcttattcatgaggtcctgatatttatagcatgctattttgttgtcatcacacttaattagttttcattctctgctgttcttcctccaagcacacataggggtagtaatgggttctaaattttgc

SEQ ID NO: 189110 - DNA, 809 bp, Zea Mays
taggcaggtgcctgggtgggtccggattcaccgtgctgcctaggcgtccgctcagggacgccgtgacttcgccgcgccgccccagcccatttggcccacctcttatctctaattctccttcccctcaaacagcgcctccagcccttcactcaccctccagctgcctcccctcctctcctacccgccagcatccgccagcccctcctctccaactgccagccgccaccagcagtatgaacttatcacctatatttatttgctatgaagtatgaacttgtactcttaatctctaaattgctactgattactaactactgaccattgcctaattggcgcctaggtgcctgactaggcgtccaggtgcccagctggcgcctggcctcaccgtgggcgctgtgataaccttgattccatatttccattgaatacttctatatgttgatgtgtccttgtttggctacatttgttaaagaaaaatttcctgcataaggagtgtactttttgcatgggatagtgatctagccacttaagttatcttatattggttcctgcttttcaagggtggaagttgcgatagattttgttctttttattaaaacctgttttcttaaaatgtatatcatgtgagcatgtacatttatcatttaataatgtgaattagctgttggatgttgaatgttttccttcatgtcatctgttttgttaatcttaccttttaagatgacaggagggataaaacatataccttaaactgtttatttcgccttcttgaagtcattctccctatttttgtaaatattggagatttt

SEQ ID NO: 189111 - DNA, 433 bp, Zea Mays
gacttttgtgatcggtgaaaatgtggcatttgtttccgattaggtaatgcctccatatcttcaaggcatgcactatggctgccaattccaaatcatgggtggggtaattctgttcgtgcggcttgagtaggcgcgatgcgtaagcaatgactttctcgttttgcattagcacacaccctaagccttgcctcgaggcatcacagaagacgacaaaatcttgatgaatatctggtagtgacagaacgggtgctgttgtgagtttctcctttatgacctggaaacttccttcacattttggggtccacacaaatttatggtctttcttgagaagttctgtcattggtcttgctatgctggagaatcctttgatgaagcggcggtaataccctgccattcctaggaagcttcgaacttcactgacgttggtcggctg

SEQ ID NO: 189112 - DNA, 650 bp, Zea Mays
gtttaacttaggcagataggatatttggtagagctttgtgggtcattgtccattgctaatcttgaaaatgtttgagcagcggaagaagcagacacaacaaaactggagcaaaagagccgcctacatgagttgacattacattggaatactcacccatctactagtgattctgcacttgctgaacctattcttgaaagccttaagccaagcagcaaccttgtgaagttatccattataggtcatggtggagctacctgcccttcatggcttggtatgaacctctccatcagaggtttggaatctctttgtctagatggtgtagcttggaagacatttccacttataagagatctatgactagcaaacgtccctggtgaggaaatttttggcactatccctaatataatgtttgagaatcagagaaggttacagctcgtaaacttacagtggttggagaaatgggttgtgcatgccccttgtcaattgtttcctttcctggaagcgcttgtcattaggggttactctgaacttgtggagctgtcattttcacatgctgcttgctgtcagcaagagaaagggacatgtgcagatttgtttcctagactcgcatagctcgtgattcgatcctgtccacggctattgtaatttcc

SEQ ID NO: 189113 - DNA, 463 bp, Zea Mays
cgagaatcaacttcaaatgcccctacgaccacctcattagtggtaaggtctgtctctctatgaatctctataccatagatccttgtgggcatctcaccaaggatggagactgcggtgtttgcactagtgtcctgacacaccaaagagtcgacaaccgtgcatgcccctacgagagaagcaaggatcgacgatggtgaattgtgcttcactggagaacaggggccaaagagctcgggcaagtcggagacagaagcatgctccccatgcgtctctgcatgctccaaatggttggccacacgtgctagccacaacttgatgatagaaacctcctcctggagaggctgcaacacttcctcaaatgagctgaaacatgtgttgaaactctgctcacaacgactccaccaaaggggtgaccaaggactgaaggttcaaaggtgtctgaggcaagagaggcataataata

SEQ ID NO: 189114 - DNA, 884 bp, Zea Mays
tttggccaaatagctctattctactgcaggctgagactttgaaagaaaaacggaggcgtgctgtgcaattctcaaaggctggcctggatgttcctgaagaactctcactgttcaagaaaagcggtggtacgaaagttcctgaaaacagtgatgttggggagcaagtttccccattaaagtttgttgagccagcaccaattgtggattctggtagagaatgtaataacaaaatgaaggatctagtgaaagctattgaatgccaaccgattatgggttttggagctggcattccagagccagaaactgaagagcctagtgatgatgctcatatgttgacaaatcagaaaattcagttgtcaattccaagttgttctggagcagaattagatttgcaggtcatcaatctgatccgaactatatacttatctcattttctgcatgctcatcaatgtttagattattcaaaagaatgctagttccgcctatccgtagtcctttcctgatgctagatcagaacctgctatacttattttaatataatccattgatcgtagttattctttttttggtagggtaaagaactaggacaagggcagcattctgtacaggagtgcataaatcctccaattgttgtacctgtgtcaagactgcatgaagttgagaaggcaaggagggatctcccaataataatgatggagcaagaaataatggaagctatctatgaaaattctgtagtaattctgtgcggagagactggctgcggtaaaactacccaggttccccaggtcagtgtgtgtgcatgcatgatgcttcttgaacgtgtattaaaactaagacttttggtgctgcctgcttgtgttaaaaggctaattgtagtcaaatct

SEQ ID NO: 189115 - DNA, 468 bp, Zea Mays
ctgcagtccctgaacttggttgtaccttagagccttcggattctataggtgcatcttgttgaacttgaacagattcagctgctacatccaccaccattacatcctcttcctcctcttgttgctcattatcatctaggaaaatagctcttttccttcttttggattccaagtaatccctcatctcctttctaattgcagtagtggtctttgaacatatctttgtatctccatagccacctgctagatgttgctttagcctttttatccctccggaaactatgatgtcacaaagggtgcatgtcacttgatctctatttgccaaatttgcccaataaccatacttccaacctggatcatttgagctagccttccttgctttgtctgtctttggatcatagttgacattgtttactgaagatgggctagccattaattgatgaaggtggcagggtgctgttggcctgagga

SEQ ID NO: 189116 - DNA, 325 bp, Zea Mays
tatatgcttacctttatgtcccaatatatgtttaagacatttcagttaacgtgcccttgaccacccttgtttcttaatgatccatgagcggtcattctactttgcatatccttggtgatcccattgtctccttgtaactccacttggtaatgaatctttacttcaacccttctgttggaaccttacctatctaacccttgattgttttctccactttgtcgtttcgcaagtcttgccttaactatatcctttgttatgcttttaattattatcatatgcacccttgacacctctatatcctacattgatgtttgtctcatacctg

SEQ ID NO: 189117 - DNA, 403 bp, Zea Mays
actgaagaatatccaaaagagtgctaatgtccatagttgctggccttaggaaaattaccacatcatcgacgtagagaggaaaacgatggtgcacaatctgtgaagctaggggctgtaagaggcctttacgctctgccttggtaaccagaaatcccaacacatccataactaaaatgaacaacattggagacaatggatccccttgccgaagaccacgacgatgatgaataggctgtcctggcaaaccatttagcatcacttgagtcgaggaggtgcatagcaacccgctgatcacatccttccagatttgcccggagcctagatgatgcaaaacttcaagaagaaaggaccacgatactaaatcaaatgatttggaaatatcaagcttccggagcaaacatgg

SEQ ID NO: 189118 - DNA, 438 bp, Zea Mays
cggtttgttgagaactcgctgatcagtgcctatgttgcgtgcggtgatgttggtgccgcgcgtaaggtgtttgatgaaatgctggtgaaggatgtcatttcgtggacaagcattgtggtggcgtattctagaatccgtgatatgggttcagctgaggaagtgtttgcgctctgcccggttaaggatatggtggcatggacggcaatggtgacagggtatgcacaaaatgccatgccagtgaaggcactcgaggcatttgagcagatggcggtggccggcatgcccattgatgaagtttcactcaccggtgctatctcagcttgcgctcagctcggtgcggtgaagcgagccgcctgggttcaggaaattgcagaacggaatggtcttgggaggaatgtggttgtcgggtcagggttggtggacatgtatgccaagtgc

SEQ ID NO: 189119 - DNA, 436 bp, Zea Mays
tgagaaaatgacctcaggtaatcaaccaaagatgccaacttatggtacacaggtatgacaacttcgtagtgttggctatcttcatgtattgtggatacttggctagattatgaaatgaagtttcatcttatatgcctgcaggtaactgtacaaacagagtctgaacgccagcttgataagattaggaggaaagaggaaagacgtagcaagcgcagtgcagacagtggcaataatgatattggtgttgatgatttttcatcccttcttttggcaagtgaacggaaggaggcatttgatgacgtgattggtagtggagaagggtcagacagttttacagtaacttcccttcctcaaggaaccacaaggaaacacatgaagggttatgaagaagtgaagattccaccaactccaacagcatcactgaaacccaatgaga

SEQ ID NO: 189120 - DNA, 366 bp, Zea Mays
atctcaatctgagcattgtactgtacctatttctccattggtcgtatcctcttctttgtcaccttcaagtttttttaactctatcctttgttgtgttttgtttgtcatcccccttactcttctcatcactctatcctaccttgtgattacattatgtctattatctaaaatctctaatttcccatctcagttcgagagtggtgttttacttattctgcccttgtttgtagcctcatctttgccatgtgcaagtcttgccatgaccccattcttggttgtacttgtaccgctggctcttcaatgccttcatcttttctcctatacccttgtctgttgtcgcctttgacccttgcgatattgaggcct

SEQ ID NO: 189121 - DNA, 391 bp, Zea Mays
atcgacttggatgagaagccgggatgcggagccggttccaaactggcgctttagaagcctgctgcgaaagcttggttacagacgtcgtcttcactacagtctgaacaccagccgccggcgcagctgaacccagtctatcccacacggagcctctagataaccgccggtgaaccgtgagcctgttgtcgttacgcaccggccctggacatgtataggatcgatgtcccagagccttgcagcgaaaacaccttggctccctgcggcacgacacagcgaagtggtcgtcggcaaagcagttgaaacagcggccgatcaagtcgacgggcacagccttgctagcccgcagcaatttagcactccgctgccttgtcttcttcgaccttacttcaac

SEQ ID NO: 189122 - DNA, 504 bp, Zea Mays
gatcaacaggatcacttgcccatgtggcatcgaaatatgcatgaagctgaagtgggctatcagaggcatagagtaaacatcttgatcttgttcgacgtaagtatctaagcacacgaagcaaatgaccataatgaactgaggtcggtgtggatacaaattggctcaaaatatgaacaacatgagcaatatcaggtctggtgatggtgagataaacaaggctacccacaatatggcgatatcgagttgggtctgctagtggtgtaccatccttcggacgaagttgtaaatgaatatccattggtgtcgcaactgtgcgtgtatcagtaagtccagagcgatcaagaagatcttgtatatatttggactgagatagataaaatccttttggagtctgttgaacttcaatacccaagaaacagctaagaggacccaaatcagacatctgaaattccttactaagatgcttcttgacatgagaaatatggtctgagttgtcacctgtaa

SEQ ID NO: 189123 - DNA, 637 bp, Zea Mays
gagagtatgagcaacttaacaaagctcagaagaaatgcatctacttcctctgatatgagtagcatggcttcgcaaggaccttcaactagtacaggtcataagatgttcttttgaaacacttatagtagcacatgattaagaattcatgtcactgggtaatattcttagttttcctgtatgctatttatgagcaaactgcaagaatcataactatagcattagattgggccttatttaaaaaaaaaatctctttaatattgtgacccatgcgctttttcacaatatgttttttttctggagataacactgcatatagttgaaaataagcaaacaagaatatttgaactcagtaagcatggaggaaacatacaacttgttgcagctgttaccttcgtaattcttgcagtcttgctgcattgttgatttgatttataaatcttttctgttctcatgggcatgttttacaaaaaatgcagctcctcttaggcggtcaagcagttggacttttgatgagaaaattttagtgcaagcattgtacaaggttctgctttcagtgtcaaagaagtacccagttgtactctatataagagatgttgagaagttccttcacaagtccccaaaaatgtatctcctgttt

SEQ ID NO: 189124 - DNA, 851 bp, Zea Mays
agatgatgagactggcaatccttcgtggcaacctcgtgcggacttctatgtttattgtattttggcttcacttccatgggctggtccagaattgtttgaggtaactctgagttacatatgtcactgactgtttagatgaatctccttgcgtcacacatgcaaaaaggagaagaatattgtgtttatgggtcactgtttcatagtccataaccccccacaccccccacacacaatccaaaaaaagcacgcgcacacacaaaagaaagaaaaaagatggtatgtacatgttgtattttatgatggcatggcgagttctaccttgaagtttggcatgcacttttggattttttgaatggttttctaatagatgaagtagccttttagtgttatccaatatccagacgtgagttcgtgagaagtttgtgctggagcatgacttgagcacgccaactctacttgttggcaaatctaacaacttgttcctaatcttgtttagtcaaaacttgttgtggctagctgcttaagttgcttctctttggcatgtggcccagtagagcaaccattctatgtcccagcagagcaatatacacagggaaggcgtggagacgatgatcatggaacttttgtgaaattatttaccagaatgttttgttgatggtaactcgttgatgacatgtacttatgtaatttaccatgcagcaagttccagatgagttcgagagagttttatttggtatacagtcttacataagtatcaggaggcattttgatgatattgctttctctgtctttgagacagatgaaggccactctcctaacaaaaaggtaatgctaatctttctgaatgaacg

SEQ ID NO: 189125 - DNA, 1136 bp, Zea Mays
atctggacctgtcccaaaggagcttggaaatcttaccaatctcttatcactgtaagatcctccaatcacgttattgtcctgggaagtcttaacaaatggatattctctgactaatatttatgttcagttactgtcatgcatctgttgtcctggttatacttgcttttcaattgttgcgttaaaaaaatacttgctttccaattgtatgaaaatcatgaggctgtatgccaagagcttgaagttttgcatatactatggccatatatcgagtataatcttataatatcgttttctcacgaagttagtataatataatggaagtgagaatctgaatgcacatcttcccaatccaacattttaccagcatttcaaattttttattgtcaaaaggcacttaacagcacttccatttgaacttttctttggatcgaacttaatttaattagttaattctttcagggcattgggctcaaataattttaacggcacacttcctgatgagctggggaaactgacaaaacttcgacaaatgtgagttatctatttggttgctttacatgtcttctacatgaccatctatgctttcttcactctttaaactgataactatatgcatgacataactgaaaaatgctatccaactttgagttgcagatacattgatagtaacgacttcagtggttctctaccatcgacattgtcccagctgaagaacctgtcaatcttgtaatttagtaaaataagctagcacctcgtgaatttgctcttcctttggaggtagaagctaataatcttaccaactcttgtcatgtatctaggtgggcatcagacaataatttcagtgggcagattcctgattatcttgggagtttgactaacttgacccaactgtaagatttatatctgaaaatcactaaggtttcaatattttaaaattgttttcttgacgtcaatagtaggaaggtcattcatttttctagagaagtgcaagatgttgcatatttttctacatcatctgttattttatagcacaattaatttgtcatgaggaactagcataggtattacttctctaatcaaatatctatgtgcttccaggaggctccaagggaactcttttcaaggtcccattccca

SEQ ID NO: 189126 - DNA, 382 bp, Zea Mays
ggctacccactccacccttgccatagccctcccaattcctgtggtagctgcccgcgaatgggagtgggttgtagtccttgcctgggagcacgaatgcacgcgggtggatgatcttgccccacagcttgtcgaggctaagcgccatctcattggctctccaagcctcgatctccccctacgtacctgatgatcgatcccctcttcggcgtacaaggccgtcatcaccaacctccacgaccaggcgacgggtgttaacatatgatatctggttcccatcctccttaatccgacttcctcctactcctgatggcgcgacctcgcccttctcacgctgcagcgctacaccttggatgaccacatcctcaccgacatgacatccctc

SEQ ID NO: 189127 - DNA, 544 bp, Zea Mays
caccgccgtccttacctgtggcgctctctctgatgatgcaatggagcttgccaccctccgtgttatcatcgccgccgcgcggtgccccactgtcgccatccgcggggagggcctcggccaggtgctcaagacctgctacaacatatacctcagcagcaacagtggggccaatcagctctgcgccaagcttgcgctggcgcaggtcctgctgattgtgtttgcacgcgtggaggtggattcgatggacgtgcgcattcggacggtgtcgatcacggagatgatggacgtgtctgatcgcaacctgaacgactccagcatcgtgcaggtggctcaggggtttataaacgagacaatggaggggagtgttgcaccagagccagggtcacatttggagccaaccgaggtggatggaaaggaggatactgggatgagcaagattagagaggatgggcttgcactcttgaagaacctgtgtaagctgtcaatgaagttctcgacgccagataaccctgaggatcagatgttgctgcgcggcaaggtgttg

SEQ ID NO: 189128 - DNA, 515 bp, Zea Mays
tcatgcaggcgaccgaggaggatttcatggagggcatgaccgcatacgagcacaacggcgttggcgacggcacagcgcacgggcctgtcgcgccggagccgcctgcgctgacggcgactagcctcagcttcaggtttcagcaccagatgcccgaagttccaacggagacggcgctggtttcgagagaattcactgcggcaagacaagagacggcggtagtttcgagagaactgacagcagcgagagacgatgatggacgacaacgagaggaagagaaggaaccacactttcctttggaaccattcgctccgttgcagacggcggcagacatgcaagaacaccggcacgacgaagcagaggaaacagagttcctggcggaggagccggcagaagagcggagcggagaggttgcgcaggaggaggcagcgccacccaagaccgtcgcggccacgcacaactatcagttcctgactgagcgcgacttccgggggttcgtcagggagccggaggccgtg

SEQ ID NO: 189129 - DNA, 410 bp, Zea Mays
aaataaaatgccatgtcaatgactcatgtgttagtgacacatgattaagggattttcgtaaggatggcaaatagttaaatccccattatccacactacaaacaatgtcattcgctccttccttttccagaccagtgttcctcctacgttttggctgcaacacttagcactcccacctacctttgaattgccttgattgtcacacaaatcgtcttatcatctcttgtcatgtggtcttcgatgaattcttctctcattcgagcgacttttgatttccggaaggatttcactaatcttgtgtcagttccctttgcaccatcaccatgtttgttgcttgtaggggcattccttaccgcacgccatgtgcagcttttggcgccacagacacgtgcaacacctagtgccctggac

SEQ ID NO: 189130 - DNA, 599 bp, Zea Mays
ccagtcatgaagaaatacaggaggtcctggatgattttttctataaccttttgggttctaatgttcagagaccgttctctcttaatctgattgcttgtcacagagatgctattgatttaagttcactggaggctcctttctcagagaaggaggttcgtgacactattggtgctctcccgtctgataaggctccgggtcctgatgggttcactggaaaattttacaaatgttgttggcatattattaagtcagatatgattgcagccttgaattccctccatcaaggaaatgctcacaagttggggatgctgaattcagcttatttagctctcctccctaagggtgatgttgctttgtctgcgagagattttagaccaattagcttaattcatagttttgctaagttggtcaccaaaatgcttgctaatagattgggcccttaccttcaggagttggtggcatctaatcagagtgcctttgtgagaggcagatcaatccatgacaacttcatgttggtgcagcaatcaattaagtctctccacaagaagagagtctctagtttgtttttgaagttggatatatccaaagcattcgattcg

SEQ ID NO: 189131 - DNA, 535 bp, Zea Mays
tgtcaacaagtcaaaaggtaccgcaaagtccaagactttctctccctcccgattcctactaccatacccaacaccttcatgccccttgaggtctcctcccatgaaaaacttctcactaataggtatagttctaacaatgctatctaagtctccccaaaaagtcacttagcactctcattgggggtatacacactaattacgtttaagatcaaatcacctacgacaagcttgactaagataattctatctccttgccttctcacatcaaccacaccgttcttgaggctcttatcataaaaaaaatcctaccttatttttgtttgcacttgtccctatgtaccaaagcttggagttgatattgtccacctccttcgttttctgacccttctatttagtcttttggacacataagataaactcttagtcgctgcttcaactaacttctttaacttaccagtaagcggccctacattccaactacctaaatggtcgactaacttctttaccttttgcacccgtcaatgatgtgaaggcc

SEQ ID NO: 189132 - DNA, 292 bp, Zea Mays
caggagcagacctgggacgaactgtccacggggcgcggaggatcctggctcgcgggtaacagaaaaggggaaaatcaaagccgcagcggtctcggttggaattgggaggcaagtttaaggctacacgtccgtaaagaagtatagcctcaccatgcactgtcaattttgggaacggtggagggaatttcacgaatttgggacttctactgagctttactggtgtagacgaaaacaccctgccgtggaccaccatgctatttatagccacggcgacccacagtcgacctccggc

SEQ ID NO: 189133 - DNA, 589 bp, Zea Mays
accgactgctcgccgaacgcgcacttgctgtgcttgacgaagagttggtgtctccggagctcagtgagcacgacgcgaagatggcgcaggtgctccgcccatgtctggctgtagataagaatgtcatcgaaaaagacaagaacgaagcgccgtagcaatggtcgtaagacgtcgttcatgagcgcctgaaatgttgccggggcattgcacaatccgaacggcatcactaaaaattcgtagaggccgtcgtgagttcaaaacgccgtcttgtggatgtcatcaggctgcatgcgaacttggtgatattccgaccgtaggtcgagtttggtgaagaagcgggcaccgtgaagttcgtcgagcagctcatcgacgacgggaatcgggaacgcgtccttgatggtgagcgcgttcagggcccggtagtcgacgcaaaaacgccatgcgccgtccgccttcttgacgaggagtaccggcgatgagaacgctgagacgctgcgacggacgatgccttgtgtgatcattgcggcgcattgccgctccatctcgtccttgtgtgcagccgggtagcgataggggcgaaccgccaccg

SEQ ID NO: 189134 - DNA, 540 bp, Zea Mays
ctagaatcaaagaaacaaaataaaattggaaaagctacagctgaggagaaacccaaggattcttctagcgaagtgggcacagataaacctgctaaattacagacagatatctccaagaaccaagaagatggcagcaaacctgcattcgccatgccaaaacctcaatggcttggtgacaaaaggatcataaaacctgaagaaaaccttataaatgaagaaaagtctgatgcagaggaacctgataattttgtggactacaaagaccggaaaattattctttcttcaggcagtgaaaagaagcttgaagaggctgcccctgggcttattttacggaagagaaagtctgctgacgagtcagttgctagcgaggcaaattcatcttcggttgaaagtgaagcatcagttgctgatgctgtggcccttctgcttaagcataaacgtggtctacaaacctcagaagaaatggagaatgagactgaaccatattctagcaagaccgaagggaagaagtcgaaacaaaaacgtgtattgggcccagca

SEQ ID NO: 189135 - DNA, 435 bp, Zea Mays
cttggtttgtaaggtgatacatggggagtgtgttgtctctcaacataagcttgtggtggcgatctttccatttcatgtgtgtctgtagagataaacaaaccaagattgcgagaacaaagtggtggaaactgaaagggaataacataggagtctttaaggaaagagccatcgaagagaacacttaggctatgtccagcggagtgtgaatcggctctcgcatgcgcattttgcacggccgagacgcactattcacacttccaacacgtcacggatgttgttgcataaaatgtgtagtcagccacatgatcgtgcatatccacgctttctatctcctctgcaagagaggatgtgcactcgcatccgcaagctattggacggtttgctttttcgcctgcacatttggagctccggtgcggtggttgcgttggcgcatgc

SEQ ID NO: 189136 - DNA, 276 bp, Zea Mays
ggctttcactggtgctcggtgatggttggctggggagctcggcctcgccgccggacgtgagtacgggagagagaagaggagcagtgggctgctgccgccatggacccttgtcgatggtgtccgcttgtgtgtgagggagctgtcgctcgtgccaccgtgggaaacactgccccattcctgatgaactattcgttggagtcctcggaccaccaccaaaccgcctcctgccatgattgttggtctccgcgacgtgatctccggtaataccctgaccag

SEQ ID NO: 189137 - DNA, 632 bp, Zea Mays
ttaggatggaaccaagtatggtggcagaggtaggagtggtggttgaggtgccggtggcgcaaagggcagcgagtcaagaggataccttggggcgggcatggtgaaagtccacctaagggttggtcgtgccacatggagatgtagttggttcacaagttgtagaaagaggactagggagcgtccccccgaccatctcgactcccacggccactccttcgccgacgatggccaccactaccagactccgcactcgtaggctagacgaggaaggagggcgtggggagttggacaccggagtgatattcgggtgcgttgatgagcccccaaaagtacgagtggaggaatcgcgcgtgaggcctggcccttgaagttgtagagtgcggtggcggtgtcagagcgaggaggcacccccttggtgagcttcttgaggatggggccattgctgaccttgtggaatgaagagaatgggaccgggcaagtccgaaggtgatcgtagcgctcgttgagggcgtggagaaggttgaggacgagcttgcagtcggagacgggctcctcaaggtcataaaggaggccaccatgctcttcatctagcggtagtactcggtggagtggcccctatagatgaatgtctt

SEQ ID NO: 189138 - DNA, 690 bp, Zea Mays
ttatgtatgaaggctcctttcgctgcagggctccttggttgcctggccggagaagtcgcttctggcagccgtcgccggagctgaggagcgggaaagcctgacgctgacgtgcgcacggtacgtttacctccagcgctggctgtcttccatggcttttgagttcagagaagatctacatatgtgtgagaaattcttcagcttgtttctgtaggtagtgttgctgtgaatatttggtatgcataaaattatttatctgcatactgggggtgccggtgggtgggctgattattatgcatgggttactgtattgttttgagtaaaatcgcagaacagcgtgtataatatggcgatatgtactagagaacacctgtgttggtgctcttttgcacaaattaagccacatggatggacgtgttcgtaatagcacagagccatgggacactattttcgcgatcttgattccaagcgggcacacgcggaagctgaaacggcctgaaagctcctgccatggcacatccaaaggatggaaagatactggatgctttcatcgtctttctcaggtcaaaaaaccagcggacctccatggcgctgaggcctagagtccgcaccttgctgtatgaacttgcaatgctagaggacagcgtgcacaactgtatgcacgatctgctggacacaagcttagccaatata

SEQ ID NO: 189139 - DNA, 2052 bp, Zea Mays
cgatgattggtttatgctgcttttcaatgttgttcttacctcacttcctgttatatcactcggagtatttgagcaagacgtttcatccgaaatctgcttacaggtatatgatataacatccaacttattttaaccatactgcttatgataaactaggcatgtttagaactgaaaataaagcttggtcctggaatgtggtgtgtgttctcatggtaaaagtttttgttgtgttgagtccattcattatgcttccagcaaagaagcaaatgaataaacgggtacttaaaagataatttgctaaaccttgtttgttgaggagaatgacactcccatggaaccacaatcattagcaactggatgtagatcagactatcagagaactatactgtacttagatgtcagtcaggtattccttctcaggctactttgcatggtatcaagtacaacaacacaactatctgacatggttcatagtatattagaaaactaaaaagaaccatgaataatgcctcaatgtagaagcatatcttagtccatgctactatgatctgtattgcccatttgttatggttaggaatgaactctatctacctttgcctctcctttcatgtaaatcatttgtatgaaacaacatattattaccagtaaaagatggtttcagaattaggaacgatttggtgtgccttgcttctccattccatgttccattataatgctattcagtctctaggttatctgcttcaggttttcattcactgaaatgaaatatgcaagtcacttttattatgtggatactatgtaaatactatgtaaaaatacaatggtttgaaatacacaatgggtattggaaagataccagttatctcaggtgtgatattatgttgggaaacatgagcctgactgatggtttttcaacacatatcatcccatagttattaaataatgtagttcaaattcatctggtttaacatcttccttgaaaatagtttgatttgcatagcatgtagaaaataattaaggcacatggtttgtggagccatttatgcagattgaagtcacttggtattattgtccatatttaaagctgaccgaaatttcaaggaaatgcaagcacacataagtttgcttcttgacaacattatgtttgtactatggcccccatcagtggatcaaatcacatcttaaaaaaacatgctcccaagtaaacttttattctagttaatttcatgtgtatacttttattctagttaatttcctgtgatctttggtgctactagaagactcatgcatcgggccctttgccctttgtactttaggagctgggcaatcttctctgatcatccacattgctgcttctaacctttcatatatctatgttgacatggcatggcttgcatgttgcagttcccagcattataccagcaagggccaaagaatcttttctttgattggtaccggatccttggatggatggggaatggcctctactcctctctggccatattcttcctcaatctctgcatattctatgatcaggcaatccgtgttggggggcagactgcagacattgctgcggtgggaactaccatgttcacctgcatcatctgggctgtcaacatgcagattgccctaacaatgagccatttcacatggattcaacatctctttgtatggggcagcataacaacttggtatctcttcatcctcgcctatgggatgacattgaggtctggcgacaactaccagatcctattagaagtccttgggccagctcccatatactgggcagcgacgcttctggtgactgctgcctgcaacatcccctacctgatacacatatcctaccagagatcgtgcaatccacttgatcaccatgtgattcaagagatcaagtacctaaagaaagatgttgaagaccagacgatgtggaagagggagcggtcgaaggccaggcagaagacaaagattggtttcactgcgagggttgatgcaaagatcaagcagatcagggggaaattgcataagaaaggcccatctttaacaatccagacg

SEQ ID NO: 189140 - DNA, 864 bp, Zea Mays
gttaaatgcaacacttgtcaaggtatggatctatgtcgtgctctttagattattcgttttcaaaatttgcccttgtaatattcaacaagaaaattgtttgatttctcacatttcggatacttacacattgttgctatctaaaaataactttcaggtaattgtcataaagagtgtacatcaagttctgttgttagcaaaggaagcagtgctacttccagtttgatatgcaagttatgccttcagaagcggaatcttatgcttactagctacaatacaaatgcaagctatatccagcctcaacaaaagggtaatggccaacaaccagtgaccgctctcagagttaagtttaaggttagttcttcccattctggtgaacctgctcccaaagtcgaagcccagctagtcgcaagcgttaaagcacagccatctgcgaaggtggaagctcagtcgagtatgaatgtgaaagcccggccagttgtaaacgtgaaaacacaaccatttgcaaaggtggaagctcagccaattatgaatgagaaagtccagccaactgcgaagatggaggtgcagccactcgcgaagatggtaactcagaacatcactggtgtccaagctctgccaaagacaaaagctaaaaagtcaaagtcagaaaaagaaaagaaacctaaaaaagttcaagcgatcacatattttggtctcgtatggaagaaaaataagactgacaaggatgatggaagtgagttcagggcaaatgatgtaatccttaaaagcaaggatagtataggttcatcaataagaccaacatgctgtctctgtgacaaagcttattctccggatttcttgtatgtacgctgtgagaggtgccgg

SEQ ID NO: 189141 - DNA, 317 bp, Zea Mays
caccccataggacaaccccgttacagcttacgaggctaccatcgtcgccaacctccacatccagacagccgttgctcccaacgttcgatcattggtgattgtcatcctcgcgtcctccttcaacaattatgcctgctgatgtaatcaagtgttgcttgctctcatgcggtatgccctcatcgaccatgtcttgtctgacccaacgccggacactaattcatgcagggatcgtatagatagcgtcatctacaggatctctggcaccatctcagatgatgaggacaccactcttgtttcaaccacaacacccacttctt

SEQ ID NO: 189142 - DNA, 341 bp, Zea Mays
cgtgatggttcctttgtttcagcggcctcaataatcaaggacaattctgtttcggttcagttgcaaggtgatgatggtcatctgtggtggttcacgggggtgtatgggcctcatcaagacaatttgaaatctgcctttcttcaggaattgagggatatcaggaatacatgtgtggggccatggatggtggctggtgattttaatcaaatttacaggtcagaagacaagaataattctaatattaacaggtctctattaggccatttcagaggtcttattggctccttggatctgaaagagatacatttgaatggtagaagatttacctggtccaatcagag

SEQ ID NO: 189143 - DNA, 368 bp, Zea Mays
gcggactccgagatgaagctgtgcgaggagcccgagtccaggagcgcggagaatcggacgctgccgatggtgacgccgatctggagggtgtcgatgaagcggaccccagcgagagcggagagggagaaacacggtgactcctcggtggatgcccctggtgcggcccatacggcgaacacaggcgcctccttgtcgccgggatcctccgctgccgcgttgccgtcccgcgcgacgtcatcgatctccacaccattgaggaagaaaaggcggcggcagaatctgttgtggccacgggtgaacttctcattgcaattgaaacacaacccttggcgtcgtcgttccgccatctcctccggtgtgagacgcct

SEQ ID NO: 189144 - DNA, 337 bp, Zea Mays
ggagaaactagaacattatgaagagaaagattataagggagatgagtagtgccggtggaggtgacatgtatgagattaccgttgccaacgataatgtgagtggggagatgctgggaggaggtatgagagattataccagcatcagacgtcatgtgactggaggcaccggtgtcgaagtgccactcatgttgaggtggctgttgaagagtgacagtttggaaattggcagcgagggtttgttgatcccagacaggagttgttggaggtgagtcgatgtaggcaggtggcggcccataggcagcaggaggtgctgcccattgtccaggagtgccagcga

SEQ ID NO: 189145 - DNA, 355 bp, Zea Mays
ctcgagcaccttgcgcaaggggtggtacaatgctcgtaatctgcaggaaacatgcatacgtaacaactccgccgacgcataattctacgataactagtgcatctcgccataaaaaacgcttcagtacgagaaaacactaaattgaatgagtaataacagcaccgccctgatcgtaggacacaatcagggcggcgtggcacctacccgtatagaaccctcagaataggggtggcaatgcgccaaagcttgcggtcgcaattagtggagaaattacgatccctttcataagtgtctacagatacatatttatagtcccagggactctctctaaccctagtgtaacagtcggactcta

SEQ ID NO: 189146 - DNA, 309 bp, Zea Mays
ctcctccgcatcaccagccatgccgctgacgcgtccaggacccctccctcgcatctccatcacaccctgccatgtggcctagcctccacttcccctctgcgccgctgtttcctctgcataaccagccatgctgccgacttgcctaggacggagcccgcccgaccaaccatgctaggtgccacgccgtcccctccgcgtcgtcctctccgcggtgtggccggccgtctcggagccctcgcgtcccctagcccatgcacctgtctcgtatgccccaactgcccgaacgccatgcccccacctcgccgtccc

SEQ ID NO: 189147 - DNA, 452 bp, Zea Mays
tttttcctctctcgcggcgtccacctccatattcgtgcccctacacatctcctcagaaaggcagggctgagcgcatgattcgcacagcgaacgatgtcatgcgctctctgctcttttaggcttcccttcctactcactactgggccgaagccctcaccactgctacctacctcctcaaccgtctgcccaccaaggcggttgcccaccccactccttacttcgctcttttcggcacccacccctcctacgatcatcttcgtgtcttcgggtgcacttgctacactaatctcgcctccactgctcctcatgaattagcgccccgctccactcattgtgtcttcctcagatactcccccgaccataaggggtactggtgtctcgacctcacctcacacagagtcatcatatctcgtcacgtcgtttttgacgagtaggatttccccttttcctcc

SEQ ID NO: 189148 - DNA, 1187 bp, Zea Mays
cgcatgatgccttcttccctccctcattctcgctcgcccccattccaccttcgacgacccctttctccttctccctcctcaatcacctgcagcgaaaaggaaaaggtacacacaatattgagtccatatgcatgcattcgtgatttcaaatggttcttcgttctaacttgtttgagatccgtttggagttttgcgcagcagatctttgacatgcatagggcgtgctacacccactttgtggtttaatttctttcttgaatattaattttctcattaagagcgtattagtgatttccttatctgatctgatctctctttgttcatgtcctttacttgtttgagatccgagagtatttatgattgtaatatttgcctatgacaacacgtacggccgaggcattacaaattgttatttgaacgacgaattgtaggttgtgtgtatttacctaatagtcagtttcatgagtgcacatgcatgtacactccataaagaaaaaacgaatgcaaccacatgcatttctccttgtaatatatattgcagcaattaattcctttcattaccttttcttcttcggttggaacaaatttgagatatgcaaaacaatccaaaaaacattgtacgttgcaccttgtgccattttattgacctgcaacattttctctcaattttatgttgtagggtgtcagaccgtaactaagagctatttagcaataatacatacatagctataccctctttaggtcaagagggtggagttctccttattcggaggaagagctccatcctcattctacaagaccaaaccaataaatggcctctagcccacagtcctcgccatcatcctccaagaagtcgccgccaccacaagaagcatcagctttggcgccaaaatcatcttcaaagtcaccctcgccaccaaagggtgaatcaaattcatctcccagtcccccatcgaaatcgtccctgtcaccaccgccacgaccaaagaaaagtgctagtacatctagctctaaagatgggaagacgaagaagtcgtcttcatcgtcttcatcgtcggataatacagccgctgtgatcaccggcgtggtgcttggggtggtgggcttcgctctgctcttgtccatcgtggcgtgcgtgtgctgcgccaagaagaagaagaaacgtccgcccccaatgaacatgccct

SEQ ID NO: 189149 - DNA, 473 bp, Zea Mays
gttaggagtatcgcatacaataacttctggacttgaggataccttatctttgagggcccgaggacttcactgatgaagtagactggatgttgaccgagtgcgcatgtccttcttccacccgctcaactactaacgcggttctaaccacgtgagtcgtgcgggatatatatagcaacagatcttccgtctactgatttggggcagctcggcgtggcggcttgagtaccggtgtagtcaggaacttttcaatgcctctagagcttcctgtgcctctgtggttcactgaaacttgtccacctttttgagcaacttgcagaatggcatgcctttctcgtctagccttgatatgaatctgcttagggctaccatgcatccagtaagcctctgtaccttgttctgcgattgtggcgcttccatttctcatgatggcctcgattttttctgggttagcttcaattcctcggtggctgaca

SEQ ID NO: 189150 - DNA, 451 bp, Zea Mays
tggttccaagtggtgctgctgtattctgaattttcagattggaaacagtaactaaaactgaatttcagtgttttgatagcagttttgaagtctatttgtggctattctatagggttttaggctatggtgtttgtagatgaaataaagaccatatgatagtgaataattttcagtaagtgggtataacatgattctacacgaaaagtggagtaaaactggctcaaagttggattgtcaggtgactgaaactgagttatattcagtgtactgaagactgaatttcagtgttgggttatctgtttggagctctgtggtaattaatccatggagtatgagccctactatatgtagcaaagttaaagatcatctgaagtatagcaagtttcatgtagagagttggcttgatatggtgtaggatttagagaaaaaggggtggcaaaaccctctgtca

SEQ ID NO: 189151 - DNA, 276 bp, Zea Mays
gtcacattgtaaatactattgatcggttacctcctttaccaaacagaaacaagtacttgagcctttttacaaagacagatacattaggtagataaggtattcattgtgcttttgaaaaggtatttttagcagaaatcacatacatttaatcaaaatcttcttggcacataaatgttcatcagacaattcgtagatagcaccaatttaagagaactcttatacctactctagcagtattggacacgaacatcaagcacatggcatactgaaaatgaa

SEQ ID NO: 189152 - DNA, 875 bp, Zea Mays
atccatttcggcgtactaggtgtggataaggatccttgcctcgacgagtggagcaaagccatggatgtgcctacgcctcccaaccgtgccggctgcaacagtaacatcggcagccccatgcaatcttttgatgatccctttggtgttgctgccatgacgagctttgatggatactcggagctctgcagcccatcagttgctgatcacatattctccctgctgaatgatccctccgctgcgcaacagatggttgccatgtggtcatccttgggctcatctccgcgtgcttcagctgtgagagaagacatgtcgtttgacacctttcctgggcctgtggacgggacatcgtcacttgctcaaaggttcaactcagcagcagcatcgagtccaactggagtcgacagagggctaaaagagtcagatgggcttgttcttccaagtaatggctcacagcaagggagtagcatcattccgaggtctgttggcaacgctcttgcagacaggatgctcatggcgctatctttgttcaggaagtcattgagtgatggtgttcttgcccaagtctggatgcctgttgagcacaatggtcgtgtcgtgttgagtacatctgagcagccctatttacttgaccaggatcttgcaggttacagagaagtttctagaaatttcctgttttcagttaaggaggagcctggtctgcacctagggcttccagggagggtcttcatatccggggtgccagagtggacgtcaagtgttatctattacagtaagccagagtatttgagaatggagcatgctcttcttcatgaaatacaagggtcacttgctatgccagtttacgatcccagcaagggctcttgttgtgcagttct

SEQ ID NO: 189153 - DNA, 278 bp, Zea Mays
ctgggatcaaacacagcaaagcagaagcaccaaaggcaaaagagctagacagaaaggtgcttgtactctaactaagacatcatcgagcaaaagatcaacgaacgacagacaacttatatatccgcctgttcgccaggtacgggcaaggcaaactataagggaattagttaatttcttaatgataaccaaattgctgtcagggaaccaacctaatcgtgggctctatagaatccgtttactaatggaattgtgagcacagaccaccatgggttttgggt

SEQ ID NO: 189154 - DNA, 687 bp, Zea Mays
tctgcagttgtggatacttgtacggtctaacagccactgactgtgtccctgtttttaggtgaatcctgtgatcacagtggcgggctgggggaaatccttgtggttcttgaaacactgattcaaatgactgcaatagttgctccatcatctgagggtctgccatatgtagtgaacgagtggctggttcatggatgtcattgcgtggtgacccaagtcccttccaaaagacccgccgacccccacgccagaatgccatacagaggtcgtcaaagtcccataagattggacccagcgtacggaggaaattaacccctggaatgacatcgaaactgtccaatggaatggcgtagcagggtattgcgaaatgctcgtggccgatgacgactggaatgccctctgtgaatcccttgcaggccactctttcgccattagcgactgtcacctgacggcctgggcctggtcccatggtgatgtccagtcgcttcaatgaggctaggtcgaggaaattgtgtgtggagcctgaatctagcaatgttgtcaggtgatggccatgtatagagagcacaatctgcattgtcttctgtccaggttcccataaaagcatggagtgagagcacaggctctattggtgctgggtcttcttcttcggacggcatgtcctcatcataatccaagacctccagatag

SEQ ID NO: 189155 - DNA, 606 bp, Zea Mays
agccttccaagtacacaagattctccagcaatatcgtttggtatatattctccacgtgcaccaatcaaaaaactggagtaagcacgtcctatctaatattaactgcaactatttattggcatctgtgttatacaacctgatcatatttatcttttagcgacgcgacaaactcgcatattcccacatgctacgcgatactgaggtgactttgatacaacaacaaatttagcttcttcgtattttacggaatacataactgtgtgatattgctgctaagacagagattggaacctattctccctttatacatgttaaaaaaaagcttccatcatctgactgtttatatcagcttgatcacaggatcatgaactctgcacgtcaacatgacaaggacagactgccctcgccaccctaagtatgtccttatgcaacaagcagccctaaaaaggagtatacaaattaaaaagataatggacaatgtttttcattcatttttttatgcatacacatacaaacacaaatttgaactccaacttaaaattcatactgatattgtaaaacatgtgcaggatcaggactagccaacttcgcatactctaatctgat

SEQ ID NO: 189156 - DNA, 313 bp, Zea Mays
gcactcgctcgcacacgtcactgatagacatgcacagaattggtgttggagggagcggccggggccggcgagggcgtcgagatttccaatggtgagggcaaggccagagaagtcgagggtgaaggcggggccgctagtggttcagaggaggccgaagggtaggcacacgcttcgatcaggggcgacagggcagcctggagtgagtttgggtgcataggtcaggcgagagcggtgtgggtgaacctttggtggaaagacaaagggtgggtggccagagggagccatgaggtcagtgtcaagaagaaagttcaac

SEQ ID NO: 189157 - DNA, 491 bp, Zea Mays
atcggaggatgatcaggatcgccatgagcaggatccacatcttcgtcgtcgcggtgatgctggggttgatggggattcacggagacctatccaattccgcctgggaccgcgactccccttgggcaggaggaggaccctctgccgcttcgtgttctgggaattaattgtgataccggcacaactgggaggcatgaggcgctgccgcttcgcaatccggaaattggtggagatgaagagacggatggagggcacgatgggcttgaggtgctgagcctcgggtgacgagagaagatggacacgaggagacggttgggagcctgaagatgcagacaatgagttgcatgggaattgagaaagttatggcagcggaagatggacacgaggagtcggttgggagcctggagatgcagtcaacgagttgcatgggaattgagaaatttacggcggaggacgaggggacgttgcttatccctgaaactgtcggccagaag

SEQ ID NO: 189158 - DNA, 1233 bp, Zea Mays
aattaatcccccagctcagactgaagataaacaagtatgccaatttttcatgtttcttctttcattgaaataaaatttgcgcacaactggaagttagttacacgattttgttcttcttctacgatttacctgcagagggatagtcagacaagaaggaatttccctactaaaaggtcaaactcgcctactaaaaggactggtgcgatgcctgttaaaatgctgatggagcaggacatgtggaaagaaagacggcctgatgaggagccactgaatgttgttgcaagattaatgggcctacatgagcctccaggtcagcaatccaatttccctttaggaagacaattggataagaaatatcagtgtggtggttttgaagagaactactggaatctcaagtcaaagaaggaaagcaaatgccaccaaaaccaaaaggcagggccacgccatcagcacacttggaatggttctggtgaccaaccatcaagaatcagtagcagccagagcatgcaccaagaaaatgagacttgtgagaagaggatgtcaattgttcgcgagaagtttgctgaagcaaagcgactagccacagatgagaaacttcttcattcgaaggagttccaagatgcactgcagtttttaagctcaaatagagacctattcttggagttccttgacgagccaaatcctctattatcaagcaaccgttatgagttccaacctgttgcaccaccttctgaagtaaagcaaataaccatactgaagccatcagaaccagcaaagagaaaagacagcatctttgtggggagacaactgttttcagatggagatggaggtgaaagtgaacgaaacagatacaggcgccatcagagttcggatgtttccccagcaaattcaaatttgtctgagccaacaaaaattgtagtactaaaaccaggattccccagttctcatgactccaggattgcgaggtcttcattatcatcagcagaagacagtgaagatgaaagtatgatggcggttgatgaaaccatgtgctcaagaaggttggcaaaggagatcacttggcagatgaggatgcggctaaaagacaggcaagacgaagagagtatgctctcatgtgaataccctgacttttatatcggagatgactccttcagtaaatcagaagttgagattccaaaagagatgtgtggtgaaacaagtggggaattggagtttggcactccgacttctggc

SEQ ID NO: 189159 - DNA, 321 bp, Zea Mays
ttgttttaagagaaaaggaacgaggctctatgtggctcacgggtaatacaacgaacaggtggcgttcacgccgcaccaccatgcacatcagacacttccggacgtgataaattctcatcagaatgacagagagccactcaccattgcgggcggcggcggcagcagcgatagcgcgtggatgacggcgcggtgtcgctgggcgtatccgtgcgggaggaggcggcggagctggagagccatggccaacaaggggcggccacgagcgcgctcaggggaggagagacattgtttctttcggctagggtttagctagggttttac

SEQ ID NO: 189160 - DNA, 366 bp, Zea Mays
aatgccttcatgctttgtcccatcatgttcaatttcagcactaccaaaacagcattgagatggtcagaagtgatttccttgctggacactggaaaccgtacctacttcgtgctctcacacttcaaccatgctacaatggcccaataaatggtggtgaggtaatttatcatataccgcataccttatcgttgttattatgtccaaattagcttgaaatcaaactattcctgtactcaattgtattatagcatttgcatttatgcaaaaccaaatgcttaaggtaccattgagataaaaatgtaatactggacttccgtcataatactaatctttgaaaccaaattatctgtatcctatgaaagttat

SEQ ID NO: 189161 - DNA, 300 bp, Zea Mays
tcatcaagaatcatcggataatatttataacatgagacattggtaataagagaggtccacaatcgtagtgtacgagaccaaaattgtgcacaacctgagaggagctagagaaatggagttggacatgacgacctagctgatatgtgtggcacagatgcacaggggtgcccctagtaaaaaaatgactaaaatactgcacagcttggacaacacgattgggttgggatgatcgagtcgaagatgtcaagtattggatgtagtggaagtagtcagagcgtgtggctgcgacgagggtgtata

SEQ ID NO: 189162 - DNA, 476 bp, Zea Mays
ggattgttgattgcttagccaagcaagttatggaccatctagagaagtgcccatttgtgaccaggaagtggagaccattgatcatctcttgatctcttgcatctttgctagagaattttggtactggtggttgtgacaaatggggcttcaagatgtccgccaatctgaatgaagtttcattcttctcatggtggagttgctgatgaggctgctgtgggtcaagttagaaaaggactcaactcgcttatcatccttggagcttgggtgctttggaagcatagaaatgattgtgttttttatgcagagtctcccaatattgttgatgttttgatccaagctagagaggagagaagactttggaagatagctggagctaagggcatttcactcctaactgctcccttcctggatatctagcttagtggctattttgtccttgtgttcctaatggatgcctgtgtattttttgtttttgg

SEQ ID NO: 189163 - DNA, 676 bp, Zea Mays
cgcggcaaagccctcgccggagcgacccaattcgcccacccatgagttgattcgccaaatcagtgggtgcaaaatgaaattaggaagatagtgaacacagaagtgggagttttaccgaggattaggtcaccgggaggcctgcccacggcgcacggcggaggtcttcactacggcgacgaattgagcttgcgcaggacaccggcgggggaaaattgacggcggccgaagctttgccgcgccaagcaggtacccaggctctagcgcagaggactaatcgcggtgtggatgagggcaatcacgacggcggttctttcactcggcaacaatggcgggtggaaatttggagaaacaggggcagccgaaggaaccaacgagttaccaggatgtggggaagtcgtccgcttttgtagccagcgcgagacggagtcaagccacggggaaatcgggtgacccaacggcagctccgaggtgttcggcgtggaccgcaaatcccgtggagacgatgactgggagggtttgaggcttgactgacgagtgggccagtccggcagagagggacacccacggatggcaaaccctgagcggccgggcccaccgaccagccaaacggacgagcgcgcgagagaggctgacaactggggagtgggccgcgcgtgagcaattcagaggtgggccg

SEQ ID NO: 189164 - DNA, 357 bp, Zea Mays
aaagactatccgtacaaaaacctattacaggtgcagccggaccgacataacaaacgcgctagatcaagtgcacaagtcccccacgggcacgtccggatcagcgaacgcacacaacctcatcatacaaatcatcataccaattaaagttacacacatacagcgagggcatcacaccttacattggttcaaccttcgggatgatacccatctccctgtagttaaacagcattatccttagctcctcaccctcaaagagacttcgcaactccccctcacctacactcggcccaactggtgaggacaacaattcccgcttgccagccctatccagacgaagacgcccaccctccacctcac

SEQ ID NO: 189165 - DNA, 567 bp, Zea Mays
ctgggtctcagtgacaataggcctggaaaacggcggttccatttcgaatccttttggcccaagctggaaggttttcaggaggaagtgcattctgcatggaactcagtcgaagctgtcagttgccctttccagaccctggagaagaagctgaagatgacagcaagaagactgcaagggtggagtgacaagcaggttggacatgtaaggttgcagttggctttggcaaaggagttgctgcatagactggagatggcacatgatgaaagaccacttaccccagcagagatctggcttataaacaggcttaaaaaacaatccttgatgctgtcatctttcaagcgaacaatggcaagattaaggtcaagaatttcatggctcaaagagggggatgcgaacacaagatttttccatattcatgcaaggcatcgtaagaggaagaattttgtggccatgctggttgatggagatcgtatcctaaccaaccactgcgaaaaggcagcagcagtggatcagttttatacaaacctcattgggcagtgtggaaacagggaaaggactattgatttg

SEQ ID NO: 189166 - DNA, 701 bp, Zea Mays
ggaaaagagtgttggcctgaaccatgttgctcatcaagtttagcattttgatccttaagaactggatcaatagatttcatggtagagggaacagccttttccagtgaaattgactgttttgcgttactgtcaaccttgtgaactagagagccaggattttcttggacaacagaaattccagttttaacttcagaattagtggtttgctccaacaagaccaatctctcttggccaacattttccagtttgttcacatagactgtggggtgttcaactttgcttggttcttgttgaacattgtcaaaatgcttgtctattggagagattgaaccaagctctaacgattctgcttctttcttacttggggacaagaatccttgcctcagctgaatattttctgatgaagtaagtcgctggaaaagctggactgcagcatccccagttggatctagccagtccacattgctgaacatctcttgaacctttgcaaatgcttcaactggtaaaccccccttctctcctatacctgccacctccatgggacctaactgattggcagtgtccatttctgaaagaagaacctttaaccagaagacaaaacaaattatcgacttttgcataacttctagataaaaaaacactgattcactgcaacaaatacatacctcagctctgaattccttcgggaatcgatctttggc

SEQ ID NO: 189167 - DNA, 976 bp, Zea Mays
gtggttgacactgatgcgggtgtagtcccacttatctattctgttaagtaatgttttctaattgcttgaactttcctgtgtctgtgtaacattcaggtactatatgttttagttctcttgtaaacttgtaggagaaataatccgctcacatttcatttcaattgaaatggaaaaaaacacgagttgattctgatgtcatatggtccatgatcaatcataggaactaaatctctgtatccatcttcctcttagtatggactaagtttaccttcctgacaataacatattaccttgtgatggtgagtattgaataacgacgtactaaatgaacaagataatttccttgtcaagtcaatcagaacattttgttttttattttagctttgaagatgtcatcccttggcaactttgtgtatatttcttttgagctgatttcatcttttcaagcaagtctcatcttccttctccatatttcttcggcataggatattaacaaaggcccaaagaacaaaccatcaattctgggaactgtttctctcaatctagcagattatgcattgacggctggagagacaattgagataattcttccgttgtctatacctggtggtgcacctgaacgagcctcatcccttcatgtgagtatacgaagtgaactagaagttctggttaacggttgtccttcaatttgttaggaaaaaaacttttacttagatcactataccatgtgacctttgatcttttttttgcagctcactctgagtatggttgaattaagagcttttcaagaaacatctgatgcatcacagcgatctgctgcaaccttgccattgtccccatcacctagtgattctcttcctggaggaaaatatgaggttttggttattaaagcagggttgaggaaggtaaaaattctcacagatctggtgtcgacacgaaggcctaagaagacttgccagggaggtggcgaagataa

SEQ ID NO: 189168 - DNA, 423 bp, Zea Mays
tgttgtgatgtgtttctttggagcactcactgcccatttgatctttgtagttgatttggggatcggaggcttcttgatttatgttgtagggactattctcttaattagtatgtgatttggtcaagaggtgtggaaacccatattctcatattcccgttgttggtaggttaattgcgatgattcattgataaaaaagaactcagtttttaaagtcattgtggtcgaaagacctagttcttatatagttcactgctggatgctttcttgtatcattccataggcctgtttggatacacgaactatttactagctagctaaaaattagccttagtgcatccaagtaagaaaactaatagcttagtaataggtgagcttattctttagctaagttttcaactagttgttagccaactagctattcaa

SEQ ID NO: 189169 - DNA, 333 bp, Zea Mays
ttcattttagttatggatgtccttgtctacatgttctcaaaggcagaaaatgaaggtttgctccagcagctttctagttcaaaaaagctccatcgagtctccatgtatgctgatgatgtagtccttttcttatgcccaacactgacagatattgacctcattcttagcatccttaaactgtttggagatgtctctgggttacacaataatgtgcaaaagtcaaatgtgtatcctattagatgctctgaggaggtgctgctcgaagtccaaaccttgatgccatgtgaaatttcaacctttccgtgtcgttatttggggctccctttatcctta

SEQ ID NO: 189170 - DNA, 443 bp, Zea Mays
ataagttgaatcagtgtgagtcatacaagggagcgcccatggtagccttggagctttcacagtcacaatggtcttgtcatgtgatggattttgttctctatatgaggtcaaataggtcgccgagacgccgacaggcgatagcaaggagcaaaaagtgcaatggtagaggcaaggaacgtgtttcttttgtcaaagttgaccatggagatcaagagggtgagaaggcgtgcaagagtaggaagaatgcaggatttgtatattactggagtccaccggccagggataggctctgcctcctcgagccgctctccacaagaggttgtgcctagtaggatcaccgtgttagggccacctaccatgtggggtggcacaacaatcggcaaggtgacggagcacatggtggcctaagggcaggaaaagatgtcttatgggcggtatcaagg

SEQ ID NO: 189171 - DNA, 497 bp, Zea Mays
ttgagggtgatgttgtggttgatgtcatatggttatcggtagtctgctcatgtgctataaattctgctaaatcaacttgttggagtctagctaccacttgagatgttgcttgtagaaactgagcatgcgccttcttgaactgttccatctgatccttagctggaggagttgccaacacaatgtattcgttgcacttagtgacctcacttgtagttgacattccaaggattgacatctgtatgggtatggaagaatggaagggacgaaagagttgagcaaagacatattatagagagcagagaaaatccatctatctaaggtttttcctagctaactgatgtcattgtggacaaaagtcacacaatacaacaacaatcattacaaaaaaacaaaacatagtcacaaatataactaacatgaactcaaacatatcagcacaacacaatccaattctactcattcaaccaaaacaaaaggtgagacaaggtttggaataa

SEQ ID NO: 189172 - DNA, 313 bp, Zea Mays
ttgctgatcgctttagctgcacagaatgggtgggaagtgcatcacatggatgttaaatcagcttttctgaatggtgatctgattgaggaggtgtatgtacatcaacctcctggttttgttgtcaagaatggcggtgggaaggtactcaaactgaagaaagccctttatggactgcgtcaggctcctagagcttggaatgctcggctagataaggagttgttgaagcttggttttatcagaaatccattagagcatgctgtgtacagaaggactcatggtacagacttgctgctgattggggtatatgtcgacg

SEQ ID NO: 189173 - DNA, 993 bp, Zea Mays
ggtgaaggttacttgccaggcagatgaccaagcgctagtggcattcggctacaccagaagcaacggcaaatacagcgtggtcctcaagggactgccgattagtagcagcagcagcagcaactacggggctgctgactcgtgtaaggtcgagctacacggagcgccaggaggatcggactgcaacgtgccgatcgagctaaacctgtcagggctcagcgtctactcccgatcaagcgaggaggtggtcttcaaagcgaaccagataatggcgttcgcgtccaagaacgcgtttggctgttcatcgaaaccacagacgcagtcgtcatcaccggttcatccctactacagctccccaccactcatccctcaccagtacccctcgcctccggtgccggcggctacccacaggtctccaccaccgttgccgttgccgttgccgttgccttatcagtattcagcaccaccaccagcagcacctgctgctaaccagcttccatccccagcgtaccagtacatttcgccaccgccttaccagcagcagcagtccatgcttcccaatagctaccagactccaccacctccacagggcacggagtctccagtactacaaccccgcaagtatctaccacctccatactactactacaactctccaccagcaccacaacaccaccagcacagctacgtacctccaccaccgctagcttaccagtaccctccacctccactcatccacaagtcgccgcttcttccatcgtcgtcaccagcggctccataccactacaactctccacctacctaccagtatccaccacctccgtatagctaccaaccttcgccgccacctgccggcctgtactctccaccattattgcctccaaatgctccggaacacctgcatccaaatgtcccccatgcgaaatctccacagccgcctctccacaccccaccacctccgaacggtgccgtgccgtcgccgtcgccgacgacacc

SEQ ID NO: 189174 - DNA, 296 bp, Zea Mays
ccaggatcacaagacccccgcggaccgggccatcatcgtctgtttccatcgaatcgaatgacctggccaggacaaaggaacaaacatggcggccgggaccgggagagcgcggaatgatgcaatccctcccttgccggaagaggaaaaatccttctggaactttccggcacccaccacttcagtcagggccggcttctccagctatggtaaaataaagacgacgacgagagaagcaacaggtgattgcaaagctgccgcgagtgtttggaacgcgacttccctttcaggaaacagcc

SEQ ID NO: 189175 - DNA, 294 bp, Zea Mays
cagtgatatgtagctattggcaatcacactcagattatggaagtagtgatgtgtagctattggcaaccacactcaggttattgaagcagtggccaataggtatgggcaatcggcttaacctacagaacttggccaagatcatacagttatggaccacagcaagtggataattctaagacaagacaatgtgactggcagcagtcaatgtgatagagatagactgatagcgaccttgttttaaatatgatagctgacaacctttagtcaagaagcccataactcatgggccacgga

SEQ ID NO: 189176 - DNA, 304 bp, Zea Mays
caaacgcattggcatattgtgttcatgctcttcatgcaaaggccgaaaagtgagttctctccttttctccaaagtcaccacctatttatccgagctttgagaattgaagcaatagaacatgtgctgcaggttgtttcaccttactactttgaggtgcatgctgggagtaccaaaaagcatccatcagactacattttcctggaaaatggaaataatctgcatgatgtgttgagggcatgtacaaatgctacattagacatgttggagcctgcaatacgaaaggcaataggcccagcacctcagg

SEQ ID NO: 189177 - DNA, 1280 bp, Zea Mays
aggtgcagcctttggccttgctggtgtggttaaaggatttggaatttcttccttgaaaaaatatggcatcgctgtgacattgcagaaaaatttggaagacaggttgtctactttgttaccttatccactagtgctatatatagggatgttgtaaataaaatcagtattgcatccatctgtcataattttccactaaattatgtgctgcagcctttgtattcagttttcatgtcttgttattctctaggcatttgagtaaagtttatctagggtattcaatgggaattttctgattgtcaaacattatagtgttgattttttttttccatttgtgcagaatgtctgcaaaatctcgtgaaggagctttacttggatttgagtgcctgtgtgagaagcttggcaaactatttgagccgtaagtgaggcatctcttcacttaactgttgctctgattccaattgattcgttatattttctttcttgtaggtatgtcattcaaatgcttccgttcctacttgtgtgtttctctgatcaagtcctagcagtgcgcgaagctgctgagtgtgctgctcgggcaatgatgtctcagctcactggtcctggtgtgaagcttgttcttccgtcacttcttaaggtatcaatatatcttatttgatgctatcaaatcataacatttattgtgtccaaatgttctggagaatacaagtgtccagttcatctagttatatattgaaatctgacaaccacttaacttctgctgaatatttaggccattggcaccacaaactactagtttgttttcattaacttgaaagagcagaacatcttgaggtccatctattacatttttttttaaaaaaatctacacattctggaaatttgttggcttattttcatttgtgctgttcgtacctttatgttagttgtttaaatgaagataaaataggtattcagatactttacaaaattttaagctagtcacattcactttcaaaaagtgtcatacggtgaatttacttagcttgtctaatacaagtttccttgaagcgcatatttggatgaagatcattaatgttggatagattagaataatgggccaaccctagagagggttggctatatagagttcatacacgggcctcatgggcctagccacatgggcctaatccatatactctaacaattaacatggtttttccagggtctagaagataaagcatggcgtactaagcaaagcagcgttcaacttcttggtgccatggcatattgtgctcctcagc

SEQ ID NO: 189178 - DNA, 395 bp, Zea Mays
cccacatgaaaaattcagattatcgatcaaacactacttatctcaattgtgaaatttattaggagatctataataacggtgggagatctataatattatagcgttgtccatggaaggagaatcagaagccccggatcgccgccccagcctccatggaaggggagtcctcttgatccgtgtctgcgctgtccaggaaaggggagcgtctgacgccctggatttgcgcaccccagcctccatggaaggggagtatctgacgccccggatctgtgcgccccagcttccatggaaggggagtcagacgccccggatctgcggcgagagaggaccgtgcgaaggggagtcagacgccccgggcttgtaacattgagcggcgcattctacatagaaatcag

SEQ ID NO: 189179 - DNA, 1310 bp, Zea Mays
ctttagcctgtataacgactccaatcacatccggcatctgcctaattgggtcttgaacaaggcgcagagtggccacaaacgtgaaaacattgcttgcatcaagagggattttcagaagatagcatgtgaggaaggttgcagccgagaccagaaccggtgatgtccagaacacgaaaccattgaaggatttcctaaggttgaacgccgacagccacttgatctcaatctccctcaacccctcaatgaccttcttgaaatgcgtctcccacgcatagagttttaagaccttcatgtggatcaaggactccgacatcgccttcagcctcacgccctgtgcttccataagcctagtctgaaacttgtgctgcagcttggacagaggagcgttgcagatcacagtgagaacgatgacgaccagcgatgcaatcatggcaagaccaaccgcattgtacaggatccccagagcgatgcagagctggacgcttgtcgtccacgtctggtggaaccagtacgggaactcgccgatccggtaggcgtcgacggtgacgtagtttatgatctctccagaggaatgcttcagcttcgaagagcccgacagcttctgctgcttcttgtagatggcggccgacaggagcgacctcacctggagccctagcctccgggtgcgaaagtaccactgcctctgggacagagactcacagcacttgatagcgaacattgccgcggccagaacaaagccctcgtacttgaaggaacctttcccaagcgagacattgatgaaggctttcagaagcactgggcctgcagacagcgtgagcactttgagcaacgcgaagagacccgagaccaagatcgcgctcttgtgagaagagacgatggtccagaagaccgacgggttgccgtgtgcctgcagctgcttcttcctgttcaggttgtccaagaacatcaggtactggctgtacgctcggtccgaggggcctaggagcggcatgtctttctcctcgagaggcttctcgtaacccttcttcatcatggggttcagccaccagaacgtcatgatgctgaaaaccccggctttagcaaacggggtgacacgcgagtcggccgcaccgtcgtcgtgagcctcggcgttcagaggcttatacaaagaactttcggttcctccgttaccatctccttcttcttcttccctggcgtgccgaatgccgtacacaaggagcagcagcgcaccaggcagggacagaacatccaagcacgtcttcacggccagcaccttgtctgcgaccatgtgcacgaccgaggtgcagcaa

SEQ ID NO: 189180 - DNA, 396 bp, Zea Mays
ttcgatcagaacctgaacgttgccgcggcacgtgcactgatgcagagcggtctcaggtcttgccctcagtcagaggatatgtggatcgagtatcttcgcatggagcttacctaccttaacaagctcaaggctcgaaaggttgctcttggagaggatgtcaagacgctgcaaaagaaagacaacgatgcgagccagtggaaagaggaaaacaaggaactgttcatgccactgaatgaacaggtcaaagatcctaaggagccaggctcggctggagatgccctggaggagaaggaagacctgttttggcgtcaagggttgttaatcattcagaccatatatcatggtgccgtggaagctcttccgtcaagcttaaccttgcggaagaaattcttggag

SEQ ID NO: 189181 - DNA, 333 bp, Zea Mays
cgttagttcacgcgttgtcgggatcccacacgcagcgccactactgtgcctcctagtctgcatcgactggtgggcaagctattggtgggatcctgccttagcaccatggtgccaccaccatctgccctcactatgtcaccagggtcccaccacgtcgtcgcaatgcaacaattgttgtcgcttgccactgtctacagccgcttgccctcgctgcccctcgcatgttgctacctcatcatcaccatttcaaggcagactcgccacagcgacgcgccgatgtggccgcttcaccctggtgctctcccctcgccccttgttggcccacccctttcc

SEQ ID NO: 189182 - DNA, 295 bp, Zea Mays
ccgggagccgttgcaacgaaccggaagtcccggccgaggggttgcgcgagcgatccggttgaggggatagagctgacgagggcttgactccatcatccaacgagcgaggccgaggcagcggatctcacccgccatttacgcgttcggtttgggaggttgaagaagatggtggagctgaccagcgggtcccaacgaacagcgacgcgcgcgcaattggaaggagtggacagaggctgacaagtaggacccgcgcgtaagtgacactggtaaaaagaaaaggaggtagcgtgggctg

SEQ ID NO: 189183 - DNA, 492 bp, Zea Mays
cgcgtgtcttcaccaaattcactggccaccgcttagcgccactataaattgacggcacggtctgctgcgttgggtcatcaccaagcctgagcacccgctcctgccgccgattagtcaccacaactctccaatttcccgttcccccaattctgtttccactgtcgtggtagagccctcaccgtggtcaatgaatcccaggtctgttcatgcaccccgctgtcttgtttcaacatccttgggttctcctgatgcttcccgaccctgccaattggactaggaccccttagatcgtcaggaatgcgcttgattgcccgtagtgcccgctgtcaccgtggacaaagtgtgttagagcgtcgttggtgaaattagttgaggggaaactcttgttagggtttgaattcggtctcagccatagtagagcaccggtcgttgcgtgaatcggccggtacaagctcgtcggagtttggttccccgccgttcgccgtcgtggac

SEQ ID NO: 189184 - DNA, 351 bp, Zea Mays
agggtcgatgtattcatgacaatttcatccttgtgcaacagatggccaaagtgcttcaccggcagaaagaggccaggatccttctcaaacttgacatcagcaaggcttttgactcagtttcgtggccctttttgttggaagtcctgcaatttcttggctttggctcgttctggtgcgacatcatgcctaagatgttcagaactgcttccactagagtcctggttaatggagaaccgggtgatctcatatttcaccaacgggggctgcggcaaggggaccccctctcgccaatgttgtttattctagtcatggacgtgctgaacttccttatcaagagggcggcggatctag

SEQ ID NO: 189185 - DNA, 593 bp, Zea Mays
ctgggtttcttgactacttcaaagctgtatggcttccaagacttggtcagttcatgtgcctttcatgtatcatattttgcttctctatctctggttttttactgtagttgccaaagggttttagttataccttttcttaagaagtaatgtgttaagttatttggtgaggtttcttgattgctgtcagatcctctactgctgagtgctgattgttaaatatcttccaggggcatggataactgtcttaaaggccacggcattggctagtgcacaggtagcttcagcaatagagagttaccatcacctgctaaaacttcggctgctgaatgaggcagatgaaagtgtctactggcgtgctgattggttggtcgataagttgggtacaaaggtccattcttactactggctggatgaattctcaggaaagaacagtttttcgcgttactggaggagtgagtggagtagtggcccaaacccatggtgccagggaatgcagattccagattccgatgtcgtcattgaaggcaattatgccagtgtggtcagccagaagaacaaggagaagtcccatgtcgtactgaatccaggttctg

SEQ ID NO: 189186 - DNA, 575 bp, Zea Mays
tttttgttcaataaatccttcagctatccacaatctaatcaatctctttctgtgtattagatagtcttctggaaacatagcacaatacaggaagcagttcttcaaatagtctggtaagtatttataacttagattcataattttctccacgcgattaaggttctcattgttgtgtagctcccagataagctggtcataaaatagcttccactcgtcaacattcttcggtctcagcgacaatatgcttcctattgccacaagggctaatggcaaaccatcacatttctccacaatgtttataccacactgacgcaactctggagggcagatatggttttcatctttcagaaatgccttcctacaaaatacatgccaggaatcatcgacacccagaggttctactttgatcttacaactacccttagctagtgaagctacctcctcaattcttgttgtgattattactctgcttccaaggccattatctacaagaacttctttaattttaaaaaaaacattagccatccagacatcatccagtatgatcaggtactgccttttgtctagagtttttg

SEQ ID NO: 189187 - DNA, 489 bp, Zea Mays
ggaaggaggaggtggcagcactggactgcatggaggacgggtctccggaggcaaagcactgcacatcagtagaggttaagaagggggacttggtgcgcccagatggggattgcagcacgatggagttcaatgttgttgggcatggagttgaggttgcttcatatgacccacaaaggctcaaacatgtggaaaccagcaatgaggctgatcaaaatgaggatccagggttcaaaattgacgaagaggtatcattcaagcctgtgctagtatgtggtgatgtcgctgaggatcagactgttggagtgaagactgaggtggcagtctgtgatgttgctgttcaaagggagaatgtggaagacaaacatgatggaataatcaaagccaattcactgcctacctctgctctcgaagcagaggatcagttgggagcagatgtagaactggaggacctggaatgtattttgaacgagctcttagttgctaagccgg

SEQ ID NO: 189188 - DNA, 812 bp, Zea Mays
gacaccttttaaccactggatggagtgcctttgtcaacaagaagaagcttgtctcaggggacgccgtactatttttgaggtaggccacagctaacattggagataattatcacatgttggtgttggccctttctgaagattcctcataattttcaggggtgataatggggagctaagacttggagtgcgccgtgcagctcagcttaaaaatggatctgcttttccagctctttataaccagtgcttaaatcttggttcactacctaatgttgcacatgctgtggccaccaaaagtgtgttccacatctactacaaccccaggtgatgatgaatatagcggtttcactttaatgcttttgcatgttcaattgttcatgttgttggcactcttttagatgatgtgaactgaaatgtgctattaactatactctttcaattgacggcgatttgaaattgtgtcattttgtgtgatatcatttcctgagttgtttcgaactatgtaattcatgattcttactgcaattcaacattaagtgatatataattactttttgaattgatattgtcacttacatttggacccttcaatataatatagttccacagctctttttttagatatcatgacaagtacgcaagtagatctttggttccttatgtatctcatgtgcatttttaccttcttggaccctgatgtgttgctgcaagccttacctttttatccaccaacaatgatggccctgatggcaattattgctttccaaaaatcttacagattaagccaatctgaattcattataccattttcgaag

SEQ ID NO: 189189 - DNA, 736 bp, Zea Mays
gttaagtttgggtgaagatgatgatgactatattttctcaaatcaagctcattctgtgggaggtaaaactagaaaatgtttttgtttattcctgcatttctttttagatccataggaggcaaaattcaaaaaatattttatgcacgcagtatagtgtttgatgctagttgttttatttttcttgcaggagtatgctagttgtatgtaagagatttttttaaaaaaaaggatgtcaagttcacaggcttgttatatgtgtaacttaggaaaacttcataatagctgaatttgatgaaaggaaaaaagattagtgttttgtactagagtgaaatctgtcaggattaggatggtgtcaatttttttgttaaagtttcatttttccctcttctctctgtgaggccaattgcaacctgtcctgtgatagtatgatgtgtagggccaagtttgcttctattatttctatgattatatcaatcaatacatttttgatgcacaagtgatgcacctacttgtggccttctggcaaacgtatatacaaagcatcatgctgttaggtgtcgaacttgctgacagttcaatttttgttaataaagtcaaattggtttactggccttattcaggcgacaaccaagtaaaacatattcaacaagaaggaacacagaaaggtttaagtaggaatatagcgccatcatgggaagatgtactgcagtccagttcaggtttaccaatttcatcc

SEQ ID NO: 189190 - DNA, 368 bp, Zea Mays
aaaaggaaatcttggaggttatcatggggacaagacccggaacaaaatgaacctctcagtcctcttgcttctggacttaaacgtaagtcttaaggtagttgtgttttcatctttattgctgctgctgttctagtaggaactgtaagctcattatctttacagatgaattctgcaatttctcccttctgtattcttttctttgtggaagatggttaaataatgtgttatcattgtgtctaaaaccatacttttcagagatgaaatctatcaaaatcatatcgacaattggcaaagaagaactgcagaagactgtttagatgagtttgaagccgccaacaaaaattgacctccacaagtcctttgatgaa

SEQ ID NO: 189191 - DNA, 733 bp, Zea Mays
gaacaagtcgctctacggtctcaagcaggctccccatgcttggtacagccgcttcgccacgcatctggtctctcttggttttgtggaagccaagtcagaaacttcgctgtttgtctaccgccgtgggactgacacagcttacctgctcctctacgttgatgacatcgtcctcactgcctcctcgacacaccttctgcggtagttcatctcagccctccagcaggagtttgccatgaaggatttttggcgaactccacttcctcgggatgcaggttcagcgtagtgccgacggtatggtactctcccaatgccagtacatggttgacatcttggatcgtgctgggatggccgagtgcaaaccaaacacaacacccgtggataccagccccaaggtctctgccgactaaggagctccagttactgacccgtctgactaccggagtcttgtcggtgccttgcagtatctgaccttcacacggcccgacatcgcctacgtcgtgcagcaggtttgccttcacatgaacgaccctcgtgagccccacctggctgctctcaagcgcatccttcgctacattcggggtactctacacctgggtcttcatcttcgaccgtcgaccaaagatgacttggtggtttattctgatgctgactgggctggctatcccgatacgcgcaagtccacctcgggctatgctgtgttccttggtgacaacctggtctcctggtcctccaa

SEQ ID NO: 189192 - DNA, 785 bp, Zea Mays
gacgataggaaaatcttatcatcgcactcctcaagcgctccccgccttgctctgccgcggccatgcctcgccgccacaagtccactgcccgagatcccaatcgacgctccggcctgatctccatttttggccttcggttggagatcgacacttttcggtgacgtccctttggctacacgaccacccaatcaggtgtttgggtcttcgatttgggtctgtagcgttggagatacccccttcaaactactaccggtccggaagccgtgcctcctagccactcacgctcgccgttcgtgatccgttctcgactgttggtgctccggactcataggtcagcccgcgccgccctcttctctacatcccagccttcgagttctaggctgtagatcgattttcgttgacacgttgtttggtgcttcatctgcatcctttttttgcagttctctagtccatattgatggctacattatcatggttgatggaatggtcagtggagaatgtttgtgaggcatttttctcctatttcggggaaaatcagcatgtgagattgccatctaccccagtgatccccgttgatgatccgaaggtgccccttcttcatacatgtttgcaccggttcaaggggacccttggtggcagagagaggcatcgcacctgcttttcgccgaggtgcattattgcaagtggtgacgaagatttgattgaccgcttcagaattgacgctactttccatcgactcacagagatccttgggagttggtctcatgggtactatttcaaggagg

SEQ ID NO: 189193 - DNA, 366 bp, Zea Mays
acaattctcttgtcctcgatacgatcttggcgatgcagagtcagcaattagatgctgtgtggtacttctaaaaaacgataaaagcaaggcaccgtagcatgttggtttagtcaattagattagactgcacggccgctgtccatgggacaagaggaaatgtctctcacgggagaacgacaagttttaagtcgatgaattggacttgtggtagatgaccaagtaggcaaagccgcaaaggaggtggaaccggtggcaaagtaagttcagcaataacaagtttcaggccttacgcatggtctaaaaactagaaattaccatagcactttctggattcttgtttaactttttatttctgtcgctctcgtg

SEQ ID NO: 189194 - DNA, 280 bp, Zea Mays
gcttgatcctcttcatgtggaacagggcggacagggaggacgcgcaggtgttcgcgccggtgcttgcgtccggtctcatatgcggggacgggctcttctccataccatacgcgctgctcgccaggtacgacgtcacgccgcccatctgcgtaaggttcatcggcagagtgcagaacaagatgctggacgactacatggagaaagtcgcagcatcccgatgatcgccctctcaacatgcttggtctgtacattctttcctgctgtcaggttttagtcacag

SEQ ID NO: 189195 - DNA, 615 bp, Zea Mays
gtttgagacgtgaaagtgatattgagagtgatgtagaggctgctggagataaagcccgaatctgataaaacataggggctgaaacgtaaacgagccgcgctccgaatttcactcaatttccggagcccgtcccctacctcccctcccgtccttcccctccccctatcctttctctctctcctctccctcctcttctttattgctttaacgttactcccactagccacccactcttcctcgaggccaccacaacacccccgggacacacacacagtcacacacacataaaaaaaaaaaaatcccccctcgcctcggattcgctcgcgcccccgcccgccgacgcaacagcgaggtacgaagcgcgggcggatgggcagtatctcagacgggccgccgaaccccgcccagctctgcaccccctcgtttttctcgatcgattcttgggtttctgacgggcgggaatgaatgcaggtcgttccgttccaggcttcggacggaggcggggtgacgtaaggaggtgcgcgggaggatccgttcgcgcccggaggaccgggatccggcgcccgtcgtcgtcgacgcccatgtcgggccacctcgatcgcttcgcgcggccat

SEQ ID NO: 189196 - DNA, 512 bp, Zea Mays
aattcatggaggtgtcggtgtcacagcgcaagagggcgtccgtcaccgagttgaggcgccagaggtggtactccaccacaaaattgaagtcgaacatcttgttgatccactcatggctaggaaacaatcgtcggtcgctagtccaagaagaacttgaggctatagtggtcgatgcagatgaggaagcggcaaccccagaggtacgactgcccatgccgcatagcctggatcaggccaatgagcacactgttttggttcggcttccggtctggtaaccaatatgctcaagagcagtgctattccaattagatgtgatgatcagcaggtgcttgctggctgcagtgtgctgcattgcagtcccgctgcgtttcctgctgcgtttccttgcaggtatctggggctgcccatctctgataaaaaattgaggaaatgtgaccttaagttatggattgagaagattgcagaccgtctgcctaactggaaggctcggctgctcaacctggctgggcgga

SEQ ID NO: 189197 - DNA, 319 bp, Zea Mays
aacatcggcatcactttcttcccaatcctgatttgcgtgcttctcatcgtgctccagaacgtcatcaacagcgagcttgacaagcccaagtacaaatgcggttgcgtctgcctcgagaccagtgccaacggaaggtgcgtaaggaaagagtgtggcattcagtactcgacgctggatcaggtggggagctgtccgattcccagcccgccacagtggccagccctgattcagatcccccgtgctgatttccgggctgcaaggacgttctcccaaccgtttaatgatttgcctgatccattttgccgtgactcctggtctt

SEQ ID NO: 189198 - DNA, 507 bp, Zea Mays
cggtgacaacatgccatgtgctcgtgaactggtgaatgtggtttggcccattcaaggacgccagtttgtttctactataaggttttggctctatagcactatgacataatcattgcgatggattggctctcgtctaataatcctatgattgtgcattaggctgataagtggttgacactttccaaggacgaagtctttgtcaagttgtatggtgtcaagacttctaatcgtggggcttttgttcaactttgcaacattgttgacttaactgatgaagataggttggttgccaggatcttcccctggagttgagcatctcattgacaagtattctatggtgtttgcacttcctcatgggctgccacctacacgagattgtgaccatcaaatttcactaattttgggggctcgaccggtgcaaatgtgaccatatcgatacactcttgtcccccaaaatgaaatagaatctcaagtgtctgacatgttagcttctggactcattcaaca

SEQ ID NO: 189199 - DNA, 362 bp, Zea Mays
ggcaaatctagtggctgcagctctcacaagatctgccccacctgtcttctctctcattagactaagaattctatcgtgcctatagatgaaagttgtgacacgtcttgcacgtacaatgggcttcttaaattccttcaagtttcctatgtcttctagcataagatctaagcaatgtgcagtgcatgggctccaaaaaagtgaaggaaacctctccataagtatcctacctgctgccttgtagttagccccattatcagtgataacctgaaccactttttctttcccaatctcttcaattttcttccctaataaatcagctagcataaatgcatcatgaacttcacttgatgcatccatagact

SEQ ID NO: 189200 - DNA, 1299 bp, Zea Mays
ctcgactcctccgccacagctccaaccaaagcaaagcggttttcaaggtacggaccgtaccacgcaaaaaccccaaccgcatttcccttcccctatgcttgctactacccccgctttcttcctcgctggatccgcggaccagcgcaaccccgtaaagctagtagtgccttccgtcgagtctgacaggcatggtctcggatcctttttctgttctgtttttttattcactctgcgtcttcgacggacggataatcgatcatgctccagcgcttgttactgatgatcagattggttcgtgtgctgatgatgcgagggcatgattttccctcatactcctacccgataacgcgatgtagccttcagccatctatgcacttatgcagggcattgattctgaaagaaaaaagatcgtcaacagaacgggctcccttttgaacggagggggaggggggtttcgtttcgtttcgtttcccttccccgagtaaaacatcgagtcggttcctcccgcgcgtcacccgcttcattgatttcgcatgtgtcgtctttgcccaatcactattgccttcatgtacatctggcttgctcagtgccttcattaatttcgcgctgtggtcccactatccaaattcgtttttgcattattattatcatcactaacttgtgcacaatggtcaatggatcactcccaaaacattttgcaccgccatttaaaaaataaataaagcctcggactctcggtaagggtcatctgttcactttgatatctggatatacgtacctcattatgtggctatgttttctgttgtgatttacttacgatggatcagaggaaacaagtctgaaacacatactactacgcagcaagtgagagtagctgactcaaatgatatgaaagtaccaaattgtaatatgttatttcagtatttgcgttactgtcatttgatatttgctttcgtgtttagaaaacataaacagttctggttcctgaagaacgttacgttttcttgactcatgcatcaacatgcaactggacagtgcagtacatttattcctttccttttgtttctcagcttgccagtgtcagtgcaatggtgactagcaaatcctcgtggagccaggttgtaaaaaataccaggccgacaaacctgtccgttgctgcaagaaacctccaaccacaggaccttggagccgtgatatttggttgcacaaacagtaccattcaagagtgtcactcacggcaactttttggtatgctcttgatttctcttgatcacgacctttgttttaacaaaactaggc

SEQ ID NO: 189201 - DNA, 413 bp, Zea Mays
gaggtctggtgtggctgatcctaccttgggtggcacgaagaaacgccgccatcgtacgcggggtcgaaggcctaagaccgcccccgttgcaccttcggaggattccagtgtagttgtacctccacccggttcctcttccccagagccggtcagggtgcatgcccctcgacaacctgttgttcctgatatggtggaagccacacatctctgcattttgaaccgtgcggatgcgcttgcacgggaagaactgcggttgcaacggtgtgctctgttcgtcgttgtcactggttcaagaccgagggtggctgctgaaactcttgctgatgaggtggctgctggtttcgggctggatgtgtcgtccttctccgttcatcgttcgtgcccagaagattttgtcttgatcctgaattcgg

SEQ ID NO: 189202 - DNA, 329 bp, Zea Mays
caggtttccttgaagcaacaccagagtgcaaacaggaatgtggtttgcctgaggagacagtaatttcctcaaaagaaacaggatctctgctgtgtgcagatcaatcaccaattggtctggaatctttattttcgcaagaaagcatagttgaatcagtggggcattgtgcacttgcttcagcaacaactcataccgaaaatggctttgatgattcaaaagattgccataacaagtctgcacttgaaaatgttcatgtgccagaaccttgttcacacaatgatactaaaggaggcatttttaaaaatgttgattgtatgcatacatcccag

SEQ ID NO: 189203 - DNA, 410 bp, Zea Mays
accagggagagcgtgagacagagagtgatgcccatcaatagccatgaacaaaggaaataattgtcagcgactcggtggaaagaaactgccatcacataatggaaggaagaataatggtcaaggtgacggaggggaacggtcggtgtggctgcagctgtgaatttataggctgcgagggaagagaaatcaacgctggggaagaggaacagaaaaaaagcattgagttcggcaccatcaatggccagggaagaaactgttggccatgtgattgcgggcggggagagggagagtcatcggcagtcgaggaggcgttggcggtgttgtgcaagcagcgcaagcgacgttcaaagaatggttgccgcagcggtgcactagaagccgagcggcatgcgtccgctggaagagatttt

SEQ ID NO: 189204 - DNA, 824 bp, Zea Mays
aattccttatcatgcccagagcctctaacagatccacctgcgggagcaccatgtgcatgtgtgctaccaatcagagttggaattcgtctaagcgttgacctttactcattttttccattggtctctgattttgctgaagaggtagcttcaggggtaaacatggcacagaggcaggtccgtgtaatgggtgcgaacgttgcaggtgatcaacctgacaaaacaatggttcttgttgatctagttccagtgcaagtgaagttcgacaatgctacagcattttcagcatttgaaagcttgtggagcaaaaaagtttctttaaaaccatcagtctttgggaactatgagattctctatgttgtatatccaggtccgtggtcttactagtgctcctgactcttttgtatttcgttattctattgctgatcagtgcatctatttactgtccaatttattactgtcaatttatttgatatgcataaagtagatgacacagtgtaaaataaatcgtgcattatcttaattgttgaaattgttaaaattctgcgccactagttctcaccaagaaatatgaattttgtgcagggcttcctccttcaccaccttcagggcaaggtgttggggatggggcgtttggcaacaacagaaatgcaagggccgtgaagccccttggggtcgatgtaagaagtcccaagagaaaagtgaatggcagcctcattgctattgttgttttgtctactgttatagcattgattatttgctgtctggctgcatggtcgctaatcctcagattcaggggtccgagccacacagctcggggatttcca

SEQ ID NO: 189205 - DNA, 329 bp, Zea Mays
tttggaaatgacttcctttcatcttggaagttaccaaaatcaggaaaagacacgattgacttcagtgttgactcagttcccaagagtagcaagaaattcagctttgacaacctgtgagctaatcccttgaaaggcttgaatccatcaacttttgatgccatcaactgcttcttgttcatgatggttctaacaaatcattcctttgaccagagatgattttgggcttaatggagcctttgacaaattaccgtcctttcaaatgggcatgtctgatctggatttttctagccctgacaagaaaaaagtgaagcacaccagttcaaatgcag

SEQ ID NO: 189206 - DNA, 292 bp, Zea Mays
attttcagttacatgaacagatgaccatgtaacttggccactgactgtgaactttggactgggtcagtgaaatggactgaactctttcagattcacatggactgaactctatcagtgaaacagactgtaaaatggactgaactctatcagattcacatggactgaactatatcagattcactgaaaatgaccagaattgaactctatcaacatggactaaaaatggtcccagattcacatggactgaacatggtaatgaggaagatagacagaaagaacacttgacaagaag

SEQ ID NO: 189207 - DNA, 378 bp, Zea Mays
tctggttgcgaacccatgcaggggcctctttgtacagtttgtgaggaaagtaatgaatctgaaagcaagagcagcagttgtgaaggaaaagctgtaggttttatgtacagttctgctggcaaagattcagttcttgtgactgcctggggtagtgggctgcttcaggttgatgctcttgcagatgaaattcaaccgcggtggaacattggggttccttcgcgtcttaatgtcgattcacatggacaaataaataatgttgccatgatatgtgactccaattcgcaagatccattggcgttgagatcgcatcgaccatctagtacaggatcaaacgtgaagagcaacatagaagctgtttggatgggacactctcctcct

SEQ ID NO: 189208 - DNA, 768 bp, Zea Mays
tccagagctggaatgaacagtttgagtgttgatgaggctcaagatgacaaagtgagacatgggccttgtcagggtgaggtcatagactcagcaatggctaatgatgctggcacaagtacaaatttaatcaaaatcagccctaccagcggatcagaatctgttaagcaggagaataatgtggttggtaccgaggaagtgatactccacagtagcgatacgaaagttgagaagcattctcacattgacgatgtttgtacagaaactgagatttctttgactgataatggaatatgcgcagtagataaccacaccgatctaactgggtgcactaagcaggaggagaggggcagccccatgaatgaagccaatgatgtttcatcacatgacattgtatttacaaggagaggtagaaaatcatgtgaggcaaagcagaggacatgtgaagaggaggcacggtttgagaagcgaatcacaaggtcagctacagttaggcagagagaagtttctgcgagctcacacaaaacttccacaaatgaggctgcactagaaggcagagggaggaagggagatattgttgctcactatacaaggaaagtaagcagtgcagtatctccaaaaggtcaccatgctgagctgggagactgtaataccagtatgccgaaacaaacagtgaaagaaacggtggttgatcgaagagactcaggtgtccctgagaatgataatcatgcgaatgtcacagagaataaggagtcagaaaatggaaaggag

SEQ ID NO: 189209 - DNA, 1262 bp, Zea Mays
ttgatacgcgcctacaatatccagacatatgctgtacactataccttacaacgtaagatgcgatgctgtattttatattcatatgtttttttgtgattttccacccatcggcttcttaatcgcacaatgtttcagttgctgttgacagtacaattaagctaattggagctggtgcttttgggtttcacccgaccctagagtggatatttgttggtgatagaggtggtactctcctggcatgggatgtatcaactgagaggccaagtatgattggcatgtaagtatccttatagagcgttgagagttggaaaatataactatagtgtcatgggtgtgttgcccattgtttcttttctttccagtactgcttgctactttcatctcagtgctaatgaaatattcattatctgcaaagtcaaacaccaagttcttcaaagcaccagtgaaactagaacagttccttaggatattgtccacattaggacttagttttgaatatatgctgctctgccatatgtattagacacccatctgtgttatgttgaattacatccacatctgatttagtgcatctttgcacatagtgacatgaattttaacctaaaagttctaacataatgcttgcagttccttggcatcaaatggatattgaaaaattgcaacgatgtttttttgtcttagtcaatcatctgcatgcacctttctttgttggtgtctctcaccctctaattacactgttttctgacatagccatctttctgtctattttccatctgaattttgcctttcacttttacttagtacacaggctggttcccatcctatcacatctgtatcctggcttcctacactgcggctgcttgttactatttcaaaggatggagcactccaagtgtggaagacacgagttataataaaccctaacagacaaccaatggaaactcatttctttgagcgtgcaggttatttttattcttacaattctttgagaaaattgagaatttctttaggccttagctatttcctcctgtcctctcaagctgcccttcttacttttaagttacatttcagggtttatttactcctttattttgtttgaaaatgatttctgcattaattttgcttgttaacattgcagctgttgaaacaatggatatcacaaaaatactaactcttcaaggtggagaagcagtgtacccattaccccgaattaaaaatttggcagtgcatcccaaattcaatttggctgcagtaatttttgc

SEQ ID NO: 189210 - DNA, 563 bp, Zea Mays
cccattcctatcccatccccgaaaaaagagcagcgctctgcagaggattctgttccgttcttaatccagtcttcgccatccgtatctgaacttttgtgtcatcatccatgcggctgatactaacaattagtatagcactagtagtctagtataccacaactcatccaatacatcacccttctggagcttcagtcactgacggatgaaccccataatatcttgccatgacatctatcagcagccagccaggatctgttttccgtgcaaagtgcagatgcggtggggatgctgagaccacggcatcacgtgcaggagctcatgtattatgttgctcaagctaatcatgtgtactactaccatctgccaaccagagtacactgcctcagctaagcaacactgctaattaaggactatcacgtgaaagcgctctgctcgtaactcgaattactagattggttggcccctgtccctgttcctgtctaatttcatttagtgtcctgtccttgtgatcattcatggtcgcagcagactctgcgccagctgccttgtttccttgacacgag

SEQ ID NO: 189211 - DNA, 297 bp, Zea Mays
acagacttcatcctctttggtcggatggcgcaacacatcattaagaagtcgtgtgatatgctcattgccaacaatccgaccagctttattcctgatccaatcacagatctgctcgagaagacgtatatatggaatgtgagtttctctgaccacacaatcaatactggaaatatttgtttccaggtcaacacagtcgtggcagagataggtactgcaaagaactccatccaagcatcttcatcggggccaaaacagtcacaacctgtgctattgcaaggcgcacccagaggcattgaa

SEQ ID NO: 189212 - DNA, 743 bp, Zea Mays
ttggtatatgttgttgaagagatggtcataggaagcaagcctcgacgtggcacatatgctaacgctaggatgagacaaccgaggtagaaggggcgaatgacattgcaccatggaactcgcttaacactggcctatcagggggctcacagacaaacccattgtgtcctgttgttcaatgccctaggttcaatgtctccataacttgaatggtgtgggttgatgtttggaacgatagctgcgatgacatcttaaatgttgccatgacagagctaggttcatactctagatcccaattaggtggacaactttgattatgttggagcgcttgcatgtctctaggtggcacatggttgggggtggcacgctcgttggaagaagggttggcaataatggcatgatatcctcttatctatatgtgggtgtgagatctcggttcttagtgctgacatcacacatcaatgattagttagtgctgagcccaataaatcaagtgttgcttggatgtcttgtctgttggacatgcaaaggctagattgcaagttttttgttgaaaagcaaaggagatgaaagagtgtttattgcggttgctcctttttttttgacaagaactttcttcatgaatgatccacaacttctattttgattggtggttaatttgtttgataggcttgcaggcggtgcgggtaattaccggaacccgctacacctgccccacaatctcacgtttgtggctcatgtgaagt

SEQ ID NO: 189213 - DNA, 416 bp, Zea Mays
gacaggcgaacttattttccttggaagaaaggaccgaattgttaaaatttatgggcaccgtttctcacttgaggaggtagaatccacattgagggatcatcctgatgtcagtgacgctgctgttacttttcaaagtaatggatctctggattttaaggcatacttggtgctgaggagtaataataaatttcttaaatgtactcagggttatagtggattacattcttcccgagatatcattgcaccacttcgaaactggctcatcatgaagtttccactagctatggtcccaaggctttttatccccatgaaatcattacctttgactttgtcaggaaagattgactatgtcaagttatctagcttggtttgtgcatttgagccttgtgaaattcatccagaaagcagtccagctg

SEQ ID NO: 189214 - DNA, 466 bp, Zea Mays
ttacctctggctctgccaataaactaacatcagggacctcatctaagcgatcaacacaaatgtccacaacatggacctcaggcagctcatataacaaggcctctgagacagcctcttcaaggtgacattccatgactgatattgctaggccctagattttcatcatccttgcggaacggcaaagctcgaagcatcactatgatccttcgtgcaccgctcatgacggaccagcggaagatccacttcctcatcctcctctgcctcttccacgacatatctagccgacttaccagcaccaccaccctccaccttatcgaccaaatcaacgtccaccccttcatcaccaacagtcggctcagctcaagcaaacaccgattgcatatctgaagtgcgtcagagttttctcctcttctgtttgccctccgagacatcagtctatgcatctggctagcttggtcgcttgtgc

SEQ ID NO: 189215 - DNA, 712 bp, Zea Mays
cgaagaggaaaagtccaaagaaaatgggaaaaatcatccaaaatcatcaaatagtttataaccagaaagactgagtgcaggggaggtccagagatcacaatgaaacaggtcaaaaacctgcttagcccgagaagtagtgaaagggagacgagtatgtcggcctaactgacaagcatgacagaggccctcaaaatgtcccctactacatgaaggatctataccgcttgtaagcttggtcatgacgtcaggtcctgggtggccgagacgacgatgccaagtggtggaggtggtggtggagaccaggactagaggtggagacacgccggtggagggtcgatgcgtgtagaggggctcgacggtgtcacatcgggcgagaggggtgtgaatcatctaggtcccttagtgatgttttggtaattaatgacaactgcttgtgaactaacggttcttggagaaataagaatgcagggttggaccacatagaacaggaaatcttgaagattcataagcattggttgtggatcaagtgaaggcaaaggtataacatatgtttcatttttgccggtcttgaggagtttagagaagatacttgaccggattggtaggttagatagccgtactattaagaggggtcaatgactttgatctgtgtaaaacttagtgcctcatagagcatctagtggttgcatttgcatgaggactaacaacgctt

SEQ ID NO: 189216 - DNA, 335 bp, Zea Mays
cgtccctcctctctccttaccaccgatcccgtcgacgtccctcctccttaccaccgatcctgtcgacctcttccgcgccctacgtggccctatcacctccgaccgcgccacacgtggccctgcttcttcgaccttcttttgcaagcttcgtcgatcccgcccgcgtctaccatcgatgtgtgcggcccgatccgtcggttccctcctccggcgagctgctctgtaccccaaccgcttccgtgatgagccgccgttgcaccatctggtgcccgtccatcgtgatccccgccatgtccacccgatggtcacacgccgctcgaccagtgtcctccgac

SEQ ID NO: 189217 - DNA, 1469 bp, Zea Mays
ggcgtcgtcataagctacgaccgccagtgcacgcgcgacggcagggtcacttgcctcgtcgcgccgccgcggagctaccgggttcccgtgcgatggcccagcggcaagggcttcatctggaaggacaacgtgcggatcagcgggcaggagttctcgtccggaagcctgttcaagaggtgcgcgaacaaaacttgctccgtcgctaaaattccaggtggtgggtttggtgtactggttgtgaatttggtggttgctcattgataacaggatgatggtggaggaggaccagatctcgttcccgtcggacgcgcacatggccgacggtgtggaggattatgcccatcaaatcgctgagatgattgggttgcggaatgaattcaatttcaatgaggctggggtgagttattgccatatgttcagtttaacctatgctattactagtaattacctatttgacttccaaatctagtgaaggcatacccagaagccagaactagctgaagtatgcaactgaaccaatgatatttctgtcaacgaggtgtcattcacccattcttttggcacaaaacctaattattaaaagagtcactcgctcttggtagtgctctttgtcaacacaacaccctacgaatttgctggcttctgccaaaattttctgtccactttgttttttttttcttttcaggattcaggacacctgtactttatagtggttccataagtaacccttgtgatttccgttgagcattttctttgggttcgatgttttttaaagtatttaaaatttctacttcattattttcgataaattcatggcacagttttaagcacataattgttttttttaaaaaataagtagcaggagctctgctattcatataagatcggagaagggtttcaaaaacataggtaggttaagcacataattgttgatcagttattttggggcaaatattctatttatttgggaaacagtatttcatttcattcataagttgtttccctgtctgatttatcgtttaaaatgacccttcacatcatgatttgttattcagcaacacttgtctgtcgtggtctttccacttggcggtactttagaaatcttgcatgttgagtgggctggctggaaagtgccggtctatttctacttaatttgacttgggaaactctgcatgcccaatgtgctggaaagtgtatatcagagcttactactgtgcctgcaaaagtatgttggcaggaccttaggatctccactacgatatattattaaagcacagttgtttttaaagatcatcatacaaaatacatctggacatactatgtagatcactttatgctctgattggctgaagtaagactttgggtaattgttatgtttacaggaactcttatttctgatggtgtttcttgctatgccattttcaggttaggacagtccttgacatagaatgtggatttggtacctttgg

SEQ ID NO: 189218 - DNA, 323 bp, Zea Mays
gaaagctaggttcgctcgaagtagtggtgcaagtgaacatggcaatgggtgtggcatcaacacatgtaggcatggggtggtagagcgatcatggtgcagtgcgacttaggtgaggtgtgcatatgtgtggcgacgatgcagggggagagggtggactgggatggcatacgagtatgggaatgagaactcataacatgtttagggagctgagtgcacaacttaaaggtaatggtatcgggatgagaattcggaacaagggagttaagtttaatttgcatgtaatcggactagaatgagaactcgggacaaatttaagaacgtta

SEQ ID NO: 189219 - DNA, 307 bp, Zea Mays
agcgttgtggggccaacccctcttcgctagacaatctattgtccaaattctatcatggatggctaaccaaatgaagaatttacatttcggtggcgcccagaccttccaaatgatccagtacttctcaaaccacacgggaatggacgcggaggatctggctagactgcagggtcatgcgcaaatgacccacatgttcaccatggtcatggtgctaaacgggaccagtggatgccgaccactatgtagctcatggcgaggcgcttgtggagcatcttcttcacgacatactagaggtagggtaggtggg

SEQ ID NO: 189220 - DNA, 314 bp, Zea Mays
cccgccccgcgtgacgtccaactccagctggtgttgcgtcgccttgccgcatgatgcgcgtgccgtcgtgctcgtgaagaaaagcaaaccgtccgtgtggccgtgtgcgagtatgtaggctaggagaaaagaacggacgttgggcctcacaaacatgcatgtgcaggcagcgttcctccatgattttcctgcatgcgtacagattctagagccaaaacgaaattgccgatcccttggatatcgtatttccctccccagccaggctgcatgccagagaaataatccttaaggattctctgtgccccaaatttgtg

SEQ ID NO: 189221 - DNA, 347 bp, Zea Mays
gcttgttcgaccaagtgaagaggcgatcaaggaggggaagctcaatgagcgacatgtcatgaattgcactgttgaaggcactcgccaagcagacattgaagttgtcattatttttgtcacttggctcacgaacaagattaaaatcgccagtgaccaaccaggggcctgagatcaagttggcaagggaacgaagttcaccaaggaattcggcggtgtagcggtgatcagcgggagcatacacgttagtgagcgtgaaagtaagatcagaagcgttataggagaggactgttgagagagagtgtgtggtgctggaagtggatacgagggtaaagtgagcagcattccag

SEQ ID NO: 189222 - DNA, 595 bp, Zea Mays
ctgaaagataatttaaatgctgaagttgctttgggcactgtaacaaatgtcagggaggcttgtacctggcttggctatacatacttatttataaggatgaagactaatcctctggtgtatgggataacttgggaagaggtaacttttcctcccaccattcacacatatgtgatgtaaacttttctaagaaggatgtatcttttagtatgagatttttgacattcactaaaaaaactggcgaacagtacatatggaagtgtcacatgcctgtattttgctgttatgggcactaggcccacagtgcacttccaggtcagccggggctactgttcacgtgtgggtactgtagcgcgtgatgtttcctccgttgagttctgaagacaattttttgggttctaatttctatctcgtattttttattaaggttatgggagatccttctatgggtgcaaagcaaagaacatttattattgatgctgcacgagcactggacaaagctaagatgatgcgctttgatgaaaagagtggtaacttctactgcaccgaacttggtcgaattgcaagtcatttttaccttcagtactccagtgtcgag

SEQ ID NO: 189223 - DNA, 509 bp, Zea Mays
gttgaagaaagtacagatgttgtgactggaaacatatctggttttcctgccagccaatttgatcatagtgcatgggcatacaagggtgccatggtcaggaatatgccagatgacccgtcccagtcacaacatctcgttcaagaagatttagttgatgtatttgacattttggatgacctgaagaatgaccctgtacagcgtgatttgttgaaagaagtcgagaaacacgatgtaaagaatgtttctacatttggttctactgaaaggagcatccccctgtcccaaggtttcacgatgccccggtacgtgtgccagtaataatcagtaattttattcttttaatattgtataatagtattcagtaataaccaattctatgtcagcaggttgtacctgatgacactgacattcagtacacacctcctcagccacgagcgacacgttctcaagctcaacctctgaaatcttcgctccgtaccaatgagactaggcagattaggaaaggccag

SEQ ID NO: 189224 - DNA, 500 bp, Zea Mays
aacagggaagagatccctgtgtacccactgtacagagatcctgtgagtgtatattccacttgattccattctttattgttttatttttctctcccagcgctaatgccatattgttaacccaaatttctgccctcttctctgcaaacaggtacatgattttggtttttttcgctatgatccaggtgccattaagtttcttaagtatgatgagattccgctggcacctgaagcagcatcagtcgggctagaaatccgggttgtcggaaatgacagcggggaaaaggttccatgaattatatcttaaattctgctgttatgtacccctaaaatatacgtccttgttagacaccacagaccacagcagttgcatatttttttgcattgttccctgtcaaaccttagtgccttagatttctcctttttgtgcactgtgaaacaaatcttctgcttttgcaatatccagaactcacggaactaaggttccacccatcatacactcc

SEQ ID NO: 189225 - DNA, 422 bp, Zea Mays
cacgtaagattgggtgcacgcgatttttacgccgtaattttgggcttcgtttgctgttacaaaacagatatatgatttacgctaaatttcgtactcatttacgatgttttagctcacgttttacgctggaatccgcccgagcagaacccgcgaactgcggctgtaaattaaaatttatttccttctactaatgctcctcgaaccgtaattatccctttatttacgcgattatgcagcacgtctttccttatatcaaaccggtcaaaatttatataatgcatggtttatgctatcatgttacacatcgttatgcagtcgtaaacggtgtgcacatggtaatattcgtttccgtgactcaaggtacaaaagatcccttctatgcatgatttatgcgtgcgtatttttttcctcctgtaactgcg

SEQ ID NO: 189226 - DNA, 1140 bp, Zea Mays
ctttttattcatttatttacggatgggtttggttccactgaagatacagccgaagatgcagatgaactacagcaagatgctgttggaagtggaactggaatgggtgagggggatggtcaaaagagtgtaagctctgatatagatgatgaatcacaacttggtgacagtaaggttagtgtgttcaagtagatccttcttacttctttttataacaggatgaaacaaatatcccagcctctacactacaaattgagatgtatatgaacgatatatacttttgactgtagcagtttctgtatgcttcattgaagctgatcttttttcgtgttagcaggacttgacatgtaaggcagatcccgctcctaagaacgatgataaagctgttgaaatgcaagacggttttaatgcacaattatctgatgtttctgaggatcttgaaggcaaagactcgggtggcgaagatgaggataccttggataatcagatgggtgatactggtgatgcaagtgaagtggttggcaagaaatcatgggataaggatgaagatgatgatcctaagacatctattgagaaatatgagtcaggctcatcagccaagggaacacaacaggatgatagggaaatgagagctaaggatgatggttctattgaggaggaagatccgatggaaatggattctgaggaaggaaagaataataatcttgaacatgatcctagtacccatgatgaaaccgaactgaatactgatgaagtcatggacaaagctgatgcatatgatgaccggactggacctgaactccctgaaccagagaatgattccattgatgttgacatggtggaacaagaacaaacggatgaaataaatgctgacaatgaagatataggtacagaagaagctgaacaagcagatcagaggttagatgcttcagatgatatggaggaaggagatatggcacaacatagcgatggtgtggtagataatgaaggggagcatgttgaagatgcaaatacagacgcaggtgagatggattcacaccaattggacaaggcggattcacttatgcctctgtcacaaggcctacagcctgacaatatgcaaataaattctaatggagaatctgaagcgaacttggccaacag

SEQ ID NO: 189227 - DNA, 294 bp, Zea Mays
caatttttgagattagtggcataccgcttggaatgaaggctaaacagtcacacattaatccttgaagcagtaagagccaaaggtctaagaatcattgcataaattatttacctatcggacacataatttgtattccaaaacaggcctatcaagctcgtaaatattgtgtttagagaatagcatgtaggcaaagataactatgaattattgcctcctacaactcttagtaccaggcttaggggcgacttgcagtagcaatggccctgcctctgcactctcatggtccaatgtttt

SEQ ID NO: 189228 - DNA, 407 bp, Zea Mays
gcaaaatctagaaatcgaaaaattttaggccgaaccatagtaggattgaagagatagtacaattttatctaggccataataaatgtctagagatagataaaattttcccaaaccctaaagacttaaccataaccctcaatcgtatacactaaacaccggaccccaaacccaaatccctaaaccgtaacacccaaaccctaaacatcaaaccctataccctatataccgaatgcttacacctatggattttttaccattaaatggtctccactaaattggattgaagatataatacattttatctaggccttaataaatgtctagagatagataaaattttcccaaaccctaaagacttaaccataaccctcaatcgtatacactaaacaccggaccccaaacccaaa

SEQ ID NO: 189229 - DNA, 576 bp, Zea Mays
agattacttatgtcaagtacttgcaaaaattgtagattctgaatctcccgtggcatctcagtaataaattccgcattgagactcaaatatctcaggtgaaacatattgcaaatatctttaaagtggtgattcctcactcccttacatttctttaaattcaatacacgtaagaccagaaaggccgaaagttttggcatcaactggaacactttagtggacacagtaagtgatcttacgtgggagaaactcattgtagccagctgcttgacttcctcttcctggctaatttggagggataaccggtggatctttttaggcagatcaagagatatgggctgttgctcacctacttttgttagaaaatgctcctcatttgacaagaaactgataagatcaaggaccatatcatgtatccgacaagaaacagtcttaccatcacggccaatatctacaggttccaacatacttctgttaattaactcttcgatgtaatcctcacctacttcatataaggtcttcccctgttcttcatggacaaaaccttcaccaatccatttccatatgagacctcttgtt

SEQ ID NO: 189230 - DNA, 448 bp, Zea Mays
gctgccacctgcatcccacacccaaaacagttgtccacttcgcaggcggtcgtgcgcacgacgctggtcttttctctcgcgaagcatgtggtggtggcaggtcaaccagcacaaggaatcttcgtcagaagccgcggagaagatggatcgaggaggattggagcacttgagccatagccatggtcggtgttcccacactctcatgttctgatttgaagatgctatgtaagttgtcccatttcatatgaccgtgcctatcctgagatgtcgtgtgcttctgttagatccatttgcaaggatgaattaacttccgtctttaggacgatttaatttagctaatgttgtcatttgtctcccatatcagaggttagagtttggtcatttttcagcttgccggatgggggcaaagtcatggtggcatgctacaaccatgtgtgtgggtacagac

SEQ ID NO: 189231 - DNA, 352 bp, Zea Mays
ccaccctattgacccctgctgggccctgcccctggccttctctagtgcccttgtttgcattggctcctcgctgctacacccaacttgtacatgtctatcatcgatgtgcccgggtgggtacaccgcccactctagcgtcgagccggtggtgtatcacccccttcatcgcgaccctcgccacattcacccgattgtgacccaatagaccgttggggtccttcaccctatcaatcgactcgtcctctccatgacctccttattgtcggtctccccatgctgtcttctgtccatagcgccgttgccaatcctcattgacaccgcattatggaagatgaatactggtccctcgttg

SEQ ID NO: 189232 - DNA, 738 bp, Zea Mays
gcctggttcgatgatcccaaaaattccaggttggttaccttacctaccgtcccttagtttgttctctacttgtgttttgaggtactaacgcttattatatcttacacagtggagcacttggcgcaaggctgtcggttgatgctctgaatgtgcgacgtctagtgggtgataacttggccttggcagttcaggtcacctcgacgctgatcgcgggattcgtcattgcttttgtggcagattggaagctcacgttgattatcctgtgtgtgatgccactgtcgggtgtgcaaggttatgcacaagtgaagttcttgaagggtttcagccaagacgccaaggtaatttaaaatctggagtcactataggaggacacttgttttgcctcccaaatttgctaagctgcaatatggatcgctgttctgcagatactgtacgaagacgcaagccaagtggccaccgacgcagtcagcagtatcaggaccgtagcttctttctgtgctgagaaaagagtgacgacgatttacgatgacaaatgtgaagcctcgaagaaacaaggggtcagaacagggatggttggaggcctcggtttcggcttctcgttcttgatgctgtaccttacatatggactttgtttctatgttggagcgcagttcgttcgtcacaacaagtctacttttggggacgttttcaaggttagaaaaaatgcatcttatcaccagcgttgctctctctctctct

SEQ ID NO: 189233 - DNA, 283 bp, Zea Mays
ttcttcttccctacaagcatcttctttgttttgaaacatctgatctaactccttactaaacatggtctgatggtcggtggttcacagtcaatatcagtcgataggtctaatctggtaaaggctgtatgttttggttcagattgggatggtttcagtttctgattgggataggtgtgccatactgatgtttttccttttcttattgatatattatacgaagttgcattttagggtaacttgttctaaccttctgatagatactttggcgatatcctgtgccgtt

SEQ ID NO: 189234 - DNA, 571 bp, Zea Mays
gaagattggatttctcgtgcaaatgcaaaacagagacggggtagggctggtcgtgtgaagcctggtttatgtttctgtctgtatacaaggcatcggtttgaaaacgtcatgcgtccatttcaggttaccaccagcgttagttatatatatgtattttcctaatgttcccttattctgcctctcatatatgccagttatcttccatggaaccttgaccttctcagtattcattatatagtgattacttatatttatatgcttttctgtttccttgcttactatctcaccctgctaatccattcccaatatatatcaatcaaattcttttagggaagttatacaaattaattgcaaacccacattctctgcatatggttactaatttgcaagatatgaaaatatgcatttctatgacacgaatgagctatttaatatcattgggcaaggctatcaaaattttcctaaatagcacatatagtctttgggaatttatatgcactctacatgctgaaggtgcctgagatgttacggatgcctttgactgagctgtgcctgcaaataaaatcacttc

SEQ ID NO: 189235 - DNA, 473 bp, Zea Mays
ccgtgtcatggccgtttctcattggggttttgaggaaaatggggtttgggcagatttggtgtgatgttgtttgtgggctgttggctacttcctccacaagaattttgctaaatggcgttcatggggagatcatttcgcaccagaggggtctaaggcaaggagacccactatcccctatgttgttcattttggttatggatgttctgaacttgctcattcaaaaggcttccgatgaagggttacttcagcagctatcagctgggactttgcatcacaagctttctctttacgcggatgacgcggtggtttttcttaggccggtggcttcagacatcaatttggtcctggagatccttcggctttttggggaagcctcggggctcaagaccaatgtcctgaaaagtagtgtgttccccattcgttgtaccgaagatgatttgatgcgggtccaagcttctctcccctgccccatt

SEQ ID NO: 189236 - DNA, 325 bp, Zea Mays
ttggaactgagggagtaatacatacaaaatatagctaccaacttccattggaaggggataattaacagcgtccctattgtcaacactcaagctcccatattcttatttatattaggatcccccaactccgtctatgctgagcttgtctcaacatagcagcaaatcccaagccctcgtaaaggaggaagggggtgttaggcttggcgagccaacctctacttagccattctatggaaatagactaccctgcttgtgcttgggacaaaaggctatgttgttgtattgggaccccatattctatttgcaaattcatgaaagttacaca

SEQ ID NO: 189237 - DNA, 288 bp, Zea Mays
cttacgaacactcatgagacgagtgtgtgccctggacctgcatcttatgccaagaggccaagtgtgtagagtactacctaatgttctgtgcaaaactacccttatatatcgttgtgtatcatggaaatcttgaatcatgaatatggattctattcttaatataagattacactactctcttgcatgttcgagataaaaaacaaccagtgagcagcaatagcagcatgcttatcatgatttgtgttttcaattttcttcatgaaaatttgcaccttcaaaaactcaatg

SEQ ID NO: 189238 - DNA, 291 bp, Zea Mays
tgtgattattggattgccaacagtagggctgctatctgctagctcttgtggtcaggcgttgggagtgcttttgggtggtctcgcctactacaacctcatgcatgcctctgaatcatgctgtgaatagatgcagtgtgtgaacagatgagaacagaagcagtgtgagtactacagcctactaatgtatctttaagacagaaacatataatctgcaatgccaccagtaagtaattaagctaaatatgtaccatttaagtagcagttcacctacttcgcatgcacaagtatcac

SEQ ID NO: 189239 - DNA, 725 bp, Zea Mays
tgcgtgatccccctgatctgcgcgatctcctgctgcacggttggcgcgttcctcagcgcgacgaatgtcccgcgcacgcctccccctacggatatacggttgaccgtacatgacatctctcccggccctcgaaggctagctcgtcttcgagctgaaagttgggaaagcgggcgcggaagtcgttgaggtcctcccacgtcgcggacacagactgctcatcttgccactggaccaacacttgatgaacgccacgggccaaccgaccagcaaggatgcgaccaggggcggacactaccgcgccattgagagtcgctggaagcactggtggctctgcgggcgatgtgcccaccaatttcttgaggacaccaacgtggaagacgtcatggagcctggcgccctccggaagctgtagtcgcaccgctgcctcgttgatgacttcctggacgcggtaggggccgacgtagcgaggctttagcttcccagtaggcgttcgtgacagcaatgctgccgaccgttgacggaggcggaggaacgtccagtcgcccacttggtagaccacctttcgatggtgctggtcgtaggcacgtttctgggactcctgggcctgctgtagccgatagcggacgtcgtcgaagaaggcggagcgttcctccatctcttgcgccactgctgccacccgcgtctcatcgggttcataggagcggatggatggggggtcacggtcg

SEQ ID NO: 189240 - DNA, 2542 bp, Zea Mays
aatgaaactaagttgggaatgagtaggggtgtcccagaacccaagctaactgctatggatgcaatgattgataagcttactggtgccatattcttatttcaacttacagtcgttgtcgttcttggggctgcaggcaatatttggaaggatatggaagctcgcaaggtagttttgcttgcaaattttctaattgtgttgtacatattagccccattgttactagtgtagacctgcaaaaatatttgcaagatgtaaattcttgccacaaactactactgaaatgttagagtttattgtgcatcttttttcagaagtttcaaattttgccattttgagattcataggtaataaaagatgggatcaccttggagttacaaagtaattttaagaaagttaagcacccaattagagctgaagagtatttggtgttggtgtgttcatctaggattggcctcctcactctccctctctattgtctactcctatttccttgtggccttcagttgaagtagtatccccaacgtgctctgtgtgttccctatatatatatacctaagtgctaatcatcacccctcatggtccatcacttggactaaaagaactagtccaactaattaatcgcgccagcgccatccgtgcgcgattaaccgcactagccgcgcacgattaacgggatccacaccagggaaatcaattgaatcagggaacgaaccgcaccaaccacatgcaattaataggattgattcgcccgccgaccgcaacatgcaacaccaaatattcaccccattcaaggtttagtttcagccattcaatgttttgttcagacattcaaggtttacttcaacaattcaatgtttacttcaatgtacagcaggaacaaacatccaaccattctaggtttgctttagtcattcaaggtttacttcaaccattttaagatttacttcaacgtacattaggaacaaatattcagccattgaaggttcacttcaacatacatcaggaacaaatattcggccatttaagggttacttcagccattcaatagttactttagccattgcagatatctggggtgtggtggaggcacgacgagtgaaggcgcgattagcggggcttggctgagtgggcgcgcgagtaggggccgtggccggacgatgcatggccgagcgggggacgcgctggtgtgactggttcggtgggtgggttaattagcgtcgatatgctggtttaggtgatgggccttttgatccatcgcttccacgtgtgacacatacgtcgacgctatccatcacccgaaccaaccccatgtttaattctgatcgaactcaccccccttgcttagcacgcccctgttaatctcgctcacccgttccttgcccgtagcggcgcctccccccgatgattaactccccctccagcgcaccgacccgtcacggcagctgcctcctgttcccgattcaccaccttgaattgctgatatagaatggctaaaataaaccttgaatgactgaatatttgtttctgttatatgttgaagtaaacctttaatgactgaagtaaatcttaaatgactgaatatttgttcctgctgtacgttgaagtaaaccttgaatggctaaagtaagccttgaatggctgaagtaaaccttgaatgactgaatatttggtgttgcacgttgtgggcggcggacggatcagccctattaatcgcgcgcagctggtgccctggtacggttaattagttcttttgtggctggtttggttggaccttttagtccaggtgatggactaagagagggagagagttctgtaacttgacagtaagtttgggcatgtggttggacaatatgtcaagaatctgacatgtgtatttgcaagagaattttggtttaggatgttcctttgtaatactttgtatcgacttaactgacagaaccccttgccagaattaaaattcgtttgtagattggtgggcaagagtggtcaggaatttacccaagttaacgaaaaaatggtcaatttggtgataatattgggtgcttggatgctttggaaacattggaatgctatagttttttatgggaagcgtccttgtatgcagtcggctctccgcccatttgatgatagagtgttgtttttggtgtcttgaaggatctgataacctgcaagctctaggtcaagtccagggtctaggatagaagtcagctattgaacttgttttgtattggcaaccctctactgggtccgggtagagggtgaagtctgttttgaactctcttctcttcttaatgcaatggtacaccgctcttttgtgtatccgagaaaaaaaatctgacatgtgacctctttattagttattgtgctaattcacctgcccaaacctgaattaactgaactatacatatcgacattgttcatttgggccttgtatattttgctgatcatctaattatttgcctgtcttcatgtagcaatggtatgttaagtatgatgacaatgaaccatggtatcagattctggttatacctctgcggtttga

SEQ ID NO: 189241 - DNA, 281 bp, Zea Mays
taaaacagtacaattgcagatctattgacaatataactgtagcaacatgctttcactaaaagtcataagaatggccgcggctgcagaaggccgctgcgtgctggaggctggagcaaaggtgccgcacactggaggctcgagcaaagggcctctacagcagtcacacgatgaaggggggcagccacgcgatggagcaacagacgcacaacagggcgaagggagagcagggcggtggcgctggagaggggggcaatggagcaaaggcggtggcgctgagcagg

SEQ ID NO: 189242 - DNA, 552 bp, Zea Mays
ctttaccaaagggacagactcatcgccggcaacttacatgatgctgatggaatttctatccggttcattcgtcttcaggatgtcggttcacatcttggtccgcttcaccagccctgaaccggttcgcatcgtcttcaggatgtcccaggcctcctttgtcgtcgctttcacccccaaggactggtgcatctctggaggaaccactcgtaggatcgtctccatagcccaccgatcctcgttgcgctcaacgttgccagtgtcgactgccttcgacagtccacacgcatccatcatgaccttcatcatcaccacccagttgtcgtagttggtgcgggtgagcatagggtatggtgctccgcctccaacatcctgcatccttcgctggatgaccagagcactgcctccgccaccgcggttgtgccccggcgagttggatccttgccgctcccggcatctaggggactaggacctcgtcacacgcgacatctcctcaggaaccgaggcttcaaaccaggcttcgatgccactgttaacaaaaccagcaccttctcc

SEQ ID NO: 189243 - DNA, 293 bp, Zea Mays
caatgtttacaagtcgggcgaccagctggtcgagtgagaggggcgaccaggcgactaatcgcgattagggcgacgattagtcgacctaatcggtcctggtcgacctctgggcgtccgttagtcgtcctatagatttaaggacatatgtatatgtatataactatataaacattgtatttctgcaataatataggcataattagtagcagagtagcagtaattcagtaaaagtgtaaaacagaatccatccaaagtccaaagtccaaactgaaagtaatattggcataattact

SEQ ID NO: 189244 - DNA, 922 bp, Zea Mays
gtggttcttggtcctcatcaatttctgcttctaaatcctctttgaatttttcaatacgatcaagctcccattcttcctcctcaacatttacttgatgatttaaagcagctttgtcaattactggatcccagagttccataaagcgcattgcatatctatcaattggccggagctggttctcaaatgatgaactcgcttgtcctgctgcagctgctgcagctgccatctgtttcacatcagcaagcatgtcagtatcttcatcaccaacagccaatgtaagagccttttccttatttaatcgattggtagacagagtaatgtgcttctccttctctacatcagaagagttatatttttgttcttcgttaatgtgctcatcgggttttccattctcctcattaaccaattcatcctcctcttgtctgcccgcagcctcctcactgaattcttgattgtccacggcttcttcctcctccagcttcttgagagccatatagtcagcttcatcttctgcttgtctaatagctgcttcaacatctgcaattgacagagccagatcaacatcatttgaaactcctgaggttgtagagcaattcttctcctgatcttctgcatgaagagatgtgtgcccggaaaagaattccataggatcaagtttcttgaagaattccgtattgtagctacctcgttgtatcactaaatcatcaagagctcgtttctgatttgctttcttgagaatgttctcctctatagtgctttcactaatgagtctatatatgtgaacttcacgagtctgaccaatcctgtggcatctgtcctgtgcttgttggtccattgcagggttccagtcactgtcatagaagatgacagtgtctgcacctacaaggttgattcccacaccaccacttcgagtggacaaaat

SEQ ID NO: 189245 - DNA, 1676 bp, Zea Mays
ggtgtctgctcagcctgcttatgttggttgccgccaagtttccccactgcttccgtccacagtttgttgatatcatggacctgcttcttgggtgggcgtttgtgcaggacctagctgatgcagatcgcagcatgatcattgatagttttccgcagtttcagtggcattggcttgggaatctgcagttttcacttggattactgcccaagttcttggccgatatggaggggcttgtgcatgatctcaacctgggaggcagccataatcctgggaggcttcgttcgctgtttgcttgtttctctacggtactgcagattatgtcttctggtgtggctgagcgaaataacctaagagaacttgtagctgggcctctggaaggtttagctcctcaacttttaaggtgtgcatcagtgatagcctctaaccttggctggtctgagaggatggaagacgcatccaaatgcttggtcttgcttgcagagattctgcaggaaaggtttgctgatttttatgtccattttgtggatgtgttggtccagagcttggaagttgcctcctcggcacagttggcggcagcacttaagactaacctgcaagttctatcactgcaaaatttggggctccatgcagcttctgttggagctttgcttgacttcagttcaattttatctaagtcacgtcttcatccaaaccacagcgtggttgcaaactcagcagctacctacattttttgcttacagcatggattggaagatgtagttgatcaagcaattgcatcagtgatgaatgagttggagctgataaaatctctgctagcggaagggcaagcaagttgccctgatatccatagtccccccttagaattgaacagtgaaaggaaaaacgagtcgaactcaggtgtgcattgttggccacaatattcagaggatcagttgctttgcctaatgaaatttgatctcaagattcttctggcgactattgcactggatacaaaaaagagaaatgagagaacaactaacttgatacaattcatcttaaagaagcttgacccatttggtgcccctttccataatttccttgagatgcagtttcagattttctctacactacacaaactgagcaacatggaactctcaagcaatatgccagcatctgaaccatttgaaagagactctggaggttataaaacacagccggttgtgttagaaaagaagatttcttgtgaatgtaaaaagaagtttgtgcataaatatggcaaatacatagttcagggccttaatgcatcatcatctttgacactgaaattagaggctctagattggataggttcatttgaaaaattgatccatggattggagaggggtgtggataatttcagtttctcttatgaggtaatttgggatgctaccctttcgagtgatatcctttttgctgtcttggattgtgcatatgatagggagtctaaagtaaggtaccatgttgcaataaccttggagttactatttctgggaaggctcatcaaccccatgaatttctatgttgttgctcaggttctgctagacaagcttagtgatccagatagtaatgtaaaggatgcattcttaaggttattttcaatcaccttgcctatcacaacatatgcgtttggcttgtttgcagatgaacataattatcgt

SEQ ID NO: 189246 - DNA, 293 bp, Zea Mays
aaacagtatgctcaaaatatgactcgccgtctggaccaaacatgcacaaagaaggaagttcttctggtccagctcgaatatctccagagctggaggaaaggcaccatgtggaggttcaggtaaaagtcgacacagagcatcatttttctgtcagtaatgcaaacctagagatatcttttgatggtccaaatccaactgaatgtgacaaggaaatctctgccattggtcatgggagtcaagactatattcaatcttcgcagtcacatcaactctcagcctgtgcaaaaccttgg

SEQ ID NO: 189247 - DNA, 1193 bp, Zea Mays
tggcagtgaaaaaagtcttgagtcattcgagattcaggtaattctttctttccccttttacagatatttcctttctactattttctccttgtaacttctatatctcaccccatttgccactatttctttttgttctctttttttgcagttatttgagctatggacaacaattgtggggaattctagattagcaaaggtttgtatttttaatgattgttttgtgcgtcatgtgtttgtattgattttcaactttgttctaggttattgggggaaacattaaggagctagcatactatactatagccttgcaacagataactgaagaacaggtatgaactagctgaaacactaactttacacatgtgatgcttcctttgttctttttgaatcattgtttggacttatgcaattaattaaggataaacagaagtgaaccacatacacattaaattgtgtctttgtcagctacattttggtttcccaacttattttggggaaaactgagctttgtacagtgcaaagcacaaccaacaagttaagagtcgatttcgagttatgtttcttcttgacatgccatttaagaaaaaaatgtaatatactccttgcaaatagtttgtctattagtcactcttcatgtttcttttttctttttatttgttatccatgtaatgatcatgcattgatgttttgttttctctaggtgcaaaactggtcacgcgatgctaaccagtatgttgctgatgaggatgacctaacctatagctgtcgtgtgtctggtacaaactgcagtactgatacttttttgtttacttggtaggcttattaagagtgcaattcagttaaccagtgtattgccttttctttaagaaccgtacaattggcagaacagcaggagctagtattaatgaacggaatttctgctactattgttactgactcccttggagcctaagtgttcaaagatgtctttctttgagttctgttttggtttatgagacccttataacctacccttgaattggaatttgttagtcgcttggttgcattacttcctcacttgctggttttcaggatctcttttgctggaagagctagtaacagcttatgaagattatggaattgactcaattgtggaagcttcacaaatgcgttttcatgaatcacgagaattgaaggaagcgggttctgctgac

SEQ ID NO: 189248 - DNA, 311 bp, Zea Mays
aacgctggaccaggagatgatggtctgccgcttcgaggaccaggagatgaggttagcacccaggaacacgacggagccagaggttgatcgacgcgtgtcggggtagccgacccaatcaatggcggtgtagatgatcaggttagaagtcggagagggccgaagaagaccgtagtcaagggtgccacagaggtagtgaagaatctgcttagcagcggtgaagtgggctcctgcgtggtgtgcatgtgaaggcacacctgttggaccgcgtaggcgatgtcaggccacagtgaggtactgtagagccccgcgag

SEQ ID NO: 189249 - DNA, 1155 bp, Zea Mays
ggcagcgacggaggaagagaaattcgagcgcgcgcaatacagctgtgccttccaggacgagggcgatgggggccgcgacttcgcgccgccggagctggtctggggtaaggtgcggagccacccctggtggcccggacaggtattcgacgccgccgatgcgtcagagatcgcactgcagcaccggaaagccggcgccccgctcatcgcctacttctgggacaggaccttcgcgtggagcgactcttctgcgctgctccccttctgcgccaactttacgcgactatccacccagagtactatgtctagcttcgtctccgccatcgactccgcgctgttggaggttgagcgacgcgtagaggctggcctctcgtgcggttgcttcagttccaacattgccacgaagcaggaggttcaaaactccggtatccggcaaggggcgtatggtgcggcgatagactctgtctacacgagggatgccttccatggcaaaacatttcttgactacatctcagcactaggaaagaagccactagccggtgctgatcttcttgacctagccaccgccaaagcacagttgagggcattcaatcgttcaaggggttcaagggaccttcctgagtttgtgatgtttgagggcattgcggagattacagagatgacacacacaaagggagaaaggatgcacaagagtgaggatgatgttctgagcaaggagaagaaatcgaggcgcgctgggagttcacgtagaaaaggagaggctttaccagaggctgcaaatgatgatgctatagatgaagacagcaatggaggggcaggaaatgatacgttgagtcagggggaaaagtcaaagcgtgtgaagagttcatcgaagaagaaaacagacatttacaaacatttatatggactcaaaactgattctgttgctgacagcagaacactggacaagaagggagtagatgatgttttgagcgagagaaaatctgggcgcacactgcgatccacgagcaagaaggaagatgcattagagggtttgaaaaggctggcaaagcatggaattgaggaattagcaggaaaaagcaaagatgcccccgttcttaaagaaaacaatcagaggcatggtgcaggctctgcacacaagggtagaatcacagagga

SEQ ID NO: 189250 - DNA, 374 bp, Zea Mays
gctctatccaccgcactggtactacagctgccggcgttcgacgtccccttcatcgtcgactgtgacgtgtcaaggactggcttcggcgcggtgctgcatcagggcgccgacgtcatagccttcttcagtcgcccctttgccccgcgccatctgaagctcgcggcatacgagagggagctttatcgacctagtacaggctgtccgtcactagcgcccatacctctggggtagacgcttcctcattcgcacggaccactacaacctcaagttcctcctcaaccagcggttgtcgacaatttcgcagcaccagtgggtcagtaagttatttgggtttgatttttctatagagcatctgtcaggtcacctgaacacta

SEQ ID NO: 189251 - DNA, 277 bp, Zea Mays
ctacgagttacattggatgctacaagtctcgatgcccttgtgctgatgttgcattgtttaatatctcttcttacacacctcaatggatgctacaagcagcaccagcgatgattagtggggctttgcggatgacgctggcgcaggtgatcttctcaccattggccaccatggccgttaggcggggacgttgttggagcggaagacccgttcgccgagcggcttcttcggagatgaaattgtgggtgctgccggagtcgaggaggtctcgtcgatcctc

SEQ ID NO: 189252 - DNA, 656 bp, Zea Mays
ttgcaaacagcaccttaggtgtgttatttgtagcaggtaaaggatcctgtccataaatacggaatattggtctacatcctccctcttcattgaagcctggaatgtttcttagtataacacagtctaaagtaagggcccggtcctgaggtggccactctgaactcacgttcctccgagatatgtaatgtaagtatcttatctgagaaggcataggattcaatggtgaccacaactgaaccagttcatgaggagcttgcctgtaaatcatttccagtgtcctctgctcaccaatgaactgctttctatacaacagcagtcctgctaacatgaatgcaagtacagcccagccaccacgctcacaatgcattattaggacattttgctggcccagagagagccaactctcccctgacctcaagtaatgatgaatcatttctattgtaaggagagggcatccctcgtattgtctggggtagtccataactaccatatcataacttgataatatattcgccagtaaactttgactgtctccatcccgaaagttgaagaccataaatgaagcatcagcgaagtggctctgaagttgtgcaacaatgtcaccaatataatcccggtatttatcatcatcgaagacatcagttgtgaagcaagaa

SEQ ID NO: 189253 - DNA, 582 bp, Zea Mays
cactggccgccgacagcatcgtggacgacgtcatcgccgagtttgcacctgacgagaacgaccgtgaggagaggcggcgacgggttgctagggtttgtgcgccgcagcctgtcccaacagtttcctacatcaagcctcaaaaggtaattctcgatgctgaaatggtcagatcggagaatgaaaatgatatggtggtggtggaattgaagaacgatactgagatggaaaccaatttggaagaaattcctggttctagtgctgaattggtggttaataagagtttggaggagccgaagcaggaggataatggggaagtaaagatagaaaaggcacaccgcctcaatgcaaagattaaggcggaggagtgcagaaataatgatgtgacgagtgcaacagaaggatggatgaagatatgtgggaatggggagaatgcagtaggtgaagaaggggtggctgttgatggtaacaccaatgtggatgaaagttcagagtttgagctgaaagatggagcactgcccttctacatactggatgcatacgaggaaccatttggtgctaattcaggcacagtgtatttgtttg

SEQ ID NO: 189254 - DNA, 846 bp, Zea Mays
ctgaactttaattgcaagttatcaggccaaatgtttgtagatactgctgataatcacgcactgcgggtcagctaagcttcaggaaacgataggcgaaacactggccacgagtccagaccatgttcctctcttccctgtaatggtcgccctttcctacacagggcggctagaatgcgcagcaagggtcgagaggcctgtcggcagtgcgccccttgcgaccgcgtgtgacagtgctgagccatcactacttgttctgatccgtatctatccttgtcactacagttctgcaaataatctttcatggttctgtctttcctggtcaaggaaatttactggttctggctttactaatgtattgtgcaactagtttgaagggtgtagttgtttaatttgaaatggactctgaagccagtatgttcgatcacattgagctcatgctacttgatgaaaagtgtggagccgtcagacatgccattatcatttttaacagcaatcaccaataatttctcagaggatcagacaattggccgtggtgggtttgctgtggtttacaaggtttgactcactctcaaatttccccagtatgtcatcatcatctatatattgctgacaaggcaaatgctctgactttcaactgcagggactgctgcgaaatggactatccgttgcggtaaagaagttctatgataccattgaactatctgatgaaatgtaccgtaaagaggttcaatccatgatgaggttgaaacatgcaaatatagtacgtttttttggatactgtgctgacacacagtggaaaatgttcaaacacgatggaagacatgtgattgcagaagcacgccaacg

SEQ ID NO: 189255 - DNA, 365 bp, Zea Mays
ctgatcgcaacacttgcattccaaccatactccttgatttgcatcaaatctgaaaattctttgtgcgtgtgtttgatctacttacatcactcgtatcttatggtcagcactaggcagtgaacttcaagttggatggttatttaactttacaacaactaggatttagattgcattccttgtttactattccccaccaagctccacatataagccatcgtaatcagtactctggtcttgtattcgcttaaccatcactttattgttaccaccacacatttttcttgcaacccgcagggacctcataagagttttggttggtaagagtggtgaggttgtgagattctatatagcttcatattccacct

SEQ ID NO: 189256 - DNA, 418 bp, Zea Mays
tcttttgcttaattgttcggctgaaacagtatggggggttttcggttgtcagatctagaactaagggacaagattataagctcatttacccgaaccggtacacaatgccacacgtaggatacataatatatggctctggtttaatgattgcacgatctgctttcgaccgttcatccaatgatttacggtcgagatgaagcccgggcgaagcagtgcattgatctaatccaaaccgttcaacaccggacaacggccaggtgcaaccggcagcacagagacccctgatttgttcgtgaccgttcacacgcggatcaacagccgagggctattcacccaaaccggccggaccccgatggcggaacagaaatcccacggcggcgccatgggtggcgaaccccgtgcgagtgctggcgagccc

SEQ ID NO: 189257 - DNA, 4695 bp, Zea Mays
gcctaaatggagtgttgaatgcaacaagtactgatttggatggtccttgttttccagcagagacatcaaggcgtcatgatgctctaaagagaatccctgatgatgttgtttctgaacttctgaagaaattttgttgtaccatgcgttccttcctttctacccttgtcaaaggattaccggctcatcgtcggcctgactctaaccttaacccaaattcgagaagtcttgtgactgcactagctcaatttttccttagtgctcttggtttctctgggcattctactgctggttttgagatgtctttatctgtgaaatgccgttaccttggaaaggttgtggaagacatggctgtgcttacatttgacagtagacgtcgcttatgcaattctgcactcgttaatagcttctatgttaatggaacattcaaggatgttctaacgacctttgaagcaaccagtcagctactgtggacacttcctttctctgtccttgctgctgccacagatcaaggttcctctattaatgagaaggtgtctcacaattcctggctgctggatacgttacagagttactgtaaatttctggaatattatgtgaactccacgttcttattgtctccatcctcttctcataatcggcttcttgtccagcctattgtaactgagctgtcaattaatctattccctgtgccttcagatccagaatcatttgcgcgcatgctccaatctcaagttcttgatgcagttcttcctgtttggaatcatacaatgtttcctgtgtgcaacccagcttttgttacctccctggtgtcaattatgaacaatatatgctctgttgttggagatatgaagcaaagccgcagtagtgttggagttgccaatcagcgtgttactggcccccctcttgatgaatctgctattgctacaattgttgaaatgggattttcaagggctagggcagaagaatctcttagaagtgtgagaactaacagcgtggagatggcaacagattggttattcaaccatccagaagattctgtccaggaagatgtgcagcttgcacaagcgttagctttgtcacttggaagctccattgaaacacccaaggaggatggaagcaataagaatgatacagtcattgctgaagaaaaaggtgtatttgtgcttcctttggatgacatccttactgtatcgaccaagcttttccagtctagtgattccaccttggctttcccattgactgaccttctagcgacactgtgcaaccggaataagagcgaatactgcaagcgagtagtattgtatctttttgagcagttaagacatttttcgtcagatgccacggatatgggtgctttgtattctgttgctcatgtgctggctttgcttctgagtgaagacagtggcatacgtgaaactagtgctgaaaatggtgtcatctcccaagttcttaacatattaggaagtcttaaatcaaggacagaccagacagatcatacttggaattctatcagtgctctgttgcttatattgtataacatgctacaatttaatccaaaactcagtatggaaacaatggatggtatatccaagtcaatttctgatgcatccagtgctgacagcgaggaaaatccattaccaactgctgaacatagaactgaaattattgattcagcagatgatgcaagtgcaaatgtttttaaaaagattttagggaaatctactggctatttgaatgatcaagagagccaaaaggcactggttttctgctgtgaattcattaagctatgtgtgcctgcaacagttatgcatgctgtgcttcagctcagtgctcgcttgacaaaaacacacgcgcttgctgctctattctttgaaagtggtgggttagcatctctcttaaatctcccaggcacttgcatctttcctggctttgagaccttagcatctgctattgtgcggcacctcattgaggatccccagaccttgcagagtgccatggaattggagatacgacagtcattaagtaaccatggcagtcgtactccaagctcatttcttacaaatatggcaccactgatatctagagatcctgtgatcttcatgaaggctgcaacttcagtctgccaattggattattcaggagggagattgaatgtagtcttgttgaaggacaaggagaaagacagagagaaacagaatgttcctgtaacagaaagtggtgtgccatgtaatgagcctgttcgggtgactgctgaggttaagacggttgatacaccaaacagatgttcacggaaccacaaaaaggttcctgctagtcttcctcaagtgattgatcagcttcttgagatcatcatgagctatccatctgcaagcaaagaacatgggtttgatggttattccctgttgactccaatggatgttgatgaaccaaatacaaagggcaaatctaaagttggtgatggccaagaactggatggtgatgctttctctgagaggtctgccttgctatcaaagtttgcatttgtccttaagttgatgagtgaaatactccttatgtatgtgcatgcagtagggataattctgagacgggatacagagatatcagtgtcacgaagttgcgctcaaggtgctggacacagtggtttactgcatcatatattctatctgctacttcctctaccttcagtcaaaattgctgatacctcagatgattggattggtaatttgtctgagagagcttcctggttcttggtagctttatgctgcagatctgctgaaggtcgtagaagggttgtttctgaaattgtaaaggcacttaaccaattcattggttcagcaagcaacacctccagaggatctttaatacctgacagaaaagttttggctttctctgagcttgtgaattccatattgtcaaggaatagtcagagcaatttgcctgttcttggctgctcacctgatattgcaaaacctatggtagatggtggaatggtgcaatctctttctgttttgctgaaagtaattgatcttgaccacccagatgctgtaagggttgtcaacctgatattgaaggctttggatagcctcactaggactgcttacaccaccgatcaagtcctcaattcagatcgatttaccaagaacagattaccagggtcacatgaacaaacacatgaagctgatgacattgtaatccctgaacaaactacatacgattcacatcatcatactaatgacatcgaatctgcaagtcagcaagctcaagaactgtctcatgttggtggaaataataacgaaaaccttgaccaacctgctgaacaagaaatgggagttgatctagcagacaatagtacttctaatggcaatcctccaacaagagctgtgcagttcatgcgggaagaacctattgaaggtaatgtaatggctcctagtactgatattggtttggctttctcaatgcaacatcaagttgatggaatgggtgtggaagacgaggatcttggggaggaaagtgaggacgaagaagatgaggaaatagcagctgagggagctggtttgatgtccatagctgacacagatatcgaggaccaggagaacaatgcaattggtgatgattacaatgatgaccttatggatgaagaagatgacgactttcttgagaaccatgttatagaagtaagatggagggagagcttaactcgaatggattatgatcatcatctgagattttccaggggtcgtgcagactccagtggttttattgatatatcttctgagtcatttcatggtgtggggacagttgattcatttaatctgcatcgttcgtttggtcttgaacggcggcgccaaatcggaagtaggtcgcttcttgatcgaccaaggaccgatgtgaatgcctttcttcatccactgcttgtcaggccagcacagtctagggagggaactaattcagcgtggccctctggaggaacttcctcaagagattttcacatgctgtcttttgacatcccctcgtacatgttagatgctggcttttcaccagaaactgctcccccagtgtttggtgaacgtgttgtcagtactgctccaccacctttgatagatttctcacttggtatggattcccttagaattaggcggggccctggagataatttgtggaccgatgatggtcaaccacaggcaggtaatcatgcagctgctattgcccaggcagtggaggatcattttgtgtcacagttaactgtggctaataattcaaatagtgctcctcaggtgcggcctgaacagactggcaacggtgcgaatgcgcactcagagttaccagatacaggaaatgctgaacctgttacaaccgatccactttctcaacctgttggtcggcatcagctagtttgtactgttaaccaaggacctgtccctgctaatgatgtcctctgtcctacagatgtgcacgtaaatcagcaccttgttgattccatttatgatagccgcgttgtagaaccggtgcagcaaacagcagccggtgatcctaacactatacctcagagtgatgaaatgatgtgtattgctggtacacagcttggtggtcatcctgaaagagattccttgtctggtaatggaagttatggtaatattatgcaaaatgagattgaagcacctcaacaagttcacttgggtaatgatcctagggaac

SEQ ID NO: 189258 - DNA, 937 bp, Zea Mays
ttgttatcacattccctggagcttatcattctggttttagccatggtaagccatctaatacatccatattcgtatattgcacttattgggttagcaaaatgttctcaaatcgctgtcaaaattaaaaagttccttgaactagctatctggttgctcctgtatgctacatgtggtccagtcctttcactgactagtgtttagactataattttcacttaacatatcaagtgaaatgctaaccttgcaattccatatttatgatacagtgttcatgttcatgcatattttcttatactttcagtatcttgctgaaatcactcacagttgcacatggaacatctctgaatgcaacaattcattttatttcactatccatgttttataggatttaattgtggagaagcaacaaacattgctacaccttgctggttgcaagtggctaaagaagctgcaatcaggagggcttccacaaattcaggcccaatggtgtctcattatcagctgctttatgagctagcactgtcattacatctaaggtttgcctgcagtaaatatgatttcaattgttgttatacgacttttcaattgtccatgaatattggagaggatgccatccaaattatctgatctcagtttttttcttgaatactcatgagatgtgtatcattgcattaaggagataaataaatcacaacacacccaccattgtgtgtgtgtctctctccctcccacacaccacattctctcaggatgtattcattgtagtattatctatttctgaactagagaggccagttacatcacagcatctaaaaaatggatatcaaatagcagttctgtttgtgtaattctctgggtcatcatgttactggagattgaatctagacaatattttccttttatagggagcctaagaattctcatatgcctagaagct

SEQ ID NO: 189259 - DNA, 314 bp, Zea Mays
gcctcccgtgctccactggcgcccttctggaaccctcagccctcctaatctcagccgaagttattaacctctttttttcttatataggccaaattagttcccctcccgcgattccaaggctttgctcttcgatctcagccgcgccgtgttcttcgcggcgagttcggagcgttggtgcccaatccgtcgaggttgtgagttgcttccgctgctgctactgccgccgccaccgctggtgttagtgatctgatctggtgggcggattgcggcgcggaggtggaattgttttggctctggggaaagctagctatgcg

SEQ ID NO: 189260 - DNA, 461 bp, Zea Mays
gagaggggtgagcagcagtggcgagcaggtcagggtctcagggaggaaggacacgagcagggggacgaagatcaacagatcgtggcagctaactcggaggagaagaacgcgagtagggggatggtggctgtcgcggtggtgggtgtgcccgcgagtggggtggctgtctcggggggaggggaaggcaagggcatgcagggcgcgagctcggtggcaagaatggtggcgctcgaaggcatgaatggcggggcttccctcaagcacggagatctcacactcactttccctcgacatagagatacctcaagcacggagaactcgcacggatagggtgaaaggatggtgggctcgtaccttctacaggagcaccggagtagcgattggggttggacgagaggccgatggcgctagagacagatcttggcgtaggcgatcttctgatctccttggccttgatgacg

SEQ ID NO: 189261 - DNA, 401 bp, Zea Mays
gtggccgttgaggtgatccactgcagtgggtttttactctatgcgtagcactatccacatagcgtattgtttaaagctgcccactgcaggcagcctaaatgctggctctatgcatactttggttgatgattgtttgtagccataagaaatacatagttgatacatctttcatggcattggacttgcttcatcattcaccctatattctattgcacgtgcttggtggcatagtactttgcttatgcctaaccatgttgcacatctgctgagatgaacattgggtacacatggagaccccccatccctcctttgtgttacttgaaattttattgaaacacctgtccttccatttactcaaggatgctgatactgtaacatcgtgtacagtgcacactatggaa

SEQ ID NO: 189262 - DNA, 2157 bp, Zea Mays
cgagatcatgtccgtgttttgtctcttgacaagaaaaatgtcttcgacagctgcatgaagcaggtagaggatatgagaaaagagctaaataactcgtggaaagctgtttctgatgctgaagcaagggctgccattgcggaggtttgttgaaatatttttattgtactggactgatagtattttatttgagaatggggcatatttggcttgtttctctttatgcaggccaagtgttctgatctagaggcaaaggtgaaatcgagaaaggtagatacaaatgagtacaaaactgtgattttgcaagcattgaatatcagaaaccagtcatatttttagcgctgacaatcttcatagttgttcacatatgtgcacttcttattggtgaaccattttaggctatgtgagatgattgctttgtatagtgaccaaagtgcatgccattttgaggatattaaacgctacagaagtacagtactatatgttttaagttgaaaagcgaaatccttaatactcctacttgttactaacctttggaatctgagagtctgtcttgtcccttggggatgacaacaatatatagagaactcatgggccatataggcctagaatatatatgggctaatggcactgacatacttaacccccaccctccccaccctttagtaagtgaagttgatgctgctctcgactttgtgctgtagtgaagaaatctttgacttgcgattcagagggcacatattgaagagcaattgttttgtcatgacgggcttctctagatatatgctatgtcatttcggcttttctagatatacactatgaatggatacgtagtttaaaaaaccaaaatgacttacaatctggaatggagggagtaatagttaatattaaattgatgggctgcaaccatatgctgtggttgttgttgcagcttacctatttttgaatatactgcaacacagaaagcactatgtttagtttttggagtggtgatgctgatgtattcctttttgtaaatatttccgaacaaataatgttagatttttcatcaaaattactttcataagattatattttttaaaagttgtattagttttttaaaaaatatttgtttaaatcccatatcaggtatcttgccagtttgggaaaatataaaatatagtatggaccgcagtaataaaaatgttatctatctggtaggagagggagggcatgatataagacatatccatcatgtgttgtctgctgttcatggccaaattttaaaaatggccacttcgaacctcgtacaatcataagaccagatcatatgctgtattagaaagatcattaccatgtaagctcctaattgtgctgttattctatcaggccatttcaagggatggttgccatgaaatctcagccgcatctgaggtgagctatttttgttgttgttgtatgccattaactatgtatctatgggtttgttctccaataatcttgtatctacattctgcggggtaattgtaaggactacagtgttgacatttagattaaatgggatctatattttttatatccttgtctttccatgttcttctgaagcatcaatgcaccattgaatctttgcacaagtcattgccgcacccctaccctcctgtgccaagtgttactttatgcagctcattgtgtattaacttgctgattgcctgacacttggtgtcttggtcaccaataggagaatgatgaactattccagttgaaagaggagttagaaaaatacaaggaggaagcacaagcaaataagaactacatggttcaggtgcctgtctctcaccttgttgaagtccagaggatcatgctttacgtagatgtaaaaatgtttctatgcactgaaaaactaaagggaaagttaaaatgacctttaccactattagttcttaattataaagcgttattctatgtttcctcccttatctttcctgttaccgatctgagtgccctgttcataatattttaaatgagagggcggcttatttatgatgacaacaccttaattttgccttctatgaaagttgcttattcactatgtatggatctcctgaatcatgcaacatgaaatcttgtacagtacaaagaaatcgcacactcaaatgaagttgcgttgaagcaattggaatc

SEQ ID NO: 189263 - DNA, 349 bp, Zea Mays
ggattttatcaccggattgcctcagtccaatcggtctaattgcatcttagtggtggtggacaagttttctaagtatgctcactttcttcccttggctcatccctttacagctctttcagtggctaaactatatttgtcagaagtctatcggctccatgggttgccagctgctatgatttcagacagggacccggtctttacgagtcacttgtggcaagaactgttcaaaatggctggtactcagttatgcttaagcagtgcatatcaccctcaatcggatggacaaacagagcgagtgaatcagtgtctggagacgtatcttcgctgttttgtccactcttctcccaag

SEQ ID NO: 189264 - DNA, 928 bp, Zea Mays
gctgagatgtttcggacaaatacgtatcccactttctgtgtttgaacatcacaattgtttgctttttataagcattctatatgagctctttcagatgattctgttgctagttataggaaaaatatgcacttccaaaattgataagttttgatacatttacaacaaaaatcctgtttcttgtaagttctcttgctgttcataatatgaatctgcacaccagtatcgtagattgtgtgcttttacctgagttttctaagtagctgattgttagttcatgtaaggtttcagatggctataaaatcggcttgctgctatgcacctgttatgctaaaacagattaattttcacagctgtggttgcttcattttatttgtcaatctcttgttgatgtccttatcttaaaacaacagcgttgaggatattctacaggttcttatagtattttgtgtggagtcattggaattggactttgctcttctttttcctgagcgccataccctacttcgtgtcctcccagttttggttgtcctagcaacctcatcagagaaggagagtgagtcactttataaaagggtgaagataaatcgtcttctcaatgtttttaaggtctggtcatctccttgtaaatatccacttaagtttacttataattagaatttttggaggagttgatgtttacctgattatgctacttcatatttttaaacttcttgttgctcttacctatttattttacagaatgatccagtgatcccggcatttccagatctgcatctttctcctgctgcaattttgaaggaattgtcatcatattttcaaaatttttccagtcaaactcgtctccttgctcttcaagcgcctcatgaaattcagggtcgtgagctacaagaatatcctttctgctgagttttctaaataattttcacaa

SEQ ID NO: 189265 - DNA, 760 bp, Zea Mays
ctaaatatatggccttgttttaaaattttccactgttatattatgcactgggatttgtaataccgcctttccctacttagttctgaatataagaatactttccgactttttaggtcatggtacctcaaaaacagttacaactaccatctcctttagaattttcactcctcaacctagatcactgagtctatgttttttgtttcttattatatactaaatggtcacctacttttcaggattatcaacagctagttttggaaatcttgcaagttgtatttaccaccagcttttcaacatcatcaacagctggtttggaaaccttaaaagttctatctacgacaggtacaccacaaatatttaggttttaccaatcattagttgctatttttcaactccttccccacctacatacaatacaattgattttttgtttcttactgtttaacccacagtcatctactttttttcgaatcgttgcctgttgatttggaggacctgtaaattccatctgtaacagtttaaaaactatgaaagactgctaaaccctaaaccctaaactatgaaagactgcaaatcatttacatactgttctacgtaagtttggtcaacttgaatttgatattctttcttttttacataatatatggcgacagacaagaatacacatttgaaaggcaacaaacacaagaaactaaatatatggccatattttttaaactttccaacgttatattatgcactcagatttgtaataccacct

SEQ ID NO: 189266 - DNA, 343 bp, Zea Mays
caggagactaacaaatggtttagggtctcttcctgatcacatagcagagtagcagacatatttgagagtaaggcagccccttctttgccagacggtcagctgtccagcagggatcgtgagccacaagccacatgaagcacttgcatttttcaggtgcccaacttttccaaatcctctcccaaggtttaaaagttgttgctccaaggaagaaaccgacatatgccgatttgaccgagtaaatacctgagcttgatagcagccagatatgcttatcctcctcctgatccgggtgtggggcctagtctgtagtgaggtcccaaactttgagaaaatcagacaaaac

SEQ ID NO: 189267 - DNA, 337 bp, Zea Mays
aaagaacctacccttctagtgaaatggacagtaacctcttcaggataaaggaagtgacctcctctgtaaataagcaaggcatagaagtcaatggttcaactaataatcctacaaatggtggctatgaaatggtgaaaacttccacagggaccaaagatgatatctttggggatctccctctcctcgaattagaaagctccaagattatgtttcggactggtgttcatgaacttccaactgttatagaagaatcatttataacaaatcaaaccgaagcagattctataccagaagcagtacccttgcggctgattgatgcatctgacatcactgctca

SEQ ID NO: 189268 - DNA, 3148 bp, Zea Mays
attttaggctctccaatcctctccgtatttgtttcttgcaaaatagtcgatcatccatacccctatccctatacctctcagctttggcttcccccgccgcctgctgggtcgcagatgagctcctccagtccgctcccctgcgctgcagagacaagccttgctgggttggaggcggctcctcatccactcccccgcactgcggtcggtcggaagcgctcccatccactccgtatctgacttccacccatcgctccgtcggaggcgcctctcgagggtgacgtgaggcgtgtgagctctcccgtttgcttcccgccctggctcaatcggaggacggtggtgcgctcgaggtcataggagatcgaacagatggtgatttgacgaaggacacgaaggttattttacactcccgattgctataatgatcaggattgtcactttgtcagacatttctgattctatatcctggaaattgtttggagttttggactacggcttataagaaaactatgattacattaaatccgaattttgtataagcggtcgcaaacgtgccttagacttcctctgatttttgtaagaacaccttcaacaatcaacaataaaattaacttgctaactcatgaatcatgattcttttaaaaaatgaaattagagtaacttaacatactagtatatgtaactctctattctaaattaagagacattttgagtattctagatacatagtttttgctatacagatatacatgtcaagcgaatgcaaacgctatttccacttcacaagttaaacataaagttaagtatattttcactcattacggtaaagatgatcacatagtacatttttgctttagactagctaaacaacaaagaacagaaagtgccatgactgtctaatttcagaagggcttttatttctcttgagactgtggcatttttatttttgcatagggtgaaacaaacaccattatatgagatatgatactagtggagttaaaatcatttttaggtttattatttatcttaaatttgtcactaccaaaaggtctaacatatgggtgcataagtcttagaacgagcataaggatcaaacctaaattagttttatgtgagagggagcttgttttttgttctaaaatttgggtcaagcttttattttccatcttcctttaaagtatccaatatattttaaaggggtgaatgattatcacaagtgttattcttatatttatcttttttaccacaattagagtacaaaaaacctcatggtagctatattttttagttgatgtaatgtatcttaacatcaacatctttcaacttcaactcaatgaatttacatttatcatatgaagttggtttaacaatagcacaaacatgtttctcattttgttcttttcagttttaagttgttctaaagtaggaacatgcacatccattgttgaagtaagtttggataaattaagtcacatgatttgcatgagtcatctttagaaatcaaagttttaagtcttgcagtttcagcattttaagatttaatcaaagtatcatatttcttaatttttttatttactttctctagtgaagtaccaggttttttaactgcacaagctacatcattgtaacacgactctaatgcacgacctttacttacgttgtcaaactcgctatttgtggagctctttttacttgccgttaaacactttttacttgccgttaaacacaatccactcaaatggttcttacttttgggagttgcaccatcctcattgtttgtgtttgtgtccacatcactcaaattgatttgatcaaagaagaacatgatgtaccaccttgtggttcaagtagtctgttgttgctgaatgtgtttttttgtctcacttctttcaatttctttttcctgttcaccttcacccctgtcaatttactagaaactttgggcttttggagggaatatagttgagtggaccacactcaaaacacctttgaggatctccacttcttttatcattcttacattctttaaagcttcatcagattgagaagagaagtgtgctagttcttcttctagaaggtcctcaagctattcattagttagtgaagacaagaatgataacaaaaaaactagatggagattcaatattagacatgctaggttgagagatcaaatcaattgactaattattattatttctggccaaaatattcatgagttttcaatttaggttaacattagtaatataagtaactttcctctcctatatagacatattaaagctcgaagtaattgacgtgcatttttcacattagtataagtaacattgatatcacataggtcactaagaattttattatagtgagcaaagaaatcatctaataattcatcagatttcatctcaaaatgcatttaatcttttttgtacatgtcttggcgtacctctttttttgaagataaaccctcatgataatcaggaagtgctctctgtactcgatatatggatttatgatgcataatgggaccaaagtcgctccttacaagaattaagtgatgggtttcttgccatgatattaacctccacttgggccgtgtccatggctcttatctcacgttctcggacacctaataaggcttatataccttctcccatattgcaaagccctaaatttgaatataagatctaggttccatttcgctattgaccatgtttcgcctcaaaacaacacttgcacatgaacaaacacacaatcgtgttcgagcataagtccattgactcaattcaattaatccgcataccacctcaaatgtgtgtatcatgcgacaataacaaatcaccatgctataacatgcatatataagtaatacatgcacattacctataccaaaattttaatcattttgaaatatcaatttcatcttaaataaaattttcatcacttgatctcacattacatcaacctcttatgaagacaaatagcttgtcattaatcaagatctgaattgttggcacaacgttcctctttgcttggcgacctctcttaatgataacttcccaaatttctacataatttgaaatttgattgaatatatttttttctcttgtgaagatatccaaattggagccagtccattgtttgttttttctctgga

SEQ ID NO: 189269 - DNA, 679 bp, Zea Mays
agtgaggtgtatcaaaaagtacatcaccaggttatttgccaaatagtttggaagacgattgtctattgatttgatagacaacagtagacatagcttcacccaaaaccgagaagggacaaagaatgaaatcaagtgtgtgatggcttttataccatgttactaaccttggggatctaagaagatgagcactccacaaatggagatgactatatatagactcatggcctcatgggccacatgtgcttatagtataagggccttcatacacttcgggcgtgatcagttcacttctctgccagcctggctcggatatgggaaccaagccgcctggagccaggctaaggaggtgcaacacgagtttgattggtttgttgtatctgttaagcgaggtcagtgtgagatcttgattggttccctagttgtatgagaaaattcaaataaattgacacatgagctcgtgtttggttggttgtttgttgctggtgtcatccactcctgcatggagtggtgaacattcaatcaactcccccaacaattacaatcaagcaagagaaatataagcaagtaaagtataaataatgacagcttcaactacaattaatagatctttcactgacacacatctatgagtatcaagtaccctaatctccatctttttttaccggagtataatggcttc

SEQ ID NO: 189270 - DNA, 364 bp, Zea Mays
cccgccacactatgttgtggtccaagttttagagatcacagacagtggttgtgaagattgggagatagactttctagttgaggggatcataactttgcaggaggcaatgaacgagttggtcctttggcatcgacgcgacatcaagtttggtgatgagccgatcttaagccgtctatcgcgtcataagtcacaaacgccgaattcaacaccaatgcaacagaaagatagttcgatcattccataccccatggtgcaggaaaatatagcaccgacctccacaaaaaccgttgaaacaatcatatcacctcttgcgaagaaactcgacgagggggacgtagacaaaattgttccccagaatgtcgac

SEQ ID NO: 189271 - DNA, 312 bp, Zea Mays
cgttaacagatcgacggccagcacatcatcttccccaacgggtctactcgccgacgcgcaccagggaaaatacgcggtcaccgacgacggcggaaatgccatcggctccccactaccgaccgcctttgctatcgctctcagatcaacgccggggtaatggtggcgccgcgccccgccacgacgagctagcaatcggcttcaacagtggtatgcacgctacgctaatgatggtacgccgagcaggtgcgagggaggggagtcacttaccgaagagctgcccagccgtcgctgcttccgataagtctacgtgcg

SEQ ID NO: 189272 - DNA, 382 bp, Zea Mays
cttcactggcttccttttgaatctgaattgcctctgcctcgatgcgggtttctggtacttttaggcatttgcggagttgagacacatagaacacattgtgaatatctgacatggattctggtagctcaagacggtatgccgcgggtcctattcgggaaatgacagggtagggaccgacgaaacggggtgccagttttcctttcatctggaaccttttgacaccacgcatcggggaaaccttgagataaacaaaatctccttcctcaaatctgagttcccttcgcctattgtctgcgtaacttttctgtcgactctgagcttcaagtaacctcctgcggattaaagcgactttttcttcggcttctttaacaaagtcgggtcc

SEQ ID NO: 189273 - DNA, 866 bp, Zea Mays
attaaaatcttctcgatattcaaattaaatagcgagtggattttagcccttacagggctagtttggtgaatagcaagggatttcttatccatggatcctctctaattctcttgttaccaaattggctctcggtctcctttaatcctctcgctcccaaacaagcactaatggttcctagaagcatctacaatacaaccattttagaatacacatggaagtcgtttgagacttacaggaaaagcataaatatggccataggaggggcaagggaattaaatccatgttatttagatttgtttatgtattctaagtctgttctaaaaaaatatgaaatctcaacgtaaaaggtatagtaggtgaatagattcttaaaaatctacatagtcctctagttcaacccataatcttttgtcccctaatatttttcacattcttagcatccaaattttccaaaatattatccacatggcaatttataggatgaatcgttgtcttttctatttggaggcctctcatttcactcccacacgatggcaccttccaaggacgactagggctaccactgtgtccctgcgccacactccggctcaaccatctataatcgccgcacctcttgcctatctccccttcaatgctgcttcatcgtccaacatccatgttcttcttttccatctaacggtaccctccttagcacatcccgcctcacacttcaatgttcggtggagtgggtatgactacaaccacgacgcttgcgcctagtcgggcgtaggatctccatggcaggacgtaccccctgccggtgatgacatgttgttgaatcggttcgtctcaatgggcagagcggcatccctcctgctaggttgtca

SEQ ID NO: 189274 - DNA, 424 bp, Zea Mays
ctttcagtccggttgtcaaacctgctaccattcgtacagtactcacagtggctctcttccatcgttggcctgtccatcagctcgatgtgaagaatgctttcttgcatggcacccttgatgagattgtctattgtgtacagcctgctggtttcgttgatagctctcggcctgatcatgtctgtcgtctgaacaagtctctgtatgggttgaaacaagctccgcgtgcctggtacagtcgttttgccactcacattctctcttttggctttgtgagtgccaaatctgacacttccctgtttatatatcaacatggccatgacacaatttatttacttctctatgtggatgatattgtgctgacagcatcttcagcctctctgctccagtgggtgattacagctctacagcaagaattctctatgac

SEQ ID NO: 189275 - DNA, 710 bp, Zea Mays
taggattgcctaggcaaccttcatatactactggatttgggactgctttaaatatagagacacttgttgctgccgcggaacaaagagatacaccaattgaggttggttttgttttctgagtttcctcttttgggttaatacataactcatcccgtgctaatagacttctcttaacctagacacctccacctgaagttcaggacaagattctttttatgatcaacaatatatccatctcaaatatggaagctaaggcaaaggaatttaatgaggtcatacaggaacagtattatacttggtttgcacaatacatggtcatgaaaaggtatcattctcaattactgattttgtatagatttgtctgacaatgctgaggtatacaaatcactgctcatcttaacagggcaagcattgaaccaaatttccatgatctgtatctgaagttctttgataaagtaaactcaaaatccatgaacaaggaaatactgaaagccacatatgagaactgcaaggtttttgttctctctaatttgtctgccctgtttttatttttttgctagccattttgtttaaacttggatacttttgctgcaggtcttgttaagatcagaccttatcaaatctagttccgaggagcgctccttgctaaaaaacctaggcagttggttgggaaagttcaccattggtaggaatcaggcactaagggctaa

SEQ ID NO: 189276 - DNA, 500 bp, Zea Mays
gtttgggggagaaatcgcaatctaagctggcgcctaaggactccacatgcttcgtcggaagcaaaagtggaccagctgggatcttcttctggagacggtagcactccaggtaacatgatccaacctgttccttctgggggtatggaagttgagggggggggggggggggggacaccgtctattctgccaaaagtgcggtgaagatggtcaccacgcacgaggccccacatgacatctctccccgcctcaaaaggcagctcgtcctcgagctggaacgccggaaacttggtcatgaaggagtcgacgtcttcccatgtagctgacgcaggggactgatccttccactggatgagcacttggcgtatgccgcgggcgactcggatcttgacgacgcgttcgggttcaggggtgaccgcaccatggtgcaggaccggcaggggaggtgttgtcgctggtggagtgccatggaacttcttgagaacgcccacgtggaacacgtc

SEQ ID NO: 189277 - DNA, 288 bp, Zea Mays
atcgtccgtgagctccgagcgtgagggcgagaggcgtcgctagctggctctcacggccggcaaatctgcgatcaactgcaggtgtgtacttgcctgcaactcatggagattcagcatgcatcgcacagtttgcttgtttattcttctctaaaaattggtcgtcatgggcctggtcaactcgtcctgcagactctgctctagcactctgcaggctctgaaactctgcgtctcatggccaagattagttcaccgtatcgatcactgctgacctttcgaccttgaatgcag

SEQ ID NO: 189278 - DNA, 1801 bp, Zea Mays
ctccgtcgtgcgagcgccttctcctacatcccgacaacgccctgcacctcccttgtcacgcagacgctcccctccactaccctacgcaacatcgccatcaccttcaacctggacattggtgccctaagtgcagcccctggccctccggcgggcacctccttccactatgactagcacgactctaacgagttctaggcctcggactccactgtgtcgtcttgtctgcaacctcgttcgccccgagcaccgtcggtaacttccacccctgcacgaccacgcgcacgcccactggcgtcttcggtgctcccatggttgcgcgcctgcttagcatgtcggcgagccttccctcatctgcaaccccagtagctcccgatttcccccgcccgcacgcggccctgactattcatggcattccttttgctgtcgggggccctgcctttgccatggccgctttccctagtagcacgaccctcaaggacgatgcgagccttcttgcacttgctccctcgatgcccctccttcactccaccgtgtctcccgtgtctccctttacgatggccagcttctctgaggcacactcgcggtgttgatcgggtcatgatctctgttctccgtgactgcatcgaggtccacccataggagggccgccactctactgggttgcttgtgttccccagcgtcgcgatcgcctccatgacgatcgagaccttgtggtctccaccacccatgtcttcgctgtcccctcctcccatcgactgggttgccgactccggcgcctcattccacaccattcccgacccagagtcgtcactttaccccatccccatagccccacctttcctgcctctattattgtcggtaatgggtcaactctgcctatcacctcagtaggtgacacggtccttcctggttctttgtacgtcaacaacatccttgttgcccccaacatcatccaacaccttctctcagtctgtcgcttcacacaactgctgctctatggagttcgatccctaaggctcaccatactacatcttaccactcgtgctgtggttgctcgttgcgacaactcctgcccctataccacgttcgcttccccaccccaccttcctccgcccatgttgtccaaccctacgcccttgcctccacttgcccctgcctcgacttggcaccgccgccttggccacccagaccacgacgtcctctctcgactctcgaccacgccgtccattcctttcccttgcgacgacgccacctcgctttgccatgctgtcagcttgggcgtcatacttgcttgcccttctcttcctccatgtcccgagctactcaccccttcgacctcatccactgtgatctttggacatcccctgtccaagcattttcggttaccggtactttcatgtcatcctcgatgatttctctcattctttgaacttttcctccgcggctcaagtccgacacacttcttcacctgggtctccacccagttccgtcgtccggttcgtgccatccgatgcgacaacgaccaagagttcgacaactccaccactagtgccttctctctcccatggcgttcagttgtgactctcgtgcgtgtacacttccctcagaacgatcgggccaaacacattattcgcaccactactgtcatgatccgctgcctcctttttcagacgtccattcccgcccactattggcagaggccctgaacactactgctcatctcttcacccgtagtgacctggacacgacgtacctcctctacgtcgacgacatcgacttcacgccctcctcccccgaactc

SEQ ID NO: 189279 - DNA, 487 bp, Zea Mays
cgcccttcctcgaccaccgctaacaccacgttttgaacacaaggcctagaaccctcaaagacacaagaattacgatgattccaaacctgccaggccactaggatgattagggaattgagtcctttcctcatgtcctttccaacactcttgatgctttggctccaccagtttgagaaatgcgtgcagtccagcaaaggggcaatggggagcagaccaaacttgctgaggatcgaagtccagacttcacgggcaaaaacacaagagatgaggatatgttgaatggtctcgtcggactgatcacaaagagggcatgcaataggatgaggcagccctcttttagcaagtctatcggttgtccacactctgttcttgattgccaaccaaatgaaaactttgcaattcgaaggtgcccaggccttccatactcgcctccaaggggcaaaggttatggacccagcgaagaaggcgtcataggcagacttgctag

SEQ ID NO: 189280 - DNA, 457 bp, Zea Mays
gaagaaggaaggcttataagccagtagaagctatgttggctggccggtatggtcataaaaatgtgtaagccgtgacgacgacataggtcgcgtgggttgtgtttctttggtgcggcccaagtagctgccaggaggccgcacgcttcttatcctgacccagcttggctttagggtcagtctcccttgctttctctgcccagcgagccctcgccctctagctcttcctgctagcgtcgtcttcgtcccgtgctctcctgttcatcgtcgatctcagccatctcaggagcacccgctcactcccagacgcccgcgcaaaggaatcccccacgatctccctccaaactgcccactctctccacgatctccccctctagctcatgatccctctgcccgcctgccacgcccacgggcgcaacaagccaacaacccacactcggccccgctacctcaatctgtc

SEQ ID NO: 189281 - DNA, 679 bp, Zea Mays
gccggtgcaaggacctgggagggctggcccgactgagaagaggtagtgtcggtgggagcaaccctcgaaggtggtgccgtcggtgcaaccacgggggcaacagaacgagtacctacaggtaaaagacgtgtttcgatggatgaaggcatcagatccatctcagacaaaaaatcaaaatcattagttcgagggggcaaggctgcgaaagggaagcaagccttatcaaagacaacatgacgagatgttaagacccgatttgtggatagatcaagacaacgataacccttatgctcagtagaataccccagaaaaacacacctagtagagcggggagcaagcttatgcggcgtagtggcagcgaggttcggatagcaagcttatccaaaaacacgaagccgctcatatgtgggaggtgtgttgtacagggcagcaaagggacaagaggcgcggacagttttagtgggaaggcaattgagaagataagtggatgtatgaagagcatctacccaatagcgaggaggcatggatgcttggagcagcaaggtgcggatcatattgttggtggtgcggagcatgcgttcggctttaccgttctgcggcgatgtataggggcaagacatacgaagcttcacaccattggtgagaaagaaggtccgggtagaggagttgtcaaactccc

SEQ ID NO: 189282 - DNA, 285 bp, Zea Mays
acatatacggcacaccaccacagctgtcatcacttccagtatcatcttgctccaatcagaatctagggtcaccagttaaagtccagcttagctcatctcagtcatcttctagctctgcaacagctaacaagtcaagattgaggtggacacttgagcttcatgagcgttttgtggaggccgtgaaaaagcttgaaggtcctgaaagtaagttggtcattctgctttatctctcacatgttttcaggttatcttaataaatagtttgttcatatatttacagaagca

SEQ ID NO: 189283 - DNA, 585 bp, Zea Mays
aaattcttcatgctcgaacagaaactatgatcttgggtctgattgtgataaagctaaggctcgtatttctggttgctttaacggagatgtgagtcatcatgttcagaaggatagggactttctgaaagataaacaagatgtgatgaacgcatgtcttataaacaaaggttctggatttggtgctagaaatttccagctgagtcctgaacataaagtcaatccagatgtcctttcatcacatgacaacgatggtcacaagcaaccaacagttcgtcagaatgggaaaacacagccccatttcggttcaaaccaaggtgaccatgcaaatttgacttatgggcatattaagcctggtaaagggaatataccaaataaggaccagaaaacaaatccatctgcagtcaaagcaagcaagcagcagccatccttaaacaatgcatcaaatggtgatgcctcttacaaggcaaggcaaatagaaaaggctgttattgaaaatttggacacgaggaagcacatcactctcaatggtgatgcttcaaatctaacaagtgcatctgttctactgaaggaagctcgagatttgaa

SEQ ID NO: 189284 - DNA, 343 bp, Zea Mays
ggaatatgtaaatgtggcagtgtcatatgggcatagattcgaatatgttttttggtagtgtacatggttggatctcttcgctgctgctgctatgctctgtactgcctaggtctgattaatatgactagcttatatgcagatatgttgtcaaggtgttaatacagtttgcactgtttcttcattaggtacttttagttgaagggtggttgatgtatattatgttctacacgggtagtgggacctgtctttattacattgaaggctcataaaccattttatcttgtctgaatagctattgagttttaaccactgtgttagattgagtgcaccattgtgttgtctg

SEQ ID NO: 189285 - DNA, 385 bp, Zea Mays
gacaagggcaaacagataagtttgcatttgttaataggcacacaacagtccaaacttgatatttctgatacgagagacctccaaatctttagtcattcactccacccttatctcaactcgagcacacaagtgaagcacagtagggagagaaagatttcttcactttccaacccaatcactgaaatcgactgaaacagcactgctgctccactccacccctctctgtttagtgaatattatctcacaatttcacatggcaagaaatctcgcatacttaaccaaagacattctccaactataactctatcatttttgtacaacacccccaggctgaaaccacacagaacaaaagctatctggcaccaaggtagggccaaggtactga

SEQ ID NO: 189286 - DNA, 347 bp, Zea Mays
cagtagtgcggttcctaccagcccgaggcatcaaggacgacccggcggatcggcgggtggacaaccgcgccatcgaggaggtgaaggcgctcgcggcgaggagcaggaacatgcaagtccgggaggagctcgttggcgacatggagaggatcgtcgaggtgctgaggggtcttgacaaggccggctatgacctggtcatcgttggcatgaggcacaggtggtacccggtgatgccggcgaacgggctatcggactggagcgagtgccccgagcttggcgtcatcggcgacctcctggcgtcctccgacttcgacacgccctactcggtgctcatcatgaagcaacag

SEQ ID NO: 189287 - DNA, 294 bp, Zea Mays
cggccattgaaggcgagttttggatttggaaaagctaaagcatcagagagattcccattatagacttggtctatcatgcccggaaaagggttctgatgtccctgtcttgttctcatcacctgcttgcatccaatctcaatccaaatcgacaagaagaaaaacgataaactcaagcaaccaaagatctcagagcataaaagaaagaagagcaaagaccagcccgcagcacgaatagaaggatgcaaacaacatagtggagagtatcgcatggaaggcgcggctgccgtcggcgag

SEQ ID NO: 189288 - DNA, 382 bp, Zea Mays
atgcgataggtagcacaagtctagtgaaaaaaatgacaaacaatgatgtgatgcttcaacattacttcagttctttgctcacatatttggcttactattaacaattgaaaatgttgcttcatttacacaaaaagaaaaggtagcttagtaaatgttatgcaaggcaggagcttgcacaattaaggtatctcgaatctcaatggcaacaaagttaatcagattgccttttgagttcattatccttctcgaatttgctatgtttcctgtttatgttctgatttaggtcgttatagttgttgttgtgaagttgtggtgtatagttgttttttgttcacataataacgtaaaagtattggagaacagcacacaaccgcctctaaat

SEQ ID NO: 189289 - DNA, 497 bp, Zea Mays
actcacctgtgattatttcatctgtttctgcttccgttgctacccctgctgctggagttctgtcggcttcagttgctatccctcaacagtctgttcctgtatttcgccagcctttaggtgttcatataccacatctcccgatgaattatgtcccttacaatcagtacatttcaccattttttattccaccccctacccttcacccttttatgggtaatgctacattttctcagccaccttcaacaggggtcatgtacccaactcctggaaccgcaagagttcttccacctgtcaaattcccagttccttcattcaagcctggtgctaacattgggagccaggcatctattggagttcctggttgctatggaacatatggttctagtccatcggtttacactaataacgcacccgtgtcatctggaaatctagcagaaaatgacaatgttacttcatctcagttcaaggaaaataacatctattttgctgggctccag

SEQ ID NO: 189290 - DNA, 328 bp, Zea Mays
gttgatgcctcctcatctcctcagacgttagtttatcccatctcagtgaccgtttctcgcggtggatccgccgatgttgggcccgcctatgtcaccgtcgttgaacaactccgatgaggaccttgagtgggatcctaactggcggcgtaggcattggttcacttgtccatctttctttgtttgggcactggtgcatgcgcggcttaggcccaggacccatgtatctacgactaatggcggaccagttgatgccttggctcctccgatcgcctcggatgttgagctggtggcgcctgggttctcgccccctcggctgatgctgctccgg

SEQ ID NO: 189291 - DNA, 335 bp, Zea Mays
tttttcttgttgttcttatgttgggtacttgcatgtgttgctacttaagaagtttgatcaaattcctgtaattgagctatctgttggttcagctacgtttttgctctttttgcagctagagccttgggatctcatagcaatggggactgtgaagttcatagtgtctattggaagtgcatatcactgctgttcttcaggtcccttccacaagattgctgtaggacttatgggccttatttaattggactaatcatggataggagcattggtgattttcttcctttagagtgtgcagaaatactattcaatatgagcttcttcttgctaaaaagccc

SEQ ID NO: 189292 - DNA, 617 bp, Zea Mays
gtctgaaatctttcacattctgtgctctctcccttttaggcaaccgagtgatgtagtgtcaagggccttagagtctagggaagggggccctcggctacgtaggtcgtaccctcggtccgtcttctccggtgaggttttacccctcttccgaaggcttgagagtggtagggagaatggaggaaataactgtgttattgctcgtctctcaaaggagccagctacaaggctttatagcctacggtgtaacaaaaggggaaactaatccctctgatttaggatctctactaaaaggaaactgatctctatgattatttcttcttctagccgcccttccttctatagaggtggcggctgcatgtcctttgattctttccttcttctagccactgatttcttggctttccttttctgctgctgacgtggcactggctgctgctctttctgcagcgcgcctcccgtctcttgcgcgcctccgacggttataggggaggccccacatgacatctctccccccctcgactggcagctcgtcctcgagctgaaacgacgggtgcttggcgctgaaatcttcccagtcttcccaagttgcagcggaggctggctgacccttccaacgc

SEQ ID NO: 189293 - DNA, 289 bp, Zea Mays
gtggaatctacctctgcagaatttttgtccatttgagaagatatctttgaagtttaaaagattagctaagtgtttgcagtcctggggtcacaaagaggtggggaatgtcaatgcccggttgggtcttgcccgtgaggttttgcataggctggagatggcgcaagataacagatccttatccagggaggagctttggctttgggggcagctgaaacagcattgtctggtattggcgtctttgcaaagaactattgcacgtttgcggtccagaattcaatttttaaaagaa

SEQ ID NO: 189294 - DNA, 288 bp, Zea Mays
aaaaagtagcacgcggataaccataacaaaggggacagaaacaaagcacaaaagttgtaggccccagtacaaaagggatagaatcaatgactgctgctgacgcacactacactactaggtactaaaatattagaatcatcactgctgactcggtctactaggaaagacgatggattcttgggtaaaagcgcaaccagcatagactctcatggacatttgcctattaacacgttttggagatttacctaacatctgcttcagttgtcacacttgttcaatgtattcgga

SEQ ID NO: 189295 - DNA, 624 bp, Zea Mays
atgtccaggatgaaaaatggatttgactacatggagctccaagataatcactggatcgatgcacagcgcgaccgtatcaccactgcagcccagatacagagtttgtctccctttggatcagaacctaggatacccaccttacaccgggcatgagggattccattctctggagatggacgacagacggaacatactccactcgctcagcataccgtgtccagtttagaggttccttcaggaccttctaggctggcctaatctggaaagcacaagctgaaaacaagtgcaaggtgttcacatggacaacggcaagggagaaattactcatgaacaaattacaaaaaaggggttggcctcaccaagatcactgcactctatgtaatgggcatctggtgttcgatggaaggaccccctctatctccttccttcttcaagctgctgaggatgaacaggagacgtggcggctggctggtgccaaggggctttcctttttggccagccaaactacctagctcctagggctgtagtgtttttgtccagttttatggatagctttgtgtatgcttgtttctggcctccataaggagtgcttgtacctgggtcattatggccctttattttccc

SEQ ID NO: 189296 - DNA, 616 bp, Zea Mays
gctggtgtgattatagttgttcttagcgcgggtagtttgatgctgtcgtttgtgcctttgttgtactggttcggttgtgctcttgggcggcttctacgcggagtctttacgatagacattggattttttcgcacttgctgtgctaagtccggctgcacccgtgggcgacttctgcgcggatagtcttcgcgatagacattggattttttcgcacttgctgcgttaagtccggctgcacccttgggcgacttctgcgcggatagtcttcgcgatagacattggattttttcgcacttgttgtgctaagtccggctgcacccttgggcgacttctgcgcggatagtcttcgcgatagacattggattttttcgcacttgttgtgctaagtccggctgcacccttgggcgacttctgcgcggatagtcttcgcgatagacattggattttttcgcacttgttgtgctaagtccggctgcacccttgggcgacttctgcgcggatagtcttcgcgatagacattggattttttcgcacttgctgcgttaagtccggctgcacccttgggcgacttctgcgcggatagtcttcgcgatagacattggattttttcgcactt

SEQ ID NO: 189297 - DNA, 366 bp, Zea Mays
gcaccagtttttttggttttagaatttccacggtcgttgtgctccacacatttaaatagtaaaaaatgctaaaattatatataaatagggatatgacataggaaccatgatattacatatattagagtaattattgtaaatctattacttatcttatcttattcagcttgctcgattgcttaactttttgtttccaccgaatcaatgtcgcttccatgtgtcagaacttaaccagacaattgggaaaaagatggctgctgccgtactactcgattggtcgtccggtcgtccctgggggtggttggaacttgcaactcgctggtggaacagtctattgtattgtatcgatacgtcgcgatcgcggac

SEQ ID NO: 189298 - DNA, 417 bp, Zea Mays
ggcagctgcaaagaccaaatgatgaacaggcccatggtgaacagctgccaaacaggccctgacagtgttgtatatatgtggccatggtgaacgaagccaccatcattggccttgccgcccggtggccagggcggtagtcttcagttttggctctagcacctgcggctagcggctagccacatgtgtgctcaagaaaggcagcaccagcaggaccagatcatcaacaaagcctaccatctttggttggatgtgccaatcgccttgcacagcagtgcgcggagctaggggtgggtgggggactatgtgaaggagaatagaattggtgtatttggatggatctattacattgcgcccttaggtggtttatattgagtacatgacttagaagcaacccacgtatacatatgacaatctatg

SEQ ID NO: 189299 - DNA, 279 bp, Zea Mays
gatagattgttcaagtcaccggagcacggcatggacttcagccctcaaagaaagagcggcgaacgcgatcccgtcagcttcgtcgaacacgatgacagtgatgacgacttcggagctgaatccaccgcctctaataagccgtctgcgcattcgcacgacaggaccaaatccaagcccaagacgagccatggcagttcaacccacgcgacgacggcgacgccgttgcctccccaaagtagctccgagccaacagcggcgactgcgacggcgacggcgggc

SEQ ID NO: 189300 - DNA, 312 bp, Zea Mays
atcagccacaccggacctctggatggccgggatcggcgaagagaccctgcgccactccatggcgcgtctaggagagtccaaaggcttgtgaaccagcttagggccaagacaatcccacaccgaaactgaagctttgatcaccggcgcagcacgaaccttgcactgaactgcacgatgtccgagcccccaacacttgaagcagcgcaccgaacgtcgggcaatcccgccgcccgatgaggaggaggccagacagttaaaacacctaccccggagatcctcagggatcgatcgacggggaggtggcgaaggggg

SEQ ID NO: 189301 - DNA, 429 bp, Zea Mays
gctgagcatcttacggaggatgtggtttctgtatttccggcagctgatgctttggagcaatacgtaatgtctgtgatggcctccgtcacgggagatgatggtttggatagcctatgcagacataaactagttccatatcaggtcagcttaaccttcattaagcagtattaaaacttagataactgcaaagcaacccatttatttaccctacattttttgccattttatcaatcaatgtgtggtgcacaacgaaagatagataatgtgttatgtatttaagtgcattgttggtgtagtgttgtttatcctaattctctgctttctttttcttagattgaaagtaaatctggtacattagttttacgctgggtaaatgggcaacttgagagaattgaaacttgggttaaaagggctgctgaccaagaggta

SEQ ID NO: 189302 - DNA, 393 bp, Zea Mays
gtagtgctctcatcagtttgtatgctagttgtgcgaacatggagatggcagaaaagctatataacgaaatgccaaggaaggacttggtctcatcaactgccatggtttctgggtacgccaggaatagaaaagtcgagattgctcgctctatatttgatgggatgccagagaaggatgttgtatcttggagtgccatgatatcaggatatgttgatagtaaccagcctaacgaagcactgagtctgttcaatggtatgcaagagtgtggtatcaggtctgatgaaattaccatgttaagtgtcatatctgcatgtgctaatttaggttccctcgataaagccaagtggatccatgccttcattaagaacagtgggttgaataaggtactgcaca

SEQ ID NO: 189303 - DNA, 345 bp, Zea Mays
gtagtaacccacgagtccaatgaagccacgtaaacccttgaccttcgtagggcatgaccagacttagatggcctccaccttgttcgggtccatggacacgccgccatcgaagatgtgcccgaggtaggagattgatggtgcgccaaaggagcacttgctttgcttgacaaccagcttgtgctgcctcaggaggactagtcgaacatgttgtaggtgttcgacccatgtgctgctgtagatgaggatgtcgtcaaagagcaccagcacacgaaacgtcggaggtagacgtgcaacacgttgttcatcagcgtctggaaggtggagggggtattcgtgagcctgaac

SEQ ID NO: 189304 - DNA, 2850 bp, Zea Mays
ccttgccatggatagacttctcctgagagcatatgagaaatatatggtaactccctcaaatctccaatatgaactatttctcattttatttgtcatgttagacattgtagctgtgcagctaagggcaatcacaatatagctaaaaggtgaccttaagttaacgattgcattcttaaaataaaccacaaacattgtgggaagtcaccttaaagaaaaatttcctcagtcgatctcagcttagagtgcacctaagaagtgaacttttttctctctctgtccctctcctttctcctccctccatggagcagacgactgttggttggtcacctccagaatggttgctagggccaggtgaactcgtgtacaggaagggtgcagcattagcgtcagcatgtggtccagagtggttggtgataggacctcaagctgtgtggtgtccgtctcctctagaacctgcaaatgggagagggagagtagcctcatcaaatccatctaccggcggaagtccacggatgggatgtggtcagtggtgaggacaatatagctgcaggtatccacagacaaatcatcaaattaatcactcaaccacgggaatgaggaaagagcagagacaatgaagctgttcggctgccgtttttgagaaagctgcagctgcaaatgtgcactgtgctacagcagcaagcagcaggcggctgcagcagctgctgctgcaaaggccaccagccgaacagcgtcaataattcggtgagccaatctaccatgtaacgcctgagcgttgaactgcctctgtcgcttgtccagtggcactgggacatggatcagggaggagcttgacctcgcgcagagcagctagcgtgctggatggaggccttgggtcccaaccgcaggatcgcaaggtggccagcatgcgaccctgccgtgttgctgcaggcttgcatcctgctgccctgctcgttactagtccggactggagcctgtcatgcgaggccacattccatgcatgaggggctgaaggtgtacagaattgatggatcgaatgagtgttcacagaatgggaagttggggatcgagcaagggttctgcgtggaaaggggaggttgggcatggtgggattttttttactgtgggacctgcctaatgtcctactagaaacagtatctttgtggcgtgttacttaactaatgccatctgcaatgggtcccacatttaaggtttgtttggtcgtttcacattgcggctgattggatggctgggcgcgccaagcctcgatcgctggagcctgggcggtcgggtacgcccgtttcagtcgtatggccggatgcagccaaacacccttaaaatctgttcatgtaggctatgtctcccgcatgcagacaaccaaacacgtctcgcacaaagtcaacgcatgtgatggcttaggacgagatagtgcgggcaaccaatcagacggattgtgcatgccctaatatggttttagttcatgtctattcactttctcctgatgttagtttgaaaagtatctcagcctgcttggcctggcatgcacagttacttggatggtttgcttgagatcgaacaatgacaattgttgtgctgtgagcgtaaccctgaccagtttgtgcaatgcacctgagtaatggttcttgctactctcaccttgatttgcttggccgatgtccaggactttgatttgcttggtggatgatgttcccagaccactgaaagtggggcagcttgaataatgtgtcattagttggaacttgcatcccagttttacggttgatgtccaagtgttaatgaacttatataattttataactaggaagtggaatacgtctgcactggacataatttttctttaaggaaaaatatgttcttttcgacattcgttagctctgctttctttgggttatgaagcttaatatgctttcacatgcttagctaaatgattgaccgtttcttgctaatctccaggccttctgtggtccaaatgtttcaagcagcaaaaatgtcaatagaactggcaaacatgctgctctaagttttgtcaaacgagtactagtgcgatgccaaaactacgaagaggcggggacaagttgctttgatgagcctattttcaaggacatgtttttatcagcgacgtctcacagacgcagtctagatactgcttcacaaggtattgcatcaccacaacaataactatcggcattgtctgtggcaacttgtgtttatacaacctccgtcccaaaaaggatgcaattctgagtttggttccttaattttgatggtgcttatttgttatgatagttttgataaacttcagcaatttcaacttttttgggtatagttttggtttgtcttctcaaaagggcgagagtcacactgagagagggagtatgggacctgatttatgtgcatcttatttgcagataacaatacaacagcgagaccagtccacagggccggtgcaccagacgcttcgcgaggaagcagtcacccgacggacctgtcgtttgcaaaggaggatccctggacaaacaacgtaaagcagcgggaactgttgctggacgaggttgtaggtagcataacaggaggagctctgagaacctcctcctccgtccttggtatctccctcgtcagcaatacgaaagggaagagaagcgagagggaagggaaggggcacaaccgagacagcctcaggtccggccgtccgtcgccgtccaacgcaaagggtgaaaggaagaacaaaacaaagctcagacagaaggcagccaacatctctgctccttcaggaggtctacagcttccagcgaaaacaacgcctcccagcagtgggaacggcaaggagga

SEQ ID NO: 189305 - DNA, 302 bp, Zea Mays
gtctgctctcattggtctgcaagaattgtctctggcaaactttgatcagactcttgaagacatggtcccagaagatctgttgtcggagccggcagatggtggaatgatggatatttgtgctgatgtgcctgatgccgggctagagttatctcgaacagcgtcccgtgcctcatcgaccttagagcacggtcttaagggtcaggaagctagtctggattgttctgctcccatggaagtgggtgaaggtccttcagccttagaggtggctgttacggagagctcgaccctcaaggatggcacta

SEQ ID NO: 189306 - DNA, 359 bp, Zea Mays
cagatagctacaaatcgtggcatgtgagttccttagtacgggtctgattggttgcctacatgaccccttatccaggaccctgcactgcaatttgcctttgtttggtaacctgcagacgctcatatgcaggctagcaatctagcactgtcctcaaagcaagtccagcctgcatcccgtaattaggccaaatcctgcatccagctatgcatcctccctccatgatcctctctgcagcccaagactcagtctgatgaccacttacacaagaaaccaatcacacaaaacacttacaatttcctattgagccgaaccaaacaacagctaattgcatagccttatgcaggttaaggatattttgc

SEQ ID NO: 189307 - DNA, 336 bp, Zea Mays
gcagtcttgtgtctgaatactgggataacaatgatattctgaacgaaatttctgaattccgggaggatattgtcagctcagctaagggtgtgatcgatatgatatattcagatgtctatctggagatagatgggtataataaacaacgtctttcttacatttacggcattctttcagcatgtcattcatatctgaagaggaccaatgagatagaattgagatacccagtgcatgtgcatacccataagcttgaaccatttcagtactataaggtacttgaggaagagtgcaagaaagtctgcttcattgatggcttgaactttaaaaacattgctg

SEQ ID NO: 189308 - DNA, 547 bp, Zea Mays
atccaacagaatgttgcgtgccaaatccatggaatgcatcagtttagttggtatggcagttgggaaacaaaagtttaaggatgatgctaagcaggtaatggtttgctagttccccttatattacagtatacagtcgagtccataactctttccgtctataaaagtgttaaaacattattttttgtggcctttgtactcaataaacgaaatcaaattgggttgtaggatgttatatgctatctgttctgtatctgttaatgctattgataattcattttggtgttaggtgatggaggtccttatgacactgcaaggatctcagatggaggctgatgaccctataacaagctacatgctgcaagtatgttagaacttgaaaccttgttctcaacttttttttgtcaatttaaatctttttttctcatttgatctatatgttcgcctctgtaggcatgggcaagactgtgtaaatgccttggtcaggatttcttaccatacatgagtgttgttatgccccctctgctccagtctgctcagctcaaaccag

SEQ ID NO: 189309 - DNA, 1362 bp, Zea Mays
taggttgggtggcagagagtttctgcttcctgttgggattgttctcaaggtataacctgttgccatttccttaagaatgcttatcatttaaaacaagcaatatggtacataatcatgcattgagcattgtgtgtgcaatggcatgtgctgcatggataaaagctatgttacaaactagcttagtagcttatcgtgagttatacaggttagagcagtgtgcttactcccttgcctgtccacgttcggatcctggtacaatttcttattgcaacgtccagggggcatcttcccccctgtgttcgagttctttttatataagctttgtatcattggataccttttcatcagatgcaccctgctaatgtcgtatactcagtgtgcattgtataatcaataaagagaccttgggttctctgttgatgcattccattttttagctgttgaacttcgtttaactaaatatacaatccacaaacttattttgtcctgtgctccaaggttaccaatctgcttgtttaatagaatttatgtaatttagtatgtttctgcctctattctcatctactgttagactcagtctttccattgaagtaggtatcatgcaatttgtggacttgtgtttgacttgtcacatattatgcaaatcattatgcttctacctttgcaatattatagtttagttcaaaagtattgaattattgttaatgtagctttagcgttgcatttacatgatgatgaattaccaatgacaggcccttattgatgcaagtgaccgggaaatctttacaagcttgacttgctgctacagtgataaacatggaagaggaaagggagttgtcagtactcaactaattggtgaaagggcacaaatagttcttgacgaagtcagaaatctgtccattctgactcgcacacagtgtttggtgcatattggtacgttctgcgttttttttttctgtgcttaagatgccttgacaacctgttatgccctgacattgattttgatctttcaaatgcagggcaatacttccgatctgtgatggaaggatttgaaaatgatgactatataactgtagtgtctaatgttccctttgtgtttacattgacgtacagctgaaatttgggccgtgcttgactttggctgttctacattgtttaggttgctgaagcggttctaaaggactatatttttgtgcacttggaaaataaccatgataaatttaatctattgatgtgagtttctattttatgacattatcttttgtaatttttttccattttaacctctcatcatgtgtttcttatttcatttttcttgtttagatttatgctgcagaaactttatgctctggtagatcaaac

SEQ ID NO: 189310 - DNA, 483 bp, Zea Mays
aaaagccctgcaggtcggtgcctcttggttttagcttgttgacagatcaggcattgttggacaaagtcagccacatcttgtttcatgcccttctagacaaacatgtgcttaaccttttgatacgtcccttgaataccagaatggccccaaccgcactggcgtgaaatgcatcaataagtttgatgcgtaaagatgagttgttgccaatcgatacttgtgtgccacaccctgatggaccgaataccccctggcatcaggactactaatcgccaactgctgcagcaaggattgtgcctccggatcagtaacatatgagttgagaacctcctgtagccactgaggttgaatgatagacaaagcatgaagatgaagtggagagtgcagacgagatagagcgtcggcgacgacattatcgtgccccttatacacaatctggaattggagccccatgagcttggtcattgctttcttttgaagatcgga

SEQ ID NO: 189311 - DNA, 1813 bp, Zea Mays
agacgaggaaacatatgatcttgtgagggaaggtgttgttattttcactggtgctctggccaaacatctatcaaaggtgtagatggatactgaactatcttttgtttacaagatacattcacagtactaaatatagcatttgtaacaggatgatcccaaagttcatagtgtcattgagaagttgttagatgtccttaacaccccatcggaggcagttcaacgtgctgtctcagattgtttgtccccacttatggtatccaaacaggtgtgttttgttttgtatcattggattttgggtttgaatgatgactatccattttcaacccattttttaagctttcctttttctgatttatttgattaaaatgctttattctcaatataaccaggaagagggtcaaactcttgtttctagactcttggatcggatgatgaaatgtgaaaaatatggtgagcgacgtggtgcagcttttggccttgctggtgtggttaaaggatttggaatttcttccttgaaaaaatatggcattgctgcaacattgcagaaaaatttggaagacaggttgtctactttgttacctcgtccactagtgctgtatataatgactttgtaaataaaatgagtatgcattcacctgtcacaaattttcactaaattatgttctgcagcctttgtatcttttcatgttttgttgttctctaggcatttgaatacaatttatctagagtattcaatgggaatttttgattgacaaacatcatagcgctaaatttttccatttgtgtgcagaatgtctgcgaaatctcgtgaaggagctttacttgggtttgagtgcctgtgtgagaagctcggcaaactatttgagccgtaagtgaggcacctcttcacttagaactgttgctctgattccaagtggttcattatgtttgctttcttgtaggtatgtcattcaaatgcttccattcctacttgtgtctttctctgatcaagtcctagcagtgcgtgaagctgccgagtgtgctgctcgggcaatgatgtctcagctcactggtcctggtgtgaagcttgtccttccttcacttcttaaggtatcaatatatatgttctatgctatcaaattgtaacatttgttgcatccaaatgttctggagagtacaagtggccagttcatcttgttgttatacattgaaatctgacaataacttaactttccgccgaatatttaggccatctgcaccagaaaccactagtttgtttccgttaatttgaaagagcagaacatattgaggtccatctggtaaactttttttttaaaaaaagtctacacattctggattttttccacttattgtcatttgcactgttcgcacctttatgttagttgttcgaatgaagataaaataggtattcagatactttacaaaatattatgccagccacactcatttgtaaaagctacatgaaacgaatttatttggcttgtctgatacattcaaaattttccttaaagcacatatttggatgatccttaatatgattttcagggtctagaagataaagcatggcgtactaagcaaagcagcgttcaacttcttggtgccatggcatattgcgctcctcaacagctatctcagtgtcttccaaagattgttccaaagttaacagaggtatatgacacaatttctttttgagcttataagctgcttatataacctaactgtgggaaaccctaaccctatgttagggatgggtgttgtatttatagacttgagttaattgggctggaccattacaaaggggtgagagaataat

SEQ ID NO: 189312 - DNA, 679 bp, Zea Mays
accatgtatacttgcgcccatgtagtggaatctccttaagggcaaggtcgttgattactcttctaaaacggcccatcattgccctattaatattggaattgttcttatcagcagagctatagatgaggttgaaatctccagccaccatccaaggaccatcgcattcatttctaatatctctaagttcctgaaggaactggatttttcctccctctccctgagggccataaacacatgttagccaccaggcctgcccctcagccttacaaaactggactgaaatgctatgatgtttaagattttgttgtcctgtgtgacctatgtgtctcctccaagcaatcagaatgccaccacttgcccccacagatggaaggtacacatattctgaaaaatcagctcccaacatcgacaaaatagtcctcctagtaatgatctgcatttttgtttcttgtaaacatactacatcaacctgggaagaatccaccaactccttaattgagtcttgcctaacagaggagttcagccccctcacattccataccagcagttttgtgggatccatgaaatacaaacacaagaaactactgaaaaacccgggtggccaaaaaatctaatacaccaggtcaggtggaggggtctagccaaagagggctgccaaagctttcacctggctatgtga

SEQ ID NO: 189313 - DNA, 609 bp, Zea Mays
ggtttcaaggattacacaggtaaggttggtgctgttgatacaaatggagttgatacgacataccgcctagtcgcagatcacatgagaatgatcgctgttactaatgcacccggttctcaacttggttagagcgttatgtttctgttggtcacgaatgttaatataattacgacatcaatgtatgggtttgtcatgagcacaagtacaattattggtcattttcaaggaacaatcagaccaatctgattgttggatgacttattacatgaatacattttttgtcattacattgttcttattatgttaaaattgtctttcatctttatgaataccagggttgggaaatgaaggtcgcgagtatttcctgaagtgtgctgataaacaggctgtgaagtatggctatcaagtacttaagataaatgaagaggattacgacatgtaagaacaatcacttttatttgaatctgtgctttattttacatgcatttgtacaaaaacagttttccctgtttacaagtcttatttttgaataatgtattctcacgcattataaactttgaatttcaataaaaacctttgtatggcaggatgtcttcttcaatgcaccgg

SEQ ID NO: 189314 - DNA, 348 bp, Zea Mays
atcggtgataatatatgtttgcaccttggcatgagcttcaattggactctgaaagaaggttctaaaccataataacgcatcattttccttttttgtgattgttgtcaattttgcatctagattgggtcgtcatcagggaactcttattttcttctttcgaggccaatgccatctgattcctctccaaaggaagcagcacctagcattgggccacaggcacctgtacaagacaactcaagttcaacaggacaaccaactgaaccaagagatttcttcagggatgctcttagtacctcaggaataggctatgacacggaagatgataaattggcagatatttctcctcag

SEQ ID NO: 189315 - DNA, 671 bp, Zea Mays
gatattgttggtggtgtgaatcgtgtgctcagccttgccattatgagggaaggtgtaagggcaactacattttaagagagaggaagaaggctcgaggagagttatcgaactgtcacgtgttgtcactggacactattgatgatgcacccaaactgagtggacacccaagtgaagaagcgagagagtgggaaatgtgtcagacttcaagggcaaagggaaaattcacaaatagtgagagcagtcatcaagaattaccaagtaatacttgtatcttgtaaccctcatgataggtgaggtccacaaatcacagtgcacaagatcaaaagactgcttagtcttagaggagcagctagggaagggtaacctaacatgttgacagagtagacatgcatgataaaggagctcaatggtgcccctagtacaagagatgatcgaactactagacaacttagacgatacatctggacctagatggccaaggcaacgatgccaagtggtggacgaagctgttgtagtcaatgcctgtggagtggatgaagatggtgaaggagaggaagcatgaagttgcaaggtgtacaggggtctagagctatcacatctgaggaggacgctcctagtgacaagatccttcatggtcaaaccaaaagggtcaaactccatagaacaatgat

SEQ ID NO: 189316 - DNA, 316 bp, Zea Mays
aaacatgtcgagcttggaagtgctgaatttagcccacaacgatctcgacgggacgataccttcgtctctaacgaggctgaattttctctccatgttcgacgtgtcgtacaacaatctgaccggagatatacctaccggcgggcagttctccacgtttgcacctgagaattttgacggcaaccctgccctgtgccttcggaactcttcgtgtgcagagaaggactcgtctgtgggagctgctggacacagtaataagaaaaggaaagctgccaccgtcgccctcggactgggaactgcggtcggggttctcctcctc

SEQ ID NO: 189317 - DNA, 326 bp, Zea Mays
taaaggcgggaatgggtgctttggcttcgggataacatggcgcaacagatccggccaacaatttataggagcgctaagcggtggtgtccaattttgaaaggggagaccggcgtccgagaggagaggtgagtcaccggcgtaaactattgtggcgcttcccggggtaatgcctccggtgacgaactgacctcctacggatatctactgcgatgtggtacatcttctaagcacgtggcgcagttacaagccagcaaactccgactaggacaccactgtccactgcacggcaagtgtcacggtgaacagtccggcgataagcctctctc

SEQ ID NO: 189318 - DNA, 721 bp, Zea Mays
ctccaataaatatggatatcttaaaaaatcttcccaaggtgtaccactgttgggtgatagtagtcattttgcttattcgtcatttgattcagctagtgatgaagtttcaaccatctttggagaattagatctggaagctttgagccgtttggatggcagaaggtggtcaagctgtaaaagccaggatgggattgcactgtctgtgagtggagctgatcatgtagtttcagatcacagaagcttgagccaaaaatatcgaccaaggtcatttctagaaattgttggtcaaaactttgttgtacagtcacttagtaatgctatcgcaagggaaagaatagctccagcatatctgttccatgggccccgcgggacagggaaaacatcttctgcaagaatactttcagcagctttaagttgtactgctactggagagaccaagccctgtggagtttgtactgagtgcagtgactttttcactggaaatggaactaatctaattgaggttgatgctaccaacagaaaaggtataaacagagtacgccatttgattgaaaatataccagcatctgcaacttcttcacggtacaaagtatttgtcgtggatgaatgccatatggtatcttctaaagtctggtcggcatttatgaaatttcttgatgaaccattacctcgcgttgtcttcatatttataacaatagaccctgaaaatcttccccgttct

SEQ ID NO: 189319 - DNA, 1090 bp, Zea Mays
gccccatccttaatatgccaataacagagtctaagagacagagagtgttggttgcttcctctattctctactcagaggtaagttccttttgcattatcacttaatcatgtaatctgtttcaatgaatttgaagtcatgcgcctgagtagactagtatactgaacatagagttcctttttaacttcttttcttcatgcaagtgctacggattgtatggccccaacattaccttttttatttctggaatttgttggtgattcagtatgcaactcacatttttgaaatatatttccttatccgttgtcctagtctgtttcatatcttcctaattgagttagccctgcacctagtatgtagccttagccttgcttagaaattcttggaacaagaatcaatcttataaagcgctttgcctaccaaactcggctatgatcggagcctcttctcaatgggacaaggctgtagattagatggctatcatccattttcttgatgtgacatctgctatatatagtgtttatcttcaatatggcaatattatgtgctaactgctaacatgcagagtatgctcatgcgtccaccttccttccctctttttcattttgatgtcatgtttgtgtacttttcaagtgaagatttccatgatgataaacctggaagtttttcgtggcctgctctaaatcccttgacttttatgctatacattcatgccttttgctcatccatttttttgccaaacactattattattaacgaatccatgaaaacattgtaaaaaatgagcataccttattcattttttaggcttctaatattttattcatgtatttttgtaatgatattattcaaggaatataaagaagttgtttgttagtcataagagtttgtgccacttgcctatttatccttgatgcaggtatggcacgctattggcagggacaggaaacccctaaggaaacaatacattgagctgattttaccaccgtttgtagcaattcttagaagatggcgaccccttttggctggtattcatgagcttacttcttcagatggacaaaatccactaattgctgatgatcgtgctttggcg

SEQ ID NO: 189320 - DNA, 399 bp, Zea Mays
ccccaaagcgtagtgatgatgttcatattttacgggtaatgaaatgcaagaatctttatcttagcctagttccacctaatgttggatcttccaaaggcattgaatcagagtctgactaccatcctgaaagaagcgcaatggttatggagacacctaagaggggtccttcaactccactgcgtaagaaggaatcgcatcactttgcttccaacaatggctcttcaatgtgcttggatccaaccactgcaagatcagcactagcagatgagaaaatcaatgagttgttgcatacttcagcattgtggtggctcaatggtagacacttgcttaaaggaaactttgttcctctctcaatatgcggaaaactgtctctatttgtggtcatgggagcagaaccag

SEQ ID NO: 189321 - DNA, 2289 bp, Zea Mays
cttcgccctcgacgccgccggcctcgatcaggccccgccgacggaatggtacgcgctgcaatttgcttttcttccgatttttttgtgctttgtttgggtagtagtgtgttggggactgcctcgcttgatgagggcgccgaaatgcaggctcggttcggggtgtttccacgccgtttggtgtgatcgtttagttgaagcagttgacatttcaataaacacgtcttactgaaccgggcataatttcgggaaatggtggacctaggatacgaatgtgggcagccttttgttgtccttccttcttccgaccttggttgtgcaatgtggtgaggttggggtctctacctcagcccctcatactgtcttatggtggattccaagctgttcttctcactgagacactcggatcatctcatggaacttgatcaaggttttgtgaaactgctgggctagcattaatcaagaattgttaggaccttcattctctgtttggttcattatttgtgcaaaaatgggcacctaaatcatgggacaatgtctatggatgctttatatatacttctttcttcacacttttagtatttttttttctgtcaactagaatcttagtttatgtgtagggctggataacgagctaggttataggtagagctggataacgagctagcttgccacgttttggctcgttaagataatgagccaactcggcacattctaacgaggcagcttgactcggatcggctcgttatcttgacgacctggaagggcagctggtctcatctcgtttacgagctcgagttggcttgttaatctcacgagccagatataaaaataaacaaaatataatattttcattttacctaaagtttgagaatatatatgctaacatatatacaagtgtaatataatacagaactaaaacatccaatagccttaaatcaaacaaaaatatatatgctaacatatatacaagtgtaacaatatactatagcattgcactatacatcaatgatccatactctataccacatacataaagcatccatacgcccattaagaacaaagtgtaaagtcataataatcccaagttacaggatctagatcagtcatcaaccaattgtaaagtgcaagacatgaagtaattgaaaataatataaattcaagatcaataactttggcttgttaggtttgcaagccagctcacgagttggctcgttaactacatgggctaaaatgctgtctcagctcattgaaaatataaacgagccgagccgaaccaagccactaagcactaacgagctgagttgagtgagctgccgagctttgagatttttgtccagccctagttatgtcctattattaccagatgtggatcctcatatggcatttgtaagttcaaacacaatggaaggatctgatattcaggaacttctcaactatttactttctcaataaatgtttctcctcactgtatttttggattgagatattgtaggcttttccattctttattcactcatcattcttcacacttgttagtttactgtaatgacttgtcaactgacattggttgtgttcttgtgcatattctgcttcaggcatccaaagtccgctttacagtgggttctcaagtttgggttgaggatgctgaggtggcttggattgatgggttggtggaggaggtacaaggagatgaattaattataaactgcacttctgggaagaaggtcagttattagttctgtgatatgtttctctttatgtattgttttggccaccgtcgggtggttgttttactcttgtaccagtctattttggaccttatcttcttaatataaaggtgcatagctctcctgcgctttcgagaaaaaatatgtttctctttttattttctgccaaaattgacattttgttagtttatttggtcctgatggtttgtcactttctattcatgctttaccgaggctgttgcattacttttctcttaaaatttcttttttatgcctcaggttaattgtctgtatgtctcagtttgttaattcacgagtgccaatgtgccagaatatactactatagcttatactagtaaattaatttattgaagtagatggataatgataaataaaaataaataaacatattttgtttacaggttactgcaaatgtctcaagtgtgtatcctaaggatgcagaagcgaagcgctgtggcgttgaggatatgacgaggctagcttatcttaatgaaccaggagttttacagaacttaaagtctagatatggaatgaatgaaat

SEQ ID NO: 189322 - DNA, 294 bp, Zea Mays
atcgcctcctaaactgtcctcttgttaatcttcttaggaatggtctccagaaggcaaagagcaatatccactattcgctgccctcccaaccaccgatcactccagaagagggtagaggccccatttccgacctcaaactgcagggtcattttttaaaaaatcacggattttcctcaggacatgaggcagagatgaccagggtcaatttggctcagtcatttgcagccaagcccaacgcctaggcgacgccttaacaactatggacatgactcaacaatagggtgtctatcgagc

SEQ ID NO: 189323 - DNA, 318 bp, Zea Mays
gaaagtttggagaatgaaaccgagatgtccatttttagggagaatgacaaagtttctggaaaagatcaggcatcagcagagtttataattgatccttcaaatacggatgaacggagggagaatgatattgggcggcccgatgaatcagcaaaaggctgtgaaaggttaacttctgattctataaacacagttcactccaaatttggcaagtctagtaatgaagaggataagagaacacagaacaccaggtctacggatccaaaagatataaaggaatcattgggtagaattcgtgccgaaccatcaaacagggtacac

SEQ ID NO: 189324 - DNA, 397 bp, Zea Mays
tgactcgtggcctccttgccactctcagtgcctgcacccgcaaccgaaccatgtgcgccgcttcgggtctcctcgcagtcctcctcgaagtcgcagagaagctgttcgtcggaatgggtcggggcagcaagtgggacgggacgccgcttgtgcagtgcattcaagtgttgggtgggcactctgtcagtgtaagggacttacacacctggctccttttgatcaagaaggcgctcggcacgcagtgggccacgcagctgactatcgcgttggaaaacgccgtggctagcaatgaagctaaagggccggcggtgaccttcgagtttgacggggagagctccggcttgctcgccccgggggacaaccggtggccattctcgaatggtcttgggtttgccac

SEQ ID NO: 189325 - DNA, 386 bp, Zea Mays
gagagggagagagaggagagtagcagcgtcgggggagagggagaggctagcggcgtggggataaagagagagaggagagcggcggtgttgagtggacgagtcgagccgagctcggtcatgtcgaccctcctttggtgtacgaggtcgttgttgtcgctagcctccatgcccaggcggctagtgtctagaacatccgatccctagtccttatcctcctcaacacggtctccaccacctacgaccgctggtgcgacctcgtcctcatgctgcagcgctacgctttggacaaccatgttctcaccgatgcgatgtccctcactatcccatcccgacgatgaaaggacaatgtggtcctctcctagaactcggggacgatcactgtcgag

SEQ ID NO: 189326 - DNA, 414 bp, Zea Mays
cgtcggcccatgtaaccttcagccgcgcagcccacctgtgtgcctcgtgctcacgctcatgtaccatggatgaagcgcacgccgagaaccacactgtgagccaccattaccgagtcgcaaaatgtcagcaacgtccagggatccgaaagccagtcatactaccagcggcaacgatggagatcaagccaacttgtctcaacggaaaagcagccagaaaagcgatcgcgtcagctgaagcaaagcaactggcgagcaagtgggccgattgggtcgtgtatttagagcctggtgggccgaccgtagagcctggtgggccgaccgtgtgacgatataaacatgtgccgtggttttgtaaagggacatcgaataattaatgaacggaatatcaactggttgccgtcacgagaccttctt

SEQ ID NO: 189327 - DNA, 619 bp, Zea Mays
ttcatcggacattggcctcaagttcccacactgcttaaagaggcacgtgcaatcagaaagcagtgttgtatcagccaaaactatgaaggacaatttcaagagtctgctctttgcatttcctcaggtcaagtggcttaaggcactagtatctttttgtttgtactagagtagtccatttaatattttttattgctttcgccgattatttgttggcgcatattctttcacaaatattgacccttgttatttttccaggatatagaaattcaagcaggggcagcactctcttggcctatttggtttcatgcggcaactcctggaaatgtttctctttatatatctctgtattacgaaatggggagttccagtgatattaaataccgtacactacgcatgcacttcaatcttgaggtaacagattgtgtcccatatttagtttttttaggacgctatatttgttactccctctaggcccaaatgcaagttgtcgtaagattattgttgctctttccttttcagtattgatttacatagattgatgttactaagttcgccatgaaaaaaaaattcatcacataaatttctacttaaaaatgttttatttgtagaatgtcttatt

SEQ ID NO: 189328 - DNA, 643 bp, Zea Mays
gccgtcctcgtctctcggtctcgaaggtgcaatgggtttcccctcgtctggctctttgctggagacgttctccccaactgtgtccgccgcactcctctcctcctccgctttgatctcctcgacagctttggttagcagctgctcgacagcagtaggatcgggcaggtccgcgtcatcgtctacctcatcattatcttcagaaggttcggactgccctgcctcctcctcatcctcttcggcttctgttgcgccatcagcttcggccgtgccctcctcgtcatcagaaacagcaggctcattttccgcctcatcattgtccttccaatgctcattttcttcttcctcctcctcctcctccagtgcaaccggtaagctgacaaattcgtcgtccatggtcatcggggaagctgcggaggcaacactgtcgtcgtcgtccttggtcgttgcaggccgggcaggcacaaaggaaacgctgtggccacccttggtcacactcacaggggctagcggtttcgccaaggtgacactgccatcgtcctctgccaccacggcgcccacgacgtcctggaccttggctgccggtgcagccgcggaggtaacgctctcgtcgtcgtccttgatcacaggggaaactggcactgcg

SEQ ID NO: 189329 - DNA, 329 bp, Zea Mays
cttctttattataatattttaggaacctattttatgtatctattacacttcaacaaaaatctggaacttagtctttcatttaaaagcatgcagttggaaggggtattttgtcccctgaaggatcaaagaacctttgtttcatccccgaaaatcaggatctcgcctcagggaaagtatattgctacgttggatttgactggttttgtaaactttttttcacttgatggtgacttgcgcactgttccacttcaaactcttggaaaggctagacacctaattgatgttaaggacatcagttggtggacagataatgttcttatgttggtaag

SEQ ID NO: 189330 - DNA, 297 bp, Zea Mays
ctaaaatcaagggcggggatttaaagaagacgagatcactctggatccatccgatccgatccaacggtcctagcgcaacccagccaaaacgtcatcccttgacttgatcttggccggtcccggccagatcaacgactggcgtgcatctcccccctcgggccgaccacggctggcggcgccccaaaaccgcggctgagccagtgccaggatactccgccctgttctagcccctagcacctaaatcgaccggctcaacataaatcggaggtaaaagcgaaccatcagagagagtcctta

SEQ ID NO: 189331 - DNA, 392 bp, Zea Mays
ccacattcttctcaaacaccacctactccacctccaccacctccctcttcacaaagtttcccatccttaagtagaagaaatcgtgtggcagcccctcatccacctccgcctccagcaccactgtcatcccgtgttacttctgcaccatcagtaccaccttcacccccattacctcctcctaagctagccgtggccaataacacttcacagaagtcaccaacaatccgaccacctccacctccacccggcccccttcataagcttacgaagggaagtgttgccaattctaaccctcccccacatccagcattttcatttggtgcaaaggatcgtagcacagcccgctcaaaaagtcctagaagtttacgtgccaaccaggcatctaaaaggac

SEQ ID NO: 189332 - DNA, 359 bp, Zea Mays
actatagggaaccatacagaacattttctctatcgttgcattgggaggtgtgtagctctcttttcactacacgaagtcaatcttcagcacccatgtgatcagcaaagtcggcgaagatagaaggatgccctctcatgaaatcaccacgcttgtctcatggcatttgcggcatttgtatctacacttgtggttgcggttaatgctgggcctgttgcatggtggctagcgtttgcccaatagtctgcagagcctaggcctacatcaggtacatctattgtaatgtcaactacggtgggggaggtagctgctcctaggattcatcctcacgttggcggcgatgctcctgctgagcacaccgg

SEQ ID NO: 189333 - DNA, 476 bp, Zea Mays
aatttggggcactgagataagtcacttttgatgctcttagagagggaaatgaatgtgctgggccaaggcccattactacaacaaacacatcataatccaaccgccacagtcgaaactctagccgtgacaaatgttgagactgaagcgaaactccgggaacagcgaggagggaagacccttggtgaagatgttggcaaactgcgagctcattgagacgtgatggacatggatgtcccgacaacaacacgctcacggacaaagtggaggtcaatgtcgacatgcttcgtgcactgatggtagatggggttgacaaagagttagatggcgcttacattgtcgtagtatactagggtactcttagcgagggagatgtgaagctcttagagaagctggtgtagccagctcgcctcagccaccccattagcaatagcctgatactcaatcttagcactggagcgtgagaccatagactgttg

SEQ ID NO: 189334 - DNA, 537 bp, Zea Mays
atctgcccactgacgaagccagtctgttgagatccaaaaatatgaatcatctcctgggcctgcaggtgcttctgtcagaacagattttacttcttgacgcctctctgttatatatgccaaatggctgtccttcttgctttggtattccacacacaattttgtatatgatgcatttagttcattaatttcatctagaagatggtgtggaagtaaatcattatttatctccacaattttattgctttcagtgggattgacatccttagtgatacatttgtacatcagcatataagcatcggtagatgaaaacatctcccccatggtagaactaggcgctgcctcatggtggccattattattattgtttgtgacagaaccttctgtggaggtattttgggacttctgatcatctttgtttgatgcctttcctggtttttcaccaaaaggatgcaaaccaagtttggatacagtctcatcatcaaactcccaccattgcccattgctttcatcttttatatgtgccacatagtgtccact

SEQ ID NO: 189335 - DNA, 446 bp, Zea Mays
gctcattgattcgtacattaaacagtgcggacagaagatacgtaggtttgccgaagaacttggctgtaatagcccgatgcgtgttgagcggagaaaaaggaaggtggcttacgagaagagggcacaggaggctagggaaatgccggcggccagagccgaggaggaaatgctggacaatcttgctggtcatctgtgtaccagtgagtgacacaaagacgtgttgtttttgctcccaaattgtatttgtgctgtcgttgctagctacttgtctttgttaacttgcagagattggatgcaccgggaagcacatcgtagaggaggcccgtgcaagatacgtggagcagaaaatggcagaggtggagttgctggcggaggaggaaggcgacacttcaagattgagtgagcttctggagctagctgagactggattacatgtggaggaggag

SEQ ID NO: 189336 - DNA, 557 bp, Zea Mays
catgaatgtaataacagaatgtgtatatagatgtcattcttttatacatcatggctcatgccaatctgggccaacgcagggtttgctagatacattttccttttatttgctgtgctgactatcacacttgctacatgcagttatttgttgtttagtgaatggcctagttatgacattgaactcacaaggttctgttgtttggaaggtaatttttctgatgcaccttgtttttatagccagaggtaatgtgtatgcatagttgagtaagaaagaaagagctattgatgcttagaatctacactagtccatatataacattgtttcaatgagagcaaaaatgcacatttttcactctgatgttgtacatttgacccagtttttcttgtgtggttcattctccacatatttattagtgtctgtccaaaatccataacttgctatttaaaatgcaggcaactgttggtggtcctatttttgctggtgcatgtttgtcacccaccctccctcatcaggtacttgctcgtgtttgactacattgataacttgatgtgctccct

SEQ ID NO: 189337 - DNA, 2959 bp, Zea Mays
cgctgaaggattttgcatgggaatttgacaaggtgcgtacatcatagactttttatgtataacatctttgtggtgatgttattaattctaatctcttgctaccaaaatgatgtagggggattttcatcactggttggaccttttcaatcattttgattctttctttgagagttatatcaaatcaaggaaagatttgcatcttgaagataattttcttgatgtggatcccccatttcctcgagaagcactacttcaaattctccgtgtatcaaaacttatattggaaaattgtacaaatagacacttctctagtttttttgaggtcagcactttatgcgtgtcctgtttatctgcagtcatatttgtttttctcctttgtatttattttatataagataacagcataactttctggtttccttcatttccagtagtgtactgctaatttatgtatctttttgttacagcagcatctgtctgcccttctagcatcaacagatgcggatattgttgaagcaagcttgcagacattaatggcatttgtagacaagtcagttgggaaaagctcaatacgcagtgcatctctcgcttcaaagttatttgccttatctcaaggctggggtggaaaagaaggtggtcttggattagtagcatgttctctacccagtgtatctgatccagtttccactgaggttggatccacactccattttgagttctatcgtgctgctgataaatcagagaaatcccagtgtctagagaaagagaacaagttggaagtaattcatttatcgaatgtcaattcgtgcaaggaggcagatcttgaaatattggacaggttggtcaaggattacagtgtgccacaagctttaaggtttcttcttcttacaagactgagatttgcaagggcttttgactctttaacatgtcgacaccagtatatctgtatccgcttgtatgcttttattgttcttgtccaagcaggccatgatctggaagttgtatcaacatttttgaacaatgaaccagaattcattgatgagctgttatcactacttagctatgaggatgagatacccgaaaagattcggatactgggagtcctttcattagtcgcactgtgccaagatcgacctcaccagcctactgtattgtcctcggtaacttctggtggtcatcggggtatccttcctattctcatgcagaatacagtggattctatcatcaatggttctatgaaatggtccataatatttgctgaagcacttctttcgcttgtatctatgctggtatcatcaacaccaggttctctagctctacaagaagcaggttttataccaactattttgcctcttctcaaagacacaaacacgcaacatttacatctagttagtaaggcagtgcatgttattgagagcttcctggattatcacaatccttcttcagcagtgttcagagatctaggtggactagatgacactattgctcgtcttaagctagaagtatctcaagttgaggttgattcaaaactaattgaccattctaccaatgaaggaaacgaggttgaaagttatccacctgtgcaagatatacaaccttcatgttctgaatccttgattttgtatcataggaagaacttaataaaagttttattacgtacaatatctctggcaacatatgtgcctggtagttctgctcgtgttgatggttcagaagagaatgtgttacctccatgtttatgtgcgatttttaagagaggcaaggacttcggtggtggtgttttctcacttgctgcaaatgttatgagtgatctcatacataaagatccaacatgctatactgttcttgattcagctggtttgccacaagcatttcttgatgccataatgtgtggtggactttacaactccgatgcagtctcatgtataccacagtgtttggatgcattgtgcctgaacaataatggtcttcaattggtaaaggaccggaatgctttaagatgttttgtgaaaatctttacgtctagatcatatatgaaagctcttagtggtgacacagcgggagctttatcaagtggacttgatgaattaatgcgtcatgcaccatcattacgatcctctggagttagcatgtttattgaaatcttgaacactatttttaaagtgtggtgtggtgtagactctatcccctataaggaatctgataattactctgcagttattcccatggatactgatgtggtggttgctacctcacagagtgagggtgtacctcctgaggtaggatgctcaggcgaaacagttgatgctcctttagatgctgtaacatcatcatccattgagttatttcttcctgagtgcatatgcaatgttgctcgcctgcttgaaactgttctgcaaaatgctgatatatgtaggctatttattgagaaaaaaggcatagaagctgttcttcaactgtttaagttgccatcaatacctgtatctgtctcaattggtcagagtatttctgttgcattcaaaaacttctcacctcagcattctgtttctcttgcacgagcagtgtgctcattctttagagaccaccttaaaataaccaatgaactgttgggttcgatctctggaactatgctggttggtagtgaacctgcaaagcaatcagctcttctgaagccactttctacccttgaagggcttttgtctattgccaattttctcctgaagggaactaccattatggtctcagaactggcttttgctgatgccgagatattgaaggaattggggaaggtttatattgaagtcacatggcagatatctttactcagtgattctaaggtggatacgcaagatgcagatcaagatgatttggctgaggaagcttcaatttctgaaagggatagtgatgatgacacaaatacagcaccactttcaagatatatgaatcctgtttcagcaag

SEQ ID NO: 189338 - DNA, 350 bp, Zea Mays
caccagcccaatttgcgtcagcaaaagcactaacaagtaaagacgacgaccttgcaatctttaagccatgaccaagagtgtatttcacatatctcaatattcttttcactgctgtccaatgctgcgaggttggagcatgaaggaactggcacactttattgactgcaaagctcaaatctggtcgagttagggttaggtactgtaaaccgccaacaatgcttctatatcttattgcatcctctggcccaagttcaccttcaccaattctcaattttttcagaagtagagagaggtgtagtcaccggtttacaggctgtcataccagttcttttcaaaatatttgaagcata

SEQ ID NO: 189339 - DNA, 332 bp, Zea Mays
taggcagtgagatcgttgacaggggaaccgttgccatagaccttgacctgcgtgtccacctgtgttgtgcaaggcttgcactccagcatcccagcacgctccaggatatctagggtgtactgatgttgctgaagaatcaagccattcggcgatgctcaacaacaatccctagaaaatgaagaggacccaaatccttcatggcgaacttgtgctaaagggttctaatgatccggtgcagtaggcccgaggaagagacaatgatcacaatgtcatcaatgtatagaagaaggcatatagtgttactaccgtgctgatagatgaacagagaggtg

SEQ ID NO: 189340 - DNA, 320 bp, Zea Mays
tgacatggtacttacataaaatttcagagaaatgagccttatgttgatagtagtgctggatcacacttaaatggaagtataaataggccaattcaatcagatgatagcatgtcatcagtgtttgggaggctatcgatttccagaagcccaggtactgaaagcaggaaacatttttcttatgagatctcattgttatctctgcactctaaaaccagatatgtttttgtactttttgaaacagccaatgaaattggatcggatactctgcttggatgctcaatgtctggttcaaaagaaagtcctgtctcaacttctgcatc

SEQ ID NO: 189341 - DNA, 308 bp, Zea Mays
gcggttgccaggaaggttggagctagatcttgtcgcggagaggcactgcggcagggtctacgtccacttggatcttgtgaccttgcgggcgggggcaggactgtaaacttgtgcggcggccagggggcactgcggcagcacggagccacgaatggcttgagtcttgtgcggatgtgtctgggtagtggctatccaaccctacaaggccacaattgcagcccatagatgcagcaccaaatggcagcccagaagtccacaaccgcaggtccaaaagcccatctaaaaacatgtgtctaatctggtcattc

SEQ ID NO: 189342 - DNA, 397 bp, Zea Mays
tttgcgcccgggagggaacatggaaggttcttgtcttcttgccagctacaccgtgtaaagcatctcgaggcgggagggagcctcaggtgtggtgtggtgtagtgtggtgcggtcagtgggtgtggccaagagatggatgcagataaacagttcctggtggttggagggctgctgctgctaccgccaccacctttaatggacgcaggctcgacgggccgggcaaggtagtatatggcaacgagagggaggaaggaagcatgcaacgcaaaatgagcactctgattgagcagagcaggagctgtgagcagtcgtatcacgtctcgaggacacggttagttagagcatagctgtcaaatcttcaaccttttgtcatattattatagtatctctatgcaac

SEQ ID NO: 189343 - DNA, 689 bp, Zea Mays
tcggatgcatggagttttggttgcacgctcgtggaaatgtgtactggtgctgttccgtaagtagcatgattattcaattcgttatcattaatgctttgtgaatggtgttcttatatgctcattgaaatgcagatgggctggactgactgcagaggagatctgtaagtctgttgcaaaagagaagaagccaccacctcaatattcaagagtagtaggtgtaggacttcctggggagctgtggaagatgattggtgaatgtttgcagttccgagcttcaagaagaccatccttccaggacatgctgaaaattttccttcgacaccttctggacataccacggagcccacctgctagtcctgagaagtaattccatctgattttgtattacttttacgctaaaacatgatacatggaagcttaaagctttggagaacctttacctgtagaagtattatcgatcaaattatcttcgagctaaccattcctgaagattcctttacttggtggtgtaccagcaaatgttgaaatgtcttcgagctaaccgttcttgaaacatacttgcatattgttttccccgacttaatttttgacctagctacttgcttatgcagtgatttcgcaaatgaaaacttgcccaatggcatggaacctccaacaacctccatcctagagatggttcgttataatcc

SEQ ID NO: 189344 - DNA, 342 bp, Zea Mays
agattgagagatgagaagggtaaaggcaataagaaacaaaagcacaacaaaggatgaggttacaaactcgcgagccaaagaagaggatacggccaagagaaagaaggtatgagacgaaagaggggcgattttaaagggcaggtatgagacaaacatcaatgtaggatatagaggtgtcaagggtgcatatgataataattaaaagcataacaaaggatatagttaaggcaagactcgcaaaacgacaaagtggagaaaacaatcaagggtcagataggcaaggttccaacggaagggttgaagtaaagattcattaccgagtggagttacaaggagacaacg

SEQ ID NO: 189345 - DNA, 332 bp, Zea Mays
gtgtagagatggtgttgagcgccatgcctggctcgacacgacgtgagagagcatcaactgcgccattgagtttgccaggcttgtactccaccacaaaatcatatccgaatactttgctcacccatgtatgttggggaattgtggtcagtcgctgatctaacagatatttaaggctgtagtgatcggtgcggaccagaaactggcgcccccagatataaggcctccagtgacggactgctttcactaacccaatcagttctcgttcatatgccgacaacttttgatgctgaggtgctactgccctgctgaagaaagcaatagctccacctccc

SEQ ID NO: 189346 - DNA, 470 bp, Zea Mays
aacctatggaagtgtggcgtggtggtcactggcgccgcaaccgacatggatggtgcagggggctggtgagcggcaaaggagggaatggagtgatggtgagtgcgggaaggcgatttggtggatgagaagcaaaaggtgggagatagtggagggcgacgtgacgacagaggtgggcgtcgacaacatctgtggaagggcgacaatagtagatggtaactgggtggcgagtgatggagcggcagcgagtggaagggcaacagagagcaggagagtgggggtaggcgatgttggggtggatgtgggggaaatcctttgaagccaaggaggcgatagggaaatccagccggggtgacggaggaggacgcgatggtaggttggtcctccacgacagtgaggcatgcaaagagggaggagaaatgttgtgtcatctgttgttggaggtcaatgatgagctacttcatgtcccctga

SEQ ID NO: 189347 - DNA, 605 bp, Zea Mays
cgccttcaacggctccttcccgcctgcgctcgcgcggctccgcgcactccgggtgctcgacctctacaacaacaacctcaccagcgccacgttgccgctcgaggtcacgcacatgcccatgctccgtcacctgcacctcggcggcaacttcttctccggggagataccgccggagtacggccggtggcctaggctgcagtaccttgcggtctccgggaacgagctctccggcaagataccgcccgagctggggaacctcaccagcctcagggagctctacattggctactacaacagttacaccggtggccttccgccggagctggggaacctgaccgagctcgtccgcctcgacgccgccaactgtgggctctccggcgaaatcccgccggagctcgggaggctgcagaatctggacacgctcttcttgcaggtgaatggcctcaccggcagcataccgtcggagctgggctacctcaggagcctcagttctttggacctgtcgaacaatgcgctcaccggtgagatacctgcgagtttctccgagctcaagaacctgacgctgcttaacctgttccggaacaagttgcgcggcgacatccccg

SEQ ID NO: 189348 - DNA, 332 bp, Zea Mays
ggggagcacacataacttgtgtcttttgagaataattgtttcttgagtgatcttgtatagtctctaggtggataagagaagatgagcaagaaatggagcaatcaggacctgggtacctctgtaagtcaagaaattgcatattgttagattgctcatgctctataaaatttggtgatactacatccttaaatataatgaggctatgataataaatgatcttgaaattggtatctttcaattggtagccatggtagtttgctttaattgacatctcttgataatcattagaatagaagtttcttcttgtgcccaatactataacttgttctaag

SEQ ID NO: 189349 - DNA, 357 bp, Zea Mays
cttcacaaaacaagcaggccgctgcttcaccaaaccctgatgacatggagacacctgatcagcctaaaggtcaaactgtcaaaggaccatcttcagggaacaaggaggttttcacttcaccttttcttgataacatcaagacaccagatccactgaagcgtcaaacggtgaacttcacaaagtgtaaactgtcccttgatccaattgaatcagattctgatagtccaaaagttgatgaaagaagacctgttactcgctccttgggacgtaagaaagcactggcatcctccaagaagcagagccgaagttcaaagaaaccattatctacttttcagtctacacccaagaagaaaatgc

SEQ ID NO: 189350 - DNA, 1240 bp, Zea Mays
tcaaccaccttttgtttcactgtttgattctccatactggtattacattctcccagctcagcatggtgaccttttggagatactgcactgctcactttccttgtatagtgagcaataatatctcccttcctccctctgcttcctagtgcagtctcattcgtggtagttttgcataagcttccagaaacttctctctgtctaactgtagctgatctcgtaactcgcttctcaaaccgtgactcctcttcacatgtcccctgctttgcctcacatgattttctacctctccttgtaaaaacaatgtcatgtgccgaaatatcattggtttcgttcacagggctgcccctctcctcctgcttagtgtacccagttcgatcagtgtggttatcagctgcacatcttccattcccagtcaaagaaatctcagtttctgtacaagtgtcctcaatttgagaatgattctcaactttcggatcaccactgtggagtatcactccttcagtatgaaccaaattattctcctgcttactatcatcctgcttaacagattctgatccactggtagggctggttttggttaaatctgtacttgtgttggcaccattagtaattgctgagtctatgacctcatcctgacaaggcccatgtctcactttgttatcttgggcctcatcagcattataactgtttattccagcttgggagtcattctgctctgaatgagttacagcggacacctcatctgacttgactgtcttatcatctgattctgcaatgctaccttgagctaagccaccatcttgagaaaaatctgttgcaggaacaccaggcattcccatattattatcagaacacctagttgattcttccgaaacatcgctcgcatccaagttaactaatccgttggcttccccaccattgcaggcaacttccatcagcacactacttttgcaagcctcagcctccacagtagtgtcacagtgtttcctctccaaactatcagttttgctaacctccacacccgctccacatggtgcctcagcctcagcacgcagcttcatggcgtcggacctcaacacccttcttgtcacattcctgttgtcatccgcggaacccctccggtccttccttttcttcccagtcaaggcaggccctccgccaggatcctcatcacgagaagcattgctttcctccaaggaggcaggagctttcttcaaatcctttgccactcttccttccg

SEQ ID NO: 189351 - DNA, 535 bp, Zea Mays
agctcacgtactggctgttccgctaggtccaggggccattacagtggtatcagagctctgcggtcctcggtggctcatcacgacggcaccccggtgaaacagtcgacgcagaaaaagtttctactctcggccatggcgacttcaaagcagaaggggaatgatcagtgggagaagatgatgaagggattggactggttggaagagagactgcaggtgatggagtcgggtcagtatcgagtatcgactccaagagcaggcggaccgcgcggccgcgacaacaaggaaggcggaggaggaatgcaagcaagaggaggaggatcgtgcggtgatggcagccttggatgggctgatcggtaaactggaggcaaggcaagggacgaagcaatcaagtcgtccttgcaatctggggcgatcagacatggttgcaatcgtgagcaggaaatgtactaatctggttggggaggtcgatactacgtgcaagccggcaatacttgaagcacaagcatggtcccagagtgatgcccaagaggtattt

SEQ ID NO: 189352 - DNA, 2033 bp, Zea Mays
gtcacttgtagcagctagtcttcatctgctaacaagttacttctcttcccagtggcatgaacttgtccatattctgcttgcacatccaaaggtaacatgcaggtttatcataggaccactcatcactcttcaatttcttgtgatatactaatttcgtctgaaacataaattatgaattttgccatccatcttatttctgaagcaaagctgattgtcgagcccatatcgctttgcttttattttggtcctgatctgccaagttttgtttactacatctttgctaacagcttctctacactaatctcattgtatgattcttggctccatgaaatataatcatgtagcacaattttgattgtcaaccttactcgtgatgttttattccagagtcattttagctatccttgtgtggcattttgtgcctgaatcacatagcaatcaatgttatcaagtcatcttactaatcacgattagtcggactgatcaatgtcacggtgatcagttatgtactacaataaatcacaattagtcaggctgatcggtgccatagcgactagggttaattagacgatttgataacattgatagcaatcactgcaagcttccatgtcaatccaaacttgctgtaaaatcctgcagttgacatgaggatgtttttctgcgttggagttatgctagttgaattttgtacacctacatacatgccttacttttaacattgctgttaaactgagtttgtttatctgggttctatcaggacaatacaatagatcccttggtattcttactgtcttataagcatggtctttgaggtgtcgcctaggtgtctaggtgtgcccccaacgccacagggcaccatggtaacactttgttgcctatatgtacaggcgtgcccccaatgcctcaaaggctaagcttataaaatacatagattatgctaatgttttggtggctaccccagtgtatgtcctgtgtgttatatgatgctatgtttcaggtttttgtatgtgtatatttttgtaattctgtgatttgggttttacatgtgtatgttgtttggaaaaattctatatgagcacttgttactctttttgataccctgttgagcacatactgattcagaatgttattctttcaatgtatatgctattcagcaatatgtgtatctgctttaggaagacctataaatctataatttaatcattcatgcacatactaacatttaatgactcatggtcaggttgatatctttatggatgtggcctttgatagtttgcacgaagatgcacatactaacatttaatgactcatggtcaggttgatatctttgtggatgtggcctttgatagtttgcatgaagatgtgaggctgttaaatatcagattatcatcaatggacttcggtatctttcctgttggttctttggaatctcgtcttgctcacttcatctgccaacagtgtgaagcatcattgcaatttctcttgttgttgtgccagcaaaagctgtttcgagatcggattttaagaaataaggtctcacctatctttagaggcatataatttttacgcgattgaggaggaaattaatacttggtgtgatttccttttcttttccgtttgatgataaaaatagaagctaccatattgactctgatttcccgcactgtagttcacattgttcatcttccttctagtattttctgtgtttggaactcaattcaatctataatagaagtcatcattgttgactatgaccccccctggtagttcacatggttcatcttacctctagtcttctctgtgcttgcaacttgattaaattgaataccgtgtcaaaccttatgtactggcgggtgaagttacattttttttgttttttcttaccatgaaagttacgtttttgttgaaatatgtagttggccaaatgtgtaatggctactgcacagttgttaaatacaatgcccttggaagattgtatgttaacgaatttctcgcttaatgcaggaactctctagaaatggaggcatactgtc

SEQ ID NO: 189353 - DNA, 345 bp, Zea Mays
ataacaccactatagaaaacaaattgaatcataaatatttaagataaaacgtgagaagattcgcgctcgcgtgtcaaggaccacgggagaagaggatccagcatagaaggcgttcctgcccacctgctgtccatggcgtgttgtgggcacgcatcgtcgccggtgagcagattggagaaggatgaaggacgagggcaggatctcggatccgacggcggtgggggttaggcattgaggaggaggcagaggtactccgctaaggtgaggctggcgatgcggtggaggagctgtgttaggttgaattgaggaggatgaactcggcgtaggtgcggaaggatggttggg

SEQ ID NO: 189354 - DNA, 714 bp, Zea Mays
ctgcatcttgagatggagtcagcagatgaccagagctgaggatgatcttcagaaggcagtggtgattactgttatcagcgatcgtgagaaagtaccggttgaagagattgctgagttaattgctcctaggctggagctggaagaggggacactgataattcggcattattcccagtcaagtttcattctctttctacctggctgtgacatggtggagatgctggtgggcaattggccttttctcagggcagccacgttcacaatcacctgcaggaaatggtcccggtttctgaactccaggggtgctgtgttacctgtcttgttggacttcgagcttcagggtatccccatccatgcatgggaaaccataactgtggaacaattgcttaatccctttgctagtgttcatcaggttcatcctgacaccctggagcttaaggatgtggctgtttaccgatgttctgcttggtgtttagacccgtccttggtgcctgcttcaagggagctttggatcgtcgaacctccctttgccgttgatgggatgtcttctggcaggagaacgctgatgtatccaatccgcatcacattctcgtctgcaccacggagggatggatccgatcctaagcttcatgctattacttcgggcggggatggttctggtcacgtgcagcagggatcccctcctttttcaagacctccccattcgagtgggag

SEQ ID NO: 189355 - DNA, 335 bp, Zea Mays
ttatatgcatgaaagatgacagcattgagggaatctatgaaaccctgaaagagtgtgctgtaataagcaaatctgctggaggaattggtgtctcagttcataatatccgtgctactgggagttatattcgaggaacaaatggatcatcaaatggaattgttcctatgttacgtgtctttaatgatactgctcgctatgttgatcagggtggtggcaaaagaaagggtatgtttcttcattatcgtcgcttttagttccttcatcttcagaaattctaacgagcttctaaaaacttaggtgcatttgctgtatacttggagccttggcatgctgat

SEQ ID NO: 189356 - DNA, 273 bp, Zea Mays
gacgcaaggatgagatccgcgcatggcgcacgagctattgacgcggagcgaaacagaaatagcgaagaagggggagagataggaatgacagagggatcccaccgatcaatgacttagcgccaagcacggggagaacactcggccattgacgaccggaccccgcaacatagaaccagctcgcgcgtgcagcgtctgttgacccgggcccgcctgccagtgtcgtgcgcacaggggaaggttgggccgcgcggtaggaaaatcagaagtgggccg

SEQ ID NO: 189357 - DNA, 1205 bp, Zea Mays
gactctctcggcatacgaggctgctatcaatgtcaacctccatgcttagacgacgggtgtccagagcattaggtccctggttctcgttctcctcgacatggctttgtccatgagcgtgtggccttcagggacgtccgtgtcctccacgtcccgatgaccttgtagcttgctaacatcttcagtaagggaattctatcctcagttcttggagtcatcttcagtaagggaattctatcctcagttcttggagtttcggtctaatctcaacgtctttcgtggctagagtttcgacggtctgtgtgcgggtggtagactatgtcttgttgtatgtgttatgggtctatagcccagcgcacatgtagcctattagggttaggtagtatatattgtaagtcctacaccattcaatgtaactgaactgcccatgtttgtgtttcattaggtacttactgcccaagtcaaaagcatcgaggatcatggttacattcttcattttggagtatcttcctttagcggatttatgcagaaggatgacaaaggtacacttgagcaataacttcatcagatcgtgaaatgctgatgtttattcatgtcatatctatataactccacgtttcactagctgatgttctaatagcagctgctcataacggattgcactccctgataacgtataattttgcctaggaatctagaatttcttctatatgttttagtttggactggacttcctgttctgcaggcttggtagcttaggagtttgtggttattttttttgtacaatttcggtattctatctaaaaaaacatacattttatgggaaaaatacaaatgaatctgttccttctctcaaatgctttatttttggtgtatttatgcataaaaacagtttagttcttacttcttagagtttcttttgttgtcctcatgtttgtagttcatgcacttttacaaggcatagtgtggagtatataaaacgttgtggtgttacttatgtaactttaagctgctctatatagatttatatgcttgctaaaagataaacattagtgtaatttgtcttacttaatatgtgccatatacttggaatctgtttgatctctcccattgccaatgctgatcgtgatattctttatatggaggtactcagggagatgtttaactgttgttctcttgtacagaagatgtgaagactgagcgccgac

SEQ ID NO: 189358 - DNA, 394 bp, Zea Mays
tgcatcttgttgactcttgttacctaaatacgaactcttgtttcagacaccggtgttatggtttcatgggatggcagatggggtggtcctatttgaagcaggacatgctgggtgtgcatttttagaggagcttggcatgtcctgtgaattcaaggtaatacaggaagctgtagtcaatgctcacttttaaaacattttgcctccctcccaacaagtggctctgcaaacatttgagctcgttttcaaacacgcctgacttcagctatatgtctgttttcccaattgattttttgaccagttttcccaatcatctactcaggcttatcctacccttggacattcattggttgacgaagagcttcaatactttcagcaatggatcctgattcgtcta

SEQ ID NO: 189359 - DNA, 339 bp, Zea Mays
acttgccaagaacatagaaaaagaaaaaattgtcctcattagatacaccaagcaaaaaataaacttttgaatgatctacatcaaaatagactcgaacccattcgataatcttttttggtgtttcatgatcaatattattgtttatacaagatcatgcaagagtccaaggcataagatgagagaaggccagacaaagacagagaaataaaggaaaaatagagcactcaaccacaccaaacgtgtcccacgtaataagagtgttactatactgaagaagagctactgagaaagagtacacagaacgctcaggtatccaccggacgtcacactagataggac

SEQ ID NO: 189360 - DNA, 592 bp, Zea Mays
tgcaaatcatcttgtgcccactagccaccttcacttgcacagagggacactcttccaccgtcaacttcaattgtttaaccatatgctcactgatgaaagtggaggaactgcctgaatccaccagcataagcatcacttgtttgcccacaatagacctcaccctcatactgtaaatactgtcagaaccggatatagcctgaaaagatagatgacaacatatctctctctgttcatcttcttgttccaatttctgtaacaattcatcagacagcacttccggttcctcctcatccctcatgacattcagctgaactcgccccctcttagcacatttgaggatatggccaggctcgaacttctcaccacaggcatagcaaagcccattgactcttcggtactccctgagttctctttctctcgataaatctccaccaactggctgtacctttccttcccccttattgccaggttggtactgttttggcacataaccttggcgaactcctctcggtttgctcttctccaatacttcctgttgcatctgagccagcaacaccgccttatccaccgtagcaggttgatgcatttgaac

SEQ ID NO: 189361 - DNA, 403 bp, Zea Mays
agaagcactatcctctctatgcttggttcagagttcagtgaatcagtttttcttccatcggctggtgcaagtggaggcatccttgtggcatggaagcaacacctgagatattcaggacaaaacaggattgctaatcatagcatctccaatcagttctgtaaggatggggatgtgattggtggctgacttgtgtgtatggtccccaaggcgacaatggaaaaatcatgttccttcaagaactcagaaatatccaagctgcatgtcctgggcattggctcgttttagaagactgattgatgatctggctctcaaagagattactttacatggacgcaaattcgcgtggtccaatcaacaagatgagcctgtcctggtcaagctggatcatgttttctgcttggtg

SEQ ID NO: 189362 - DNA, 877 bp, Zea Mays
gcggcatggtgggcaggtctcgtcgtcgccggcgtccgcggtttcggcgggatcatggtgatggtcagtccgaccctgctgtggtggcagttcagcatccagggcctgcccaggtgcctgttagtggagatgtgcctcctccttgtatcattgactggagcgatcaggtggctagtggcgaggaggatctcgctaatgcgatcatggtttctgttatcagtgatgtgcctctggtctctgctggagaggtggcggcggtgattgcggccatgatcgatgttgccgcaagctctctggttctccgtcgggcctctcagtcgagcttcttgttggtccttccggacctggttctggttgagcgtttgattggcattcagcaaccggtccgttccttggatggcggtctcagtcttctgtgcaaacgttggaatcgtttggccggagcccttggtcgtgtgctgccgtccttgattgatgtggagcttcgtggcatccctgcccatgtgtgggagacgtctactgctgatcgtcttctgtgcccttatgcctggatacagcaagtgcatcctgatacgctggggctgttggacctgtcaagtttcagatgtctggcttggtgttctgatctgtccaagcttccttcatccagggatctctgggtagttgaaccgccgtcgggcatcgttgaagtccctcctgtgaaacgggtgttatcctatccagttgagtttcggttctcggaggttcgcgctcctgttgcgcctggtcctcccgcgtctgatggcagtgatgaggacgatggtggtgactcctccaggggtcgtcggcgtcggctccgttctccttcgcggccgcggcagtctgatccactggcggt

SEQ ID NO: 189363 - DNA, 283 bp, Zea Mays
caggcagcgaagcctcctcaggagctgcaggcgcagcttgccgtggtccgagaagagctcgtgaaggccaaggagcagctggtggagaacgagaaggaaaagggcagagtccttgcggagctggagcgtgccaagcaggcggctgatgaggccaatgccaagctgcaggaggcgcttgatgcgcagaggagggccgaggacgcgcaggaggctgacaaactccctgccggcgagtcggaccaagcaagcatgcacagccagcaggaggctgatgttactgcgc

SEQ ID NO: 189364 - DNA, 667 bp, Zea Mays
attgagcaatctttgaatgagtctggcttagaagctctctcatcctttctgaaaaccaaaaaggttagttttttttatgtgaatttgctcttcactgcctaacatagacaagtacaataagtttggagatattaatttgtgctaccaacacgtatttgctatttctatgttttggcaactcaactccatagaataggtataacctcatctttgctgatgtacttaaaatctgttagtattcatgccttgctaggttcgatgctatgtttagttggataatgttattggccctggtgtacaccctgcaacccaaattcaagtcccttttaacttgaatttgggagcctatacttagtatctgattaagttcattctagtgtgagtttttttttaataagtaaacagctgttaccacttatctttaaccagtttactgagcgatgaacctgatgctcaccagtgtaatggccattttatacgtgtatatgtgattctattgattatttcagaatttagaccaactggaagatgcaaaagatttggatgaaaatggcggcgttcacgttttgctgaagaccttgctgtcattatcttatctaagatcaattctaatgaagggtctggaaagtggccttagaaatgatgctccagatagtgctattgcaat

SEQ ID NO: 189365 - DNA, 1968 bp, Zea Mays
tggggctgcacttgttggtcttactttgtggcttgatcacatgcaagtatgtgctgaaagaataccttttttatgatgttgcattcatagtcataagagtggtaaaaacatctttgctttgctcttcaacatataattgtttaccatcagttttaggcatagtcacaggaaatggatcgaactcattgaccctcaactccggtactcgggttcatttttgacccagccatgtaaaaacctgacacaagcagcataccatgttccttgaccccatcgacccagaaattttgtgactatggttttaggtttattgtcttgttctgtgatattttgtcatgattattgacagcaaagtaactggaacactgagaatctcactacatgaatttttagctttttgattcaatgttctcacatcagttacatagtaagaagaatgatgtgaacaagttaagattaaaatgaggattggcatatgctatttaagttctttattagttccaattacactagtactggtgattttcaccttgcaatgatgtaatattgcaaattgctgaaggtaataggtcggtaagtactgcaacatacatcttggaggtgtagttggcagtagagcctgcacttgtttgatatttttccattttggtataacttttcattttacctgtcattataggttttctagcctatcagcttctaacccagatataattttttttctctcgaacgcacaggagaactgcacatatttataaataagagggaaagaaaacaaacccaaagggatttcaaagcagatgacctgctaagaaaaacagaaaaacacaacactcaaccaatgagctagatggccaaggaactggccacattcaaagccctagctaggtctaaggaacctaggcccttagcaccagctataacccaacaaactgattcatcaaggaaacttctctgaatccttcccaatgaaggggaatctccatcaaagaccaccttattacggtgaagccaaacacaccacgcccctaagatgatgacactgttaagcccctttcttgtgcttttgggcacatgatgctccacctgtttccaccattctgtgaaggaaggagtatcatcagttggcatgagatgatccaacccaaaaggggataataaactgtgccagaactgacgggcaaagatacaagaggtgagtaggtactggattgtttcctgctcttgatcgcatagggggcaaaccaccgggtgcgggagacctctcttctctaatctgtcagcagtccaacatctattcttcatagctaaccaaagaaagaatttgcattttggaggagcccaggttttccgaagccttttccacggttcaaaaggagctgaaccagcaaacaagctttgataacaagattttgaagagaatattcctgaagcattatgcctccatctatgctgttccggatcctgtgataaatgaacctcccccaaagaatcccaaagcagcaaatattgttgaaggcccaacagagaatgaggagccctaatatcattgacccagatataattggagacatcagttaataacacctaaaaatctttctaaagaattttgaagaaaacatcttttaatgtttgcagtaggtttatgaacttattgagtttctcttagtcctgcaatagccattcttttttatttaaatgacacctgacctactctggttttattccaggatgcttcactccagggttcaccagaatctcccaaatctgttgtactggtcacaggggagggggaatataacatggtatccctgcgtaaaaccatcagagcctaccttttggaaatgggctccccattcttgccatgtagagctcggtcaggtcgctttgtggtaaaggattactctcttaagatgtggctgaaagattctcctttctgcatggaccttgagttaaaagatgctccag

SEQ ID NO: 189366 - DNA, 1851 bp, Zea Mays
cttaaggctagcggtctttaaactatatatgatcagctgcctgagtttagttctcatttatttcttttacttacatgatgatttgactattttcttatttttttccttgcaggtatattgtgcctgccaagtctgcagtcaaaaacgtgtcaccagctggagagggctcagtaaatatttaccccataatgctaagagtttcagccagcagagatacatatacactaaccgtgaagatcggcaaaaaggtgcacacaaagtacttgtattcttgtagtttgcaagagttctctctttttttttaaagaaagtttgtttacttaatgatcttaaccattcccttttaagcaatgtatcttaactttgtgttttcccctcattttgatacactcaggacaactcaactgagaactttaagagagcatgcaagatcctgactgcagactctgagccggtattcctatgagaattcttttgcccacttactagtaatggtaaatagccgaagttatttttcttgtattgcatgtttgcaggttcacatatgggatttctctgggcgaacaacatacatagttatgactgaactgaaccggtcgccccatgactcaaaatctgcagatcaggaggtatcttcttctccatcaagtcttccatctcatctcatactcttacagttttgctgggattgtattgttctggtagctacttttgtcttttttgttgcataaaatgccaatgatgattttttatgcttcactttagttctgcttaccaccgactgcagaatgtctagtttgtcaaggttcttatcttcttttctgatgtaggtgcatttaatctgtactaagttagcacatctatgattcatattgtcaaaaaaaatctcattttttcgaattgaactcttttcctttgaattatttggctcgtatactgagcatggatgaacaccaagtcgcttcaacttctctcataatcctagagctttctccatgtccttataaaattccatgaacaaaggatgcatgttctaaagtccaaggaaaggtccaccataccttaaagaaaaggtgcattcaactcattatgtatttcctttgaggtatctgtgtccagttaattgacttcatgttctcattgcatatttcttattccacattcttgaaagctgtatatttcttcttttggcttgctaatagtttctttagaagttgtaaattatgtaagaaaatatattgttatatgattccagttcaaactaggaaggttggatgactagtgcattgtttatatttgttgaaaccgtataatattctcttatttggagctttgatgttagttgtcaatgtcaaccacatactttaattgagggggccagggctacatattacttggtttctgctattttattgggagtgaattggtcagtgattactgattagccatatatttcccccctctttttatattagattatctagcttgcactttctttgaacttagcttttgaacagttcgttcttgtgattgtatgttctcatatatgttgcttactttttggtagtatatcttgtttacactttacttcgcattttcagatgcctctacaaatacacatttatgatctgtcggaacctatggttaatggttctgatgggaaaagggatgagttagcattaacattgggtggctcaagttctagcaatggtggtagtatgaacatggatctggattcatcaagtggaagctctaagcaagttggatccggtttaacaggattagacaatttgggaaacacatgtttcatgaacagtgcagtccagtgcttggctcatacttcaaagctgg

SEQ ID NO: 189367 - DNA, 1223 bp, Zea Mays
cctcggcaatatgtgcaaccctgaactgcacaaggggaggctgcaggtacttaatgctctgccatcgcaaggatcgaaagaaatttcgacgcactgctctttgagagaccatatggtggttatggtttagctaggatggatgaaggggtgcgtcaatataagctaattttattatgtactttcagtattggaccactcgttttagcatagcagagtaaactcgtgactctaatgtggggatgaacaactcccatctgtacatatgtggatttgactagacagattccgctcttcattactgaatatggaataggattgaaaactagaacaagtaacagtagttatttatcctgttcaagtaacagtagttatttatcctgttccttttgagttataataagtaatcacatattatatcaattaagatctgcaaaacctttagcctacaatttctacaagtgacaatgacaattgcattatgaatttattgcatctttggcacttctttttgtcaggatgttgtgtttgcactttgtagttgttcttttgttccacccagtgttcaggtgttagagcttgtaacactattgtagcactatgttggtaattaacttatttttttgtaatgttcttgctcgccaggtgcctagactcataaaggaatacattgaggaagtatctactcaactgaaaatggtctgtgattctgattcagatgagttgcctctcgaagagaaactcgcatttatgcatgagacaagacatgcctttggtagaacagccttgctgctaagtggaggtgcttcgttaggatcctttcatgtgggtgttgttaaaaccttggtagaacataaacttctgccaaggatagtttcaggatcaagtgtaggctcaataatgtgttctatagtagcaacaagatcatggcctgagctggagagcttttttgaagagtggcattccctgaaattttttgaccagatgggtggaatctttcctgtggttaaaagaattttgacgcatggcgctcttcatgatataaggcacttgcaggtgcttttgagaaaccttaccagcaatctgacatttcaagaagcttatgacattactggtcggattcttgttgtcactgtgtgttctccaaggaagcatgagccgcctcgatgcctaaactatttaacatcacctcatgttcttatctggagtgcagtaacagcttcctg

SEQ ID NO: 189368 - DNA, 434 bp, Zea Mays
gacaaggttacttttgataagactaggtctgtaatggaaaaaattgtaaattctcaccttccaagttacttggccagcttggatcagaatgatattgcatgccagctattcaatatttttagaaatccatgcagctatcgatctggttctgtgaggcttgtcacacctgtgtcaccacaacttttgtcttctattaagcatgcgttggatgagcttgatggaatgccaatgcagggtcttgttgcaatgaataggaagattaaaggaaaatcatgtgccccaaaatttggattaactgctagcttttccaaaagaatgcatataatcaaaatgataagaaaaaggtgcaacaagattttaacagaacttgaggaaggtaattacctgccaaaggaattagcaaaggcaatgtcagtggtgaacttatatcagaa

SEQ ID NO: 189369 - DNA, 307 bp, Zea Mays
gcacttactatggtactggctcgatctatctttaaacatctaacatgtctttagatggttttcagcttcttaactggtagtagcagaggatagctaaggctgatttgtggcattgtgtgaataagctggaattgtagctggagcttgggcgtggaattattattaaggggttttctgtttgtatttggactatttagatgaattttatgcctcctgttatcctgtacaggggggaaaatctaacttgcttcttagcttatcacggattcaaagcagtctctctgcatttgcagaggggaagtttgcc

SEQ ID NO: 189370 - DNA, 372 bp, Zea Mays
cccaccgcagacgtcgagcgccatcgcatcgcacagttctctgtcgcgtatgcctgctgtcctactcacctttgcgccatcaccgctcgttgccacacacctgctgctgcccctgctgctgcatctcgtcgacaacacccttcatcgagctcaggtcgccgtattctcctcccgacatcatacatccgtccaaactcccatgccagcatcatgacgaccccgccaccgaagcctctacggcctgcatgctctgctttttgccgaagtcgatgtgccgagatccctcgtcggagcagtctacccattatgtcatgcaaccgtcatcgatcctcctcgtcatgtccgggctcgtgtagcgagatcgccgctgac

SEQ ID NO: 189371 - DNA, 308 bp, Zea Mays
cactgtaagaaccacaaatagcccaaatctgcaggaagttaaagaaaaatatgttggtgcaaggacacaggaccttgcaagtggtgttctaggtcctcaaagcacaagcaaaatgcctgtttttagaaatcatgtagataccttaaatgggaccctggacgttctaaaaggccatacagatcatgtttctcgaaaatattctgccagccatgatcagactgatgttgctgaagtcttattgaccagtcctttgagaggaaatcagtctgtggacgagctcgattcatcaaaagttgacagatggcaac

SEQ ID NO: 189372 - DNA, 293 bp, Zea Mays
caggattccagcgtattgctcgagtgatcttagctaggaaacaattgttttgcaaataaaaatttctgccctaactgatggtaacgcacagctcatgcaatcattgggaagatgctaatctggaatcattattgcagtgacatcattgccgtggttgctgctatttaatctcataccaataccagataccgtgatgcctaggaaaagcacattctaggccaattctcgcagggcaggcttccgttgttcttcaaagaccgtatcatacagtcacagtcgtcgtctctcagaaa

SEQ ID NO: 189373 - DNA, 468 bp, Zea Mays
ttggacctcatccttttggacaaaaacttccgtaaacctctagctgccaaaccattgatgaactgcaggcgggaagtgcacgcgaggggttggcaggcagcagcgcaggcgggaggtgcacgcgcagcgcggcactgtcaattggaagctccattgggtgacctggcgccggccacacagcaacgtgcgacgccaccatggccagtgcggaagggccaaagtcaaagcagagcgggccgaggatctgcagcagcaggctgaagagcgaggagtagggggcgtgggagaggatgactacggacttctgctcgccatcgcgggggagtcgctcatcctggcgctggcggttgaagacgaagccgtagaggaaggcgcggcgtggggaggacgggtcggggatgcggaaggagaagagcgagtcgtggacggaggagcggtggcgcgggaggtggtgagacatggagtccg

SEQ ID NO: 189374 - DNA, 491 bp, Zea Mays
taagtggtaatggggatgcaatttatcctgccaaaagtaatgcacagcagcctagcagctgtgctcctgacatgagaaaacagccaaaagcaagcatcacagtttatcagcctgacataggtgtctatttaacttctgacatggtcagttcttgtgaggggtcatatgcttctgccagtgagccactgcaaaggagcttgtcatctggaagaactattgggaaagcaaacgcggtgaataagaggcctccatacccatcaagtaaggtggtttcagcacaaaagccacaggatagggtgtctacatcatatcaaaatgatggccatgagaagaatccttgcaacaaaaatgaccaaagttagtagtgttctgataaagtgggctagctttatcttatagtgctacttttatctcatataattactgcattattcaggatctacccccaaatgtgaatcaagtcaatcaacaagcagcaatctacaaaagtt

SEQ ID NO: 189375 - DNA, 344 bp, Zea Mays
ttgttgtgccatacaacctttcaccttgggcgtgcatggaggagtcaaatttcatgatggctttacttattcctggtcctacatcacctggaaaggacttcgatatttttttagagcctcttatagaagatttacttgagctttggacaggtgtacctacttacgatgctctaactggacaaaaatttaacctacgtgctgcagttttatggtgcatccacgattatccagctttgggcactctttcagggcgtaaaacaaaaggtttttttgcatgtattcattgtgacaagcaacctctttcatacagcctaaggagcaaaattggttattttgggcatttt

SEQ ID NO: 189376 - DNA, 379 bp, Zea Mays
gtgaacacaagataccttaagcacaattataacagtctgtcccatccatgtatcgaggaaggaagtttttctgattgacaatttgttgcttaattaccactttatatacttttgtaggtttcatcaccttgctctgttgaagttatagaattttcagcaaggatatggagtacaccccctacacaacaagctcctatgtatctcacatctcgctgctcgaggaagttcttggctggaggttttgactttacggagacttcatgttcatctattttgtcaactgcacctgaggatcaaccaacacttagcgactgccttgaatggtcccatgttgtcagacattaggtatgtgcacactctctaatgtagacatgatcta

SEQ ID NO: 189377 - DNA, 800 bp, Zea Mays
tcatccttagttcaactagaagtggggttggtggatatatttgttaatctgtgccgatttgagtggcagacaggacatcgggaactagcaactgggctatttcaggcgcagatggagtttagcttatttgcccctcctttgtatctgacaacaagcagtaagcaaaggctctttgaacacttctggaacagtggtggtgccagaattggggaagatggagctcttggatggtctgaatggttagcaaaagacgaggagagtagacaaaagttgtctatgcaagaaaattcacaagagactgaaacaggaggctggagtggttggtttgatccttctctgggtaatactgagacaaatgatttatcaaacaaatcactggaaccatcattgaccgatggaaatgatgctgaagaccttgatgctgaggactcaccagcacaagatgatgttgaatccttgctgaaaaagcttggtatcgatgtagatgcagagtccaatagtgaagttaaagacgcagaaacctggaatagatgggcctcaatggagctgtcacgggacaatcagcaatggatgcctcttcatgaaaattatggtaattggagtttgtcccaattattactaggtttttgtttgtttgaagttaacttaatgctaacactggatttttttttcttggtaaaagtaggatcaattcattgtggtgatgctccatctggggaagacaatgaccagctttccagagtaattttgtttgaggatgtaactgagttcttgttttctctatcttcagaggaggcccg

SEQ ID NO: 189378 - DNA, 336 bp, Zea Mays
tgttacattcatcctcttccacatgatactcaagcattaaatttgttaacaaatctttgacttcagcacacttttcctcacaatcttgactagatgtaccaagcagccactcaaaacacattagcaaactcaaaccttttagtcagaacaagtatagttgcaatgcccatgagtccttgaatatcataccaatatttatcaaatttggttaccatactaactgacatggcttcaattatttgattgccacaagttgaccattgtctaattttcattcttatctcacatatcttgatgaagtataaattggcagtgacatattcagttccagaaaat

SEQ ID NO: 189379 - DNA, 599 bp, Zea Mays
ctccgaggaggatgtgatgctattctctctcgtgctcgtcaacaccgccgtcgaacttggcggcgaggccatcggcaagcaccccaagctcctgcgcctcatccaggacgacctcttcttccacctgattcactacgccaccgaatacagccccctcgtcctctcgatgatctgcagtactgcactcaacctgtaccacttcttgcgccggtgagccagccagcaatataatgttagcatcagtggcaggttcttctaactcttggcaactgcattgctctgcttcaccaggttcctcaaattgcagctggaagccttcttcatgttcgtgctgctccgcgtgtgcggcggcggcaacgggccgcagctgcaggaggtggcgatcgagggcctcatcagcttctgccggcagccgacgttcgtgatcgagacgtacgtgaactacgactgcgacccgctgctgcacaacgtgtttgaggaggtgggcaagctgctgtgcaaggcggcgttcccggcgtcggccccgataacgacgatccagctgcaggcgttcgagggcctcgtcaacatgatcaccaccatcgccgacaacgtcgaga

SEQ ID NO: 189380 - DNA, 473 bp, Zea Mays
atacaccttttttatctgctgcatcactttcattctattcctgtatctgcagctacctttgatcgcacagggcgttatgttattactggttctgatgaccgccttgttaaaatatgggcgatggaaacagcgttctgcctggctagctgccggggccatgaagtaagttttgcttgctgtggcatatatatacataatgtttcattgataacttaatcacacttaatctgttccatttttcaaatcaagggtgatattaccgatcttgcagtgagttccaataattctgtggtagcatcttcatctaatgatttcattattagagtggtaagttcagtagtattcattcttcataagtaaactgccataacatcatgatgttatttcttccctttaccttgaatatctccttttaccaatgaagtggcgtatgcctgatggaatgccagtctcagtgctcaaggggcatacag

SEQ ID NO: 189381 - DNA, 1043 bp, Zea Mays
gtcgtccttgagacgacagaagtgtacattgtgatcagcttgtcgacgaggagagacacccaggtcgtatacgtcgatccgaccaccggcgccctgcgctacctggggaagcatggggaggacgtctttgattcggaggcggcggcgctgaaccacatcaccaacggatcaagggttctatccaagagcactacatatgccaaggcagtgctgggatacgcggtgttaggaagccatgctctgctcttggtcgcgacacagttgagcgcgtcggtccccaatctgccgggaggcgggtgcatatacacattggcagagagccagtggataaagatccagctgcagaatcctcagccccaggggactggagaacagaagaacatacgtgagctggccaatctagacattgatggcaagttcttcttttgcgagacaagggatgttaccaggcccttcccgagtcctattacactacgggaaccagatgaggaatttgtttggaacgagtggctgtcaaagccctttaaggacattggtttgccaggacactgtgtcattcttctgcaggggttcgctgagtgccggaactttggaggtgctgggcagcaaggtgggttagtcgcccttattgcacgccgaagtcggttgcatcctggaactcgctatttggcccgtggactgaacgcatgttcaggcacaggcaatgaggtagagtgcgagcaactcgtttgggttccacggaagggcggacagcgcatcccttttagctcgtatatctggcgccgtggaactattccaatatggtggggcgcagaaataaaaaacgcggtgtcagtggaggctgaaatttacgttgccaacgatccttacaacggaagcttacagtactaccaacggttgggtaaaagatatgggaataaatcatctgaagcgaacgtgtccaggcaaaaaagttctggaagggttcccattatttgtgttaacttgctaagatacggcgaaggaaaaacagagtcagttcttgttgatcatttcaaagaatc

SEQ ID NO: 189382 - DNA, 348 bp, Zea Mays
actactctctaaggttgttgaaggacaaggagaagaacaagacgtgcagaacagggacacgagcaccataaagaatggagttaaagcaagcattgtaagcaatcaacaaaaggatacgaccaagggcataatgggtagaacaacactctcaggttgagatagaaaaggggagatttccaaaagcagaccttagataggtatcaagtcaagatctagtgattacaatggtaaggcatatatcaaacaaacgctatgactggcaacgcggtaaaggaaaagggaatgaccaagagcgggtaggtaagacaacactcttgaactggaacgagggaggggctttaaaatgca

SEQ ID NO: 189383 - DNA, 1049 bp, Zea Mays
gttaaggagtataagagcaccatgacttgtttcctgtagcaatcctggccacccttttgcagcaggtctggtactttcaaagctttcagcagttacagtggatgaccttggcaaggagacttttgccacaggtggtgatttggaccgagtgaaaaaggtacattattcctacattttatttccatggttagtttgataactcatggctgatgtcaacttctggagtccagttatgttttttgtgatcttgtagaaagcaaagcgagcacacgaggaaatgcctattcttctggcatttccttgataaatctatcttccatctccaagaaatggtgattgctcattgtctacttagtcgaatattagatttgaaagtaaaaaataacaatagctcattttttattttctaattttggcgatcaattaatttgatttaaagttttcaggacctagtaatgaattcttttcgcttcacacatcaagcatttttcacatttggtgtgcttatttgttttagtttgaccttttttacttttgatcaatttgcgtgacttctttaacttggcattttgcagtctgttgaacttgagagtctggcggtgtattttgactctgatagcagttcttggattgtggataaaccctgggaggatttacttccatcagagtggagtcaggtgcctcccaattttgtttgtgcgcaaataaataccctgggtttgagagaataaattggcatggagacaattacctttgtcaatttctgtttgaaaaaacatgtggtagagtgtgaatagacgcagtgctgtaatgaggttttgttgggatcttttattcttctgttgcttgcatccagcaacctaacaaatatttattggtttgtaaactacattttcaggtttttgagtttcaggagcaggatggttccagatctgcttcgaaaaagcatgcctacattttacagcctgtatctggcaaagcaaaatatacaaagatacaacttactgaggcaaagaaaacaggacaagcattgcaaaatactgcagtgg

SEQ ID NO: 189384 - DNA, 346 bp, Zea Mays
ctagcaggcattctgatgccctttccacaataaacatgttagaacatgagttgagtaaactaaaagatcatatttcttccatttctgaagaaaaacgtcaaatgcagttaaatacttctgctgtacaggaggagttggagaaaacaaacgaggaactggcaatcaatttcaggaaccttgaaagtgccaacaccaccattaattcactacaagatgcactatcacaggctagatcaaatatttttattcttgctgctgaaaagaatgaagctgaagctaaatatgaaacagaaataaatgctcttaatgctgagctaaccaaatgtttggaggagttggataaaac

SEQ ID NO: 189385 - DNA, 525 bp, Zea Mays
ttaattatttgcattaacaaaatttagcagtgtactagccattcaatgatagtgtccactcaatgcgagcaaccacctagataaataaattattaacatggtcattttggccctcaagatcatacacttcgtttactcatttttatgtagtgaatcagaagtgataaatggtgtatcacagaaggtagctgcaagatggtatgtattgattttaatcgaaagcacaaacaattccatggtggcccattgcactgcaaagtcaaacctcatcatgcagtacataccgagcagtataatgctaaaatgaataagccaaggccacttcacgataatgtgttttttaaagaaaaactataaatgtgacgaatgacagcaacactggtcaccaagcaaaagtgagaaaatttgagaaagaaaaatgtgtctaacccaattatcttaccgccccgtaaacctccataaatgaatatgagatcattaacagcagctgctgcatgcctgcaccgtcgtgtaagctcaacagca

SEQ ID NO: 189386 - DNA, 337 bp, Zea Mays
ctttaattagaattactgcactcttataatcaaccaaataaccaagggtacatggttcttttagtactaatcctaatctgtcttacaatggctagaacatcaaacattcatggacagagggattattattgtgtcaatgtcaactgttgtcatttacaaatcttaattgtttcctttgcttcataaggctaagcaaattttggcataaccaacttattgtttatatgttttttgttagtatctgggatcagaaataatcccctcagacatggttaagatatatatttctgctggatgcacatttttgttgcgaatgtatcaggctgtggtttgtccc

SEQ ID NO: 189387 - DNA, 298 bp, Zea Mays
tgggggcctctactgtgtatgactggtatcggtaacaccagcatctgctttcgtccctgacaggttgctaggtctagcaaacttagcccatgcctcagtctaagtggcttgactgcatcatcttcggcatcgaccctcatgtccctgtcatatctgcctcaattgcatcatcacctttcgtctacaatggccctaactatgtcgaccttggcatcgccgccttccacgacaacaacctcaacgcatctcgatcgtcaccatggtgcctcttgtgcgcctgcagctccaccaacacggc

SEQ ID NO: 189388 - DNA, 288 bp, Zea Mays
atctcggcatgaattgcggcggcagatcaccggcggcgatgcactaaacctggcgatcttcgtcaggttactgtaccatgcaaattcccttcagtgcacctgacagagcagatttagaagctccattctccatttttcatgtggagagctattgatccatctgcaccaaagttgtatctctataaaccagccttgattctgctatagccaccataattgaatactccctagatcctactcaaaattgcttcccaagttcatcctaggtcactatgagtcaaaattcag

SEQ ID NO: 189389 - DNA, 2079 bp, Zea Mays
ggaaaggatccttctatcttcaaaaaagacatgtcttcatgatgatgtgcttcacatactatctatgcatatggatccaatactaccacttcctcgacctaggatgttatcagttaaaaatttcttagttctttcagacttaatgctgttccttgttttattctcagactcctagaatttactatttttttttctgtgcctaggttctttatcatgtgctaagcactgttcctgcctatcaaccttcagttgggcctatgctgaatgagctatgcctaggtctaagaggccatgagttagcacaggttgttattttgtagtctgttctccagcttatcctattttattttatctagtgctatgtattcttacctcttccttttttcaggctcttgtcggtgtatatgcaaaagaactgcatgttaggcttgcctgcttaactgctataaaatgtgttcctgtgcactctgtgcaacgagatttgcaggtgtcaacaagcctctggattgctgctcatgatccggagaaggtttgtaagataacatccctgtgaacttgacttggaactcctctatttttttacgttactcatgtgggagcttccagcactggttctgccctttttagtgaaatatgttgaacttttttcattctagagcaggaaatgatgtttattttcttgctcttcggctcatgtaccttctctaggtggttgctgaattagcagaggaattatgggaccgctttggttttgatgccatcactgattactctggtattttcaatgcactttcccataaaaattacaatgttcgtgctgcatctgctgaggctctggctgcggcattggatgaaaatcaagacaaaatgcaagtaagtcgcctacaatgcaaattttctgttctgtatttgcaccccttctgctactatatagatgctcaagggttttgcaagacgagcaaaggcacatttaaacaccgacattagtttaattattactattgggatgggatgttgttttactcttcgtgaagacatttgaactggacatggacccactgaactaagatggcatgtagggacaaagaggtaatagcacatctcaaaatcatagaatgacatccatttaaaagctggaagatataatgccgtgtatttgggtacggtcttgtgtttctactgtatctttaatttcacattcaaataaaacttgaatagaaccacgttgatcggagattttttttgccaatttggagtaatttctttttattgcgggtgtcatattatttcaggatgcactttctacccttttctctctgtacattcgtgatattggcactagtgttgaatttggagatgcacactggctcggaaggcagggtattgcattagcactccactctatcgctgacgttttggcctctaaagatcttcctgttgtcatgacatttctcatctcacgcgccctggtcagtagtttgctttgtttatgtggatcttaacattgcagtgccacttatatttaacttttaatgcttctcatggtgaacttacaggctgatccaaacgtcgatgttcgtggtagaatgattaatgctggcatccttattattgacaggcatggaaaggaaaatgttcctttgctatttcctatttttgagagctacttgaataaaagggcaagtactactttcctattaataattgtactaatataattcaatatactacattcctattaataaatttattaatatattattgtggctctttgttttcttatttgctatgtaatccatatataacaggcatcagatgagaaaacatatgatcttgtgagggaaggtgttgttatttttactggtgctctggcgaaacatctatcaaaggtgtagatggatactgaactatcttttatttacaagatacattcacagtactaaatatagcatttgtaacaggatgatcccaaagttcacagtgtcattgaaaagttgttagatgtccttaacaccccatcagaggcagttcaacgtgctgtctcagattgtttgtccccacttatggtatccaaacagg

SEQ ID NO: 189390 - DNA, 925 bp, Zea Mays
gcccggtcagccagtgagcggtgcggcagcgtcgctactacggacgagctccagcttgctcagtggcggtggccagcctgggatggctggaggtggtggtggcggcatgctttcttcacagtcgcccttctcctcgcttgtctccccgctcacacagtttggcggcaatggtcttcttggaggcgcctcgaatgtctcctccctgctgaaccggacgacgttcaggaatggtggccctatgccaggtccggggtcgatgcagggtggtgggatgcagatgagtacactccagcagagagctgggttggatggtgccagcgatttcattagcacgggagggtcagaccctctctcattcccgtcttcctcacaggttaatttggtcaatcagatgggatcagataatctgcaagtgacttcacagcagcaacagcagatggatgcagtgcaggatatgcagcagcagcagcagctaccaatgtcttacagccagcaacagttgccggcacaacactcgcagcagctccagcagccacaggctacagtgaagttggagaatggaggaagcatggttagcatcaaatcagagcagcagatgggacagcctgaacagaatggtcctgcccagatgatgcgaagtgctggttgtgtgaaacttgagccacagcagttgcaagcccagatgatgaggagtttaagttcagtcaagatggagcaacagagttcagattcatcagccttcttgcagcagcagcagcagcaacaacaacatcatttgttgcagctgacaaagcagattcgaaattgtccagaccttgtatcaatgggtggaccaaacacaactgcaaaccctcaagctgctgctgctgctgctgctcaactgaccctcttgcagcagcaacggctcctgcatatgcaacagcag

SEQ ID NO: 189391 - DNA, 274 bp, Zea Mays
tagtagtgatttgtcaagtggctctgaaagaagtaaggaagttgatgatgtttctgtggacactggcagttcaagcactgggagccagtatctggatgagctgtctgatttcctaactcaagcagacatgtggttagggcgtgcagagcttcttcaaagcctgctgggatcaggtattattgcctcgctggatgatatagctgacaaagaatcttcaagtagactacgtgacagattggtcaacgatgaacggtacagcatggctgtatatact

SEQ ID NO: 189392 - DNA, 527 bp, Zea Mays
gttgagtttgtcgtcacccttgccgaggcacgggagcgtgcacccggaatgatgcggaagctgcctcggtacgttggtcggctatttgcggtgctcatgagtatgctgctcgatgtccaggatgaaccggcatggcatgccgcagtgtcagaggaggaagacgccggagagacgggaagctatgtttttgcacaggagtgtctggaccggctgtcaattgctgttggtggtaatacgattctgtccgtggcagctgagttgctcccatcgtttttctcctctgaagattggaagagacgccacgcggcactagtgaccatagctcagattgcagagggctctgctaagatgatgattaagaatctggagcaggttgttgggatggtgctgaattctttccaggaccctcacccacgggtgaggtgggcagcaattaatgcaatagggcagctttcaacggacctggggccagagttgcaaaatcagttgcaccatgttgtgctaccttcattagcttcagcaatgga

SEQ ID NO: 189393 - DNA, 461 bp, Zea Mays
gttggagaataatcttggttaaaagggatgggtgtgttgtcgaggggatttgggtgatagaggggcttaaacagggaggtatgcagagggagcaccaggactgatggagtaaattcagagttggatttagtaaactgaagaagctttattcctccttgttgtgcccatctgatgctatggatcgtgatatggatggatataaggatgtatggtctaactcaggttctagagttttttcccactgaaatatccacttttggactgatttggagatagtagagagagtaattcggttaactgaaccttggatcagatttggcggtgaagaaaagatctctccctgctggtctccttgtgtgtttgggtggagataaggtcgaagtgcatagccaaggatccagtgtcctcagctctattgaaaaatatcaagttggactgttgtgagcaagtggataggggag

SEQ ID NO: 189394 - DNA, 535 bp, Zea Mays
ctctgtttgatgtcttgtcctttcaccaagagttgatccatctcatccttaatgcatttaacttggttgaggtccctcgtcttcctttctcgaaacctagctatcttattgacatctttctccccttcctttgtacttagtccctcgaccctttgcctcactcacagctcgctttgcacgaccctttgcctcactcacagctcgctttgcagtcttctttgccaccttatatctctctatgttgaccgcgctcctgtcatggaacaagctcctgtaacattctttcttctcctttattgccttttgaacatcctcggtccaccaccaagtatccttagaggtgtgaactgataatggccaagataaaacatatgtgcaattggctgaacatttcagttttccacttgccatgacaaaaacaaaaaagggacaggcccagtgccagaggctcccaatgagtggggtctgtggaacgcagcaaaaaaataaaatcctttagggcttgatgattgaggtggataattaactaactttc

SEQ ID NO: 189395 - DNA, 859 bp, Zea Mays
ctccctcctttctcacacgcgtacagtgaacttctcctcgtgttctccgaggcggagcaaaaccctcccttccccgcgctagggttttagcgcggccgcgacgggaggatcacggcggcccaaggagacggctagacggtcggtggacgccgccgagacgtggggcggcgccgtcgcgtattggtaagtccggggtctgatgggcctcacgggaaggtccgcggccgtgtccgtgcaatgcgggtggggttccgggttccggcgatcggggactgacgcgggccgccactcggaatggtgttctgggggtgctgtgtgcgttttgcccctttgtcgagggttttgatgggtaccctctcagccccggggatcacacgggaagcgtccgtggcggcgagggaggtggctgtgtggtgactggtgacaggcgagggagctaggatctaggagcggcgggaacgaagaataaggggagtacaacggatgggaaaaacttgttgatttgccagtcacagttttgcctggtctgggaaaggggtcacaaaggtctttttacacttaaaaatcaacttaataatcaggaattcaggattgccaaactattagttttttatgtactttaggatttttagactgcagattatctgaaatttagattagattttaatcagttcttatatatgctgttccaaacaggccgttagtttgttcgtttgttggtattttttgctaccttgttctcttttgcgaactgtgtacctgacatcttttccccatccgttggttgcatagaaatggaggaggatcactcggtgatactaatatctgaaggtgctattaaaagcatcaaacttagcct

SEQ ID NO: 189396 - DNA, 556 bp, Zea Mays
ctctactcacggattcggggcggtgctgctccaagacaagcaccccatcgctttcttcagccgccccgtcgcgccacgccatcgctccctcgctgcatatgagcgggaactcatcggggtcgtgcacgccatacgccactggcgcccatacctgtggggacggcgcttcacggtccggacagaccactacagcttgaagttcctcctcgaccaacgcctcgcgacaattccgcaacatcattgggtcgggaaacttctcggcttcgacttcgaggtggaatacaagccgggcgcccagaacaccgtcgcggacgcgctgtcccgccgagacacacctgacggcgtagtgctcaccatctcgggcccgcgtttcgactacatcgagcggctacgtcaggcacacgctctcgaccccgacctcgtcgccatccgggatgagctggccgcgggtacccgtacagctccgtggggcctcgtcgacgggctggtcacctatgatggccggctgtacgtccctcccgcctcgccactcctgctggagatcgtggccgcggtg

SEQ ID NO: 189397 - DNA, 799 bp, Zea Mays
aagttgccactctgttatatgctgccgagtttctccgctgcagaaggcacaggtaaataacgtttcttgcagagtaccattttcctcttacccactgaagaattaacaatatgggattttgttggaccccccaacacacacacacacacacgcactgacacacacacgcacaggagagaggccagaaaaggaataaatattttacgagatatattactaatcagtgaatgctttactactgtggttggtttttactctttagcatactgtgtacactcatgtacttctgagttgcatttctgatgtgtgatcgtgctgttatcagctgtcattgtttttatcgggggtctttagtttgaggtatcagctactgttgtgataccagtcctcgtgtttgtactagatatgtgcatacttacttaggatgaggtgttgattagcttggccattccattcatcaaaccaaaccagtaggaagagcggacttgcaggtccattatcaaagcaaatgggggcaatagtctctgattgattgcatggtttcattgcacagtcttgtatacgtgaaaatataaaatgctgacattaatgtgtatatgtaggttacaagcttagttaggaagggtgctgagaaaataactctcagcattggtgacggtgctaatgatgtgagtatgattcaagctgctcatgttgggattggcatcagtggccaagaaggaatgcaagctgttatggctagtgactttgccattgcacagtttcgttttcttactgatttgcttcttgtacatggacg

SEQ ID NO: 189398 - DNA, 508 bp, Zea Mays
aagccatgggcagggatgcaccagaaccgcctgaatctgataccagttgatatgggtgttcccgttgataggaacgagttccaggccgcagcccagatcgagtaggctggggcggcaccgggatagctcgccggcgacctatggtagcggttgacggaaccaccggccgtttatcgtcggcgacgcctgagactggaatttgtggaacaagaatgtcccttttctcttctgcctttttctcttttatttcccacaatctctttcctaaacatagaaactatagagccgtaatgctcaataaggtaactactgctaccattacaaaaagggactatttgctaccaaataatcacagccaatcaactcagtgtttcctaaaataaactctatgcggctgggccatatcagacagtgtcgtcgccgcatcagtagatgaaaagggatgtgtccgacttggcctcgatgatatggagaccaagttggaggcaaagcgactttaccaagcccg

SEQ ID NO: 189399 - DNA, 306 bp, Zea Mays
tgatcggtgaaatgaaatgtcctacaagtcatatcgttgtcttgtgcattccatttgatgaataatgatcatttattggtgtagccaaccacactacctttgtcattgcacatatcatgaagttcctcaactatctttcataaaaaatgaacaatgatcattcatagtgtagccaaccacactaactttgatcattgcacatagcatgaagttcctttgttatccttcatcaaataatgaacattgatcatccatagtgtagccaaccatggtacctttgatcattgcatattgcataaagttcat

SEQ ID NO: 189400 - DNA, 534 bp, Zea Mays
ctattatgaaggctcagaatgaaccaacagtctataataacgctgctgaaggagagaatggggaatttgatgtctctagtgatgatgctggtgatgaacttactgtggagaaacgagcaaaaaggaggcgtctgcacataaatcacgctgcagatcccagggaattactgtcacaactatgcttggttgcaacagagccaatgaatggatatagtttctcagcaatgataatcggttacttcaacgattacagaaactatattgtttctactactactgaagcaaacattgttgataaaggtacatctagaagagggaggaagagaaaagaagttataccttctcctgaggtagagacaacggatcatatgcaggactcgtattggtccggattgagcttgtataatcacccagttcatgacctaaaaagagagagtccgactacaaggccaagacggaaacggagatcctcaagacatgcatatatacctttgtcggaacttggggagccggttcctaaaaaacagatacaag

SEQ ID NO: 189401 - DNA, 577 bp, Zea Mays
cgataccgtcattgctgaggttgaccgtgttcgtgtcgaagccatccgcgctgttgatgatttcctccgttgaactgtcgtggcagcccatcgagtcgttgctagcagactattttatgaatttctgactcacatcgtcggcctgttggcctctcactgttcatcgtcccatatgcttgggaaatacttcttcaagtgttggccgttaaccgccaccgggaacttagtcccgtttaattcttcgagtatgtatgcgttcctaggtaggacctgatcgactttgtagggtccatgccagttcggagaccatttgtcgtatgccgcatcttttgttccgagtggcagcactggttcccataccagatctccggcctgattttctttcggcctgacctttttgttgtacgcccgggccaccttagctttgttgtctctaatcttttccaacgaccaaagccctagttccgtgagatcctcgacattatcgttcatcagagcagcgtactcttcagccgtcaggtcattctggaattccacacatcttgagccggctgcaatttcccacggcagcacaatc

SEQ ID NO: 189402 - DNA, 421 bp, Zea Mays
acatacctgctgttcagacaaggttgatgtctttgtttcagaagtaggtttgtcaaataaggtggacctgcgcttgactcggaaaatttcattctctgaaccggaatcatcactgcattccatgactgaagcattacatgaaccatgttcattacaagcacaatccatgccggatgaactctcatctgtagtgcaagttcctttggtcactgatgtatttattgcctgcttggcagtggaataaatctggtcagtttgtgttgcatgaacctaagaaacaagaatttaattagctgacggtagcagttggaaaaacgtctcaatacaggggtagtaagcctacccttgcttctgaatgcatgagtgcctcatgatgcgcagaagatgtcaaaattgatactgcagaagaactgtttcctcc

SEQ ID NO: 189403 - DNA, 871 bp, Zea Mays
gtcaattacgtgccttaatatgagtcattggaagcagccgtcgaaactcgccatgcttgtagtactgctgctgctgctatgtcatgcagtggacaaagtccattgctcgacgcaccataacaacagccaagattttcattccctgcttgagtttcacaagggcatcaccagtgatccgaacgaagccttgagcaattggaaccccagcatccacttctgccattggcatggtgtgaactgcagtttcactcgaccatatcgagtcacggagctcaatctcaccggccaaaacttggctggccaaatcagctcctctcttggaaacctgaccttccttcatacccttgatcttagctacaatagcttcagtggccccctacctcttcttaacaagctccgaaacctggacgtactctttctgggaagcaaccatttgggggatgttattcccgattggcttacaaactcttccaacttagttgatctagatctctctgaaaacaatctcaccggccatattccttcaaacataggcttcctaacgaagctagaaggtatagccctttacaataataatctcaccggtgtcatcccaccaaccttgggaaacatctccacactagaggtagttgatttttcagcgaatcaactaagcggaagcattcctaataaagtttggcaaatctcaaacataacaatgttaaatctaggacaaaataacctatcaggtggaatcccagatactctctctaacttctcttctcttacagcattaggcttgaacaacaataagctaggcagcgcattgccatcaaacattggcgatgtgttccgtcatctaaatgaactatacttagataacaacattttt

SEQ ID NO: 189404 - DNA, 2073 bp, Zea Mays
ctccaaggcgcgtccgtcggctgcggcggatgggctcgcctccggggttgtcgcacttaacttcgaggatcctgtaggaaccggcgccgtggaggacgggtacgactacagcaagggagacttcgtggaacacgcatgccggtactgcgggatccacaaccctgcgtgcgtggcgaggtgcaacgtaccctcctgccgcaagtggttctgtaactcgcgggggaacacttcaggctcccacattgtcaaccacctggtttgtctacttaccttttgtcacgagactttgttatttcgagactagtgagctactaatatgttaacaattgcttaagaactgaacgagtgagagtcctgtctcacaattttggtgataattgcttagaaaccgaactgagtgagagctctgtctaagaaaattctatcgctttgcatcaattttagcctttttgggttgttgaaataagacatcatgctttactgggacttaatggctctgttagtaaactaatgttcagactctggtagcatgttttttattatatgtggcagtagctaaggaggcgatagttaccatctcatagattttgtattttttatggtatatgatagtggcgatgtatctagttactgtatgtagttataaccctggtggtcacgtcacatagatgtggctttagagtttagactttgaaagttttctggtggaaacaattgtagatgaaataactttgaagcgaataacatgttaaccatctcttgaattaggtttacataatccagtgtgcagtatacttgttgcatgtctgggagatgttacactgggatgctatgcttgctagatgtgtgcatttggtttttggttttgttgtgcagtattgaattttgattttttgctattggaatggttgctacattttgtaaatgtggttcctattttggtagctagtatcttaattgttcagcccccatttgcaaaggttccttggcaatattgtttaaatatagttaggaagctaactgcatttgcagtgaagaccatctcttttctcctatttggtagctagagtcagggtcttaattgtgaagtcccatttgcaaggtgtcaatgataccatcgtctaaatagtttgctagtaattcaattatatcttcagtgaagaccatttcaaatggtataagaataatggttgcaacaggactatatattttgttaaaaaaatgccccataaccattgaaagcctgttatgtgacacctctgtttgtacaacttattatattgccaccctgattccttattaagaggctctgtggtgttccataagcagctttgtatccttaaggccacccacaactgcaagcaaaccattgtcctttgacacacttttggtgttctggcattgatgcccaccactttgtgctatggcgcttgtccaagcaaaccaagtactggtacaaatgcatgaagaaaatggttaatacacaagctgaagcatgggtccgtttgcttattgtgcgagaatccacctatttttacatattttaaatgaaactaatgctctgtagtgtgtccatggtcataactatgcatgtatcatttgcaggttagggcaaagcataaggaagtatgccttcacaaggatagccctttaggagaaacaattctcgaatgctacaactgtggttgtcggaatgtatttcttcttgggtttatctcagcaaaggcggagaatgttgtcgttcttttatgcagagaaccatgtttaagtgttaatgcactgaaggatatgaattgggatctcagtcagtggtgccctcttatcgacgacaggtgttttttgtcgtggcttgtaaaggcaagtgtttcctcatgatgatttgttaggttgttctgtcatgcatttgtgcttagctagtaactttctgatggttgaacaatttactttataccaggtaccttcagagcaggagcagctaagagctcgccaaattagtgctcaacaaatcaacaaagtggaagagctctggaagacaaatcctgatgcatctcttgaagatcttgaaaagcccgg

SEQ ID NO: 189405 - DNA, 516 bp, Zea Mays
ggctcactattatatatttgtggcacacaaatcagcaacagatagcaatgttgaataagtgtccaaagtactcgtcctatctgttggcatagagaatgttgtccggggtaataattaaggatacctgaattaaagctgaggcatctacccgagagtccctcacctcggatagaactctgccttgcccgaggtcaccgccgctccgtctgtctcacccgagccattctcgggcagatgagatagcagcacacaaaaacagggagggaacacccgcatttaatgcgcgtacctaccccacgccgcggcagcagcgcacagtagcggacaagacagccatcacgtctggcgcaacaatatgattacgtctacgctacagtgtgcgcatgccgcctgccaccctccgatgggacacctaatatgataggcagagtagacctaccctcgggcgcaatctctccgcctctcccgaagcagggttcagaccacgggtgcaatctctccgcctcgctcgacgac

SEQ ID NO: 189406 - DNA, 411 bp, Zea Mays
ttgcttcatccatatttccatccttgcagaaaccactgataagagctgtaaatgtatatacattccctgaaacagcattcctggtcatctccctgtggagctccattgcactggccagatcccctttcctacataaaccagctataagaggggaatatgatgctggacttggtgtcaatcccttcgcaaccatctcattcaaaagacctcttgcctgatgaaaattgttgtgtttgcagtaaccattaattaaagagttgtatggataaacagtcattctgattcccttctccctcatcctatcaaacatgcaaagtgcatcttccatcatacccctcttgcacaaggaatgtatcagtatagcataggtcacctcatttggatctagacctctgtctgccatccctctga

SEQ ID NO: 189407 - DNA, 320 bp, Zea Mays
ttcgcttctagatctgagttctccttgctgatgcttctagatcttggccccaccgccctcctcgatccgccatcaacgtgtagcagatcccccaccctcctcgatggctcgatctctgctccccgccatcaacacgacgccgatggtgctcgcccggatggtgctcgcagcgcaaatgagtccgtgtctaactagagtggacttgtgaatatgtcaaactagctatctaactgctgaatctgtcaaactagttgtccagtgtctgactagataattgagtccgtcaaactagttgtctagtgagtagtgactaactggat

SEQ ID NO: 189408 - DNA, 313 bp, Zea Mays
atggtgaagtgttgcagctagggatggcaatgtgtccattccccggttgggagtgctcccccatccccgtccccgcaacgctggtgtttctccgttccctgtccccatcctcgggcatggggaaggtttttctctgtcccttgtcatggagaaggtttttccccgtccctatccccgttcaggtatacggggccccaatggggaaaaatccccacgaaatccccgcttggagactgaatcatttcagcaatatattcaattgcaaacatctaaacatattgatttctaaacataacaacacccaaaattcatc

SEQ ID NO: 189409 - DNA, 331 bp, Zea Mays
tccgccatctcttgtactcaaagaacacatgagtccctctgtcatgcttgtcagttaggtcgtcatgtacgccttcgtttctcttcctctacctctcaggttgtacgtccttttgctctcattcactatgacttgtggacctctcctatgatcagtgtttcgggatataagtactacctggttattgtcgatgatttctcgcattactcctggacttttcccctgcgcttgaaatccgatactttcacgactatctctcacttctttgcttgggtgtctactcagttcggtcgcactattcaggctaatcagtgcgacaacgggcgtgagt

SEQ ID NO: 189410 - DNA, 417 bp, Zea Mays
gtttattcaagtaaaggttggatcttgttgggatttccggtcacccacatgaacgacatgtgtatataccaggtggtggcctcatttggcaagcttttgaggtggcacaacagtccaaggatcaaaacctatgtgttggtcaaatgcctatacatctctgctatggaggtcccccagaagtgccttgctctcttttggtgatgacaacacgggaagggtgtgttcttgatccatccctaactatatcctgactccagatgatgattggcatatggggaacaatgatgcaattgcgatcacatggaagacaacatcccccaatggcaatcctcacccttccccgaagacgacaacgatgaagattttctgcaggctgagagggacttcatggaaaatttggtcaatcagaatctaggc

SEQ ID NO: 189411 - DNA, 492 bp, Zea Mays
tgactgttagcttgagccgcaaaagaaacctctttgttagagtggaactgagaaaggacgattctgacatcaggaagcctccattagaggtttgcttgctggattttttgtcatcctgttgaatgttggtgtctagtcaaacatccttatctattagagatgtgggcttccaggctgttcatcctagggagcggaatacgatgctacagaagtggggccatacacagattgctgttggaacaagaatggcttcctaccatgatgaagttaaaatcagcctacctgctcttttgacaccccaacatcatcttgtgttcacatttttccatgtagatcttcaaatgaaacttgaagcaccgaaaccagtatgtgccatgttccttattagtttggattatgcttcattgtttagtttgctcatgtctgacatgttctttatttcttcaggtgatcattggatattctgtacttccactgtcgacacatattcag

SEQ ID NO: 189412 - DNA, 374 bp, Zea Mays
attagaaattgctaaagagcttctccatcgctgggaaattgaaagagatgaaagggctcttgctgatgatgaggagtggctgagacggaagttgaagcttcattgtcttggtttggcctcgctggtcagaaccatcgcccgtctgcgttctcggattttgtatattcaggagggtgatgccaacacctccttttttcatcagcaggctagatacagaaaaaagaagaatttcattcctaagctgcacgttggtgatcaggtggtcacctcccaagaagataaacagaaggctgtttctgatttttatgagaacattttgggtagggctgaggagaggagctacactcttgacttggatgagttggccatccaca

SEQ ID NO: 189413 - DNA, 340 bp, Zea Mays
aggagacgaagaatacacaaaatgaagggtcggaccaggcagcagaatgtgggaatgaagggaaagaaagggaggagtggtagcttctgccatttcactgctgcacgctatctatctttatgggccaacaagctacagtccaacaacgacgaggagcagtgcatagcacctcctactcctcctatcttctttgaaaaaaatacaagtagatttatgttgtttcaaacctagatatagtatttgttttctagatcaaaaagtttgatgcttttggttcacgttaatacacctccctctctcagggtccttgtaaatttgacatctcggtcctgccattgcg

SEQ ID NO: 189414 - DNA, 318 bp, Zea Mays
cgccaccaccacttggtttgtatgccaccatctccatggagagtgtcgacgccgaagtagagagtggaacatgtcgccacagtcgaacccgcggttcaccatcgccaggtcctcgaggaattaccatggagcgtcgtcggggcatgtgggagctggcgcaagtgttggcgtgcacaggtagcagtggggtgaccgggaattgctcgctggagtcctccttcgccgcctgaaccatcgcttgccatgggcgaaggccaccgactcatcgtttggcggtaagtatgtcttgattgagttcgcgtggttctctgctgtgtg

SEQ ID NO: 189415 - DNA, 333 bp, Zea Mays
tatggttctgcaacatattctggaggaaatacttcaactatgggatcatctacttctagcatatcaacaccacagcctacatattcaggtgttagtgcggcacctgtggactcagccactatccatgtgccagcaaataaaactgcatatggcagtgccaattctaatactttttcgaaagaaagcattcataatagttccagtgcatcagtacctcctatctcccaacatgggccgtctgcttactcttcagcacaggttcctggttctaacaatatctcacatggaaatccaggaggtccaccttaccctcaatacagcgcaacagtccca

SEQ ID NO: 189416 - DNA, 410 bp, Zea Mays
gttcgctaatgatggaatttattcagcgaaagcagcttataatggcctcttcatcgggtcgaccaaggctaagtattgggaactaatttggaaaacctggccccctcccaaatgtaaattctttttatggcttgctgatcttggaagatgctggacagcagatcgtctgcagaagagaggacttagccatcctgacaaatgtgtcctgtgtgaccaagagcaagaaaccatggatcacattttggtggggtgtgtttttgctaggagtttttggtttcagttgctgggaaaggtcaacttatctgcctttactcctgtggtgggagaaactaaaatgatggagtggtggagcagaagcagtgagcagttgcaggggattgctaaaaaggggctcaattccttgattaccc

SEQ ID NO: 189417 - DNA, 440 bp, Zea Mays
atcggggagaaagagaaggcccatttaacgtcacaagtctcctagcgtaacagcttatcctctcccctcccaaactcctttgttgatgcttgtcactcgcccacgcccttgacatcgcctgcttccccaccggccattgccgagaaggcccatttaacgtcacaagtctcctagcataacatcttatcctctcccctcccaaacttctttgttgatgcttgtcactcgcccatgcccttgacatcgcctgcttccccaccgtccattgccgcccccatcgatgttacctcctcccccactgccacatgacgtctgtgccgcccccatgcgtccttgcctgggcagatgtgcctgccgccaacgcctagtgcagcctcttctcccactggccaccgccgctgcacgttagcatccctgccttggcagatctggccaccttt

SEQ ID NO: 189418 - DNA, 463 bp, Zea Mays
gttgaaggcatttgttttaccaccatattatgaacttatgattgtatcgttgatcagctgttttaaaatcgatagctaaaggtttggaaacattaactggtcctcttgaagttgtttggtagtgatgcataattattagaaacccaacaagatcaccatgtgaccatgtattctttctgtgttgtctaattggtctgtgctgaaacacataatgaatcaattgtttctggtgtactaactagatcacaagttcaaaatcgttgcttagtaggcaacataattgaatgcctgcgtggccttggtcagtagcttcctggactcaattttagttatttctatgctctctattgaatatgtacaattagtattttattttagaatgtgacagttcatatacctagatctttaatcctttctctgactgaccccaatcattattacctaaaccatgcaattgaatata

SEQ ID NO: 189419 - DNA, 299 bp, Zea Mays
tttagttactttctccagattaggccgatggtgaagccaacaaagactattctcagcctccatgacattcggcgtaactggtttgagttcatgcctcacacagagcgaattgctgtaatctttctgtgggctccagttgttcttatttatctcatggatattcagatatggtatgcgatcttctcatcacttactggggcacttatcgggctgttctcacatctgggggagattcgcagtgttgagcaactgcgcttgagattccagttctttgcaagtgcaatgcagttcaatttgat

SEQ ID NO: 189420 - DNA, 314 bp, Zea Mays
cggcctccacatccgacgcacgtaccctctcccagcttcctgcaggtccgcgatgacttggctctcgaggagcttaccatggcaaaggctcctcccgtcgtggctctcgctgctcttggggggcctcacgacgcaggcaaccccaggccaccctccaccgccgacacctccatcctccgacgccgcaccaacaccagcggtctcctcagcagcagcatggaggaggttcgggtggtggctcgggccagcgcagaaagcggggcaaacgcggtggcaggtcctctggcggcagcaacagcagtgttgcgcctggc

SEQ ID NO: 189421 - DNA, 760 bp, Zea Mays
cttgcggactaccagcgccaccgtcagcctcacacctcggccacctcatcggaagccaaggggtgtaacatagtaaattgggtttgcgtgcttgtttttgcagagcaggaagataagaccaagcgattggcgtaccttgtgatactcctcgccgacgaagggcctgaagaagatctgggcatctgatgtatggcagcagcgactaaatctaccatagatgtagtaccgcaaagaatatgaactgtgggaatataatgaatgcatgctcacctgcacagctctgttcaacctcttgattggcctggaacacagatcaccgcatgaattttagcaaagagatcaaaggagcagaaaaaacagaacaaactttatttcttggtaggttgataatgcaagtaccaataaaattttagacaaagacatgtcaacgtagaccatttaaaactaagttattgagaggctaacccatagtctaacttctgaaactagtttccgaatcatactgcaattctgttgattcttcatcataactttaactgtctcagcatcacatatcctgatcccacttgcactgcctatccaaatgccaccactgtggggaggatgaagaatagaagggctacaaagattcaatgcaaagcacacctgactgcaggcgcatatccagtaaaggacatgggtgtgctcatgtacgcataataatctttgaaagggatcgaagttggcatgtgcatgtacacacatgtaattagatggactc

SEQ ID NO: 189422 - DNA, 402 bp, Zea Mays
ctcggataccggaggtacaagaagaagggaggctctaccggtgcaaacagtttcgcggaggacttcgtcgtgccggagctgaggaagttcacttgcagcgagttggatgccgccaccagttcattcgacgaaggcaacgtcatcggtagcagcaacctgagcacggtctacaagggcgtgctcgtggagcccgacggcaaggtggtcgccgtgaagcggctcaacctagcgcagttcccggccaagtccgacaagtgcttcctcaccgagcttgcgactctgagccgcctgaggcacaagaacctggcgcgcgtagtcgggtacgcgtgcgagcccggcaagatcaaggctgtggtcctcgagttcatggacaacggcgacctcgacggcgcgatacacggc

SEQ ID NO: 189423 - DNA, 551 bp, Zea Mays
ggctagcaaggcctcgtactattccgtagcacgatgctaggaggattggacgagcgtgctacgggcagaggatggtagatgcgagagtggtgacgaggaggctgctgagagaaccagccggtccaccgggcggagggcctcgcttgcccgccaggtgaccatcgggtgcacatgacgaggatcgcactcgacgatgacaaggtggtacactgacggctcgtcgcgagagggagagaggtggtcctatgggtgagatcactaggtcaggctcaaaaagggtgtcaagctcggtggttgtggcggacggagtggaagtggtgaaggtgaaatcagactcatcaaatactacctgctgagatgagcacacagtgggtagatggattgagacaccagtaccctttatgatcgatggagtacccgaggaacacacaacgagtcaagcgaggcgcaaggttttgaggtgttgtggccgagatattaggctagcaggcgcacctgaaaactcgaaggtggtcgtaagagggtgagaccccgaaaagggtgggagtggg

SEQ ID NO: 189424 - DNA, 287 bp, Zea Mays
tgctgttgctggcggcgtggtggttgcgcggctaacgaaggcggagcggtggttctttggtgatgacatggcagcgtgaccggtaggacctggctacctcttcatggcgtgcaagcgagggtcgaggctatcagacgtgccggtggtgggcggtggtgaccgttcggcaggcttcccgtagaatggtacaatcactgccccatcggagtagctcctcatccgtgtgcatttcgacgggtggcggtggcgaaagtcttacccgctctctgagccgatgatgacgacca

SEQ ID NO: 189425 - DNA, 282 bp, Zea Mays
cgtggatgtattgaccgacggcccagatcgatcgcgcgtctggaccgcacgatttggatccaagggtagcgtcgcgtgcattctgtggtgagcgtgatctaatccggacgctcgattcatcatccgacgaccagtgttggctgataccccttcgccgatcgcttttgcataagagaccttgggttattagaaaaccaacccgcagtccgcactgtatagtgctctgagtcttagaaattctttcacgaaagcccctgcgctttacagaaaatgtggcccagt

SEQ ID NO: 189426 - DNA, 408 bp, Zea Mays
ctcggacagcagtctgcctccttcagatgagaatgagtttcatggtgaggaggatggagatgtccggggtccgtccaatccccggatccgacagccgtgccctttgcagcgttagcctatccaccatcgcctcggttcacatcagagagtgggcagagaacggtctgtagctatgcatggaaatatgatggaggcgccggttctagctctggtagatggtgctgctgtcagtgttggtgatgggctgctgacctcacctggaccttcctcgcctcagcacagaagtttggctgagccgctggagaaggctgggttgagctcgcccctttctgccacttaagtgccatgcatgacaacctcgaagattaacttagctgggccgtctgtgtcggctgctgtagggtcgct

SEQ ID NO: 189427 - DNA, 612 bp, Zea Mays
tttggggagagcatcttggaggctgttgggctacagttaaaatgtctgcccaatagtgcaataccagacgtcctttgttggttttctgagttgtgcttatggccttatctcgaacacattaaggagcatcttgtagttgcaaacggagttagttatataagaggaagtattgctgctaatgcaaaatcagttgtcttctacctacttgagtctattgttactgagcacttggaggctgttattcctgaaatgcccaggatagtgcacattcttgtgtctctctgtagagcttcttatactgatgtggccttcctaaaatctgtgctatgtctaatcaagccactcatctcctacttcttaaggaagggaactaatgaaacaaaagtactgggccatataaaggagggcagcaattttgagttgctttgttttgaagaattgtttgaaattgttcgctgtggtaaagattcggtggatacaactgaagataatattcaggcaccgttggtcatcttcattctgggatctatgtttcttgatttctcatttgagagaaggattgaaatgttaggctccttgttagtatggattgattgcatcagttccgatcca

SEQ ID NO: 189428 - DNA, 479 bp, Zea Mays
acatttcacacccctcaactccagccgctagcaacaaagatgatcacgctgctcttccaaatggttttggcttgaatcagttggataatgacataggggttggctgggaggcaagctgcattgaacctatcctcgatcaacttgtccatgggattggggtaccaggatggtcttcagttggccaaagacttattcaagcattgattgatgaagataggatcgatagtattaccaacaacacttacataagcgagggctatgcatttgatacacatgaaattcattttgatggaggaggatggaagcctcactcaaataattataagttagaacctttagcgaattttgaagcttcaaggaggggcccaaatggtctgacaatggattctgactggaaatataatgatgtgtcaaatagaagtggcaatgtcatggataaaaccaaggtgtggcctgagtttcagtacagtgagatgtgc

SEQ ID NO: 189429 - DNA, 635 bp, Zea Mays
gttccctccatttgtaccccaagagctagggttctccactcaacaaatagtccaataagaaccataaccatgtatcttcgctgtcttgcgggtgatcggccaaagtcatggcttaaatggcttccatgggtagagttttgctataactcgtcctatcagactgtcctcaaatgccccccccctttagagttgacagggaggttcccatgtggccgcggttgacaaacagctccaggatagagatgacttcttggcagacattaaggatcgtctcatacaggctcaggtgaccatgaagcaataccacgacaagcgtcgtagggaggtagagtttaatgtaggtgattgggtttggctaagactacagctacgcacaatggtgggtgttacatcagcagctcctaccaagctagtccccaagttctttggtccttatcaggttctgcaaaagattgggatagtttcatacaaactacaattacccaggaatgctcagattcatggcgtatttcatgtatcgctcttgaagaggtttgaaggctcggccccagaccagatagtttcactgccacccttgttacatggccgagtgattccaacacccgaacatgtgctgtgtgcaagagttaacagag

SEQ ID NO: 189430 - DNA, 845 bp, Zea Mays
gtttatttgcgtactatccatgcgcttctgattcacaacatccttttaggtctcctttgaaagaagaattaggcagcacatctttacgaatcgaggatgtcagtttctatgaaggacctggacccagctttccgtggctctggacaaaaggagtatccttttcaggctttcgtttattttgttacacaattacattatgactgttttttagcgtttgtcaccttcatgctggtcgaatctctaacctctctcctagttattggttagtgattttgggcgatgacatgaggtatcatacaagaaaattaaacaatcgtttttggattagcacgggataaccatttttatatcccacacgggagcggtagaggaaaaacaatcatgtacctgtttgacggttttatcaattactaatttgtaatacataatgaactctcgtgggatatgccctctcagtgtgttctatatatataacacagtagaaattggtactcatttcctggaaaaggtgtctgcatttttggataactaaatagtaaatagcaatattaataagctaatttaaatattgagcaattacatcgaaggatgatattataataactaaagcttgtcaaaattgagttcatcgagtatttatggtcttatggagcacgcacttgatctcaaatttattgttgaaaattactctacaactccactatgcttttggtctaggtccatgaatggctattgttatccttaataccttgcagcggcttggaaatatggcgtattgagaatttcaagccgatccctgcccctgcatcttcgtatggaaagttcttcatgggtgattcttacat

SEQ ID NO: 189431 - DNA, 469 bp, Zea Mays
tacggagtaaagacatctaatccactatttcgatcccaatgtgccaaaaagtatagatcaaatgatgttgaagatgatgatttacccatttcagtgaataatgttaacattgcgccaaatgagcatgctgaggtggttcccacaatgtctactgccatgactcgtgaatcaaatttacaagatgttccaagagaaagcacctctgatgatttagctccgaaagtggtttgttgccaacaaaagcttttggaaaacacaggagatgattcctgtaaaactttagaggtggttcaagattcaggcgatatattgtctgcgactccacgtggtcttcagatggcacacaatctatacccctatgacaacaaattggataaaccagatttgaagaaggaagcttttgctgatcaatcttcagctcttgggaatcctttaaaagattttgttattccagagcaatcttacatct

SEQ ID NO: 189432 - DNA, 1276 bp, Zea Mays
ggttaatatactcatggagcttagacacaaaaatattgtcaatctcctgggatactgccacgaggttaggggtacgtacgtacagtacaaaggaaaacctgtattcgcagaaacctccgaacagttgctctgctacgagtatctgcactgtggaagcatcgacaagtacatttttggtatgattacgaagtctgatgggattaaccctttacctgctgcttaatggtagattcacttttctaaatgccataccccaccaaccatcagccaccaaagacgttctagttttatttttagtcagagcatcaagtttgataagtttaccaaaaaagtagaaatatttatgatactacataattatcattagatccattataaaatacactttcatagaatactgatctattgctaaattttgatacatctttctataggtttagttgaacttaagatagtttgaatttggatcacctacaatgactttttttcctaagagagagtatatacaagtggcaaatctgaactgttgtttgtttagtttttttatttaattaattgattgatctaacaagagaaaaaaattcttaaatcctctcatgaatggagacataagtggccgtgcgggcccttgttgctgtggaccacccttccttttggccatattttattatatttatgtatagttttatttatgtttgatatattaaatcactaaatatttactaatcaaatcaagtcatttttatagttgcaaagtaaaaaagatctaccacgtctaatagatcatgcatgcatcacttagatataggaaaaagtatttttcatatcaaactttgctttatttatcttatttaacaaaataaaaaattaaataactatatgtttcacatattacctcttaggaagtaatagatgatcctaaccttatgatatagttaaatgaatggttaacaatcgtttgagagtaccatagcatatatcataaggagaagaaaatcagaagtgccaaagatcctgaacaaatgtttagtgttgcagcagtcagcactatataaaattccaggaattgtattctttctcttgatttttagttctatttttttaaaggaaaaaaccatgaactagattggcacacgcgttacaaaatgattaaagggatctgtgagggtttacattacctccacgagaatgacagagctccaattattcatttgaacttgaagccagcaaatgttttgctagacgcagccatggaacctaggatcacagattttgg

SEQ ID NO: 189433 - DNA, 526 bp, Zea Mays
gccaagaggcccttgatgcattccagcaaatgattcttgatggttcagagccaaattctgtcactatcatctctctattgtctgcttgcgcttccttgggagcattgtctcagggcatggaaattcatgcatactctctgaagaagtgtcttttatccttggataatgattttggtggtgacggtgacggtgaggatctaatggtgtacaatgcattaatagatatgtactcaaagtgcagaagtttcaaagctgcacgctccatatttgattccatacctcgaagagaacgtaatgtggtgacttggaccgtcatgattggtggatatgcacaatatggagactcaaatgatgccctcaagattttctcagagatgatttcaaaaccatacgcagttgccccaaatgcttatacaatttcctgcattttgatggcctgtgcacatctggcagctcttcgtatgggtaagcagattcacgcttatgtcacccgtcaccatgaatatgaaccatctgtgtactttgt

SEQ ID NO: 189434 - DNA, 506 bp, Zea Mays
cccccttccccaatccccctcccaaggtgcagcccctctcctttgggatctccatcgagtggtgcaagcctctaattggagaattggtggaggaagaacaaagaggtgaaggaataactcaaggtgatcttatgtttattttgtatttttgctgcgattatgtttgattaaccgttcccctaagcgaattggtggtagtgctgtcctgattttgggtggcaggcggacagaagtattgtgggcagtttctgggggttttgtggcggtaattagctgtaatcactatgataatcatgtagagctttgtcatacctttccaacgagtacttatgcgctcgattcggagttataatttaggagatatcgctgtttgaatcctggtatgttgctgtccaaaaaacagatttccgcaggtgggcgaacagcattagtattagcagattctgggtatttttcgtgggaaattagtgataatcaatatgataatcatgtagagctttgtcata

SEQ ID NO: 189435 - DNA, 472 bp, Zea Mays
gacgcgcctgccactgctcctcagtgagaagcaggcgcccaagctcatctgtcgtctcctccaggcagaagcggttctccgccacacggagccgcccgacgagctcctccagcggcattgtcttgaggtcgcacagcatctcgatggacgccgcgacttgattgaacttcggtggaacaacgcgaagtagtttccgcacgacgcgtacctcctccacctcctcgccgagctcgcgcatctccgagacgagggagctcagtctcatggcgaagtcgtccaccttctcgccttccttgaacttgatattctcgaagaccttgagcagcctttcggcgttggcctcccgaacacgcgcatctcccatgcgcatgcttctcacagccgcccacgcctcctttgcgctcttcttcacagcaagccccgccttcatctccggcggcactgcgcgcaggatggcagccaacgccctccg

SEQ ID NO: 189436 - DNA, 2297 bp, Zea Mays
aagcacttagaacatcaggcaagatgtcggtcgcaagaagtatgttctcatacctgcaagcattgcataatgaagatatcaaattcaaaaccatataacagcataacaaagttcgacataagaatgcagccatcacaacttatggacaaagaaactcgtctagctgctggttaaaattccttactgctacagtcaccaattctcgttttattttctaattaattatgtagtgtatggtctaacctacatctatctacgatgcaaactgttaggcatgtcactctttccatcttttcacatacatcataaaaatctactaggtgattcccaaagttggtctcaatgtgtgcatggttccttctccatgcatggactgcattttctgagaccaaccaaaacagcaaagcaaatttatgtgccacaaaatagtatgatggataacaaaatagcaaagcaaatttatgtgatacacgatgcacgaaactgatgctttaaaagagtagagatagagattcaacaagtatatgggatcattaataactaaaccacgtctatgcattaaaactagaatcaaaaggcagatctcaaaatgtagatatcacaaaaataacaaggatgcaaactatgcacacagccacacactactcccaaatgaactcaaataagaatttgcatagatttacacagacatatatgtcaaaagagagagaaaaaatccaccagataaatgtaactccctgcgtataaaaagatatgtgcaatgccttaggagtggtcaaacatccttcactccgatggctaatatgtttaacgtgttcagattagtcagataaaaagagtaccattaggtttactataaatactaccagaaccataatagttatagtactttctactggggacattatactatgaaaaaatggttcaaaatgctgatcagaaattgtttatcgtccaaaacgtcatatatgtttttttattacctcttatgtgacctctttcttatttgtgtaaacaaatcattgcataaaacatttcagaaaacaatggaacatcaggacgaacatacctaagcagagatgagaacacaagtgcctcgttgacctgacaaacttggtgatctctgttcctcataagcatataagtcctcccaggttgacctgaggagcccactccacgaattttcactagtaaccatatgaggaacttcactccagagactgaatcacagcatgtatccagtacatagagaactgacagcagttcttcatcacctagcctccatttggatgcagttttatcatcaggctgcaaaggaaggatgcttatagaattggtagctttagaagctgtcattccgtttccatcaacaagctgtcttattgatttcaacaaccatgaagagacagatcgtctttcgagcaatctaagtctttttagtgacttccctattgcagtcacgtttgctgcccttgtgtgatcaaaatctttgacgttgtcaccatcgttattaggttcatggtggggacagctcatcttgctttcacaaacatgactagtagatgccccctggctaccttcgattctagcagctgcaagctgtgcaagactttgtgttttacgaacaacttttgccctacctctagaagtttgcttaacagacttctgtacaggttcaacgttgaaagattcttgtaactttgtccctttcttcacccaccaaatatcctcctcgcctgattgaatcaatggaaacccttggaaaggagtggcgctgtcatccaatttctgccccttggacctcatacaatcctcgcatccacttttggcttccccagtctcaacttgtgtgagcgttgacgttactgattcttgaaagcttgttttgatttcacaaagttttgattccactaggggaggatatgtaaaacccaacagacttgacaaaagagctttaacatcttctacttgttctagcactcttccatgcttatcaccttctgatgcaactggaagatcactctgcttccgaatgcaggaacttgaagtgtactcacctctgccacttgcataaaatgaatgaccacatgaaagttctgagagaacaaggcgtcgctcactagagtatgttgacatcatctcatatagctgttgctcttctgcagtcctagtttcctcaagaacatcaaataaagaagacccaggaagctgcttcaaagttctgtgatgcctcctttttctttcaacatccagcattgtatcgttcttatcagtaattccactaataattagctgcc

SEQ ID NO: 189437 - DNA, 441 bp, Zea Mays
gacgttgaacttcgtggaattcctgcgcatctctgggggattgaggctgctgaagctgttcttggtgctttctgtttgattcatggttttttgcctggcttggtcaaggaggaagatatgtctgttctcagactgaaagtatggtgccggtcacctgtgctgctgccggcggtggtggatctccttgctgaagagccgatggtctgtggagaggatgggagctgggttcctagcacgttggtgttccctgtttctgtggtggttcttcattctgatggaagttcagattccggtgtggatccccctgcgccacccccttcgggctttgtcgacgaagatagtgatcatgagcatcatgtggagcggccggggcgccctgcgtcttctgttcgggttccaattcatttgcgtctgggtcagcgcagtcgttctgggcaggtg

SEQ ID NO: 189438 - DNA, 509 bp, Zea Mays
ctaaattgtgtagtatggacgtccatatctgccgagcgaacacgcaggagacaagaatatgctggatggtttcctcggcctgatcacacagagggcaagcaactggatggggcagacctctttttgcaagtcgatcagctgtccaaaccctgtttttgattgccaaccatacaaagaatttgcatcttaagggggcctaggtctcccagacacgtcgccaagggccaaaagggatagagccaacaaagagagcatcataggccgatttgctataataagtaccatgagcagagaggcgctagatgtgttggtctgcgatgtcaggttgcagaactaccccatcaaccaagttccatagctgcagatactccactaggaccgttacaaacaatcctccccgaatatctaacacccattgacgatttgtgagcccctcggctattgttcttcgctttaaagcccttctagaaatcacttggataagggttggagagtgttcagccacagtt

SEQ ID NO: 189439 - DNA, 273 bp, Zea Mays
gaaagagaagcgccagggatgagatcgatctgatgctcaatgccacggagcggaggaagacccagtggtaagtccgtaggaaaaacatgactcctgcaaaaatttcactaaattcactatcagcggaggaagacccggtggtaagtccgtaggaaagacatcagcaaaatcagtaaattcactaatggcagccttcacttggctattagctagaatatcatggcatgaaaatttctgttctacctccaattcccaatcaagatatgcaacagg

SEQ ID NO: 189440 - DNA, 390 bp, Zea Mays
cgactgtggtgatggagagggggtcagccacgacgattggcggcacccaagctacggcgagcaattcaccgagacttggttacgccccgagttccgatgtccactgtatagtctccacgaagctcggggatgttcctaaacccgaaagcgagaacacaacgaccgtgtaggcttgattatcctacggcggatctatggtggtggcggcgctctcgagggttgatggaggatggctcaggtcaagtcgatgggtcgaggtggccacggggcgcccatatttatacacaggagagagcgtttgttatgatccggccgacagaaatctcggcagcttctgttgcgcgggcatggcgcgtgaatctggtgaggaagaaggccaccggagccggg

SEQ ID NO: 189441 - DNA, 343 bp, Zea Mays
atcgggatgttcaaaggtgacagtggacgaggtccaagggggcgagcggttctagacatggaagaagggaagggtaagcgagtgtgacacccaagctgacaagcatggcaaagtgaggcatcattgccatgggggcaagtgatggctaaggtgctcgagagactagaaaggacgttgtgacaagggtggccaagacgacgatgacatatggaggcagaagcagcagtagcgatgatgtagggtgtggcaacatgggttaagggaggtggggcgagcaagcgaataagatataggaggcccagatgtcacagcaagcgaccacaacacgagtggtaagatctct

SEQ ID NO: 189442 - DNA, 655 bp, Zea Mays
gggcaggctgcccacctgtccgggcagatgtctgggcagacagcgcagatgaatcaggtccctgccaccggtgtcggcattggcgttggcactgccgatgggctaccgcagcaccagccaatgcaggagatggcggcgttctcgggaacggaccagcagtttgtcatgtttcggaccacaatgcgcgaaaagatgtatgctttttactactgctgacttgaactaagtagtccattcgtagtcatgtatttattgcactgagttagtaagcctcagctagcggaatggccgcatatgtcctgataccaactggaagatccaaattatctacatgcccgacaaaaatattaccttatcgaacttcatgcttacataaatttatctccttgtcataattacgaatgcgacaatggatgcattacttatgttgttagctttacttaaaccttccgagacttactgattttccttcctataagcgagcaaaatttaggttagtgacggattttttcttcgacccgatagaaggtatatgacagcctttagtactattcttgcagatttaactatataggaaggaaacagtcatcggctgagtggcggaagcggttgccagaactggcaaagcgacttgaggagatcttgtacagaaaat

SEQ ID NO: 189443 - DNA, 418 bp, Zea Mays
ggaagccactgcaggcactggcggggttgatcatcggtgaggcaccttaggtacatgacgatgacgcggttggtcgactcggattgaccatcgactgcgggtggaaggccgacgttatgtgtagtttggtgcccatcagccacatgagctcccgccaaaatgtggaggtgaacacggcgtcacggtcggacaccatgtactgcggaacgccgtgcaagcgaacgatctcggcgaagaaagcctgggccactgactccgccgaataaggatgcgctagcggaataaagtggtagtacttgctgaatctgtccaccaccgtcaagatggcggacttgccgcggacccgaggcagggcttcaatgaagtcgagcgctacatccgtctagacgccttggggcaccggttgtggaaggaggag

SEQ ID NO: 189444 - DNA, 363 bp, Zea Mays
gctcgcaaacgcattggcgtcatttcttctggaagctactccggagagcttgggattttctctaaccagacaagcgagatggactccgacctgctgtctgagtctcagtcggggcacaagtcactggcctcgcgctcgcagcatggccgtgggcgtcatcgtagcctgacacagaagttcgcaccaaagacgttcaaagacgttgttggccagagcttggtggtgcaggcgctgtccaacgccatcctgaggaggaagattgggttggtgtatgtattctatggtccgcacggcacgggcaagacttcgtgcgcccgtgtctttgccaaggcgctcaattgcctctcctctgagcaccccagg

SEQ ID NO: 189445 - DNA, 485 bp, Zea Mays
ttcaacatcagtccgaagcggttcacccaagcctacggtaaacatctgagtttgctggagctgcgtcatatcctcgcaacgacagagaatggacagaaactgacgttgatagtcttcgacagtgctggtgcgccgaaggtccttgagatcagccatatcgttggaccgtagaggtggtccaaaccgcatacgggtgaactcaacgaagcgggaccaagtgagcacgtcgcccgtgtcccgctccagagtgtagaaccactctgccgccacaccgtccaaatggagtgatgcctgccacaccttctcatcggatggagtcctcatgcccctgaagtaagtctcacatttattgatccatggcagggggtcggactcaccatcgtagtggggaaaggagacattgggtcttcgatagccaccatcgtcgacgcggtcacgaggagcagatcttgtgctagccatgaccccgacaggcgccgtcggac

SEQ ID NO: 189446 - DNA, 433 bp, Zea Mays
gttttgacttgatccaaccaagaacgcgcatttcagccgtaaaatactcgtaccggtttccaggtccggtcgcgtcttgctctcttccgtccctcatttgccttcccgtccctgctattcgcgtgtgggcctttgcttacccattcttgcttccgctgtctttgctgcgtgtaaatctgatccagtacttgtgtgtccgcgtcactggggattctttactttaagttggatttggcaatgtcaatggaaggagcgatatctgatctgaattggtgacatttcttgctgctgctttggtcctggggtgggcggattggagagcgaccactgtcttgccggttgcttttggggtagctactgttcttgtgaatttctgatgcggagtttcgctcaggatagggaaaggagtgatctatagatttctaggcttctg

SEQ ID NO: 189447 - DNA, 702 bp, Zea Mays
attcaggacccagggccctcgctgccaaggtaatccgtcaaggattttactagcccgcgataatctgtactgcgaatcgagtcacgaggtcttgtgaagcatgccagaagttttccccccgctcaagcaacccttcgcagtacaccaagctgatccccacacatggccacttcaacgctggggtctggatattgtcggaccactacctacggctcaagggaaccacaaattcaccttcgttgccgtcgagtatttcaccaagtggatcgaggccagagcagtatccacaataacgtcgaagaccgcccaaaagttcttctggcaaaacattgtctgccaattcggagtcccgtccgaactcacagtcgacaacggcaaacagtttgacagccaggacttcagggacttcagtttctccatcggcaccaagcccgtcttcgcctcggtataccacccgcaatccaacggtgtcgtcgagcgcgccaacggcaagattttcactgccatcaagaaaagatttctcgacaacaagaagagcaaatgggtcgaccaactacctgaagtggtatgggccctaaacacgacagaatgtcgggcaaccggattcacaccttttcgtctactatatggatccgaggccatgacgccacaagagttaaagcatgggtcgccccgaacaagcacatcagcggtccccgatgt

SEQ ID NO: 189448 - DNA, 392 bp, Zea Mays
cacacagtttgtaattaagcatattgatgcacatcttgtttcttgtgccatgctcaactgcatgtgtcgtatatggcttcatattatagattgttacttctgttttggccttttgggtccatttcttgtttgattccattatgagattgataagttaaccgtttcaaaccgattaacagggaggctcgattcattttttccgtttgcttgtgtgttagtataatagagctgaaatagtgttgtatatgtgtgttgtgaggacacttagtttgttcaacatacacaattgtttttaatctagtgaggcgagcttgaagaaaatagttgtatatgtagttattattttctcagtgaattactcgtgcacacaactcatccacataaatattggt

SEQ ID NO: 189449 - DNA, 1532 bp, Zea Mays
gtcatagatgaacttcatatggtaagcttgtctaaaaccgaagtgctgctcagaacatcctctctttgctttaaaccttttgttgttggtactttcatggttatttataccacatctattttgttatgcaagttcattgccttaggaactgtcatttcagcaatctaggtttgtgacagcattgagagtactaacgtaattttgtaacatttccattgtttgtaatcttttaatagcatgcacgagataattgccatttaatgaggatatttgttggcctgttgttagctattagtgctccttggccagtgtgaattgtggaattggatttgttttatgaaacagatggagcactagagatctggtactatctggaatctaaaaagtagagcgtgtgcattttgtatgactttcttctttaattaatacaatgatacagaactctcctgcatattgaagaaaaaacgatgtacaattgcattgcaagtagtagaggttttatcattgctaactaagagcactacaaattcttgtataggtggtgtatgtggtattggtgtactgcatatatcaatcagaacttcaaatatgatttttcctctcccccttctctccgcctgggccgttagggagtgaattcagtccaacgcctaggggctatggccaccaatctagtccaagtgatgtacctttccctactgcatcattgtttagttttttaggtgtccttttttgttcaaggtttgggatggttagtcatcaacttatcacccatcctatctaatcaagtaatcttgtgtgttactttacctgttacccgagtttccatattgttaggttataatcattaagagcaatttgtaaataagaaaggtttgtcattatggacaattgccagtaaacaagaaacaacaaggagaagtaccattggtcctggcgctgaatgaattctggcagcatacttatcaaatgcaaatcatataggaagatttgactttccttagggctcccctcatatatttgtaatattaggcccaggaccaatagtctcccagctcgccattcggctaaagcactatggcagtattactatttagcaacccctaccaaaggaagcatatagcttgcatctttacctgtctttgtttacctttccatgcccttgagggttctttcaatctttcttcctgtatcctttgacttagtttgttgaacatgatgtgatatatagttgaaacttgttaagttctccaattatgcaattaaattaacaggttggtgaccaacatagaggatatcttttagagctgatgttgacaaagcttcgatatgctgctggtgaagggactttacagtcatgtagcggagaagtttcaagttctagcagtgggaagattgcaagtcatgggttgcagataattggtatgagtgctactatgcccaacatcgctgcggtggctgattggcttcaagtaagatatttaattctcctagttttatgtacttaatgaagggatgttttactagtgtga

SEQ ID NO: 189450 - DNA, 445 bp, Zea Mays
cgaggctgaacagaggacgagcacgcgccgcagggggccctctgcagactgcagccaccgtgcgatggagggggtgcagctacgattcaagcagagggccgctgaaacacaacatggcggcaggagaggagggtggcggcaatggagaaggggcgatgacactagagaagggggtggggcgctagagaatggtgcacgtgcgactgtgcgctacgtaatgcgtgtaccgtattggtacaggtagagcaaaacagtgtttgtgttgtacaaatggtgagtcgttccatgtaccagagaccggattagaggcccaaaacaggtataactagtctaccataacccctagccggacgactaatcatgagtagtcgacgactaggatgactaatcgtttgctagtcgctctagtcgagtcaaagaccctaattgagcttgcactagcgat

SEQ ID NO: 189451 - DNA, 500 bp, Zea Mays
cagcaaagaggccaaatgattttgacgggatagaagaagatggtgtaagttgcatgaacaaacaagtagttttttcgaggagcaaagaaaacccacctagtcatgtttttttagttaccataatctaatttacactgtatcactgtgatcttaacattgaactttggaaaccacatttttctaaccaagcaaagaaagtaagaagtttctctagtatatgaatggtgagacagtgaaccaccaattctgaatcaggctccttgtctaggacattattatgcctcagggacttcattctcagaattagctcaatgtccaatcaatatacaatttcttcaacatacacatgcatctgagcattttttaccgtttctcattcagaacatagaagatcgcactttgcagaaaccgacagtaaaaaaccttatggaggatgaattggaaaaattaatgctgctgaagaaatttccaaatgatgaggttcagagaagaaaagccga

SEQ ID NO: 189452 - DNA, 2192 bp, Zea Mays
atttagaaggcgatcctggtttagaaggtggtaaaaactccccaatatttacagacatcttgaacatggtatgtggttgcgttgataacacatcctctgacaggtatgcatcacattaaccgagataatgccgtgtcacacttttgcacaagtactaacatgagtatggttctatgtactgtagtactgttctccaagtcttgaaagtgcttctcaatgctgttgcttcaaataggtttagaggtaatttttacaagcatattctctactcgtatttttattaggtaagtttagctaatgctgtttttttaaaaatgcatttatgagatatgagcttataaataataacatcatgcattaaccggttaagcttatgcacaacactgcaacatgcctgtattaatttggacaatgttcgttctcattttttttttctgtatctgtaagtgtatgaaaatcatataaggaaataagttgcaagttgtttataaattcttatattttactgtaacaaagccagtggggccaaagtagttctgcatgtagatatatttctatgttaaagtacaatgtaagctgcaaaacacaattcatcttttgtgtttgattctgttttttggaatgcagttcatggagagccattgcttggggtcattagagtatgctataacattgctcttaataggtacctgttatatcactaccttcttgtttgcagtatgttgccttgttgccctttggaccatgtatgataatttattcatttgtattttgttagcaagagccctgtgaaccaggctacctcaaaggctatgttaacccagatgatcagcattgtattcaggagaatggaatctgagcaggtaaagaattccacatatcttatcttgtgcctaggaaaatgattcattgaggttgtttctctaggtattattttactttcttggttccaggtttctgtattgcctgcaagctctgtggttaaagatacaccttcatctatcacaaatgaatctgaaaatggagaaatatctaccgatggccaagatgaggaaaaagttactccgggagatgcattgtctatgaatcggccttctgaagcacctccaacatctgttgaagagcttcagaatcttgctggtggagcagatattaaggtactgaaactggatctcgttgctcttggaactttcaaacgtgtcttaggtattgcattggttccatctaattacaagagatcttttacaggggctggaagctgttctagacaaggctgttgaacttgaagatgggaagaaagtgtcacggtttgttaagcttgtactaaggtttttttgcatctctaaggtgatgcatccgggactcagatgtggcagtagctaattacctttgcccctcccctcttctgtttttccagtggaattgacctggacactgtgaacataatacagcgggatgcactattgctctttcgaactctttgcaaggttggttgctttagtaatgttactttagtcggagctataagaaagtaacaattatatcctaactatgttgtgttatccttttagatgagcatgaaagaagaaagtgatgaagttgctaccaagacaaggctgctatcacttgaactgctccaggttagcttacttctttgaggttgcttatttttatttttttctttgttttgattttattcgtagccattctcttcagggattgctagagggagtcagcaacgcattcacaaaaaatttccacttcattgattcggttaaagcatatctttcatatgctcttctgcgagcatctgtcacttcatctccagttgtttttcaggtgaaaatttgaaattcattcagttttggtttttatcatacctggtgtaacggtactcatcatttctgtaataaaagtggactatcatgttaagttgacttctcttcttttattacagtatgcttgcggtatattttcagttctgttgctccgttttagagagagtctgaaggtaaaattattattaagaggagtcatggatggaaatattgtttgttgtgttgtgttgcttttagtaacattacattctttgttttttttcaaatattggtgcagggggaaattggtgtcttctttcctctgatagttttaaggtctttggatagctctgatagctccctcagccagaaggc

SEQ ID NO: 189453 - DNA, 875 bp, Zea Mays
ggttaacaaggctatgtcatttatgagtcatctgttgactgtgttgtctgaacaacgacatcttgcttataatctatttgatcaacggaaccaattcaagcatgctattttcttattaggttctggaggtacttctcgacttatgccttttcctttttgggcttgaaaatcaatttgcaaaactcacttgttatcctttataggaaagagtaaatctctatcatcaagccaaaatgtgctgctgagttccatgtggcagcaaaaggtaggttttctgcttatttttttagctcatgcattttatagttttgttgtggcttgttctagttttcatgcagattttttgacagcatggtggctaacacatcgttttgttattctttaatgtagaaattgtttgatgctgtaatcactttgataacagactccaacttattgctcagaagcttcaaggattgccattataactcttgtaacaactttatagaagttgaagggatctcatctctccttggaaagttcatcttgaatttttctgaatccaaggtaaacttagtcttttctgttgcctcgtaggggtcacctctttagcttattgattgtagtgagccaagatcaaacatgggtctcaattttttttggtttcattcaataaatcttagaccccaagataagctccaaatgcgttgaagcctgtgtgaggttcctttgggttctgagcttaaggggcatatgagaagcagttcactcattgatttatttatatgtgccttgtaactctttttttgcaggagttgttagatgaatgcttgcttggatccactaatatatttgctggtgcatataagagcatgcctcattctgcaacagagatg

SEQ ID NO: 189454 - DNA, 400 bp, Zea Mays
atgcaagacttggttcgctgagtaaagtaacccatgggattgtgaagaacataccgaggttcttcttggatacggggggattttaactatgattttagcattgtcaaacatggtccaggatcctacaggtttcgtaccttcttactggacagagtagagactatgctaattggcttcttgttttagtgacgaagttgacgttgattctgctcggttgattggtcaaacttcttgctgggagttctttcttgggaattcagagtggagaaattgaccggcagtcaaacaacagagttggtcaacctccttcaacaaatagagaatcttagaggttgcttaagtttggtctagagggtcgattatcaaatagcgtagtaaatcattttccaccaactagaga

SEQ ID NO: 189455 - DNA, 528 bp, Zea Mays
aaaacagtaaaaccctaagccatcgcctctgccccctctcacactctactccattgctgccctgcggccttgccctctgctccggtggccctgccctctgccctctgttgcgctcgcctctgctcagctccggtggccctgccctctgttgcgctcgcctctgctcagcttcgacgctcgcctctgctcactgctcagctccagcgctcgcctctgctcactgctctgctccggcaaccgtctgcaccaatctgttttgaactctattcagagttcagtgttcagtgctcactttagtgcacacttcactagtctgttctgaacttaaccgaaatgagcacctctacagatggtaatctctgtgttcttttggttcttcaattgttcatttggtgctgcacctcttgagttggagttgttattcacactacagatgagactaggaggcggcgtaataatgttcaagttatctattagtggaaacatccttgattttgattgcttgtactgctgtcctgctagacagct

SEQ ID NO: 189456 - DNA, 485 bp, Zea Mays
tgctgtatgcagctctggtaccacccgtttaactcttgccactttctgctccttttttttcttcttcttgatttgaaggaccagaccatggacaacgatgatgcacaaattggagttgctaaaactcaggtttacacttgttgcacttactgaagagaggttttcgtatttttcataagctaaatattggtggctgaagggcagggtgctgaactgctgattgcagggaaagtattggggcattttcatctgctggcttcttggaaatggatgtctatttgggttcaatgggatgcttactattgaagattactacgtgtacctcttcccggtatgaaaatgtcgacgtgactattatttccatccatccatgtacctttaatttgctgttacaaaggcacacgtttactgatttggtgccttctggatgcagaagtaccatccaacaaggattattactctcacctatcagccctttgttctcg

SEQ ID NO: 189457 - DNA, 290 bp, Zea Mays
gcctcgcctcgtccacggcggtttgacgacattgtcctctccgtcgacttctccttcattgatcgttgtgactgcgtctccgacttcgtctatggcgccctccttctgtgccaccgtcaacctggcacctctttgtacgttgtggccttcccgcatgctgtgtccatgcccgcgacttgtacggtttgtcttcttcggcatcctcgatagctccatcgaccacagctccctacacacgatacctcgacaacggctccgtgcccttgcactcggcaacctcgacattatcg

SEQ ID NO: 189458 - DNA, 377 bp, Zea Mays
acgcaatcggggttgcggccacgatcgcggtcatggtccgacgtcgcattgtctatgtcgtcatcattctcatcctcgtcctcgtcgccgacgcccttggagcgggagccaccccgctccccaaccccaccggctgcaccgctagtgggggcgctcatcgaatcgctctcgtttcgcggatgcggttttggccgtgctgccacgtccgcatttgagaaggaggatctcaaggcgcgagccgcatttccgcagcgcctccgtactgccgtgcatgccgcgatgcgcgctagggatcctactgcaggggcattcgcgcttgttgatcgtgacaatgatggagaggggcatggcacgggcaatccatggttcgacagcgc

SEQ ID NO: 189459 - DNA, 425 bp, Zea Mays
attagcacaaacttaaaccacaaaaactgaggtcaaatcacattgcatttaggacaatacaacaaaacacagtgaaagacaagcttctaggcagagatcactcaaaataaatggaaatattttatcaggggcattctcctactgccaagccttcataagccttatgtccacataaggattccccagagctcacttagccagcttggttgtggccaacgagacaagacagacagacagacagatgagccccaagaaagcagtagtactggtactagcagtagcagcaggccatcaaccagagcggccaagcagacttcaatgggagaaatacactcggatttccattcttgatgcaaaaaacatcataatcatcaggctggtataccagaattcatgcccccataacaaaaccaaaagactactag

SEQ ID NO: 189460 - DNA, 304 bp, Zea Mays
cgcttgttcaaagttggacaataagtgcttcaacggggattatcggatatgcttgcattgttggattgtacatttctataatgatacttgtcatgctgtggggcaaaaggatacgtggctatgaggatccagttgagcaatatgggatgaatatttggtcggcgtctagggtataaacttacaatctcatagccaccatacttgatatttctcagagaactggagtgtgctggtttatgtatatagtatgtaaaatttgatgttttattgcagctgcgagagttttttcaaggtttggttggag

SEQ ID NO: 189461 - DNA, 1076 bp, Zea Mays
ggcttgtgaggctggaggtggaagaagagacaaattccttattgctataaccgtgcagcatagctgggtatatatggccgtcggccacctacaaatggagcaagtctccttgattttctctagcctgattgattgcttctttcctattcttatccctctttcctaatctcagcccctgctatctgtggctgatttgcagcacctgattttagccctctttcctaatctcagccacttgccattggtggctgatttgcagcatgcgctgctgcctgctctgcggccgcgcgctcggttgctcgccggacatcacgcgcgcgcctgcgcctagtgaatgtattaccgtacatgacatactttttctgggaagcaaccttttggaggatgttattcctgattggcttacaaactgttctaacttagtccaactagatctctctgaaaacaatctcaccggtcatattccttcaaacatagacattctaaaaaagctagaatatataggcctttactataataatctcaccggtgtcatcccaccaaccttgggaaacatctccacactagatgtagttgatctttcaatgaatcaactaagtggaagcattcctgatgatgtttggaaaatatcgaacataacacagttatttctacaacaaaataatctatcaggcggaatcctagatactctctctaaattatcttctcttgtgatattaaacttgcacaccaatatgttgggaggcacattgccatcaaacattggtgatgtgctccctaatctgcaagaactatacttaggaaagaataattttgtgggtacaattccaaattccctaggtaatccttcgagtcttaaaatcatagatctatcaataaactattttaggggcaaaattccgaactcttttggaaatctttcacatttgcagtctctaaaccttgaggtaaacatgcttggatcaagggatagtgaaggcttgcaattctttgatgccctcgcaaattgtagatctctcgttacactttcagtgtccaataatcagctacatggtcctataccaaactcgattgct

SEQ ID NO: 189462 - DNA, 484 bp, Zea Mays
gaccatgatacttccgctagaaggaagacaagcaaatattttgggtcaaaagcagaaaaggactcagatgtccaaatggcagacgcctctggggggaagagtgcggctaaaagaaaacttcagaaatgcaacgatgaagtcaaggaggacagcaagccttttccagcaaagaaaatgtttgatgatgaagaagatgacgattttgtggcacctgcaaagaagaaaactccagtgaagccaccaccttcaaaaaagcttaaagttgaatctaatgttgaagcccctgcaaagactactggtgttgatgatgctgaggatgaggacaggatggatgaagatgccaagaccccctctaaaggagctggaaggggaaggggaagaggaggaagaggaggagcaggagctgcccctgggggcagaggtagaggaggtgggagaggttttatgaattttggtgagaggaaagatcctcctcacaaaggag

SEQ ID NO: 189463 - DNA, 275 bp, Zea Mays
cgttatacagttgagtgatactcttgagatttaatgatagttcttttgccttatccttagcagccttagcagtctctgcattagcaagaatgttgtcacgagggaacggaacattaggtaattcagaactgcttggaatattttcgagccgtgcaaccatgagctccaattcttctttaatttgaatttggaagcgtagcacgacaagttttccttcaagcaaatccactgtgctgctatcaacaggatttttggacaaatcagcagcgatgcct

SEQ ID NO: 189464 - DNA, 313 bp, Zea Mays
aatcaggataaggcttgcccttactagggcatgtggctagttaaaaagttcttaagcatgcaggcctacaacggaacgactcttaatcgatggagacaaaaacactacatagagactatattcccaatgcaagataactgcccgttctcatcttaataaactttaccatagttctttcacaagtaaccataatcagtagtaacatatgtttcaaaaaccctaatccattaagcagggctaagcatcaataacttttaagtaaaaacatgtatcaaggatgattttcaatttaatcatggtgggtaatgcaaca

SEQ ID NO: 189465 - DNA, 339 bp, Zea Mays
gatacaaattggctcaacatatgaacaacatgagcaatatcaggtctggtgatggtgagataaacaagactacccataatatgatgatgccgagttgggtctgctagtggtgtcccatccttcggacgaagttttaaatgaatatccatcggtgttgcaacaatgcgtgtatcagtaagtccagagcgatcaagaagatcttgtatatatttggactgagacagataaaaggctttttgagtctgctgaacttcaatgcccaagaaatagctaagcggtcccaaatcagacatctgaaattccttactaagatgctgcttgacatgagaaatatgttct

SEQ ID NO: 189466 - DNA, 293 bp, Zea Mays
gtgcctagctttacccatgtcgacatcaccgagtgattcctctgcttcttttgtctccaattcctctaggcgtgaaccaacccagagtgggatcctatagcggcatatgaaaaacaggcatctttgcactgggatgcagatggatgggactttgtagttgcatcgtaactcgacggcgacctcaccgatggggatgacctctagttcctcattgacggggagctgaactccgacaccagcactgagtggtcttggacgtacgacggagaatcataagatgtggagtccttgga

SEQ ID NO: 189467 - DNA, 306 bp, Zea Mays
gcccccgagggtgttgccggtaatgattcggctcgggtagcgcgagctacgacccagcccccgggggtgttgctggtggtgatccggctccgatgggcagtgcaggctgcaacccagcccccgagggtatccaagcgggctccccttctcatacctccatggatgttcacattgggtcttctcctccacgttccgatggcatggtaacagcgcatgcttcaaatgaggaagtcgccttagaggtcggcacgtcagatgctagagttctgatgcctgctggtggtgctgagttgattcctggcgatg

SEQ ID NO: 189468 - DNA, 538 bp, Zea Mays
tatgcactgatatgatcaagctagaatatgaagataaagattaagtgaataataggaagtgtcaagccaaaatgaagaggatataaggaatcgtgaattggcttgaccatactgatgttggtccatgtatgtttctatgagaatcaacctaaagcttgatcgatcttaacatgcatatctagatgacaatcaagcaaggatcacaatattgaagaaacggtttttcaatggatgatcaatatgatgtgacttgaggatggattgataaggtgaagatagcaaggaaagggcttcaaggtactaagcaaaggtgaaggccaagcaacaacttgaggaccaagatgccaaggctaaggtaaagaagagagtacttgcattgagttgaggaactaatcaaggtacgaggagtcatattgtgttgaggatcaaatcattagtggaagtgatttggaagccatgaattgaactcatatgtgatgaaatcgttcaagtcacgtgctcaaggtgtgtttgcttgaagagatgagacaaagttgat

SEQ ID NO: 189469 - DNA, 405 bp, Zea Mays
tgtcaggcaagaatcgtccactgatatagcgatctgaaagaacagctgcagctacaagggcactgtcagatattcgtacaccatggtgcaactcatatctctctcttagccctcggagtattgaaattgtatcttcaactgaaggttgatcaacaaaaacttgttggaagcgccgctccagtgctggatctttctcaatatatttgcggtattcatcaagggttgttgcaccaatacaccgtagttctcctctcccaagcattggtttgagaagattaccagcatccattgcaccatttgtggcacctggaataagatgaacattcataaattacctactagcagagacaggtgttctatcgttcatgtctatagtagtaaaattcacagcaagcttcgacaggc

SEQ ID NO: 189470 - DNA, 278 bp, Zea Mays
ttagtgatcagaggcgggtagtttagtttgcgaccgtttctcttcgttgatcccctcccccttttctacgtttttatgcaggtttcatgtgtttttcttatatcctgtttctgattcatttttccctaattccttttcctaaactctggtgcccttcagtactagtctttactactgctagtagtatcacaaacggcatcaacatttttgttccccactttatcagtagtataatggaaaaacgtctggcgaaattcggaaatacgcttttgggatgc

SEQ ID NO: 189471 - DNA, 398 bp, Zea Mays
gtactccagaagtacgagatgcttctttttctgttttaactgccatagccaaggtttccttcttgagagcttgcttctctcttcattccattgcatatatcaaaatgtagcttttaaagcctagatatttttgttactcttgctccctatagatggttggtatgaaaccattggaacgatccctggagaaattagatgatgtgaggaaaaagaagttgtcagatatgataggttcttccagtgacactgttctgagttcagggacaggtttgattttctttcgtagttctacttgtatttaaatgggtcagatgtctattttggtctaatttctgtatgaaccacacttttccagctccaatcacaacatctggagcagccacatctgctcgtggggt

SEQ ID NO: 189472 - DNA, 1030 bp, Zea Mays
tatacatgtattgacaactgggccgccatcacaaatcggtgccccctttgcaaaagtgaattccaacacataacatgcactccagtaagtagcaaatatattttattgtcaatctttccctggctgagttctcataatacgtgttatatggttaaggtatatggtacgattggagctactgacgaagatgaatactctttaaccaggtataggccaatagcagcatttttttaacctctggcatgcacacatgttagtttgacactagtatccttaattgtttttttgttatatattctgtgctccccttgtttcctcctaagttcttaggaagcctatttctatcatatgttttgccttatgtctcaggatgttgtgttttgaatatcaataaaaataaaggattggtttgaaaattgtgaatcacaataccagcgaaaggttgcccttgatttcatttcgagcaaagtaataaaaagtgatatttgagtcacctttcatgtgaagcaggattttttatgatataccgggatgcatgtgcagatgcacaccattttcataggaattcatgccatattatttttccataatgatttgattgtatatttcttatttatgattcctccaatcatatgtttttccaaccaatgctctcataaataaaagtaaaaccatgtcactcatgacttctattatgtttttccttgctttgaaccaagtattcatgcttctcgttatgcagctgtgatgatgattggtatgggcaagaggaaagcagcacactttccttcccgtcatactatattgatgcagaagtaacaatactcagataacactcatcatctctttccaaacaatcatactcctctgtcccacaaagttgattgtgtggcttgctctgttttattgcattttccaggccgtagtttgtttggatgatggtgattgcaagattcggaatggacttgtggcagctgaggatgattcaactttagatacatctattgcttgtgattcctgtgataaatgg

SEQ ID NO: 189473 - DNA, 538 bp, Zea Mays
caagaattgagcattatgcttgtgtggtggacttgctttgccgtgcaggaatggaagagcgagcttataagatcatacaggggatgccaatgagaccttccatttctgtctggggagcactacttggggggtgcaagatgcatgggaagacagaactaggaaggattgctgctgagaagttgtttgaacttgatcctcaggattcaggcaatcatgttttgctctcaaacatgcttgcatctgctggcaggtaaagtaacttaaatacccttcttttcaaacaagctgcactcactcataaattgtgcttcagatttaatgtaaattttgaattgccccaggtgggcagaagcaacggatgtgagaaaggagatgaagaatgttgggatcaagaaggacccagggcgcagttggatcacttggaaaaatgttgtccatgttttccaggctaaggatacaacacatgatatgaatagggagatccaggcattgttggccaagctcaaagggcaaatgcaagctgctggatacatgccag

SEQ ID NO: 189474 - DNA, 446 bp, Zea Mays
atagaatcataaacgaaagtatatgacagaaaagaaagagacagaatagaaagagaaatattatgttgaacggctcagatttaccccaatatcaacacgacacatcctactctaaatgaacttttgagtaggattgttcatttggaaataaactggttgcttgtatatggtacaccaccgccacggcaatgagacaatcagttgcaaactggttgcttgtatatggtacaagccatccaagtttaacattgtattgagcacaataccaaaccctaaatcctaaaccctaaacaattcaagtggatggggcatttgacatcacagccgccgaagagtagttccaaacaagaaaggaagatcaacagataagcgacaaataaatatctagaaaataaaggaatgcatagggtgtttggtcatcagtcatcacagccagagaagaagag

SEQ ID NO: 189475 - DNA, 318 bp, Zea Mays
ggctgcgacccacaggccatccggggctcattgcagctgacgaagcccctgcagactactccccgacaatatggcgacagcgacaatggcaaccgccgcgggggccgcggcactgctttactacacactgaaccgccgcctgcagacagagaggctgaataaggaaggggagtgcagcgatagcagggatgtgacacccagggccgcacagggttctcccagcaggagccgtgtatcgcggagggacgtccgcgcccctgccacctggcttgagactatctcgacgctgtcagagacgctgcggttcacgtattcaga

SEQ ID NO: 189476 - DNA, 331 bp, Zea Mays
tggtccttacttctctacctataaaggggtgagacaatggaaccccctctcccctctccttttcaacttagtagctgacgaccttgttgttttagtaaaaaagttcaagttgaggggttgctcactaggttaattcctcacatagtagagagagggtggtgtgacttcattatgctgacgatacgattttccttcttcaagatgatctagaaatgcctagaaatttgaaactcaaccttatcctgtttgagcagatgtctggtttgaagatcatttttcacaaaagtgaagttttgttttgttttcgggaggctagaaacttcaaaaacct

SEQ ID NO: 189477 - DNA, 292 bp, Zea Mays
cctttttacctaagcatcagaaagttggtccaaaatcttagcccgcaacttcatgtagtaagtctgttgctcttctgtcaatccactaagatccatagtcataatcctctcttcgtctctttgtttctgcaattgaatctcctgcttcctcacctccacaagttctttttcattagcaactcgctcttgttcaagtgcaaatgctttactgaacctctcctcttttttgagctctttctccatatcagtttctttcttttgtgaccacatattttccaatgttattgtcaca

SEQ ID NO: 189478 - DNA, 345 bp, Zea Mays
gctcgagggggctgtggtgctccttgagaagctggcggaactaggaggtctcggcctcgccgtttgctataacgcggtacttggtctcaacgctggagcatgagacgacaggctgctgcttcgaggcccaggaacacgacatagccggatgttgaccgacgcgtgtgggggcagccagccaagtcagcgtcgttgtagaccacaagctccgatgtcggtgagagtcgaatgaaaaggccgtagtcgatggagccgcagaggtagagaagaatatgcttgagagcggtgaggtggggctcccggggtgtgtgcatgtgaaggcacacctgctagacgacgtaggcg

SEQ ID NO: 189479 - DNA, 406 bp, Zea Mays
ttcgattgttcttttggggatgatggtagatacctagatggagaggttgctggagtggttttgatgtgtattctttgcagtatttgacgttgttatttatattgattaatgattgtaaccatgtatgcatgtggagattggaaggagctcagaaggctgggacactgacctgctttacgacgaggagcgtgggatggttcaaggtggccctgttcgcagacctgctttacgacgaggatgcgtggacggactggtgccccgcgcaggatgccacatctgaccgcgttatagccgtcatccacgacgccgagaacctaggtgcctacttgcccacgctctccttctgcttccctttacggttcacccctttcctccaaatgaactgacacggaactccctctgccgc

SEQ ID NO: 189480 - DNA, 548 bp, Zea Mays
gtcacaccgccttaagtcgttgccgacttaagtcaattgctccgttagtagggtatagtggtcaccctgagttaagtaagcatgagcatgtcacatcgccttaagtcgttgctgacttaagtcgattgctccgttagtagggtatagtggtcaccctgagttaagtaagcatgagcatgtcacactgccttaagtcgttgccgacttaagtcgattgctccgttagtagggtatagtggttaccctgagttaagtaagcatgcaggttgacagtaaacaatttgagtgcctttgaagtctttttattgatgatatatttcccagtttacagaatacaatgtcgtcccaatagcttttgaaatatagctaggggtaaaacttcttgagatgttcaatgatccatgagttcctaatttctgtgccgtccatttgagtgagacgatatgatccaggccgagtgacttctgctactacgaatggtccttcccatagtggtgataatttgtgtcgtccctcccccgttagaattcggtggaggacgaggtctc

SEQ ID NO: 189481 - DNA, 322 bp, Zea Mays
caggaattgcggtcaggagaacctcatccctctcgccttcaggttctactcgccctctccccacccgcagcgcctcctcccattcccccaacggacattgcctaggaggctaggacagaaccacccagagcgcacaaccttacccgaatcgccgttgcatggaggccgtgcgcgcgtcggcggcgtgggtcgccagtcgctcctcccatgtcacggtcgaccttcaaggtattgttgcggcttttgcccagctgtaaactttgtaatacaggattgctcacttcctgctgctgtgagatgtttacgggatgatggaattcta

SEQ ID NO: 189482 - DNA, 276 bp, Zea Mays
gcatggtcgctggttgatgggctcgtcgcgttccaaggacgcctctacatcccaccagcatcgccactcctccacgagctcgtcaccgccatacatgatgatggccatgaaggcgtccagcgcaccctacaccgcctacgacgtgacttccactccccaaacctacggcggacggtccaggactacgtccgcgcctgcgccacatgtcaacgatacaagtcagaccacctacatccagccagcctgttactgccccttccggtgccagtcgcggtc

SEQ ID NO: 189483 - DNA, 297 bp, Zea Mays
gttcacactccacgtatatcttcacgcttgatatgggcaatttctgaacactttgatcttgaaggtctggatccccttttagctgatgacccagaggacccactgaatattgtcatatctaacatgcacaagatattattcaacaccgattcatctgctactacatcaaataggatacaagatgtgcaggctgttctaatttgcgctcagcggttgggagcaagaaatgcaagagcaggccaacttctcactaaagaactggaagagtttagggcaagtacttcagctgattctatg

SEQ ID NO: 189484 - DNA, 372 bp, Zea Mays
tagggcccagcagccttctcttcgttgttgctaaacatcaattcagccctgtagtgcaaatgggggcagaaagatacactgccgcgatctccagttcctttcctcaagacctcaacctacaccaaccaagacctctagtagatcagtggatctcctttgctttctctcccggcacacactctccacaagcctctcccagcatctaggctctggcataaagcctgcatcagctaacccatacaatgccatcgtagcatctgctatgcgcccagcatcgcatagaccgatcaacaggttgtttgacgccgcatagtgaggtagaaaccctcgtccaagcatcaatcccagcaagccaactgccctgtccatctc

SEQ ID NO: 189485 - DNA, 502 bp, Zea Mays
gccagccacccagctccgtccgtccgatcggggccccttgaccgcttaaactcatctaagatacggtttgttacacttttgttccttccgtaatcgccttcaatttcctactactagagagagacggcctcccttcctctcgcttcgcttacacttctcccctccccccaacccaaacccaacacaattcccccgtgttgcctacacgcactggccacgaccaaaccctaggcgccgccgcctccggggccctcaggtacgcctctcgcttacccgccgccgggatttcgccgctgcgccgccgtccgtggctttgaacgactgacagcttcgcactagggttcgttgcgatttcgttgttaggagtgatttatgttttacttttctgtttgtgtgcgtgattggatcagggctgtcatacggggaaggaggaggatatcggtgaggagagaaggggatttatgtcccagcgaggtgacaggggcgaggggcacgccaggag

SEQ ID NO: 189486 - DNA, 289 bp, Zea Mays
gaagaaaggaagcatcactaaaattgatctttgggacgagtctcataagaagaggaatgggaactatgtcaatcaaaatgtgcaaacacttatggtattcactggttcctgtactacactttaattagtttttattcaaattgtcaatcattttctctgttaattttatgaaatttgaagggtaaggccttcgatgaattagagaacaggagaaaggacaaggggacactttctactagtgattatgatgatgtgtttgagaatgtcataagaaaagacttgaacattc

SEQ ID NO: 189487 - DNA, 329 bp, Zea Mays
cctgcgccttcctggtgttcgcatggacagtgcggttctgtcttggatcctctgcactatcactgtcgagctgcaggacatcgtccacgagcgtggtggcactgctcatcaaacctaggttgccatcgaggaccagttcctcgacaaccgtgaggtcgtgccctctacctcgacaatgtcttccgaatcttcatctagggcgacctctccgtcaccgagtactatcgccagatgaagggcgtggccgatgctctccgtgacttcgatgagcttgtcccgaccgtaccatcgtcctcaacctccttcgtggcctcaacgagtgctacgac

SEQ ID NO: 189488 - DNA, 304 bp, Zea Mays
acaattgttatatcgacttattggttgtcgggtaattctctcttatccttgtagcagataagctggtttagtgaaataaactgatttctatagtcatatttagtttttttggcccaaggctcggtgccaatactgcaataaattgttctaccccaacaagatgaaggtgcacttgatgtatcactgtgggcctaatgctaaacgcacagaagctcaggctaagcagcagagcaagaggaagtgggacagcagcaaggaaaaggtgaaggagaagaggagggttcataagaagggtgatgaggcg

SEQ ID NO: 189489 - DNA, 380 bp, Zea Mays
cagcctttgtgattttggtagcgaaggactgcaaacagataacatctacggtattatcacagtgttcgctgttcagatagaccccccgactatctattggataaatatgaactgcagaagaactgaatttatcgagttgattggacaaataaatcaaaatcgcaagcttttagtagaagagtgaaggtagccgcgacggagatctgaatgtcaccgtcgcaacctcccccaaacatccttccagagcagaatcttcgaacgcaacagaaatggtcaaaggtttcctaaaacttcactcccaacaaaattgccttgtagcgtgggctttaaacactcgaaatcacccgaacaaaatccactgtttgctcagaaagtagctg

SEQ ID NO: 189490 - DNA, 686 bp, Zea Mays
gccatgctttatctgattgtgttaaggactgtaatgatctcaaaagaaacattgatgagcatgacttttcagttgaacagaaagcaaccgagctatttgatgttatgtccaccttaaagaataggttcacttctcagcataatgagttggaatctttgagagcaaaatttgttgaactacagtcagagatggaagaaagagacaaggagattatatttgcacaaaggaatatgagcttgctatatgaagcatgcgcaagttcagttgctgagattgaaggaattagtgatatatatcctggtaaacacagctatgctgttgaacattctgcagatgaatgtataaaatcaatcgttgaacagttagttatggctgtaaaaacttctcagaacagtaacgaaggtagcacaaaggagctgaaggctattgttcttgagttgcagcaggagcttcaagctaaagatgtccaaattagcacaatcagttctgatctatcatatcagttaagggtggctgaatcttctgcaaagcagttctcagttgatcttgaagatgcaagaatggagctccaaaatttggagaaacaagttgatgtgttgcagaatcagaagaaggatttagagactcaattaaatgagcttaaaaatatggaatcaatggcaagtgaacaacatggaagaattgag

SEQ ID NO: 189491 - DNA, 776 bp, Zea Mays
ggtcattcaggtcctggaagtccatggtcaagttttgaggatcaggttactgtctttgcaatattgtgggtcttattttttattggttggcaatacactaatttcctttcacaccaggctcttgttgtccttgtccatgatatgggtgaaaactgggaattggttagcgatgcccttaacagcatcatccaattgaaggtaacattttattgaggataactgttttaatttgttatcagtcatttacttttctcctgaatcatcaaaatgtgccatgcaactattttgttgcaacctgttacgagttagtttatgttatttgtgttcctctttgtaaatgatttatgtatataatattccagggctttggatcttaattgttgtaaacttgcaatagtctgttgctaattgaaaaacattttatattttattacttgattcaagattttagcatcttcttcgcagtgcatatacagacggcctaatgagtgtaaggaacgccataaacttctcacggataaaagttgtggcgacggtgctgacagcgctgatgactcaggctcatctcaacactatccttctgcattgcctgggattccaaaggttaattccattattctttcatctatttcacttctcagcttgtatatggaaatgattttttttggaagattacgattctagattttcggtcaagtggcttctatctgctgcatctttcccaaaaatattatggcgattatagaaaggaaatgaatttttttcttcaacaatgc

SEQ ID NO: 189492 - DNA, 322 bp, Zea Mays
aatggatataagttatttgctgtcgaagaaagcttgtcagaaagggttcttgctttctcatttgccaaatgttgcccaaacagagggctttcaggcacaacatattcccaccaggttctttatggggaagatcgaatccttttggtgcaaccggatgatgccgatgaactgaagatattgcatcttaatgttccagttaagtgttaacttctttgcctttgatttatttgagaggttaaaatgctgcagcctctgttgtttgatgatgcatttttatgacaatatatattttttgaagtagatttcatacatttcccagaac

SEQ ID NO: 189493 - DNA, 501 bp, Zea Mays
tttgaaacatatgataccagtgaacaccctccttccaaagttggtaagaggattcgtgttgctgcaacaagtcctctaaatgctaacctgagctctgcaaatcttgagctgcttatagaaacgttagtttcatggagaagacagattgatcttgaaaataaatcgtcaacaaaaagcgaggtataaacttatccttcctcgcccttgatgtttcattattttgcttatgtttttatatccatgtgacagggtaccattgaaaacatgaaaaaagctgatgattcttcgtactctgcattgaatgaagatgatttccagagagtggtttttgagaataaattaggatgtgatgtttatcttaaaaaaaaaatggaagatagtgaaatcactattgagcttttacagcatgagagcaaagtttcgttgttgcttccgcctcccaggttttcagataaactaaatgtgttatccaattcaacagaatcaagatactatgttgtt

SEQ ID NO: 189494 - DNA, 377 bp, Zea Mays
cattagattcaagcctgctgctctgcagagtctgacatgacggacttgatgttgtggatggtctgctgtcattttcagcattagtcatgcctgttgatatggcattagaggcagacctgcttctgggagaaacccctcgtaaagcagctgatgaggaagatggtctacaatttttgtcagcaaattctgtgtccaatacagcattgataccatcagaggccagccgtcttcttggtgacatccctcgtgatgacattgacggtgttgaaggtctgatacttttttcagtaatatttgtgctctttgatataaatgctagaccatcagaggtgagccgtcttcttggtgaagcccctcgtgttgcagctgacactgtt

SEQ ID NO: 189495 - DNA, 596 bp, Zea Mays
tttatcaggagaaggagctgcttgaaaagcacaatgtctggcttgatgaagaactgaaagcaaaagtgaagaacttggctgaactaagaaaaacaaatatggatgaggaggctcggttgtcagcaagtattgctgaggcgagtctttgtgatctaactcatgatggatagtcattgtgatctatctcatgatggataaatatgatttagaacacatgcgctgacttaatcttcgtgtttcagcttgaaagagagatatctgaatcctctagctccttgaggcgaagcaaagaacgcatctctgaactggagcaaagggtatcctacatggaaaaggtaatttctcatgcagatgattgcagtattactgtttccatctaatcttttctcttcatgttttggtgattgaaggagttgcgctcaacaaaggatactgcagctgctaatgaacaacgtctgggtgctgagctttcaactgtatggtttaatatctcttaattctctctctttgtcgctgatatgtttgcacccttggtgctgctgtatgtcggtacttgactggcgcttagcgcctagagattctacgctcgcctcctg

SEQ ID NO: 189496 - DNA, 456 bp, Zea Mays
tcttagagggcctgaatgccattctggaccaccgtgctgaggtcttcatacctgagcttggtcaaacttacaaatgctcatcgtcttttcgggtctttgcatgccagaatccttcatcgcagggtggtggacggaaaggccttcccaagtcctttctgaaccgcttcaccaaagtttatgttgatgagctatcagaggaagattatctattcatctgtaaatcacgatatggttcattgatttctgaaagtttcatccgaaatcttattcactttaatagcagactgtatatggataccatggtatataggaagtatggccaacaaggttctccctgggaatttaatctacgtgatattatcagatcttgtgagatgatagcaggttccccaaatcctatgatggatgattcttttttaaatactgtttatctgcaaagaatgcgcacattggttg

SEQ ID NO: 189497 - DNA, 441 bp, Zea Mays
taagctcatcaaccagattttccatttgcctcttgttcaaagttgtccgataatcaaggtacctcactaatttctgaacaagatccatcaccggtccagctttgtaaaacggcatgacagaatagtcaacacacaggatcaacccttgctgagtggatttaagggactgctgggttcctttcatagctacagcaccctgcccaatgtctatactgctgcttggtgagtaaaatcctctaccaaggataatcttgttccatcttgaggcctcacgcacaacaacatcaaggccctgcaagacctctctaggcacaggtaaatctgagagttgacttaatggcagctgcttcttcaaatctactgatacaatgtaggtctttgatcgaactctcacacgaaataaacctgcaggcagttcagcagaagtatacagatttcttc

SEQ ID NO: 189498 - DNA, 618 bp, Zea Mays
attctctgtctgatatgttctcaggtttaaatgtgtctcctttggaaacaattcgagcttcttgggatgaagagtccaactgcatttatcaagcgaaaaactgaacgaacaaaagcatccatcctccaaggaaaagaagcagggccctgcatcaatttcattatccatgtatttcaccgggagcatagtgatggataagttaggagcacgatcattgtcagtagtagtgacactgatgcaataagcattgatggatccatttccctctgacaagccaaggaataaagagccatgtggggtggcgcgaccaacgaatggtagccccttggtgtcaattttgtgccactcgactgaattggtgtcaaatgcatatgtgccccaaagttgattgaatgataccagtatgtaggtgtcgaccaccacataagacgtgataagtacaactggcagcatggtataaacaaatggggtaatcttccaagggaagcaaggtggatgtggtagctcaatccaggagcatccctccaggtgggagcggtcgtcaacaatgacaactttggctttggaaagatcgagtacctcgaaccagggtgggaaatcggggtctgtgaaccagca

SEQ ID NO: 189499 - DNA, 614 bp, Zea Mays
gcctccgctgtatctacctcgccctctcccgtgccctatggtgagaacagaactgcttctgcttgaacctatctgtagcggaaatggttgtgaagtgtgctattttacttgcaattgcggaagcaaatggacgcaatgtgttgaatcacttcgaactgcatagctggtttggaatgaaaatgatggttagtctatggtggggtttccttttgtgtactgttttaggtctcatgattgatattttttcgctcataaatcacacaatttctctgtgatttttgctcaaagtgttgacatgaggctgctggagctgataataatatgctatttgaaaagcaaccatcattcaaaccgcatccttttgctatttgaaaaaaatcaaggtcatatgcttatcaaatgtgtgacctctttcttctgacataatcagatacagatgacgtacatgagtatgccacaaagctcggatttgaaaaggtctctgaacagactatagatgagtgcaaatcaattgctgttctttacaagcacaagaagacgggtgctgaagtaatgtctgtgtcaaatgatgatgagaataaagtttttggcattgttttccgtacccctccgta

SEQ ID NO: 189500 - DNA, 379 bp, Zea Mays
ctttttcttgggatcctatttgagctccaggtagttactcttactcctgatgttggtatttcttaaggtggcataccttaatattaaatttctcaacatggcatgcattgatattaaattttctttatattcatagtgaggatccagatatccatttcaaatacatagaagcagctgcaagaactggacagatcaaagaagttgagcgtgtaaccagagagtctaatttctatgatgcggagaagacaaagaactttttgatggaagcaaagctacctgatgcccgcccactgattaatgtttgtgaccgctttggatttgttccagatctgactcactatctatatacaaacaatatgcttcggtatattgagggcta

SEQ ID NO: 189501 - DNA, 278 bp, Zea Mays
acactcttgacatggactttgaatctaaccatatctttagaatctaaagataggatatcaacttcttcaacagcccctatagtagaacctatttcacaaatagcctgataattttgcaactcctctggtacattttcggccacaacccatactgcatgcaatttagacttaggtttggcctgagaactccaatgcgaaacagaaatttttgctcccgacattttcattttgagttcggggaagttaatcatttcatcaagtttctcttgagaaggaaa

SEQ ID NO: 189502 - DNA, 442 bp, Zea Mays
cagctggggaatggggggctactgttgtcgcggaagtggaggagaggccaacctacatgtggctgggcggcacagggctgcggatggcgcgcgcgtagagggaggccgccacagggaaggaggagctgactgcggatggcactgctggcgcgtggagggaggctgccgcagggaaggaggagctggcctgggtgcggtcgggtgatgcagttggtgtgtagagggaggccaccatggggaaggaggggttgggcgccggtgtgcggtcgggcgcgcttggtccgcgcggcgcaagggctgcagtcggcgtcgcggaggagcaaagggaggccggcgcggacgacgtcgcaggggaggagcagcccaccgccgtgcggcttgcactccgtgggcacctggaggtcgaatggtgcgggaaacggagagtagaaggccggcagcg

SEQ ID NO: 189503 - DNA, 826 bp, Zea Mays
aagaatcctcgaaaaaagggaatgatgtttcgtcaaaggacacgtggcacgaaatgatgatgcagttggattggcgattaaaacaaaggtagcccttgtgatgaggggagtagccaagaaaaacacaaagggtggagcggggggagagtttatggggggctgtggctgagagattagggtagcatgcgcagccgaaaacgcgaagatgctcatacgaaggtggctggccaaaaagggcaagatgaggtgttgaaaaggctaaggttttgattggcaaggtgtttaacaggtaagtggttgtcccaagagccgcgaccccgaaacgaggagggaagcatgcctgaatcaacatggagcgaatggcattgttgatggagcgaagaatgcgttcatctttactgtttttggtggaggtgtgagggcaagacatgcgtaggtggacgccatgcgaagaaaagaatgtgcgggcattgaggttgtcaaactcgaggccgttatcgcactgaattccttgaatggtgacgccaaactgagtatggacacaggcaaagaaattagtgtgggtggagaaggtgtcagatttcaggcgcaaggggaatgtccacaagtaatgcaagcaattgtccaaaatggcgagataatatttgtgattagagacactagtgagaggtgaagtccaaagatcgcaatgaattaactgaaaattatgagtagcgtgggagggcgaagcatgaaaaggttggcagacgcgctgatctagctggcaggcgtgacaaataggagtgctactgtttttattacaggaaattgcggaggactgtgctag

SEQ ID NO: 189504 - DNA, 1563 bp, Zea Mays
attttgaaatcgatcccgttcgtttcggttgccttcggcctcggcggtgggtcctagactcctaggtagctcggttgttgtttctacgattcacctcgtttttattacgttgttgatttggtccaccgcagtggagtcgtggaatcaggacgccaggcgcgttgcgtgaggttggggattgtaatggttgcctagcatagttgctcagtcctcagctgtagttcaggagcaactgttcctgctcccttgttgccgttccacctgggatcgtgttgggatcgatcacaaaccgaacaattgtcggcaatctgtgcttatttacctccaattctaatttcatggacttagatttgctcaaagcttcacactaataaacaaatcaggcagggatctgaaatggttaggcatagtcacatgattgaggttgatgcacatatctgagtgttaataaacttgttctcaggactggcacgctggctgggtagtttatcatttatcttcacagaaggaagtttctctattggaactttagcatacacgggggtcagaatctcaaatttccacctgataatattccttcaatactcaatagtatattagtatgctaatctagttcactactttattaatctaatttcatccattctgttggaacaagtttaaagtcaaagggatcatccctcacttgtaaatcaaatccagtacttagttcatgtttcctttcagtatctcttagctgtgttttagaattctagttcattagtgctgatgtcctgttgagaagataatcgtatgccatatttgaagtgaataactaatcactttcctgtggtaaattcagattcatgagaaactcgcatctcacactaatattctaattcagcaatttgttatgagctccagtctgttggaacaatatcaaagccaaaggaattatccttcacctaaaattcagatcttagttagtctatactctatttgattaatctgttgtttatgttttcaacatccagcttattatgtgataccttgttcataagatcaccgtgtactgcaatgatccaattcatttgaagtgatgcttaacgattttctatgttcaggttcatgaggggttcaagaatgaatccaggtgaccgtagaacgcggagcacgatgacgatagtaattgtgatgggtttatcatgcttcttttacatactaggtgcttggcagaaaagtgggacaggaaggggtgatagcatagctctgagagttaaccaagaaactgactgtacaatcttgccaaatttgcactttgagacccatcataccataagtggcgctaatccattgatcatgtccaataaaatgattgagccatgccacatccgatacagtgactatactccttgtcaagaccagaaccgagcaatggcctttcctagacaaaacatgacatacagagaaaggcattgtcctgtagagaatgagaaactgcattgtctcatcccagcaccaaaaggatatgtcacccctttctcttggcccaagagccgtgactatgttccatatgcaaatgct

SEQ ID NO: 189505 - DNA, 560 bp, Zea Mays
cggtctggaggccctgcctcctccactgagccacctccccagcctccccatcatccatcttcctctcaccccgctgctgcctcgcgtccctctcctggccgcggatctcctatgccacgtgctcgtggtcgtggtcgaggtcgtggccgagggatgggtgctcgcttggtccatgggtttgcggcatttttctccatgtgccgcaacatttctgctgatgtccatgaggtggcacggcgtcagcgggagactgacgacaatcttcgtcgtcaagcttccaccatgggcatgccttttgtccctcgctcgcctgacgtgcctctccatcctcctcccccggagatcaatgagtggcaccagcaggcctacggggtgccatttatgtctgcagacgatgaagaagaagaagcctatgttgatgatcgcgaggagtttgccccgcctccctaccatagggatccgggtcaatcatcctctcaccctccgcctccctacccgggtccgggacccattcctggtgaccctaggccatccggctctggttaccaccaccaccctcc

SEQ ID NO: 189506 - DNA, 275 bp, Zea Mays
gcggcgagtagcggatccagtcgcacggcgacgaaattctggccatcccactggccgccccttccttcctcagccacgagcgctcggatctgcggccaacgcaagcgacaacgagaatttgtaggtgccctgacaaccttcaatctccctggatgtcaccaccgcgagcacgtccccacagtgaaggcctcgatccaaccctagcaccgaatcattgccagttcgagaacggtggggcggcttccacgcattcagtttcttttctccaaatttct

SEQ ID NO: 189507 - DNA, 393 bp, Zea Mays
aacctgagcaactcgtagacatgctgctatttccgttctcccagctgagtgatcttttgcttgaatacaatcaactgtattgctttctccagtctgaattttacttccatcaattatcctaccattgccccttagcagagaatacccaacggagctctccaggtcaagtgagtttggttccccaagggaatttgctgatctaggcaaaaggctcatagtggtatagaagggtgggaataaccaagtcatcggtagcgcaagtgcaaggggaggatctggaaccacaagaatgatcttggaggcattgtatgatacaacagatccagaggtgccaggtagcaagaaatcacaaacaactgaaatggaaattttggttttgccagcagacctgtc

SEQ ID NO: 189508 - DNA, 1410 bp, Zea Mays
aagggcaggggcggcggcggcagaggcggcgacaggaggaagaaggaagagaaaggtacgggcgttgttctgcgcaccacctacgcaacctactacctcctcagtctccacctcctttctcgttgtatgcacgcacgtacgtacgtgcatggtgaagactgaagaacccttgttgttctgcttgacaccatggatggatggacggacacgacagacactgtgttgccgatcgcagtagcacttgcatgattgtagttttggctgcttttaattagcatgtgaatggaaaggggaaaaaagaaaagaagaaggttcttcgtttctttatacacgctgccttcctccctagctactaccgatcactgcaagcagcggatttcgtccgtctctgatgaaggatcctgtctctttccccttggagcgagcctggctggcgttgttgccacccaatccatggttattactactccttgtccttggccgctccttcacgagcgccccccgttcattcccgtgttcagaattcagttaggaggtagatgcagaagggtagcagtattaagcagctagtactactaccggcagtctggttgggtcatgcggtttgcaagggcggagtgaattgcgctgccgtacctggtttcagggactgggagaagctgtacgtttcgctcacctatagaacactggttgatagttgatactgagaactttggtttgcttcttgtcctttgcatgcagtggtgcccagcgtggtggacgtcacggtcgtcaccccctacgaatcccaggtgacactcaaggtatgtgttgtgttgtgcgccatcaccgtatcatcagttgcattccttcctaatccttcttctcccacacttgattgagcgcgttaacgctagctgattgatcagagagacgagtgactgtgctgtgctgctgcgcactgattgattgtgcaggggatatcgacggaccgtgtgctggacgtgcggaggctgctggggtcgaacgtggaaacgtgccacctgacaaactattcactctcccatgtggtaataatgctcgcctctcgcactctcgttccctcaactgcctacagtactagcagcaggcacggctaattctctggctgcgcggtatggtcgtgttgcaattgcattgcaggcgcgcgggcaccggctggaggacggcgtggaggtcgtggcgctcaagccctgcgctctccggatcgtcgaaggtgagtgggtgtgggtgggtggtggtgaattggtagcacaatcgagttgggtatcgtagagccaggtccctcccacccagtacacgagaggacgtacgtacctggctgccgtcgtccaggcaagtacacgtacagcgcgccctctgttggtctgttactctgttatgctgcgttcg

SEQ ID NO: 189509 - DNA, 714 bp, Zea Mays
tcttgtcggcgctcttcagtaccacacctttactaggcccaacatcgtgtatgttgtccaataggtctatctctaaatgcacgatccctatgacccgcacttgagtgcagccaagcggatcctatgtacctccaaggtactattgactacgggcttcatctttgtcgctcctccatccatgagttgatcggctacaccaacgctgactgggtcgggtgaccggacactcatcggtctaccttcgactatgtggtgctttttgggaccaacctcatctcttgatcctccaagcaacaatatgtggtctcctgctccagtgctgaggctgagtatcgggctattgctaatggtgtggctgaggtgagctggctgcgccagcttctctaagagcttcatagctcctcgacagaagcacgttggtctactatgacaacgtcagcgccgtctacctatccgtcaacgtcgtccaacatcaacacgtgaagcatatcgagatcaacctttacttcgtccgtgagcgtgtcgttgtctaggatgcccatcgcgtcctaatgagcttgtagtttcccgacatcttcaccaaggtttttccctcattgttctcggagttttggtctagtctcaacatctgtcctaactagagtttcgattgcataaacatagcacataaagaagtcaaggacatatgttaaagagttatgcatagtgtcgttc

SEQ ID NO: 189510 - DNA, 690 bp, Zea Mays
ctcaagggcctgtcttcagaatgtgactttctgtgccattatgtgtcgtccatggaattcaccatctgatgttgacgtagtagaatatggtggagatggaacaatagtatctgacatgttttccttattgtcactgtgtggatcatatttaaataaggaatccaggcagaatagcaatcagaaatgcaaactatccaaccctcatgctcttgtagtgcactgctgccttgcactagcgacaatagctgcatgtttgaaatcagagggaggatcttcagcatcacttgtcctaacaagttcccagaaaaaacagcggtcccggctctcagttcttgcacacctctcatcagttgatgatacagtgaagagttgcctgcagccacactgtgcatcagcaatgcttgcgctctcatcacttgtttctcttgaaaatggtggacaaaccagatcgtctctttgtgaaactgcccttgctttgtttcctcgtatggcaacactgcacacactgctgaagctttggttatctgatggaagcgaggcactgtgtcgatataatgctggtcttctgaatctttttggactccgcgatggaagtattggactgctggagacaaggttgaaatggggcggaccattggccattgaacaagcctgctcagttggcatcccacagctcctaattcgcttgct

SEQ ID NO: 189511 - DNA, 466 bp, Zea Mays
caaatttgaagggctggaatttcatcacgtggaaagagatcgcaacacagtagcagacgcgttgtcgaaactaggatccagtcgggcccaggtcccacccggagttttcgtccaggaagtgtcacgcccaagcattccctcagatcaggcggaagagtgcaatgctttgagccagccagagtcagactctaatggctagagagagcctatcatcaggtatataaagaatgaagaagaactggatgataaggccgcagcagaacgcatcgcaagacagtcggcccactacaccctcataggggacacactgtacagaaggggtgcaacaggagtcctcatgaagtgcatttcctcggttactgggagacaactactagatgagattcacaccggacagtgtggtatacacgcagcatctagaactctggttgggaaagtcttcaggtctggtttctattggccaacg

SEQ ID NO: 189512 - DNA, 368 bp, Zea Mays
gaagatgggcagaatcatccataatagggaccagataaaggaaaagtgtccgtggaataacaacatgtagagatgatacttgttcatgaccagaaactcttgtgtcttcaacaaccaccttagtaaaccctagactcaatgcatgcaagatacccaaggaatccacttgggccacagaagagtttgtcgcataccagcgatgatattgtgatggtaatttaaccactagtgaaaaggtagaaatggagaggatcggttagctttcagcaccagatgcactaaagaaaacacaggtagaaaagatatagcaatgagataaaataatatgtcataccataaaacagaatctaaaactggatattttagct

SEQ ID NO: 189513 - DNA, 326 bp, Zea Mays
gtggcactggatgccataagcacgatgtcatcgacgtagagcaagaggtaaacagtgtcgtcgtcgcgttgaaggattaacaacgacatgtctgactttgcctaggaggcgatgcgactgtatcaggcttgtggcgcctattttaagaccataaaaaactacatgaagagaggtgatgacacggtgggtgaggagatcgaggcaccgataccccttgtgatcagaagagtacccgtgaaaaatacgagtgggtcagtgtgcacgtttgtggggagcactggcaaaggtgttaggataggaggcacgaccatagacgcggatgtgcg

SEQ ID NO: 189514 - DNA, 638 bp, Zea Mays
cgtctcccctcccctcccccaacaatcggaaccggataggaagttcggcttcctcccggacgactcggcgcaaggtcgcagcttttctctcgatttttcgcgcttccccgttttgacgcttgcttcgcatggggattctggagatctttggggcggttcgctgctgagatggttcgcctcatcacgcgctgctgtgactcccaacaggtaggctccgctagacctctttctagccttctcttggtgcacggaacagctggggagtggggagtacgagtcactagccttctcttggcggctgagagcgtgagctcggtggagttctgatctagcggaagatgggatttttgcggggctgacttgtgttgggtttcttttgttgcgcgatttggtggtgtgggcttcattccttccatatatgtagcatctgttttgtatgttgcttccgatttggtgggattccatatctcgcactagtgaattagtgatgacttgcttgactagtttcttgactggtttcctgttctatttctcattgttgcttcagttcttccgatccgaggagcccctgttatgaacggcatgccgatctctgcgtcctctgcggcaagcgtcgacagtggcgcggtggcggccgg

SEQ ID NO: 189515 - DNA, 467 bp, Zea Mays
acaaatatcaagatatgtgcaaaattaccttaccctactgtcctttctagtaggaaaagaagcacatatgccatttgtctcatgcattatcaagtgacgatatatccttaatgcccctatgtcctaataaaaatatggagccaaatgatgaatcggcaccaaattatcaaaataccttatgatctgctgaaaaactatggaattcacatctttgacttcaatgacttgtatactttgacattgattttggatttctatggcaaaatactttatgatcagctggcaagctaaggaattcacatccctgatttgtatacttgacattgattttggatttacatggcaacataatttctccatctcttatgtcataaatgactgactaatgttgcaaagaatggattttaattgttaccgttttcacatgaaaattccctgttgcattgtgggtacttttgaagaagcca

SEQ ID NO: 189516 - DNA, 767 bp, Zea Mays
tgaacctcagccagttgttttgaagtatgaagatgcttaccaggttaaaactttctaaagttctgtattctgttacttgagtttacttttttgttggtgctttacttcctactctcaaatatcaaagcccatatttttaccttgcatctaagacctaactagcatatcctgcccccctttttttgccagtaccaaaatgtttttgcgccactgataaaacttgaggctgattatgacaaggtactgtgttctgattaagagatcatgttttttatcttttccatcacaaaactgagttgtgttactgttttatatgttgttgtagatgacgaaagagtcacagagcaaggataatgtaactgtccggtgggatattgggttgaacaagaagcgtgtagcttactttgtctttccaaaggtctgttcaagaagtgaaatatatgggattagtgaattaataccataattgtatagttatctgttgttgatgatgttcggtattgcttcgtgatactctattgtctaacacgggaaacaattatgtattttaggaagacaatgagttgaggcttgtgcctggagatgagctacgcttgagatatcctggtgatagctcacatcccacatggcaatctgtgggacatgtggtaattagaaacctgctgataatcttaattgggccagttttatctttgtggctatgctaaggacatttgttctttcagattaagctcactgcacaagaggaggtggcacttgagcttcgt

SEQ ID NO: 189517 - DNA, 285 bp, Zea Mays
ctgttcagtggttagagcatatggaagagctggggaagttaagaaaataaagacagcgttgagaatcattgagaattctgacataacattggatattgtgttcttcaactgtttggtggatgcatatgggagggtggggtgcttggcagagatgtgggatattcttgatttgatgaaggagcatagatgcaaaccagacaaggtaacctgcactaccatgatcaaatggtttctcatcaaaggaatcgacgatcatcgtgttcagtacctacgtgatcttaaaga

SEQ ID NO: 189518 - DNA, 589 bp, Zea Mays
ccgcaacccccatgccccatccccctccacctgccaaaataaatccatgcgctctccagctcggtgctgcaatcccatcaaaagctagggtttcacgcctctcccgacttcacagttcacattcctctcctccccttcccacctccccaactcggccgccgtagacgcggtggcgcacgaactgccctagatttgagcgagccaccctgcgaatcttcacctgacgcacaaagtctgtcagagacagtgaagaattcgaacacgatcttaaacatcgttgattaagaccacacacaaacacatctacctggcttcccccctatcagttgtttttgtgtgtttttttttgctgtttcggacgattcataagaaccgacctgcaaggcttgcagatctaccttgagaaccagggcccttgttttggacgtccagaacgaacccttgaccctgcggatctgcttgatccgttttggatctgcttgtttttttgctggatctggagagaatgttcaagtcgatggtttattacgtgaacacctcaatcggagaggtggaggtgtggcccaagggcgaggcgagcgcgggcctg

SEQ ID NO: 189519 - DNA, 432 bp, Zea Mays
agaatgcttggaagtgaaatctcccttttcctctgttgaaatcatgaaacccaagcaacaaagggcaatggtcggagtcatccgtggctgaactctggagaagagaatctgggaattgttcctcctaatctgatgtgcagaaaaccctatccaatttgaccagggtaggattagagtgaccattcgaccatgtatatttccggccaatcaacggaatttcattaagggccaaatcatttgcccatctcctgaacctgcccatcatggcacggtctaagttattattattcttctcttcctcccttaaaatcggattaaaatcccccagcacaagccatggcccattacaaagagctctaatttctctaagagattgcaaaaactgaatcttctcttggttcccttgcggaccatacacacatgtaagccacc

SEQ ID NO: 189520 - DNA, 494 bp, Zea Mays
gtttactcctactacaatagcctctcgccgccgctggctctgctacccgcgttcttcgctgcatctggttcttctcggactccgccgctccccccgcagacgcaagaaactgctggccatggagcccccatccgcccaggcgatgtccgcgactgacgacttccaggacaaggccgtcgacgagtggtaaggggactcgactgctccctccaaaccccgatccttctcgtttccgctttctcctttacgagttatatatgaccgacggcggtccgccgtttgtttggttgcagttgctcttgctgctacgattgctgctccagcatcctggacttcctgtgctgctcgtcctgatcgatcgatgcctgccctttcgacggccccgtggaatttctcagggaaccggaggccttaccgtggcccactgatcttggattctagatgccgtgggattcgtgtgttctttaggtccttcggtgacgatgtttgtaatc

SEQ ID NO: 189521 - DNA, 554 bp, Zea Mays
tagtcaaaccatgacgttaaatgaagccatggagaaaccaaacgggccttgtactgatccatagagccatcagccttccacatatgtgtctagactcacttgctagtcatcacattgtgccgcctaggggacgggcaccgaatcccaagtgtgattggcaaggagggcctagtactcttcctccctagcgtgatgcaagtgagaattggcgagggcactatggacagaagacgacaaataggagaccgacgtggacgtggtgagggttgcagtgaagaggcggtgatacactgctggcttggtctgagattggggcggtgcacccacccgcacatgtagttgataggcatgcacatggttggcatagcgaggtgaggccggtgccggtgaggccccattggcactgctaagtacgaaggaggcgtcaccggagccgccaacggtttagcagaggtcggcaggggggcacacggtcctaccggttgtggtagggcaacctggagggagtccaggggcacatgagccatgaaaggcaccggtgccataggcaggag

SEQ ID NO: 189522 - DNA, 403 bp, Zea Mays
tgctggtgaaggaaggccgaagtgtgtagaggggcctcgagctatcacagcgggcgaggggggtcctggtggccaagatccttcatagagaaaccaagtgtcaaactcaatggaacaagaattgtcggtggtgaaccgacgaacataaagaaggttgagcaatgtgaggagctacgagaacgttgttgagatagaacagtccggggagaaccgaggcacgtaccgaggtgaccaacagagtggaaccgtttccaacaacaatcgaggagggatgggggtgggatgagcaggataacgtgactatgttggaggtggtgtggtaagaagcaccagagtcgactgaacccagtcggacgggggtggtgtatcaccatggtgctgaaggcggcgacgagggcagcgg

SEQ ID NO: 189523 - DNA, 1013 bp, Zea Mays
gcgcctcctgcgttatctggctggagatccggccggagtgccattcctactctcggtaaaccctaggcgctgtttttcctgctctcctcccgtgccttttgttgcgaacatcgaatttttaggccggaggtccgcccgcttttcgcgcaagtcggtagctgggaagcaatggaatccggctgctttgttcttcttctgcggatggtcgtgtcggtggagtcgagtggggcatttcagtggccgtgttggcatgcggcttagtgctggggatctgggagcttctagggttctcattttgatatcagggcctgggcactcttgtcagaaatctctcatttggaacttttgcgcttgtgaatgtgctgccgtgtagtacatgctagtttttttcgttcctctgtcgattttttaaggtgtaggggtacgagtgttagtaccgatttcacgctcctgagctgctgtgctcctgtgggcttgtgagccaaagccatggaaatcatcatacaaggttagaccaacttcgcactggaagccccaaatgttgtgaatccagcacaagtaaactcctaccactcctaaaatgaagacccagtcagccttttttcaaaaagctgttttggttctgttgcaaaaataacagtttattgtggaagcttaagctgggtcttgcttgtccctaaagtttttggaggctttagctttttcttatttcattccattttatggcagaataaaatgtaggcttattttcattttcttaatattctctttcctgtaggtcaataagtattctggaatgtttttccgagctgaaatagatagcttctggagctggatctcagtattctgttagggacatgctccaaccgagggaagctgatttgcctgcactctttcttgtcttcattgtacttcctgtggtagcttattttcttctcgggagatggcatgatgctgcaagtaagaaggcaagggtaagtgtgcttgctcagcgagctgcagaagaagcctat

SEQ ID NO: 189524 - DNA, 398 bp, Zea Mays
gaagaactgtacttagtcaaagaaggaccttttcttaacagtgaaagtgatttcccatctggctgttcacagcttgtgcattctaaaaaatcgcagagggtcgttgatgatgtttcttctgggccagattgtgctccaactagcaaagaaaagactgtctttccatatactggtcaaccagttgctggcaaaagagatctatttctaccacagaatgctcctgcgattcctcctgatggcagaatggatttggatccatcatttcctgggcctatttcaatcactcctgacagacagattagcccattgttttcagatcctttctctccaagagctgccagtaaactattcagttcaacacatccaaagcctctctccccaactgaaggtagaaaaga

SEQ ID NO: 189525 - DNA, 315 bp, Zea Mays
ctcagtagacatacgattacgatcatcaaggcatgaacttgagatgccatactcggttcggcgagcgagccatcattgtttccatcactgtccttccattaaaatccacacgaaaacgattgcggtaaataaactcaatggtaaacagaaaaacaggtgaagaaaataggcatggtaaaagtggaatcgtagttcaaggaaccagaagcacggggactttggaactgagagcgagaggaagagctgtgggaagcataaccaggatacactgggataatcagacagagacagaatgaatgtgtttcactgctggag

SEQ ID NO: 189526 - DNA, 375 bp, Zea Mays
ggaattggaattattttcaagtgcagatcatcctcaatttccattaatcaaggtataaggttaccctatggtttcatttttaccattaatgtagtgaattacttattgttaatgggtgcagaaagatgttagtaaagcaaaaagtcgtgaagttgttgaattttttgaatctggatttggtatacacaatgctggaatgatgcgatctgacagaagtttgatggagcgcttgtttggtgacgggcttttgaaagtatgtatttctgcatgcttgagtattctctagtcttgtgctaacttctttcagtttaggtccttgtttgtacagcaactttggcttggggagtaaacttaccagctcatacagttgttata

SEQ ID NO: 189527 - DNA, 393 bp, Zea Mays
tagaatatctacaagctcgcggatttggacaccgttggcgtgaatggattaccatcctttttagcacggcgagttctagggccctgataaatggtgttcaaggagaaagcttcgaccacatgcgtggggtgagacaaggagaccccctctctcccatgttgttcatccttgcctttgacccactgcaaaggattttagaccttgcttcagagcatggcgtcctgacacctctccctcttgctgcagctaagctcagaacctcactctatgctgacgacgcggctatcttcatcaatccaacccgtaatgacctgcaagcggtcaaacagatcctcaatgcgttcggagctgccacgggtctaacaacaaattttgagaaaagctccatccacc

SEQ ID NO: 189528 - DNA, 349 bp, Zea Mays
atccgaaactgattccgagacacaatcaacttcatcgtgtccagagcctaacatggaacagaacacagcaaaaccgaagcgtgatgtgctccttggttctggtgggagctcagacatttccaagaaggagagtgatggatcatcttcttcttcttcagattctgattcagaggttgacgaggcaagtgaagaaaatggcaatgggatttcttatataagtgatgaacggattgctgagctggaagatgagcttcaggaagcaaggcaacaaattgaggcgcttgaggtaaagaacatgcactgccagtgtgagaaacttgaagagagtctcaaacaagttagcaatgaa

SEQ ID NO: 189529 - DNA, 783 bp, Zea Mays
tctccgagtttaaaaaaagaagaagaagaagtagtagtagtagtgtatagtacaggacggacaattcaaagcggtttgcttcacggaacctcagcatctaatcacttccctgatagcccccagccccccactccttaaatttttagtttttcgttcctcagcgttttaggtgagagctttcgtacggcgtcatccccgggccagctggccagattgttgtttgtccgtgtcgatcgacaggtaaccaacgcaaccttccattccattttgatcctaccagtagcggggccggccgcgtgtgtcccattggtttctcagtgcgtgcgtgcgatgcaaggcgaggcagcagtagttaagcactggcatttcgtatgctaaagatgctaccggagacggatgaatttaaaagaactgggtgctgactctcaagaagggggatcaagtgagactgcaatagtacgcaactagaaagcaaaaaaaaaaaaaaaaaaaggcaaagtgtcagatgcaagtagccttgaggccgcaaggtggtcgcggacagactgaagaggttaatttgataactggaccaacttttttaaaaaagaaaaaaaaaactcttcttctgtaatgagatcctaaaattccggcaaggcgcgggacaaagaaaggtgccagtggctaatcacggatcgcgcacagctgccgggcggccaaaggagaatctaattggaagcttcggcacgtctggttggttcgtgcaaacgatcgcccccccccccccccatgtgatgagacagg

SEQ ID NO: 189530 - DNA, 499 bp, Zea Mays
cggggtaggtggcggtaccgggcctgacgacgggccgatagagccagccagcgcgacaggtggccgaaacgccgcctctgatggagcagatggcacaaccggtgaggaagccaccggtgggggtggcagcgccatacgagtacctgaaaaagaagacacggacgacagtccaaaaggagctgtaaccgggttagagtgatcatcgaggaagtcgaaggtcgctggtgtgggtggattggaatcctcagaaaagggaaacgaggtttcatcaaaaaccacatgatgggagatgatggtacgattggactggcgatcaaagcataggtagcctttgtggtggggagaatagccaagaaagacacaaagggttgagcgaggagataatttatgtggagtggtggcagaaagattggggtagcatttgtagcaaaaaacacgaaggtgctcataggatgggttgtggttgaagagagcaaagtgtggtgtagaaagtgcaagt

SEQ ID NO: 189531 - DNA, 297 bp, Zea Mays
gcaaagacaggggatgacccctcataaactctgcctgcttgtctctgggcacttgtggcatctggacctgcactggaggctgaggtggtggcggctgctgctgaacctattgcatagctgctaatgttcgaccaattgcctgaactgcctgagtctgcatcaagaacatctgctcaatggtcatcgggggtggcggtggcaaatgatgctgtggagccgcatcctcttggggtgcctactgctctggctgagcacgcctcgcacctctgcgcctgttctcagacatctgtagaaatc

SEQ ID NO: 189532 - DNA, 273 bp, Zea Mays
atcccatgccacaacaacctcctcttgttccaattcctgcatatctagaaatctcaatgaatggcacgagcgagaataaggtgtgtcgtttattactccgaaagctgaggcaaaggactacgatgactcatcttactttcagtctactcctgctgccgcaataggacccattctaggtgatcccaaaccctctggctctgctcatcctccaccttatcagggtccttcttcatcggcctatcctccttctgatgaccctcctcaagacttgtc

SEQ ID NO: 189533 - DNA, 544 bp, Zea Mays
gtggccatggcggcggtggccacggtgagctctgccagtgggctccttgctatgctgcaggagccggcgccggagctgaagctgcacgcactcgacagtctcaactccgtcgtccacctcttctggcccgagatctccaccagtgttcccaccatgtgagcccggcctcccccctcctcgcttctgctgggcgtacgcggttgccgccgctgtagctgcagtgtttgcgcgatttgttcaggcgttggtttggctgaatttctgaagtgtttcgatccgcttctcttattgatgatgatgactctggaagagaccttgacctagataccgtcttttttgcgcaatttcttcagagtcagtcgtctgtgcaagctgaacgtcgtaggtcacgggttggttctgacacgtggattccagaggcccaattcgcgtccgtgtgcaagagtgtgataactatactttcgtacattgattgtagctgaactggtgtgccactcttgtacttcttctgcccttacttggatttagcttgggttttgatggg

SEQ ID NO: 189534 - DNA, 400 bp, Zea Mays
ccgcgatctaatttcccctcggtggcctcgattcggacgagctctccggcggtcgctagggttttgggcacgggctagactacgatttggaagaggatgtttatcgtcacgcaggtgatgtgaacctctagccggatggggacggggctggccggctggggtgagcgtgagtgagatcagcggtagttgggagtgaagctggtggtgaatgcgctgcgaagtgcgaacttgccggccgccgcacgagatttcggaaggggaagaccggcaccagagtcgaatgcttcagttgagcgtgccaaagaagatatttttcccgggagtcgcgtgatcaggcccgattcaaagcaggacgtgggctcgtggctggttcagttaaacagacgaatgtagctggcac

SEQ ID NO: 189535 - DNA, 320 bp, Zea Mays
gacccaaattgatattaattcccagaaatttttcccagtagccaaggacgagtctgaatttccatcgttacttcaggaccaagcttatctaaataggtgtttaggtaatattctcatagaaaatagatgcacatgagcttaagacaagaatctcgagtacgtgttctcatcgtttaatatgtgactcttcagtggtcatgttttctttctaagcttcgccttgttttggttggtgcaagctgatatccctatttcagtttgcgtctccattaggatcacattgttgctttcttagtccaacctaggaaaggagtgcccga

SEQ ID NO: 189536 - DNA, 278 bp, Zea Mays
tggctaatggtttttcaatcttaatttgcgaaaataggtccactcaacttttacaacagacatgtttgtttttgacaattttggaacactgcaacatgttgggttaaaagtatttttgctaaagtatacattggatatcatggtcgtctatgaaccaattgtagtgtctccatattttcatgctatcttaccattttgtttcagtgagttgaactaatcattatgaatatgcatgggccatggtagaaaacctggtttccttcgtttagtaagagaat

SEQ ID NO: 189537 - DNA, 323 bp, Zea Mays
ggagatgcacactggcttggaagacagggtattgcattagcgctccactctaccgctgatgttttggccgctaaagatcttcctgttgtcatgacatttctcatctcacgtgccttggtaagtaatttgtttttatggatcttatcattgcagatttgcagtgccacttacatagttacatttaacttttaatgcttctcatgacgaatctacaggctgatccaaatgttgatgttcgtggtagaatgattaatgctgggatccttattattgataggcatggaaaggaaaatgttcctttgctatttcctatttttgagagc

SEQ ID NO: 189538 - DNA, 284 bp, Zea Mays
ctcaaggggggcatgtacaagggtgttgagccccgacatgtgggcccaagggcacaatggatgtaagacttggggcagcaatggttgtctgctggagcaatcttctcgtgctctgacacccgtggtccgcatagtcttggtgtgctagggaagcttccctggtaatgcacaagtgctcgtggacatagcgtatctgcgtatcctacaacacgggcatattgttcggattagacgggcacgccgcctgctgcatggcctgggcgccgtctgccagcggagtggac

SEQ ID NO: 189539 - DNA, 478 bp, Zea Mays
acgaacgagggcaaaagagaggcacatacatgttctgcaaggtctgggctacaccacgtcttcacctgcggtcacgcctcgtgcctaagactggttaggattcttgacactggggcagtgggtcatctctagcgcctagcgggttagtacttgatccttgacgagttctttgcttgggttctgaccatcgatccagaagccttctggaccgaatctcctctggttcttaagttgcagttaacaggatttgagaagttacttctgtgtaaactactactacggttggattaggctaggttagatagagcgacttattaagttaatgatgtcctaataacgatgtgcaactgttcatcctcttgcgtatgatctattcctgctgagtttatcatcagttaagttgtcaccgtaataaaattgtttcttagtttctcaaaagcttcatatgtatacattaccaaagtagtcgttctatgta

SEQ ID NO: 189540 - DNA, 584 bp, Zea Mays
gaattgtctattaggccatgtatagtcaatggtatggtttaagtttcaatatttttaactcatataaatcttacagctttcattcagttcatctattgctaaaatcttgtacgccgactgcttttcatttttatacctttttgtgtttcttaatctttgagatgactaacttttcttattattggatcttttttcttgaaattgaacaggagagtttgctcaaaaagaacaaaatcacaccacaaatgggattgtacgtgcttatgttgtcaaggtggataaggaatgggtctggttaactgtatcaagaaatgttatggctcatttatttttacttgatagttcttccgagcccagcgaactgaaagaattccagcagcgctttagtgttggccaagcagtgaaaggtcgtgttatcagtgtgaaccaggagaaaaggttacttcggttgaaggcacttgataaccaatgcacacaaccgaatatagatgaaacacaagaaccaaagtcctctgtgtttggacaaacaaaacaaggagatatcattggtggacgtgttcaaaaaattctacctggtgttggtg

SEQ ID NO: 189541 - DNA, 364 bp, Zea Mays
catcattgcaatcatcgtctgggtttcagcatggtggttggtctgggacacctggtcagttgtcgatggctgacattgtgaaaatgggccggcctcagggaaagacttctatcaaacctgtggtcacagctgacagaggttatgctggacagtacccatctttgccaagcacaaaccagaatctgaaacaatctggaagcatggttcccccaacagagcttgacaaggggttacaacctgcccaagattcggttcaggttaaggatcatgatcattctactgctgacagcaagctcccatatggtactgactggtctccacaagatggcccgacatttgcgaaccaatcttcccttcctgagcc

SEQ ID NO: 189542 - DNA, 303 bp, Zea Mays
gttcatggtaaggaaagcttttcatcgcaaatgatgggtcttgtctcatttggagatctggtctgcctcccttcttgccttgtcgacgttgatcttttcctttctttcggtcttggtgtctccaactaggttttaaggtcatgtagatatatgtgggtaggataagccacatgaggtaggtcaagatctagtttgatgtttaggttggaatggatggtttagacaacccatcgtgtatgttaagtagttgtgtatggccaagttgttataaggcatcaatttaggttaaaacatagctagtag

SEQ ID NO: 189543 - DNA, 373 bp, Zea Mays
gattgagccattggagggagtcttccttgtcatcaaataaggcaaatttgaggcgatggaagtgaggaactcctgcagttgaaggatgggggtgacactgatatatggttggggaggtggtggataatatggaatgggtgaaggtgaatgtggcatgggtagatgatggattgggaactgggtgctgatggctggtggcatgatggaggtgtaggcagcgacaaatgatgaggagatgggtggtgggatgggcacatcggttggcatcgaggtggggggtatgcctccataccctggcaagccataggagcagcttgccggaagggacgatgtcgatgatgcaggcggagtctccactgctgcaatgggtgag

SEQ ID NO: 189544 - DNA, 354 bp, Zea Mays
gccaccaacaactttggtaacttttccaactatgcccacatgggcgaaggtactcaggcacaagtttttgcatcctcatgtaggcatcgcatagattgggtcatagattcaggagcatcaaagcatgtgaccggcatgtccacttctttcaaaacatacactccttatacacattctaagtcggttcaaattgttgatggtacatcccaacagatccatggtatagggtccatagagtgtacaccatctctgagcttgtcatcagtcctgcatgttccataaactggttgctaatcagtttaatgcaaggattcgaattattaggactgataatggaacagagtatgtgaataa

SEQ ID NO: 189545 - DNA, 736 bp, Zea Mays
caactcctcgtcgctctcgtcgtggctcattaccgataaggacgggaacaggtccccctgcgcgccggactcgcaccactggcacggcgtggtgtgctcccatggagtggtcaccggcctccgcctgaacggcctcaagctcggcggcaccatcgaagtcaactcgctcgccagcttcccgcgcctcaggtccatctccttcgccagtaacaacttctccggcccactccccgccttccaccagatcaaggcgctcaagtcgatgtacctctccaacaaccagttcaccggcagcatccccgacgacttcttcgtcaatctcagccacctcaagaagctctggctcaatgacaaccagctctccggctccattccagcttccatctcacaggccacgtccctcctcgagctccgcctcgatcgcaacgccttcacgggggagctcccctccgtgcctccgccggcgctcaagtcgcttaacgtatctgataatgaccttgagggcgtcgtcccggaggcgttccgaaagttcgacgccagcaggttcgccggcaacgagtacctctgcttcgtgccgacccgcgtgaagccgtgcaagcgcgagcagcctgtcaccagctcgtccaggcgggctatcatggtgctcgccacgttgcttctctcggccttcgtgatggtcatcgccctgcacttgtgcagcagccagcctagcagcagccgccgtgcccgcaagctc

SEQ ID NO: 189546 - DNA, 475 bp, Zea Mays
attaactttgcgaagctgtggatcaagctaataggccgaaagtccttggcaaggatggcatcctctttcttaggtaaaagagtgatgaaggctgtgttgaggtatctgaagttccggaagtccttgttccagacagccaggatagcagccataatgtcttttttgatgattgaccagcaggccctatagaaacggcctgtgaacccatcaggccccggggctttgtccggaggaagctgtttaatggtgttccacacctcctcctctgaggttggctgctcgagcccatgaaggtcaatgtgctgcagtcctaaggtgttaaggttgacaattctggacctttgctgccctgtaccgattagatccgaatagaaggaccgaagcacctctgccttatcgctatgactggtcactagctactccccgtcttgacgtttggctatgaaattttttcttttccgacgacgagaccaag

SEQ ID NO: 189547 - DNA, 311 bp, Zea Mays
cttctatggacaacaaacatttgctgcatgtggtatacttgttacatttagccggcgagaccagtactgtacctcagttggatccccgcatagccacagttttgcaacagttcaaatcagtctttgatgaacctacaatgttgcctccttccagatcttatgaccacatcattccactggttctgagcgcccaacctgtttttattcggccatatagatatgcaccagctgttaaagatgagatagagcgtcaggtttcagaaatgctggcttccggcatcattcaacatagttcaagccccttttccatc

SEQ ID NO: 189548 - DNA, 290 bp, Zea Mays
gaagaaggagtcaggtaagcttagagtatgcattgattttcgcaatttaaatagagcaactcctaaagatgagtatcccatgcccatagccgacacattaatcaataatgcatcaggaaatagaattattagctttcttgatggtaatgccggatataatcagatttttatggtcgaagagggtgcgtctaaaacggccttcatatgtccaggcttcattggtttattttaatgggttgtcattacatttagtcttaaaaatgctggtgctacttatcagagggctatga

SEQ ID NO: 189549 - DNA, 436 bp, Zea Mays
gtcatcgtagaatttcttggccgcaagtgagctcaatgagtgcatacctattaggcccatccttcgcatgagcaggacctcattgtgttttgaggccgagacgtgcgccagctcttgcgccactagacgcctaatgtggctcgacatgcttggttgcagggcaccctctgcttggatggttgacttgtagcggtgtcctcatcttcttctgaacttcttgtcggacaagcgtcaggcggcttcctttggagcaaggttcacttagagttgtctcaacaccctcagctatgcaggcatcatgccctcgccctcggtgtcgtcttctggttgtgtgacgtggtcgaagtgatagttcttgtcatggccctcattccctcgtgttctagcagtgatagaaggttctgcaggagtagttgcccataccaactccgcccag

SEQ ID NO: 189550 - DNA, 372 bp, Zea Mays
agagtgagtgaggtggaaggtggtcgtcttcgtgtggacggggctagcaagcgggaattgttgtcctcgccggctgggcgagtgtaggtgagggggagttgcgaaatctttttgagggcgaggagttgaggataatgttgttcaactacagggagatgggtatcatcccaaaggttgagccaatgtaaagtgtgatgccctcgctgtatgtatgtaaccgtaacttatgtgaaactgcaagccttcgctgatccgaaccttttggaaaatactttgattttgcgcgcttgttaggctagcctgactgcacccgtaggcgacttttgcacaggggagtcttttggagaagacttcgattttgcacacttattg

SEQ ID NO: 189551 - DNA, 348 bp, Zea Mays
acaaccaaacagatcgacaaggagggagcccggaccgatgttatgggtccacgacggttaataggacacgttgccaccaaaccatgtccatgtcgtcgtgtatacaacaccaagggggtcacagcatcaaagtcttcacccacgtaccacgagggataggacaacacacgtagtgcatgttcgcacatgctgatgcgagagagttgacagaagatgaagtcatactgaacaagaacctcaaccttatcgagagcacattttgtgggacccatctagtatggtggtatgggcatagagcaagctacatgatcttgcacgacagatggacgggatagtgcgtcatgcgag

SEQ ID NO: 189552 - DNA, 313 bp, Zea Mays
gcaggatgcaatggtcagcagttccgatgtaggtcttcttattgattgtgtacggtccatccaggacataggaactcggaatcatggcttttccttgatagcttctttgggaaaggcttgcccgcaactggtctcagagagtattgttgatttgtttgtcgctattggggatgctattaaacaggtctgtttaaattttctggcggcacatatgatctttctgcagtccattagtctatctccagcatattcaaaccccactatgtgaacaatgcagtttatagtgcaaaacagtacacaacaatgctttggg

SEQ ID NO: 189553 - DNA, 1193 bp, Zea Mays
cacgagcaccaccaccgcaacggggtcagtggtgggagtgccctgcgggatgcgctgtatagcctggccggtttggtcgggaagtggacctcggagggagtggtggctgccaaggagagaagggaggaaatggaggtgctacctagactgctcaagttcctcgacaacgtcgaggagttctacgactgcattggtggcatcatcgggtgagcattcctttgcttgtatgtgggagacttagtaaacgacgaagcacacatgttgccaaattctgatacctgccggaatcataagttagcaactgaaaaggtgcaaagtagtaaaaacatttacgagctacggcatcatatttaaaatgcagtcatacaagaaggtaagttgcatcatgttttgaaactacaaaccttccaagttccaacacatttggttaacattaactagatggacctaacaaaggatgcaattggtaacaccaattagtagtagtgggtcgtttaactagttcaatattatctcagacacattgctttgaaatctgaatgagttgaatcagatgagtttcgggtcgactcattgacccaaaaaaaaacaagacgtgcatccttagtcttaacttatccccttaagccattttttcggtttgtaatctgttatatctacaacagtattaaaagtattgatgttctttacttcctgtatctacttcagctatcaaattatggtattggagctcctttcagcctctaaggatcgcatgcaccgacctagcaaagacaagtttgttgatttccatgttcccagtggacttaatttattgaaggataaagaatatgcatctcaagcagctctgtggggaattgaggttatttcatatacgataattatctgaaatttatggcaaggatatcaacactggttattgttcttatttcaagtgcaaattacgttcttggttaaaaagaagtgcaaattacattgaataatgttgcacattaaataatgcatctgtattctgttgtaaggtacaaactgaaatacgatcttttctagggtctgccagaattaggtgaaatttacccaattggtggtgcgggtgatcgtcttggtttagtggactcagatactggtgagtcccttcctgctgcgttgctcccttactgtgggagatccctgttggaagggctgatacggga

SEQ ID NO: 189554 - DNA, 372 bp, Zea Mays
ctggggtggtccagagctgtgcagccgcttagcttggttccgtaccctaagcctgcacgctccaccgctctgggacaggcaccctagtatttggaactatagtcttgtgggtccgggaacctagggtccggttctagcgaatggacacacgtctcttggggtggcctggagctgtgtagccgcttagcatggtcccgtaccctaagcctgcacgctccaccactctgcgacgggcgtcctagtatttggaactgtgatccaagggatctgggcatacaacttggcttcccaggctcaatcttgcaggtcctgttgcgtgaatcagaggatggctgataccagacgatgggtcctatgggtgtgctactaacg

SEQ ID NO: 189555 - DNA, 337 bp, Zea Mays
cactccagcattatgggcttatggtcttgcaacagttgctcaaggggtccattacaaatagaacttcttgtttcagagcagggttgcttagtttccttcttgattggtttaaagttgagaaagggaatgacattgtaatgaaaatcgcagaaataattcagatcattggtggacacagtatttgtggaaaggatattcgaaaattttttgccctccttcgtgacgaggagattattgcaaagcagcagcacagttcattgcttttgacaagtgttagtcacatgctcaaggaaaagggtcctgaagctttctttgagtttagtggtcatgactctgt

SEQ ID NO: 189556 - DNA, 345 bp, Zea Mays
gttattgtgctagcccggctgcgcccgtaggcgacttttgcacggatagtctccgcggtagacttcggtttttcgcacttgttgtgctagtccggctgcacccttaggcgacttctgcacggtatgtcttcgcggtaggcttcggtttttcgcacttgttgtgctagtccggctgcacccttaggcgacttctgcacggtaagtcttcgcggtagactttgatttttcgcacttgttgtgctattccggctgcacccttaggtgacttctgcacggtaagtcttcgcggtagacttcgatttttcgcacttgttgtgctattccggctgcacccttaggcgactt

SEQ ID NO: 189557 - DNA, 546 bp, Zea Mays
gcgccgtgccacaggatggttgggtccagcccgacaggatcgctggcgtcgtctgaggctcgcgtttgccgtacctctgaggtagatgaggctggcgtggggagtagatcctgtagcagaaaatcaaaaaaatccggtcgaggctttaaagccgcaaaccgaaagtgagtctcatcaaacacaacgtggcgagagatgatgatcttgcgagtggatagatcaaggcactggtagcccttctgagaaggagggtagccgagaaaaacacacgccgcagagtgaggagacaatttgtggggggtcgtggcactgaggtttggatagcacaggcaaccaaaaactcgaaggagtgagtaatctggcattttgcgataaaggagatggtagggaataccgttatgtatggacgatgaaggccgccggtttgtgagaaacacgacagtggagagagcctcggcccaataaggaggaggcatggccgcatgaatcagaagcgtccgaacaacattgttcagagtgcgaagcatccgctcagctttgccgttt

SEQ ID NO: 189558 - DNA, 358 bp, Zea Mays
atgataatgaaagtgctggactgctggttgctggatgcttttggagttttggtggaatggtggatacaactatacaagattacaagcagtgaagttgaagttgctggatgtttttggccttttgaaatatgcaagttgatgagtgcttttgacttttggttgatatatgtaatatgttgttggagacctggagtgctggttgatacttgatactttgatagcatatgcttgttgtcgttgaatacttgactgcttggctgcttgtatttttatatcagtggtgtaatatgttgtcaaaccctcaaagtaatttccttttatattgcttggctggttgtatttttatcaaaggaatttc

SEQ ID NO: 189559 - DNA, 1182 bp, Zea Mays
atgacatcaaagaatgcagattactggatattcagcaaatttctgattgtaccataaataaaactattaagtctgcacctcactttgaaatggaagctgctggatcatcacagaattgcactttggacataacacttggaattaaccgttggatcgaggtgatagagactcatctccctcagggattatcccatggttctgctatggtattttaccactctagaacctgtattctgcattttcttatgttatttgcagtaaaacacccattacatttcattgtctatcaaaaatctatgttattgatgcaatgttcctaacttaatgaagcagtatggcaacaaatgcctgccacataacaaagaagccagctaatttataatcatcaaagtgttgcatggacatcttgcatatgctgttgttatactcactacccccaaacgattgcacatcttgtttcccaagaaatcgaccaatttcaagttcgaccaaatctatacaaaaaagattaacattattaatacaaaataagtatcattagattaatcatgaaatattttcatagtaaacctatttgtagacataaatgttgatactctttttataaacttattcaagtttaagattaattgccttcttagaaaacgatatgtgcaccctttctgggatggagggagtagctagaactaggaccaatttgtttgtgttttccctggtttgaataaagtatctgtttatttctaggtcaggacagcatccctcacatgctttgctggcatgacttctgatgtattcttctccctgcctgaaaataagagagactatgtgacctcttcttctgtaagtcgggaatctcattagtctatttcaatattccattgtgttttcttacccagaaacgttgtatgtatatttgtattgaaatattcttgtttaggttcatgcggcgttaaatgatatggttcctagtgtaagatcagctgcatgtcgagctattggcattgttgcatgttttcctcagatattgtcaaggtaattttcacaattgtgattgcattgcagcctctctaaaaaaatgctaaactcaaagtatttttgttaagttatttaatagtgcatgatgcactgtttcctcatgcagctctagcctaccaggcaagttcatagatgccattgagttca

SEQ ID NO: 189560 - DNA, 574 bp, Zea Mays
taatagatttaatggcaaatctgaccctgtctcctcagaggttaaaaaggatacacaaagaggccttttagccaagggcaatgctatccttgaagagaataatagtaaggataaaatgcatacacttgatactcgcacttcaagaccttctcatctgacgaatcatgagaatgtgaagaatgccagtcaaccaacttcaaatatcgatgttgctgattcatctgacaagatgcaagaacataccagtgtcaatcctgcaacaatggaacaaactaaagtagactcagtgctcaatgacaatcctggagagcatcctaaagagatatatgcaatgaaggcagctgttaacataccttctcaggatttctcctgcggtgccatatctagtgaagatccaacacaagggccagcagatcatgtgaacagtaaagatgcacctatagtgaactgtggtaaagttcatgtatcgagggagagtaatgatgatgagcagtcgaatggtttacaatccagggacaccagcattattaattccaatgtgtcaagaagaccgtcgggccaatttaactcccag

SEQ ID NO: 189561 - DNA, 349 bp, Zea Mays
atgtgtctattcttgtagatgggaatgacgcagagctacatgtacatggcaatggcgcagaggtacatgataatggcacagagttacatggcaatggtgcagtgctgaaaagagttgaaatgccccaggttagagaggtgtatgttagtttaaatgtttatttttggtactggctgccatggaaacttgtaatgcttgctttcttcactaggatttgggagcgatttcagccaaggaggtgccgctgcatgagggcaaggaggtgatacttgtggatgataatgacagcgggcaggaagatgatgcagagggtaaggtggatgagaacacacctcgtgttgggctgaga

SEQ ID NO: 189562 - DNA, 555 bp, Zea Mays
ttaggaaggagcttgagaaacaagattttttgaatagaaaggtattactggttctatataattgtagatgccttccccttcctcttcaaattcgtttacaatgtgatgtctgtgcagagagaggagcaaaggcacaaggaaatggagagacttgagcgtgagagaagaaaagaagaggagagattactgcgtgagaggcagagagaagaagagaggttccaaagagagcaaagacgtgaaaatgagcgcatggagaagtttttgcagaagcaatctagacgagtttgtttctgggttcctagaatgttaattgtaaatgtagtgtagtaaataccttatttatgctgcctacacttgtgcaggaagagaaacaaagacaaaaggagcaactccgaaaagagaaagaggcagcaaggcaaaaggctgccaatgaaagggctgctgcacgtagaattgcacgggactatatggaactggtggaagatgagcgtttggaattaatggaattagctgcacaaaacaaagggttgccctcaatgctgtatcttgacagcg

SEQ ID NO: 189563 - DNA, 603 bp, Zea Mays
aggaaggccccggaggacgtggtcctactaagagtacttgccgagggtgagtaggaactgttcgcgccagcgagggaaagtaccggcgccgagttcgagggtagaggggcggcggtgcctgggtggtagacctccagggtagcggaagaggaccaggggggtagcgttgagggcagcacaccagagggaagcaaggtggcgcctagggctgcgtgccgagcagggaaccggccaggaaatgggtttggtctgctgataccatgtagaattgcagctagaatagtattgattgatgtcacggatgatacgcttagtgtgatcgttctgcaaggaggtgtagggatggaagacatgcgaagaagatgaatgtcgtgggtgaggaagaatgtgcgagagctcgcattatcgaactcaaatgaactcattctgcattgcagtgatgatatgctgcaggagagcaacagaagatgcagtgagcacaatatcattcacatagagcaacgtgtagcactatgacggaacacaaacagtgaaggatcaaacttggccgcaacaaagccaagtgagtgcagctatgcagcaatccagtgtaccaggcatggg

SEQ ID NO: 189564 - DNA, 602 bp, Zea Mays
cggtccccggaggccggaagccggaagcccctcttaagtttctgctataattttatacttgaaatttaaaaatgcgattttaaatacagaaaataaaaggaataagtccatcctccgtatctttctggatccgctgctcgcgtggtgtttttagtttgtgtgtgtgtaagggtggtcaccagcacgtctcgtaactggcggcgtgcttctttgatccgtttgcttatgtcgcctgacgtcaatacatcagctaaggtgccctttcccggttgtggatcggggttcaggaatcaggatatattcattctttctccaaaaactatagaattcattcagtgtcggacggaccttgacaaaatggaagaagcagggcgcagaggcatcagcttatttccacacgaccgcgtattttctatttaaccagcgcagcgcagcgcaggcatggaagcacagcggccgttcatgcagatgaaagatgagagagacctgaatgaaagaacaacaggaggacaaggaaggaggacgccgtcagccctctgtttaggaagctcaaccgggccatggagtcctcttcagcccgcaccatctacgtgagcactgag

SEQ ID NO: 189565 - DNA, 327 bp, Zea Mays
ggagttgcatccgtggcctcccgtgttgctcctcctcgcgcccgcgtccctattacttctccgcgtccgtgctggggcgcggcgcgcccaccgatcctgttctacctcgcgtctgcgctgcgacgttacctgctgctgtcgcccgtcggtggtggaattcgtcgcgcggatcgagccgcgggctcgattcgggcttggcgcctctgtatatatgtcggaattcgccgtagcgtgtgattaggttttgttgttcttctgtgtcggcctggtcttcgcgtgttgtgttttgttgtctggcggaggcgaatctagggtaacggtcagtcg

SEQ ID NO: 189566 - DNA, 719 bp, Zea Mays
ggactatggttcataacaaacaggcactacaagagcggtctatgtacctcgtatcccgtatcagataaggatacccatggatatatggtggatacatatcatcaaaatatccatgaaaaataaatgagataattctagatacttagtcgatagttttggacttcctcgatgaagaaacacaccgcacacctattactggtggggtgacttcattatatagccagataagctagggttacattagggttacagtgtacatgggccaatgggccaggcgccccatatgggctgtcatagttacattccaacaccctccctcagtctaatcgggagtgtcatgaacgcaaagactggacctaaaatcagtaaataattgtacaggtaaccctttggtcataatgtcagcgaactgaagcgatgatggaacacggagcacccggacctgtcccaaagcaaccttctcacgtacgaagtgaatgtcaatctcaatatgctttgtgcgacgatgatggacagggttggcagtcatatagatagcactgacgttgtcacagaagacgattgtcgccgaagagatgggtgcatgaagctcctggagcagctgacgaagccaacaagtctcagccacagcgtgcgcaacagcacgatactcagcctccgcactcaaacgagaaaccatagtctgccgtttggaggaccatgagactaagttgtcgccg

SEQ ID NO: 189567 - DNA, 349 bp, Zea Mays
gcaaccgcgccattcgtctcctccgtctcgttcgtagtgcaacacatacagcctcgtctggtgaagtgaaagaacgacaagatctgtggtacggcggtgccggccgacatccacccactgtgctaccccttgcggttccagccagcgcagcgatcgattcccgctggccgctgccgtcggtgcctgcccggtcctccactcctcccgctactagtactagtaccagcacactccactgtccactccactgccagtgccatcccattcccatccgaggtaaacgcgtcaacgcgaccagctcacctcgtcatctcccattctctttcatatttgcatgcatctcggttct

SEQ ID NO: 189568 - DNA, 355 bp, Zea Mays
gtctggaaagagcactgttgtggctttgatagaaaggttctatgatcctaatgaaggtaacaaaacacatcttcttagaggctgttgatttgcttccttcaaatttattgctccttttaaatcattggctaacttcgtttgcattgcaggccaggttttgctagacaatgttgacataaagacactccagctgaggtggcttagagaacagattggtctggtaaaccaagaacctgctctttttgcaacaacgatcctcgagaatatactgtatggaaagccagatgcaactattgcagaagttgaggctgcagcgactgcatccaatgcacatagtttcatatctcttcttccg

SEQ ID NO: 189569 - DNA, 337 bp, Zea Mays
gctgaagctgaccccaatgggtgtgaccttgacgatgctgatctcaatgggtgtgatcctgccagagctgaccccaatgggggtattgttcgtactgttgacgaggatgaagaagaagaggaggaaatccccttaattcggaagaatagtcggcgttacatagtcagtggggagagtagtgatattccttctccagctttgtctgctctcgttggtctgcaagaattatccctagcaaattttgatcaggctctcaaggatgttgttcctgaagatttgctgtccgagcccacggacggtggtatgagggacatttgctctcacgttccagatgtgg

SEQ ID NO: 189570 - DNA, 805 bp, Zea Mays
cgcacatggtgatggagaccacaagattttttatggaatactgagccctgtctctgcttctaagaattggctgtcttcatctgtcattagtggcattgagtccaaccttaaactaactatggcttcaaaatatctatctagccttctgagaaagcactcactctgttcacaattgaacgcaccattatctgaagaaaaggtccttaatgagtacaacaatcatcaaattgaaaaactgacgtgtgatattacaacagtaatctcaatatttgataaaaggttctccctcaaatttgctgatatagctgagaaggtaacgctggtagataacagtttcttttattttgataatttctggtgaactttgaatggtatttcatccaatttcccccctcttttgttgcagatcctaatcttttgtagccatgatggtttattgtttctagcgtatgttttgttatggggtactaggtcaccagatgttgcaactgataattatattcttgaatgtcaccctctctgcccaattgattatctgttattgttttcattcaaagagagctgcaagttttttagtcgatatgttgtcctctcctccatgtgttctgttctgaatatggaggacaccaattctactgcatgggcacttaaagagagacataagtacattgtaataagtttgtcaaattacctgaatgtcagcaggttacttcttaaacatgacaaaagtggaaattatattctggatgacaggtcagctatgctggcagttatggatctgtttgagtacattatagagttttct

SEQ ID NO: 189571 - DNA, 479 bp, Zea Mays
cccaggagtgcgtcgaggaatggttccctggcctcgacagagtggagacgaccaggggtcttgggagcgaggccctgccagcacacagatctgcccgcatactggaatgccatagtgccagccgccaaattccacatgatgtcccccaatggcgccatccagttggttcctaacaccacgtcatagcctgcaaggggcataagaaacagatccacctggaacgtgagtccgtcgatgagcactggcgcgtgacggagcaccccagggcaggaaacacgctcgccatttgccacggttgccgtcagacgtgggcgctgttcgatgtggacaccagcgcgatgggcagcctcctccccaatgaagctgtgcgtggaaccagtgtcaatgagtgcgatgaagtcgaccgcgcccacccggaccggcagctggatcgttttgctgccgggaacaccagcgaccgcgtgcagggaaaacaccgg

SEQ ID NO: 189572 - DNA, 428 bp, Zea Mays
cgaggaccctccttgccccttcaggcaggtcaaggggaagacggtttaccgtgagcagtaggagggccggaagaagtcatatggatagagtcgctcgtgcagcacttgcatcggcagcagcagccgagcaggcagagcgaggaggacagttgcagatttcctctgatcagatagcctacagaatttgtcgcctcgcatctcggccttgctccactgctccctccacaccttccgccacagtgtctactccacctccaacttcaccagctcctatcgctccagagccatccaccacttccgctacacccaccacctccaccactctggcttccattgttccccctcctgctcccattttcgctccgcccattccaccaccttgcttcagcgagcgtgacgagactgaggtgcgacccctcgctgctgat

SEQ ID NO: 189573 - DNA, 312 bp, Zea Mays
ccgaatcgcaggttcaggagatccttgaaacgtccccatgttggtgtgccgtcgtcatcctgcagttgggtaaaccacatctgggcgacgtcgtccaggtagtacgacgccagtgccacgcgctcctccgccatagttctgtgttggtggaaataggcgtcgcatttgtggaggaagagcatgggatcggtcgtaccgtcgaagcgaggaaaatcccactttctatgtttgtggtggaagtcttgatcacgtaggccttccgcacgtcgggcagcaacgttgccgccggaggatgaagacgtgtccttgatg

SEQ ID NO: 189574 - DNA, 541 bp, Zea Mays
ttttcaaaaacttacagctggtctgtattcttataggccaaggaagcagcgacattactcaaaaatggtttcctcgcgacgacagatttacacaagaacctagaacaccgcatttcgacaaagttatacaagaccctggtacaccacatgaacagccatcgtcttcgcagccacttccaagggtattgataaaaaaaatcactccaagaaagaggaagtcggttccactaagcatggacgagatgtagtatctgttagttgtatcatccatgtgttgtcagcatgtgactgcagacatgtgccatgtatcagacttattgtatcagactacgttcagcctacttgttagtagctgagttattgtgtttcctactacgttcagactacatctatcagacttattacatctcgttcagacttatgtgtttcctgtttgtgccatgtatcagtggaagtctcaatgccctgggaaaagaagaagagagccacgagaaaggaaggggcaaaactggaagtctcaatgtcgctccctggttaacgc

SEQ ID NO: 189575 - DNA, 364 bp, Zea Mays
acagtttgagtgggcctgtgccagcggagcttggtggttgcattcagctgtcagtgcttgttctgtccaatccttatgcacccactgctggttctgattcttctgattatggtgagctcgatgacttcaactacttccaaggagggattccggatactatcgctacactgccaaagctgaggatgttgtgggcgccaagagccacattggagggagagttgccgggtaattggagttcttgccagagcttggagatgataaatttgggggagaatctgttctctggtgggattcctaaggggctggtggaatgtgagaatttgaagttcctgaatttgagcatgaacaagtttacaggttcagt

SEQ ID NO: 189576 - DNA, 572 bp, Zea Mays
cagaaatgacaggtgtttggtggaatcagaccttttgattttgcattatgagacattgtgccttttgctggctgtttcacaacaagttcttgataacatttttcaacctttatgactatctcctcctgtatattccaggatgaatatccataatacattttggaaaaaattgctaaatcggttaatattcctctgtttgcaaagtattgtttattcttgtagggtataaaactagcaaatgggcatctcgacctactgcacgcacatctatcattagtcgtcctcagactttaactacattagttcattgtttgggtgtatattacgtgttcagtgaatattttggcacttacaaaagaaggggatatcttatataggagttgatgtagcacattttatgttatatgtcgaagagcatctgttcatctgtttacctaacaaattctctgctacatgtcttctcttttgaagtatgtcactgtcatagtaaggttttcccctctggcatcatatttcttcatggaacggagtgcctttatagtcatgtgcatatgtttcatcgagcttaaatg

SEQ ID NO: 189577 - DNA, 323 bp, Zea Mays
ccagaacacaaaggctatcgttgttatgatccttcgactcgtcgtattcgaatttctagagatgtgagtttcaatgaaaatcgccccttattttacaaccagcctactcactcctcatattatcccccacagaatctacttctttcatgtgtcttccttccattcctgcatctacaccatcatcttctacatccacatctaatgttctcattccaataacaccaccttccacctccacgtcatcctcttcttactcttccaaaccacctgtcatccaaacctacattcgtcgttcccgctctatttctacggctggtcccgat

SEQ ID NO: 189578 - DNA, 297 bp, Zea Mays
gtacacacaggtaagccaccaagcctgcccttgctccatgcacaactggactgaaacactgtgattgtcgattctttgctgccctgtatgacctatatgtcttttccaagtgatcaagatgccaccacttgcacctgttgatggcaggtagacgtaatcagagaactcagctccaagcatggagaggatagttcttgttgaaatgttttgcattttagtttcctggacacaaaccacatccacttgggaagagtccacaagctctctgactgagtcttgccgtactgaggagttcag

SEQ ID NO: 189579 - DNA, 315 bp, Zea Mays
gcccgttctccagctccacaccccgcacagtcgcctgaagcctggtgccgtgtctacctggtgggttcgggctatcagctttgacctcgtaaccgaactcctcgctgcgcgtaacaaactcctccgcattcgctagggcactggacaagttttcccccaccgcctcagattcaatcctcacaggtataagtgtcacgatcgacctttcccaacccatcatcacaaaacaccgagcaagccccgagcacacctcgtcatgtgacagagagaaggatgatcgacgccgctgtagaagtcgtgccctggctacgttcg

SEQ ID NO: 189580 - DNA, 452 bp, Zea Mays
acaagggtgttcaaatcatcaaggaaatgctcaatcaaaaagtggataagtataaatgctttcgtcaggacagcaagggtactttatggttcgaagaccggctggttgttcccaagaatccagaactcaggatgaaaattttggacgaggctcatctctccaaattttccatgcaccccagaagtaacaagatgtatcatgacctcagatccttatattggtggaccaggatgaagagagagattgctaagtacatatctgagtgcgacacttgccaaagaatcaaagccagtcatttaaaggtagtgggtaccttacaacctctccccataccatcttggacatgggaggacatttgcatggactttattgtgggattgcccaacacctctcggcaccacaattccatttgggccattgtggatagactaaccaagtcaactcatttcttg

SEQ ID NO: 189581 - DNA, 431 bp, Zea Mays
aaaaaaatcaaattccatggagtagtgattatcaagagggaagcaccagacaaaaagaagattagcgataatatcaggggtaagtaaaatgttgttaaggtagaatggaggtgaccaacagagaggatccattatcaacaaggatagatgaagagcagggtgcaacggacgaagggtagatatgatgttgatgttggaagtagtgtggttggtggcactggagtcgacaacctaatccgataccatggtagacaactgggaaagggccatcgtgctgaaggaggttgccaaggactgctgattccaagatgcatgcacgtctgcatggggcgtgggtgccaacgcaggaggtgtcgggataggcaccaggggtgacatccactgcggctggtcgcccatggatccggtgaagaagacctgctagggacgct

SEQ ID NO: 189582 - DNA, 393 bp, Zea Mays
ggacatggactggttggcaactctggcagtatgtggtgtgctagtggtcgtgtgggcgtgtggtggtgggaggtggtcgagactcaggcatgtggattgtggaggattggagttggagacttggagtggaggtggtcgggcgtgtgaccaactggacgtggtggtgggccagttgttgatggtcagatgccggcgggtggagtgcatgtggaagtggaattgtggagtgcatgtgcaacacttaggagcaataaactaaaatctctcttaaatttctacacttcccaggttaaggccctttcttgttgctcgatgtcctcttttgctctagaggcaacttgtgctgccgtttgaaaggtgtcggtgaagatccttctattccgttctttccag

SEQ ID NO: 189583 - DNA, 402 bp, Zea Mays
agcgagagagaaaccacaggtggaggcttccatcctcacccatgggccatgctgccgctcggtgtcaaacggggctgggtgattcgccggaggccactgaagctgttcttggcagaggatggcggccgggaacgctcctatgcgatagcaaccgtgccccgcgacaactgcatgcgcgcggccgcaccagcacaatggatgtcacaaaggaccagtcggatgcgggacctctccgcggccgggactctcgtgattgcgcgggctctgaaactggtaagaactcttgattgcttacctgtttccttcacgtagattagttgtattcggttaggctttgggagcacctgaagcgccgtggtaatggcggctacttgagcggtctccctcgccagcgtattcgac

SEQ ID NO: 189584 - DNA, 418 bp, Zea Mays
tcgtggccaacggcgtggcaagctcaccggcgtcgatgggacaaccttaaggtgtcacgacggtgcggtggaaaggctaagccacgcggcacatggccgggaggcggcggtcaccggcgaggtaatccactcggccgcaaagagggagagagggccacgggggccaccggagtgatcgccagcgcacgggcggtgaagatcttttaccccgcaaggttatccattagctatgagcgcgaatccggacggcggcagcacgaatcacggcggagggtgccgtcggcggtgaggacagccgcgctggcggtctgatccctattgagcactgtaccatgagatcgccattcagtccatctgagagcccaagttggagctcgattttctgcgatttttatgtggcaccagaactagccttctg

SEQ ID NO: 189585 - DNA, 398 bp, Zea Mays
ctaagatgaggatgattcgtagctcatacgggtggtcacttgaaccaattagccgctatttcaatgaggtgttgagaggtgttctatcattatgccatgaatttatcaagcttcatgatcctttagctgtacaacctgaagattctaagtggaggtggtttgaagattgccttggagcactagatggtacacacattgatgtttttgtacctttggctgatcaagggaggtataggaataggaagcaacaaataaccaccaatgttttgggtgtttgtgattgacacatgaagtttgtttatgttctagctggatgggaagggtcagcttcagattcacgtgtgctacgtgatgccatgtctcgggacgatgcatttgctattccaagtggaaaatat

SEQ ID NO: 189586 - DNA, 495 bp, Zea Mays
gcgcacagtgactactggacgacgggtttatttctgtgaaaccgagggactctttactaaatttacacggcgaaggggtaacttctaatctggtccgttcgatcaaacgcggatggctcggattagatccactcatcacccgaaccggtacgcatctacagccgttcgatcggcgatcaacggctcgcgctcaacataaccgagaccaacgcacaaccctcggatcttaaatctacggtcgaagctcgtttgaacgaaagggtatcttcgatctaatcgggaccgtcaaaaagcgatcggacggcccgaggatcgcccccaacccaacagagccgcgcggcggcgctacccttccgcggcggcgccatcaccggcgaggtgaccgacccgcgcgtccgggttctaaacttcgatcctaactgcgcaaaataatgctgggaccatggtgattaaatgggcaggcgacttacccacggcgatgatcggagggaagct

SEQ ID NO: 189587 - DNA, 564 bp, Zea Mays
aacacaatagtcttcccaccgaagggcagaccagggcgtcccatgatatcacgcatgctattgtccagcacttcaattgattgtctcttagccattgatgcctcgtcccaaataatgagcgacgctttctgtagcaactttgatgtcccactttgtttcgtgaaggtacatatagcaccatcatcaatagtgagtggtatcttgaagcgtgaatgggcagttctcccaccaggcattatggaatcggcaaccctagatgtagctattgcaactgcaatcttgtcctgactacgtagcaccgcaagcaatgccttatacagataagtctttccagtcccaccaggcccatccacaaagaacacatcgccattactagtgtcaacaatagataagatcttttcataggcagacttatgctcctcatttagggtttcttgcaaagcaacatcttctatcatcgcctcgatactttcctcctcgtaaatctctctatcaataccttgtgaatcatcatatctatcgatgatagaagggagggggaatgtctttatgtctttacccatt

SEQ ID NO: 189588 - DNA, 458 bp, Zea Mays
gtgaccgaccgcgcgcttgggtggaatggttgccgtgggcggaatattgctacaacacatccttccacacagcgttgcgggcaaccccctttgaggtggtctacggtcgaccccctccggccctcttgccttacaagtcagggaccgcacggacagagacagcggatgctctccttcgcagccgcgatgaggtcctggcagaagttcatcagcgtcttgttcaagcacaacagatctccaagaagtattacaatgccacacatcgggagatggagttcaagaccggtgattgggtttggttgcgattgctacatcgcaccaccaagtccttggatcctcatgccaagggcaaattgggtctgcgctatgcgggacctttccaggtgctggagcgtatcggcagcgtggcgtatcgtctacagctgccggagggtgctcgtatccacgacgtcttccac

SEQ ID NO: 189589 - DNA, 313 bp, Zea Mays
cccacaggccccctggtgggtcggagtttgggtcgcggtactggccaacgctaaaatactcgttgctgacacaagagccacccctgctataggatttcttgttgccgttggtcttattgtcgctgctggcctcggtgcgctatgctgttgcggcccaccacaggatgatgatgagcgacaaccggagttgctgcaagatggcacagagctagcaacgagggcagaggcaacgatgaccttttcttcgttgttcagacgcaattccttcagaagaagctggttgcatgtggatgcaaatgtgaggttggcgcca

SEQ ID NO: 189590 - DNA, 954 bp, Zea Mays
cagaggcaaagaatataatgaattaccttttccagttagcatcatctgcaaggtatgccgtaatttacattccttcaaaggattttatgatgaatgctatgtatgcccattcttagtttccagatacttattttctgtattttgcttctaggtctcaagtactggataaagaagtaatttgtaatgaaaaagaacacaccattactgaattgaaggaaaaggtggttgtgcttaatggtggaattaggcagttagaaacacaagtgagggatctaaggagccaaaatacacaggtaaagattctccaatttgtactgtgcaaattccatggcaccaaactaaaaaattattttgtattacgatatttagataaaattttggttatgatcgtacgtgctaacagtttcttgtttatacaaattggcagcttttcactgcattgaacaatgcaaagaaatctgctaggtcgaatggcactggatttgctcagcgtaaggtatttttcttttgcgagtgcctttaagtttatctagagctcaagtgatattcatagtcagtatatgcactctttgctgttttttcttgttagatgtctgaccatccctcatacatgcagagtgttcgagcttcccagcattttggttatagtaaggacaacttcaattgggtggatgatatggacatttcagacagtgagcactcggatgagttagagaatatgagtgatggatccgattcagactgggtacagtcgaccaggaaagccaaaaaacaccagagaagagtgtctagccattcaaatcctaacctggattgtcaaaatacacaaggcaatgcagaaccagagaagccctcagatgaaaagtgcattttgcccaaatatatttcatcagacggctgttcatgctcaaaatcctcctcatgcaagaccaacaaatgcgagtgcagaggctc

SEQ ID NO: 189591 - DNA, 281 bp, Zea Mays
aacagtagtggggcgtatccattccacaaccagcatcatcaaaaaatgtggacgaaacaaggcaacccagttaatcgtgtaggcaggcatctccatgccatgcacgagattggcacggagagcaacggatgggaatcctcgccgtagggacataactccgcgtcgtcaagctaatcgcgatctgagacgcgggaggagcaaccgcgctttcatgagccagagcctagcaggagaagaggtggaggaagagaagggcagaagacgaggcgatgaggaccttg

SEQ ID NO: 189592 - DNA, 513 bp, Zea Mays
gtgatcttgagggaccaaatctttttgaacgcacggtaatcatattttttaaatgtccagaaaacatagcttctgaatttctcataaaatgtgtttttttctttggcttgcaacacatctgactgataatctatctcctaccaggttagtgcactctcaagaatagcacaagggtctcaaattgctgatactaactccattgtgtcatcccagacagtttctgtaaaaggctcgtctctccaggttactatgatttaggttacaatggcctcctttataatatcttgtttattgttagttttacatgaagattttggattgcagtgtttggtgagtattctgaagtcattggctgtttgggagcaacttcgaagatattccttaaagcaagggagcattgttgaatctcatgaaggggatgcttcaaggagcgtgacaactgatgagatgaagagccaagaggatgttcggaatcagtttgagagagccaaagctcataagtcgacactggag

SEQ ID NO: 189593 - DNA, 314 bp, Zea Mays
gcgggagcaaaatatagctatacagttgatgtatatttagcatatcaaacaatgctcaagatacttaattaattgcatactatagttaggctgtatataccaatgcaatggtcactagcaagataatgcagcctcacagtcttatgacatcagccaatatataaattagaccatttttgttgctgcaactgcaactaatactatgttgaagtgttttttgttaactctgctctgaaaatgcttttttgcttcactctttgacatatctatatgactatatagctgatgcctgtttttactatatgcttatcatg

SEQ ID NO: 189594 - DNA, 541 bp, Zea Mays
ctgaatggaaggagtttctttgggatatcccacaagaacgtgcagccttgtggggtcactgtcaatctctctttatgagatattctttccctcctttaaaggtattcttttcgataagtaaaatgcacagaaaagctgtactccctccatttgaatgcaaggtgtcctagttctatgcacatatatcaaggaggcattaagactcagtaggtagcagtgagaaaagacgagaatagagttccgctttctacctaagaaacaaccatgaaatgatcaatgccatctagctgctgcatttgttgagaacatctttcttacattctatgtttgaccactttattggaggcaccttttcagttctattgaaagctaaccaattaataagagcacattaggaacactcatagatgcatgcttgaagaatgtagtatgcctagtaaaaaaactgtctcaaatcctaaacgccttgtattatgaaatggagatcactaagttttatattcattttctgtacatgcaggctggattatttttccttaag

SEQ ID NO: 189595 - DNA, 529 bp, Zea Mays
agtacttgttgatcctttctatgaacaacaacttcagatctgaaaacgtagctagagtttgagtggttggtttcgcatagtaggagcagaggagaaggggtgcacgtacacctatggggaaatatttagtggagcggtgtttggaattccaataagagctcgatcagttgtgtctgctccttgatcatcgattggaacaacaacttcatatttgaatacgtaactagagtttgagtgcttggttttgcatagtaggaatagaggagaaggggtgcacgtacctagtgggtgtgtatcgccagtggaagtctcgaaggtctgagtagggcagaggcgacagagaaggaggaaggcaccattctaggattagggcccgtgcgatgggggcgcggataggggatgggttcatgccatggccgcctagtatggaagaggatgcctaccatggaagctcgacggtgggggcgagatccacggctgcctgcgtgggcgcggcgtgtgctaggcgagatacaggggcatggcgggg

SEQ ID NO: 189596 - DNA, 448 bp, Zea Mays
caaaaatcggaaattctcccattcttatagaacatgtgatggccgatgcagttgatcgttacagtcgttcgttgttgaaatccttctcgggtagacaagatggcccacgcagtgcttttgagttaccccccagcagatcatgatctatgcaggtccagaaatgggggttcttgtctcgaatcatgagatcactggtgccagtgaccgatgttctggttaactcaacatggaatttagatgtgaaaaatgcagtatcatagatccataggccattcattgggggaaagtagccagcctcttgcagatgtagacatctagctgacctgaacgccaccaaccccggtgtcccttctcctgatagactcgcttgtcagcagccacagtgacgcttgatggctcgctcacatagaagtaggtaaggtgcgcctgccactagcatttaccgaac

SEQ ID NO: 189597 - DNA, 423 bp, Zea Mays
cacaacataaccaccccacccctaatcctatatgttgcgtctgtgtggtggctggttactcgagagacgaccgagagctcgagactagaacactggacgacgtcgcgtcgatgccgcctccgccctctaggccctccaccatctagtcgaagtcgagtagttgaccactgccagtccatcacctcatcctcgcctgcttggagcttgcgaggactcagcctcatgtggtcgattgttggtggctcggtgcctccgtgcctcagtgagacggcgctcctgctcctgcgtcctcctccgctagtagccttcaggagctctgtgctcgcagaaggtgcgacaggaatgggctgagtgcaacatgtctgagagcctatttgcgttcacgtaaccgaaagagtgtccacctcctccgtgtttatacac

SEQ ID NO: 189598 - DNA, 339 bp, Zea Mays
tcgggaacatagttcctctgtgtgggttctagcattgtgactgccctaacatcatttgtgtgatgtcagttgtggaggattcagttcaattttatcgtagtttagcactttagccataaatgtaggagttctcctggctattagtagttcacagaattgtgggtgttttgcgcccaactgaacagaatggtaacctaggctgctagctttgactggaggtgttttcttcatagcttgctgtcaggtggttgatagggtgcatggattgattcggccttgcttcatgaaggaagggggatttgcattagctaacattcctgtatactgtcgcattgactg

SEQ ID NO: 189599 - DNA, 363 bp, Zea Mays
ggagatcccacctggagtgtcagagcccggggcagccggaaaggtatgccgattgaaaaaatcattatatggtctcaagcagtcaccacgagcttggtttgatagatttagacgtgcactatgtggtatgggatataaacaatgcaatggggatcatactgtattttatcgacacttcgggcgtcgaattgcaattctagctgtgtatgtggatgatattatcatcacaggtgacgacgaacatgagatcgctcatctaaaagagaatctgagtaaggagtttgaggttaaagatcttggtcaccttaagtactttcttggtattgaggttgcccgatccccacaaggaatagttctttctca

SEQ ID NO: 189600 - DNA, 429 bp, Zea Mays
cttgactcctgccagctggaacaattctgaccagaatgtgctagtaaatattgtatctctatcactgacaatggagtaaggcaacccatggagacggacaatgttatcaaagaaggcctttgctaccgatgctgctgtgtaagggtgtcccagagcaataaagtgtgcgaacttggagaaacaatcatcaaccgtgagaatcaccgacttgtcgcccacttttgggaacccctcaatgaagtacatagaaatatcactccatacttctgaaggcactgatagaggttgcaggagaccaccgggatggagatgttcagttttattgcgctggcagactgaacaacctttgatgaactccttaactctctgtaatgcatgaggattatcgaatgacgaccggaacctgtgaattgtcttttggattccttc

SEQ ID NO: 189601 - DNA, 497 bp, Zea Mays
atattttgaaaggaagattctacggaagaatgttgattcactagatttggctgtcagtcaattgcttcgccttccctagtcaatggatactatcaatgaaggtaactacaactggaaatgtgtgtcgtgcttttgtgtatgtaccatcaccagccaatttgtagtgtaggaaagtacttaatacctcatgtcttatcatccaccttctttgctgaatgctcgtcgaatgtttacttttgacatagtcatgtgtttacttttgacatgaatacagaactatagactactggttattttcccgctgtgcagtgggcgctgtggtactgattcttgccactatagtgcttcaggttctaaggaaattgatacaccaaatatatgtcatgtctcatgttttttagttacaaggcaactgactgctggaaatatgaagtggcttatagcaacagaggactggacactggaggacttcccctttttatggcatgataaaacac

SEQ ID NO: 189602 - DNA, 973 bp, Zea Mays
tcttgctctatgaccatgtgccatgaccatgtcttcattttcaggcttcaacctccgcaagttctcatcgtccttatttctcttgatatgagaatcgtccaaactttcacggcgattcaaaaccacatcaccacgctctctttgccgagatcccctccactcgccatcatccaaacgcttccgtgaaagatcttcatctctatcattcctatcaatgggcctcatcttatttctatgccttgcaccaccttcaacattgtactccagcctcaaatcttcttctttagctcgtcggctgtgaacaccatcatctctccttggcaaaatttctgtctctcttaccttatcataactcctaccccgcatgtcaacacgatctctgtttacataagattggtggatatcttccctgcctctggagggtaaatgtgatctttccaaatctgattttacatctcgtgagtactcatctttccggcgaagattgtgttcttctgcgtcatgatgccttcttgcattatttactctccttgattgcctatcttgaagaacctcttcacccaattcaaggcgtttctgctgatctttgctgcttccagacatccctttactattttcattagttctcaattcaacaggttcactgccattgtgtccagtaggttgctcaaccccagctatatgtttctgctttttatcagagtgaaccaggtcatcatcctcatttgcatcactaggcatgttggggtctaaagtagcatcatcaccatccacttcaacactaccaaccaatgtggcatcatcatcatcaccaccaccaccatcaaaatgatcttctgtactcagtttatctgtcgtgttatcattagcagcaagtgatccttctgaatcgccctcaacaaggttctcattccgggaatcatggcgtctctctgaagatatttgatgaggtattatgtcgttagagctttca

SEQ ID NO: 189603 - DNA, 341 bp, Zea Mays
ctgacgcacatattagatgcatatgaatttatccttaaattcgggtatgacggttgcagatcggggagcgcggaagccgaggagcgatccgtcggaaagaagcgcaaggaggctgagggagctggagaaccagagtgagtggaagcaagggagaaggggtgactagggagctggagaagtcgtgtgagtggatgtgtgggagaatgggtggccaaggcatgaagggaattgggtgggtggaggaggaggcgacaacgggagggctcgaagtggagctgcacgatcttagagtcgtcgtggacggcagcgatcaggcctccaaagggcgttgcgacgacgat

SEQ ID NO: 189604 - DNA, 527 bp, Zea Mays
cttgaagttactatcagctgcttcttgggttgtgattttgcctgtaacttatgcatacacttggaagaatccaactggtcttgcaagagcaattaaaagttggcttggtgatggtcagaatcagccatcattatacattttggcagttgtgatttatttggcaccaaacttgctgtccgctacactatttcttttccctgtaattaggagagctcttgagagatcaaatcttaaagtcgtaacattcataatgtggtggtcgcaggtatttcttgttttacctttttaagctgattttgttcttactacgctttaggtagtattgattaatctaaaacttatacagcctcgcttatttgttggaagaggaatgcatgagggcgcattctcccttttcaagtatgcttgcctatctcagttttttatttcttttagtttaccattgaatgcctttaatgagtgttgttggcttgttgcgcttgtaggtatacaatgttctgggtcttgcttttggccactaaattggt

SEQ ID NO: 189605 - DNA, 353 bp, Zea Mays
aggcacgtgaaaacattactgctgagctgaagctgggttgtttgtcggttggcattcttgacagctcttgtggaatggtgtgtaggcttgctaaattatgtatctctttttaaaatctaaaagttttaacattgttttttctctcgtaaacacagtatttatagaattattacaaatcaaccaatattaccttttttcaggtcacaccactttttgacacaacaatcgctaatataaatcttgcaacacatggaagatttgagacattgaatgctgtattgatctgttcaattgctgcatccacattcaatagacacttggaggcatgggaaccctttgttgagccatttgat

SEQ ID NO: 189606 - DNA, 406 bp, Zea Mays
gggagcctttacttctctcttgctgatgtcgcacgcctcctagggcgcctgcagcatgggtgctgagctccctttctagctcatctgtcgcacaaaccggactcgccctccgtctacctgctcgacaaattccacacctccagcgccggtaagattacttcatctgagttcaccatcgtttctgcttcacaataatcacgtcgggatgaagagtgcaagcctgggcgagcgtcgcgcgcaccggcaatggcctccgccgtcctcagccctagggaaaactcttacactaaggttcctgaacttttcacatagatccctggagactatacctcgaaacttgtagactccataaattttgcgttatagctccaatttaatccgttcaaattgtgttgccttcataata

SEQ ID NO: 189607 - DNA, 458 bp, Zea Mays
ctaggttttacggcttacagaaccttgttaagcaaggaatcagcaccacagctgggaatgtttgtgccattttcacttccagctcctgctctaatcaagtcaattccaacttggactatcacacagatagtgctaggcgagtaatcactaatcaggtaagttgacttgccataggggcacacacttgcctgttcagccatccctttttgttcgtggttttgcctaggatggtcacttggatgacaacaagcacagttcctgttggaactgcgacttctgaggtggtatgtgtggtgaggggaaggttgaggctcaggaccacggagcttgggcaccgtggctgctagctggaagagtcgaagggacgaggaactgttcacgcagcgtggcgaacagtagttgtaggtgaatagtgacgcgaatgaacagtaccttggatgaaccgtatgcggcgagca

SEQ ID NO: 189608 - DNA, 475 bp, Zea Mays
gcgtattccactgtcgaagcctctagattgcagtttatagctaaccaccagaaagatttgcgatgcgaaacagtgcagggtgtgtctgatgccattgataagggtttcgttagtgctgattccgttggaagcaggatggttgttccttcgtcgtttactggtggtagaaggtatcatgtgatgaactaccaagatgctatggcaatatgtagagtctttggccctcctgacttgtttgtgaccttcacgtgcaacactaagtggaaagaaatagcggatgccattcgtttcgaaaccggacagcagccatgcgatcgctccgatgtgattgttcgtgtattccacatgaaagtcgatgagttcatagctgatatcagggagggaaagacgtttggccctatacttgcaggtatgctggcgtttgtggccctttaggtgttcttccctcaacctatcactttccatctaaaaacct

SEQ ID NO: 189609 - DNA, 378 bp, Zea Mays
atatgtgcttggcctctgggactgtgctgttgatagtaggagctttgaaggtttcccttctatccctgtgtttcttgacttgcactaggaatttgggttgaccagcagggacttgatcatgagggggtggtcctaagatgaagatagatgaaggcatccatgcgctaatcacagggttacttaaaacatttgaggtcgaaggttgaagcagcttgggtcctgtgattgaggatgtacatactatggaatgtacggtaagcagtacgcgacaatgtacagaacacttccttcggttgagagggttgagatgttgtcgaagcaatctctttctgcttgttaatggtgtgatggcaagttcttgtagtgtggcccttacct

SEQ ID NO: 189610 - DNA, 322 bp, Zea Mays
agcacagaaggtttgataaggcaaaggaggtgttcaggacaatggaccagtgcagtgttgcaccagatgttcggagtttcaatattttgatcggaggattttgtagggttggggaggttaaggaggcagtgaagttttacaaggagatgcaacatcgttatgttacaccagatgtggtcagctttagctgtttgattggattattctcgaggagaggggagatggaccatgcaggggcatacttgagggaaatgaaggggcttggattggtgcctgatggtgtgatttacacaatggtcataggtgggttttgtagggctgg

SEQ ID NO: 189611 - DNA, 435 bp, Zea Mays
tgggtggtgaatacaatttcttgtgttctaaaaaatttaaagcttacttctaaagggaattcagattctgaaatggctaggtgcattgaagaaaagtttcaagtgcaaacggaaatattaaaattccttgctgtccaaggtctgttctcagcatctttaggaactgaggttacatcatttgagttgcaagagaagttcaaatggccaaagaatcccatatccacatcgctacgtaaagaatgcatagaacgacttcaattcttgctggaagatgcacaaaaggatgcatctttacatgttcctaatgaggtcaaatccaatgacttaggctactaccttatgtgtttcattaacaccgtatgcaacatcccctcagtctccctcttcaggatcttgagtggccacgatgataacgcattcaagaaattgatggca

SEQ ID NO: 189612 - DNA, 351 bp, Zea Mays
gtgcgacatggaagtaccaatctagaacagcagatctagaggatactgaacctgagacagatacgctaaaggctagatttgaactgcaactacaggaaaatgatgaccttcgaagttccaaggttgagatggaaaattttatttctgagattcaggcagagaagagtcagcttgaggaacgcctgtccgtgtcgcttaaagaaagcagcatcacatctaaatgcttggatgaagtgcggaaagatatccttgtgctttccagcagtatagattcccatgtttcagctaataaggttcttgagaggaacataattgagctagagagctgcaaagctgaactagagttgcatg

SEQ ID NO: 189613 - DNA, 479 bp, Zea Mays
aggtcacggtcgactaggggttcaggtggtggggatacatcctctatgttgttccaggtatttaatttgttttattttcttttcttctacgtatgtaatagtattatcaccttattttcgagtacttgatatatctcattgttgattatgtttgtagggctctacagcatcaaggcagcggctagagcagctccttggttgcatggaggagcaggggcgcgaagtggcaagccatagtgcacctgggcaagagcgcgaggtggcaggccatagtgcacctaggcaagagcgcgaggtggcaggccacaatgcacttgagccggagcgtgaggcgataggctcaagtggacctatgctagagcaggaccacaatgcatttgagcaagcgtgcgaggcggcagaccacaattcacctaggcaggaggacgagctggcacgccaagattcaccgatgcgtgatgatgatgactatgggcagg

SEQ ID NO: 189614 - DNA, 724 bp, Zea Mays
gctggacaagacgaattactacgagtggagccagactatgaagctgaggatgcaggcgcgcgatctctgggacgccattgaaggcggtcctgtcgagttccgcgatgacagacgcgcactggaggtgatcgtcggggctgtacccaaggagatgggtctcccactgctcgacaaggctacggcgaaggaggcgtgggacgccatcgctgcgacccgcatcggcgtggacagggtccgtcgagcaacgttgcagcgcctacgccgtgattgggagaacatcagcgtcaatcctggtgagcaagtggatgactttgctgtgcggttgtcaactctgcaccagcagcttgccatccatggtgatagggacatcactgaggagcgcgtggtggagaaattcctgcgcacggtgccggccaagtactcgcagatcgtcgtcgccattgagcagttccttgattttgaggcactgactcttgaggaggtgactggaaggcttaaggcggtggacaatcgcgaagaacaagtactgaccgagccgaccgagccggtggccatcaatggcaagctgttgtacactgaggagcagtggaaagcgcgatgcagaaagaagaagggagacgatgcaggtggctctggttccaggaaccagcgcggtggcggtggacgcagccgcggtggtggacgaggacgaggcagaggaggtggacgtggtggcggacgagga

SEQ ID NO: 189615 - DNA, 271 bp, Zea Mays
gcaagttaaaactttttcaacaaaaactagaaacaaaatgggtaaaacaagttaactttggaaatgagatgttctaaatgatccatggtgttcaaagtagtagatctgacaagggcacttctcaaaatccacacactaaagagatatgaacaaatcttccatggaagggtgagagaaggaataacacgaataaacacaatgagcaagaacacaagagacacaagatttatcctgagattcggtcacaccaccaaggtgccctacttcttcg

SEQ ID NO: 189616 - DNA, 295 bp, Zea Mays
ttcaggaatatcaactactatgttgatgtaccagtggtacgtcagagctggatcatttgcaatgaggtttctcagaaaaaaagtatgtatttattcattcattcataatccagttctgctagcaggaattaaaaaagcaaggtgtagcagaagaccgcctgcagctgcttgttgatgtcactggagcttttaggccagggatactaacagctcttgttggagtcagtggagctggcaaaaccaccctcatggatgttttagctggcaggaagactggaggtctcatagaaggaag

SEQ ID NO: 189617 - DNA, 2190 bp, Zea Mays
gtatttatctattcagcagatatacggaaaccaatttatcttacattgtttctccaaaacggttggattctagaaaaggtattgtgtttatccttttatggagcagattttaaattcatggattatagtttatttagactcctgtcctgtatgaatctgaggaatctgcaaaactttttttttctcggacacagaggagagctgtgtatcttttcattaaaagaagagagaaatggttacagagacaccccacacacgaactcacgctgcaccaaagaaacataagcgcctggatttaataaagacaaccttactaacatgcaaaggatcaaccctctgtgacgactccgaaggcctgatgtcttggtgaaacatttagagaagaggaaaggcacgggagcagctgtgttggatgactaactacttttaggccatatggtgggccatagctattagctgtcattatctgtcatagtggggaatccagggttggcagtggcttataagccaagtctgtaacagaatcaagcaagttgagaaataacagaatcaaaacagaaccataccttgcgtcggtctctacttccccaccgattctgcttttgatttccactaccgtctcacgtctcggcgtttggggtgcgccagtggccaagggtcggtacaccctccacaccctgcaccactgctgcaagggcagagatgcctcttgcaccagccatatcccacttccagaactcatcaccggccaaaatcagcgctgcggacagattaggaatctgcagaacagccacaagtgacatgggaccaaagggtttacttacatactgtcttgtcttggcatgcttacattgaagtactataatattttgtttcctgttttctttcaggatgctgtattgataatggacttgttgtccttggaacatgtttcttcgttctggatggttcagaagcagagccagaggtttggaagcttttgcaatgatccagtgttttgcatgagtaatagtattagttctaagtttcatggaccctgatgttattattttcattatttcactatttttacaacaataacgcaagtgtacagtttgtactgtgattcagcactttcatatcaatcttctggatgtttccctttttgaactgtcgattctcattttgagctgtgtggtcatggcctagcatttcctcattgtggtgtcatctttttagagaacctgcattgcttgtaactgctgtatctaacaatatgcaactcagatttgagctgtttatagatgatacaataagttaatgcaattatgtcatcccatccttcttaagactactacaaaaatgaggaacagtgttatatcacctcagttcctgatattattccatgattgtctgacttatcatcaaattaaatacaccataatgtgaattaaacttctaagattttctagaacatcagtatcgtctctttaatggatatcactatgtgctcacgctaaagtacactagctcgctaacaagatacctgaaccacccaacaacaaaaatttacaaaccatgaatataaaccaattatgtgcaataatcatgcataaaggatgccatgtagatgtactgtgattgtcggcaattgcccacagggtcgtaggttaatttgctacgcaaacttaagacagggtcctatgttaattgagcttgtatttaaattttcttttggtgcattagcttttattattttgttatttttgatagttgcacttttttttggttaattttaggagactacgagttagtgttgagcatgacctaggtgctagtgatgctgcaccaaagacactgagattgtttgtcccttactggataaaaaaccactcgtcaattccattatgttatcgcatagtagaaggggaatccacagaaagcacagaagcagactcacttagcagaccagactcgctaagtagagtgtctaagtcttcaaaattttcccttaaatattcttcaaagtctcttgtcagaagaggaacaatgtcgcacagaaatatgcaagtactggaagatattgaagattgtagcacagactatgtgatgctatcaccacaagattacttgaaccgatctgctggtatgcgctctgagtcaagggataacaatttcagtccagctcgagttgcaatatctatggctgtt

SEQ ID NO: 189618 - DNA, 386 bp, Zea Mays
ccgggatatgaagtcgacggagggggagcgacaggatggctggtttccaaatccggcgagaaatcgtcgatccatcaaggccacacgcgaactaggaagcctgccaacacgagctccgcacaagggcggatctccaagacccgtcagcgaaggcgtcacgagttcaacggaggcagcggggagcaacagcagcgacccacactgtctctcctatctaactctcgtttgcgctcggcattgattcacctgtatgcggctatgcgtatgcactcgtcggaaagggagggggtgcacaggaggctcgccatggggaatagggaggtctggcagagcagtcctggcaggggccctccgccgtgggatgaacggcgcccgcgcagatgtgg

SEQ ID NO: 189619 - DNA, 436 bp, Zea Mays
ggtactcagcctcagcactagagcgagaaaccatgggttggcgcttggacgagatgaggttggccctgagaaacaccacatagccgaagttagaccggcgggtgtccgggcgcctggcccagtcaacgttgatagatacaaccagctcgtgtgtggaggagcgccaaagatggagcccatagtcgacagtaccccgaaggtaccgaaggatgtttcacaacgctcatatgcgactttcgaggatcatgcatgtagagacagacacattggatagcatacgcaatgtcggacctggtgaaggtgagatactaaagagcaccggcaagactgtggtagacaatggggttgttgatagggcaccatcactggagaccttggcttgtataccaaccggtgtcacacagggcttgtagtccagcataccagcgcgctccaa

SEQ ID NO: 189620 - DNA, 515 bp, Zea Mays
gtgaagaccatactgcctcttgagttttcagatagatatcattgtaaggatctgggaagtccctgccattgaaaagaaaggcctttggataacattcgcctgttcccttccggtaaccaaaagcttggcagtccgtatcgttcaagcacatgttcctgcacatcaaccatggcaccagtttggaatagtttaagtcatagccccataagtctgttccggtaagcttcctaaatgaaaagggtgtggtattagtcttgcgcctgcaccctttgctccagtcacttggttcaaccatctcaaatccttcaaggcaagaacatgactctagctctggtctgtatctgcacaggctgtttgctccacacagtccatgtattttgcacagttgagggaatgccatccaagagactgaccaattgccactggtcatgtttaggctatacaacctaaggttaccgtcatagtctagggtcaatctcctcatcgtctcatcaccaagatcagaagcttcaaac

SEQ ID NO: 189621 - DNA, 285 bp, Zea Mays
gcgccaccgcggtggaagccgataagaacgccggtgatagccgtcgtccgaccttacgccacgtatccgggcacctctgtcgcgtcatcgtgattccccgctgctgtctcatcgatgccggtgagcccgccacggcggtggacacgaaaccgcggcgccagagtccttcctcatctccggtcgccgcgttgctcgaccaaattgagtgccaccgacgaagccgcttataaattgagctcgtgactagcttcgcaatatcattgcgcacccccacaccaagtattg

SEQ ID NO: 189622 - DNA, 346 bp, Zea Mays
gggaggctggatgacagaggtcggagacgccgggcgagcagggctaccccgcacaggagcatccgcaacggaccacttttcccgcgagaccccaggcggccgcgacaacgatcgagaagagaacgtgccgaggctgcatcgggtgccggcgtggagtatgtggcaacggcggagaggagggggaaagggactcgacgaggctgtgtatagactccaagagcacgggatgcgcggtgtttattaataaacagggtgatgaccaaatcttaacaacttcccctggaatcccaacgaatccaacggatatggcggcaatacaggccactggcagcatgcaagccaccca

SEQ ID NO: 189623 - DNA, 786 bp, Zea Mays
ctcctcgcatcgccggtgacctcgccgcctcgctctgtctcaaaaccctagccccggttctctccgccgcctcgccccgttcgctcggatcgcgccgcgggagccgctgcctctcctctctctccgccctccaccggaaaccctagctcactcccccgctcgctccttcggatcccgcgaggctccgatggcggagaggaagctggatcgaccctcggcactcggcaaaggtgacccgcccgatctaggcgccctggcccgcgtgagatccgatctgccgcctggactggcctcggggcagatctgtgattgattggtgggtgcccccgatttgacgtctggttgttgcgtcgtgcaggtgggctgtcgcttgggatcgaggaggacagggccgccgccgccatggggttcgtcgaccactccaaaggtgcggatttcttcacccgaaaccacttgcctttcattcctccctgattcatctcggactgtctgctttgctcagcttagcatgaggtatttctgtagcgggcgccatgcactaccgcacaaatgtgtagcgttctgttgggtattgctagttcgtgttgcgtgggtgcatgtttcctgtgcggttgctatcctcgtcctctgtctgcttgcgtagggtcgtgagcttgtgcatcattaggctgtcgtgtggatgatacaatcgtgtggatgatattgctgagcgttgaccctctgctatgcagatcagcaccacctggataacagcattcccctttctcctcagtggctctacgccaa

SEQ ID NO: 189624 - DNA, 329 bp, Zea Mays
aacaaatgcgatgatcacacggacgggagggtggcaggccctgtggctcttgaaaaagatccttaaatgtatctaggatcccctgcagacgaagatcatgtccaacttccaaactgcgtaactgaactgacttcccatgatgtagaaggccttgcaaactgacatgtccaccctcgaggaaaagagacatttggagggagtcaaagttccagctgatatcacccaatttctggagccattgcaccccgagaactgcatcaaacccttccaagggaatcaccaagaaggaatccgagaaggaatgatcctgtataccaaactgaacggcc

SEQ ID NO: 189625 - DNA, 309 bp, Zea Mays
cttcgatctgatccctgccgttctcgacgagatgtcgtacctggggatcgaatgcaattcggttatccacaacgcgataattgacgggtacggcaaggccgccatgttcgaggagatggagggtgcgctctccaccatgcttgagagtggtagcaatgtgccggacatttacaccatgaactccgtcgtcggggcgtatggcaaccatggaagaacagatgagatggagaagagttacagtgagtttcagctgatgggtgttgagccagataccaagacgttcaacatcatgatcaggtcttatggtaa

SEQ ID NO: 189626 - DNA, 803 bp, Zea Mays
ataacattggcttgatgtacttacgtcgcaacctaatggaagaattgattgatgacgttgacacttttgatgagaaagttgttggatcgtttgtgagaataagaattcctggtacagggcaaagacaggacatttatagacttgtacaaattgttggtaagggttgttttacttcttagttggtattgtttgtcttaactgcattatactaaaattttcttctattgtttccaggcactggaagatctgcagaaaaatataaatctgggaaaaggactactgatataacgctagtgatactaaacttagacaagcgggaggcagtaactattgacataatctcaaaccaggagttcactgaagtatttttcttctcagtttgaacttaatagttttactagtattacacagtttactaaaatctaatacttataaggttgtctttcacttcgaatactgttgactttaactgctgttggaagatccttgaccttgttacttgacttcatggatacaaacatgcacttcatcagtaaatttgctactctattttgttcaaatttcatgctttttctgatttgcaatggttttttcttttctaggaggagtgcaaacgcttgcgtcagagcataaagtatggattcattccaaggctgacagtggtaaagttatcattaacttattactagtgtttcttgcacattttttgtgtcatttatgcactgttttcttctgtttaactatcttatcttccagggagaggttcaggagaaggcaaaggttctccaaactctgaaagtcaa

SEQ ID NO: 189627 - DNA, 622 bp, Zea Mays
cctgctccccacgatcccctgcctccacaagcttccttcacctgctcactccaaccgctgccgccatggcggagaagctcagggatctaagccagccggtagacgtgacgctcctcgatgctactgtcgctgccttctacggcaccggatctaaagaggaggtaatctcttccaccggaccatccgcggattacctgcccccgaccgactttagggtttacttcggttgctcgagcttcgagtctatccgagctcggcttgctaaatgcgaatggtacctgttttgctaaactaggatactttagtgtttagggttttttcttctgttggcgatatggtttggcgtgccatatgttagtccgtctctgaggcgccgccgccgccttatccttctccgttcacacttaccctatctagaccttcggaatgactaaatgttaaagcaaacgtgaatagtcggggtttcccccactccgagctgactggtcctttctcgtcaccagaggcctaacattgctagtttttgtgtatttgttttctagcctcgtggttttggcattgaacacagataactatatctgctgcctttcgttccagaggagcgccgctgatcagatactac

SEQ ID NO: 189628 - DNA, 320 bp, Zea Mays
cgagcacgttgacgttggggagagcccacagcccctcgggcacctcgccggagaggctgttgttgctgacacggaacctcaccagcgtcttgcagctggcgtacgtctccgggatcccgccggagaagttgttctcgagcatgagcagcttcagcatggtgccctgcttgcacatgtccggcgggatgggccccgagagcaagttggtggacacgtcgatgaagttgaaccgcgcccagctgccgaggctccgcggcagctcgccggtgaggttgttgctgtagagggacaggttgacgaggtcccggaagtcgccgaac

SEQ ID NO: 189629 - DNA, 360 bp, Zea Mays
cacaccaacaggatgtttgagagagacggaacacaagcaagcccaatgtgtatcttcagttcttcactgtgtcgagctaaatggatattggatagctcaatctgctcgacagggcgagcagtcaatagcggaatgcgttcacgagaaattacctgcccgttaaatgattgagacactgaagtgagtaaggtaaaagatctaggaaccaagacggcccaatgcgttgtacgtaccacacacaaaacgcaacatggaaacacacgacccctttccataatgaagcaaacatacagaagatcaaaagaaacaggacagaaggctcaaatatattcctgtgaagccgttcggatgtcaactcgc

SEQ ID NO: 189630 - DNA, 524 bp, Zea Mays
aatgggccattgtcgctattgacaagattagaagaggcttcttgtggacaggtagaaaggaagcaaagggtgggcattgtatggttgctcagggaaaggtttgcatgcctatgaatttgggagacttgggaatctcgagtttcccagagctgtgctgggctctccgaatgagatggctctatggttgaagaaaactgaccctacccatccatgggctgatcttccaattaaggtgccatgtaaagccaaatccttcttctctgttgtgctgaccactgtaattggtaatggatctaataccttattctgggtggacaaatggatcaatggaagaagtgtcagactttgccccaaggctgtttagcataatcccaaaaagaataaccagcaaaaagaactgtgcaagaaggcctgctaaataggaggtggattggggatattaagggtgctctaacggtgggagccttagcggactatctgcacctctggaatgctctctcagttctatttttgcagccagatat

SEQ ID NO: 189631 - DNA, 475 bp, Zea Mays
gcactcacaaatcgacgaaagccaatatgctcaacgatgcataaaggatattcatgcaatgctatcatagcagcaagctcctttctagcaacttcaggatcaaaagtgtagctctccacggatactttccccccttcttgtgaactaaacctcaaagatgattgtgacataatcttgttctggctagtgagctttatcttgcgcaaaacacaaatcttcaaatgatcatgaagatgctttgttccatgagtacttttcccattaagcttcttatgacaataagaacattgtgccttgatttcactagaacttaacttcaccctcttgaattcattccaaacaacagatgtaagcttcctctttggttctgcaatcacttcttcaatttcatcaacatcatcatcaatctgtattggctctgaatcattcacagattggggttgcatgctgctctcagtttcattcccactctcag

SEQ ID NO: 189632 - DNA, 290 bp, Zea Mays
caccgggaatgagccaggcttgaggacgatgttgtggtcgcagctccgcgtcggaggtaggccgatcagctcggcgaaaatgtcggtgaaggtgttcaacaccccgtcgacgagggtgtcatccgctgttgcggcgaggagaatcggcgcggatggagggtctacgccactccatcgaacgtcgcgtccctcccactggaacaccatggtccgagcgttgaagtcctaggcaataggcccgagtgtggccatccattgcgtgccgaggacgacgttgtacccggctaggg

SEQ ID NO: 189633 - DNA, 271 bp, Zea Mays
gcttcatggccctcggtgaggccgtggagcttggagggtgacacagcaactccctggctactgacaatgctcccggagccgccctcgacggagtccgggatgtctgcgtagttgtatgctgtcgtgcagcgtgcacagcagcagtgcgtggcactaggcggttgggaatctgtggcatggaagaaacaacttcttcctccaccaggaaatccgttgaagtcgcggcgcggtgctccatgatttgcaccatcatgctaagcgaggaaacaag

SEQ ID NO: 189634 - DNA, 337 bp, Zea Mays
gatggctgtcaacatggatcaacagtgctagtgaacataactgtgagcctgagtggaccattagtcctcacccaggggctcacggcatactactgtttttgtacattttgaccttgcttagttttgtactctattctaaaaatgtaggccgttttagactttgagttttgtcctaactcctaaatcaaattctctatctttggccatatttagagaaaaatgcaccaatatctataacacctaattagtttctaactccataaaattcctttatttttcatttatttggcactgtagatgttcatatatttttctatgtttagacttggttaaaatt

SEQ ID NO: 189635 - DNA, 544 bp, Zea Mays
gagagaagaagatgagctgaccggagtacggctggccgcggtgaggttgagtttcgggtggcggagaatggatttgggggaaatcttaaattcgagctctcggaggcacggttgctaacgattgctggtgactgggtgggtgatgatgttacgcagctaggggagggctcaatttataggcggcttcgtcggtggcgcacaatttggtcgagcaacgcggcggccggaggtgaagaggattactggcgcgcgtgaatcgctgtctcatgccgtggcaagctctccggcgttgattagacaacagtgggggtttacggcaatgcagtggaaaggttgagccacgcggcgcacggccgggaagcggcggtcgccggtgagcttatctgttccagtcgtagagtagagggggaagcacgggaaggtcaccggagtggagcccagctcacggcggtgaagatctttactgggcgatgcttacctgctggccacggcgcacgaatcacgacgagcggcaatcgacggcgacgggccaccggcgacgggc

SEQ ID NO: 189636 - DNA, 896 bp, Zea Mays
ttatttcttacaaatcatattttatataggttttatcaactaaaatatcaatgtttgttaggaacttgaaaacccggacttctgaattagacctatgagctttagcatacatacctgaggttttgcctcttgtctaacttttggggcaacagattttttatttggttcagatatggtgcttcctccattacttttgtcactatcaatgctggagttgagactggtaattttcccattattgcttgataccccaagcatgtaacgggaagcaacaactatatattgagtagctccattacaatttctagacaatcccattatttagttaaaaatgccattacaatcatctgaatgtaatatgtggagttagaattaccgttatatgtttccctttcccatacgccaatgtctattttttttgttatgttcatgctagctattatcatctttggttattttcttttaaattattctactcaatagatggatgtaatcaacctattgctattttgactaattatatgcttgtatggtttcagtaggaagggagaagaacctcaagttcattgtgcaggtatggttcttcataatttacaccatgtctggtagcactcatctttccatttttctagaaagttacatgaactcgatctgaatgtaacacatagagtttgaaagagaaaatagaaacacaactattttctttcaatctcagcgcgtgcacatttgattggtgtagggttgggatcgagatgcccacgatcaaggtgcggtcggcaatagtagcttccccaccgtcctcaattgcgtcgtcaatagtcaacatgcctgaggtgcgcagatttacttgtggtatttatttgttccacaatttacctgcagatgcaagattcatc

SEQ ID NO: 189637 - DNA, 375 bp, Zea Mays
cttttggcttctgtctacagtatttcaatcttttgaaaacttctgtttgtagcttgaggctgtcattgcttctgatctgtatgccttctgtagtgtccttttaagcttaagctgtctcttaacattctgagcatttcatatttggtagggttcagaagtgtgccaagtgtacaaacaatctgtcagtttacctgacttcctccggatcatttactaaatataggcatgcacgtattgcaatatattgacttttcatgtggattttcagttcatctatgattttgtattgaaaaggtgttttttattagtactcatttagaaatagtgaggtatagctgtatagttctcttagatctttgaatagtgcttgtcgcg

SEQ ID NO: 189638 - DNA, 310 bp, Zea Mays
tagcacttatttctgcatcattaggatctaaaggcacctcaaagtggacttgccgttcatcatcgggaatttctccaatcgaggcaaccaaaacactaacttcttcagtagagggtcgcactctaaggcccaaactgccatcggcgacaggtggattcgacacaaaatgagtaaaagccttggaaggaggcaagttccaggccgagtatgcgataggggcaccaacattggacaccttgcctctaagtatcatttcaagccggctcaccaagtctacagcaagaattcttctattggtgacccgggttgg

SEQ ID NO: 189639 - DNA, 389 bp, Zea Mays
gtaagcatgaagctgaagtgaggaatttgagtcataaaataaacattgtgtttttgtcccccataaatatctaagcacacgaagtaagtgcccataatgaactgatgtaggagcagagacaaactgactcaagatgtgaaccacatgacaatatctggcctggtaacagtaaggtaaactaagctgccaacaggatgtctatatcgagatggatcctccaaaggtgtcccatcagtcggacgaagagataagtgaagatccataggtgtggcaatagtgcgagtatcactaagaccagaacgatcaagaaggtcttgtatgtatgtacttggcctgagagagataaataccattttgagtctgcaaaacctcaatgcccaagaaataac

SEQ ID NO: 189640 - DNA, 512 bp, Zea Mays
gtgcaatatgacaacgggcacgagtttgacaactccagctcccgaacattcttcctcacccacggtgtcctcctacgcatgtcctgcccctacacctcatctcagaatggtaaagctgagcgcatcatccgtactaccaataacaccattcgctctcttctctttcaggccagcatcccaccaaccttctgggttgaagcactccacacggcaacacttcttctcaacattctacccaccaaaacccttcatttttccactcctcacttcgccctcttcaaaactgtaccctcctatgaacatcttcgcatgttcggttgcacctgctatcccaacttatctgccaccactagccacaaacttgatccccattccgctaagtgtgtttttcttagctactcgtcgcatcacaaagggtactggtgtcttgacctcctatccaaccgtgtcatcctttcccgtcacgttgttttcgatgagtccacttttccctttgctgaacagcaacccac

SEQ ID NO: 189641 - DNA, 480 bp, Zea Mays
tatcaaaggaagctcctcagccattgcctgcattggatgcaacggatttagacattgatgccaaacctgtcctggcaccaccatcagagagtaaaccagggcaattgtcaccggaacctccccttctgctacctcatgtagcacagcatacaacgtgttcgccagggatgacacttttagggtctgagaatatcgagtcctcgcagctgctgccacgagctctggttcttcctcttgatcagacttcagacatcttggctgatgcagggaccaagaagacagtcacaatggaagaagtgtgtcatccgctgcctgtagcaggagtggcggaagaagccaataggtctgttcttctaccagtaacggaaaatggctgtgagggccaatcaccacacctagagctacagacttcttcccctgcagtgaatgctgcagctacatcactggagatagctcccggaagttttgagaattcagagt

SEQ ID NO: 189642 - DNA, 402 bp, Zea Mays
tcataaacgctacttgccccaataattattgggctgcgataacactcgtataagacctctaatcgatcaacaagacatttatttatccaaggggcatggaatgtgatgattgacaaagcgaagcatcacattgccataccacaaaaatcatgacaacttcgagatactacccacgaatcgtttgaaaattaaacttacttctcgcctgccactacatcactccttaatcacataaccatcacgagcatccttcgcacgattatataatagcgacctaaacgtcgtgttacacaatacatacatctttcctcgtcgcgagtataaccatattacggcatatacccgcgcacctcaaataaatatctcacgccaccactactatatcacaccacggcacacaca

SEQ ID NO: 189643 - DNA, 484 bp, Zea Mays
ctttaatgtgacaattacgtaaagcatccatggttattacttattaaggtgtcgcttcaatcgcttgagcgtcagaggaatccaaggtcacctcaggggtaagctgacgccccatcgccttgtgcttatgctgatccccccttgattccgccttctcctcgttgattctgctgctggctagatttcttccatctcctgctgtgaattgctcaatctggaaggggacggctgcaactgtcgatctgagatcattgacaagaaaggaaggggaggcagaggggtggagagggaaacagagcaggcactcgggcagaggttgaatctcagcgatggagaacgcgagagagaaggagcggcagcgctgaagggggtcgggaactcgggattgggagttcgacgaagccatgccaggaggggaggagcacatgggctgcctggtgggctgggccagcccacttcttactcagccagttttttccttttc

SEQ ID NO: 189644 - DNA, 539 bp, Zea Mays
ggacttattacatgagatggaattattttgtctaagcaaatttagggcagcagctcctggatgaccaagacgatggtgctagaggttggtggaggtggcgaggttggcttggggcgtggcagggacggtgtagaggccgtcggagctattagagcggagaatcacgcgtctggtctgcagatccttgacagaaaaaccaaacgcgtcaaattcgatagtgcaattgttgccacgagtaaattggcgaaatgaaagtaagttgcgcactagagatgggacaactagaacattgcaaagcgaaaaggatgaagtgctaccaggcaatgtggaggtgccggagcaagacacaggaaggtgatgaccgttgccaacagtgatggatgggacagaggagggttgatgggagagaagtataccatccgtgttgtgcatgtgggaggtggcaccagagtccatgacccagccggagttctggagcgccatctggttcagggcggcgatgaggctggcctgatcccacaccgggtaaggaggtggcg

SEQ ID NO: 189645 - DNA, 462 bp, Zea Mays
cttgtgtcaccagaccaatttggcttcttaaccattctactttcaaattttttatgttttccccatccaaaagaacttcacctgaaacataaataagagtagtcttttaaatggaggaatagaagtcaaaaacaaaagatgcttctcaatgctcttacctaatgttgggtcatagaatctctccataagaggaattatactgcttttcccggagccatttctaccaacaagtgccacagtttttctcgccggtacagtgaggaagaatccacttaatattgggatctcagggcgagacaggtagctaaagtacacatttcgaaattcaatattcccctgcacctggggtaaggttgccccttcttgattggtgctggaggttgaacgactaatcatctcatatagtctataagcagcaatgcgtccttgctcgaatgaatagaagtttgtagctgcttgatt

SEQ ID NO: 189646 - DNA, 364 bp, Zea Mays
gtgccggcgaggaaggggtgtctgaagcaaacgggcggaggtgccaccgaggccaagaaggttacttttggggcggaggtagggaaggccaggagactgaggtctcgggtcatatggtcgccggtcgttgccaagacaagggggaagtctgctcgagccggtactgattctgctgctgaagacggtatttctgcagatgtgggcgctgatgtcccagtgaggcggtccaggaggaattcgttcaatcctgccgaggctgaggaagcaggagaggctgttgctgttgacaggaagcccaagcgcaagaatcaggagaatgacgagggcgttgctgttatcgctcaggctagagttacgagaaggt

SEQ ID NO: 189647 - DNA, 368 bp, Zea Mays
cggaagacagcaactcctcttggggataaggcgagcaaataggcagcccgttaacctctcatcatctgttttgtctagcgacagtatgcatattggaattcttgctgctgcagcccatgcagcagccaataacagccaattcacagtattctataacccaaggtaaatatcatcttctttaattttaatatattaagaagtaatgtactgaaagtttcaattagactgtttttatccctttcagggctagtccttcagaatttgttattccttttgccaagtaccagaaggccgtctatagcaaccaactatcacttggcatgcggtttagaatgatgtttgaaactgaagaatctgcaacaagaagg

SEQ ID NO: 189648 - DNA, 473 bp, Zea Mays
gtttgatggtgcctctgatagaaaattcagttcataaccgtatttctatttatgctgatgatgtggtgattttcctccacccggtggctcttgatttagtaatcaccatggacattatcaggatttttggggaggcagctgggctcaaagtgaatatggcaaagagcagcgttttccccatccactgtactgctgaaaatctggataccattcataatctgctgccatgcgttgttgccaacttcccctgcaaatatttgggggtgcctctatccttaaagaagctcgacagacagcacttacagccattcattgataaaattgcacatcgtcttccctgctggaaagctgatctgttgactagagttggaagactgattattgtccagattgtcctgtcttcaatgaatatctacttaatgatggccatggaccttccttcttgggttttcaaagcaattgacaagatcaga

SEQ ID NO: 189649 - DNA, 416 bp, Zea Mays
gaaattttcaaaaccctttctcaaatccttggggactccttttatagcattgtaccatcaactggagaaatgagagacagaaggtcaggggtggtaggaactaggaagcagccccagctgttggaggatcattgtccaaacctgtctggttcagcctgatcacatagagagatgcataaaatccagcatttattttcttgtagcagcatctttacactaggttgaatttggaaagataactttcctcaccctttgtttttgcctttccccgagtctatacctggagcaaaggcatagcatgttttgctcaagtgattaataactatcacactggccactggtttcgtgaatatgcttgtaataactatcccactttttgatactgtcttgcccaatttatcagcatgatttatcat

SEQ ID NO: 189650 - DNA, 390 bp, Zea Mays
cacctacctcatgtgtctttctactacgacgattcgtgcccccacacccactttgttcttttcgataccatttccttctacgaccatcttcatgtttttgggtccgcatgctaccccaacctttctgccactactctccataagcttgctgcttgtccctcgctccacccgtcatgtcttcctcggttactcctctgatcacaaagggtatcagtctcttgatctcactacacatctcccgtctcgttatctttgccgagacagatttccccttctcgcatccctcccagttcaccactgactcccttcccgagttggactttcttcttgatcctgaacccgtgtctccatctggttagtcatcgtctttttccctcctgtaggtttacc

SEQ ID NO: 189651 - DNA, 576 bp, Zea Mays
cacctctccagctgaagatctccgcataggtttccctttaatcagcgtaatctcggcccagagaggggggtggggggataacggaaaggcgttcgtctttgctcaccataaaagggccttttcgggaagctcccactactttttgttaggacaagactcacccccatgccgtgtcatgccattgccacccatccttgggagctgcagctgcctatataataccaacagtgccgaagcaagaacatccaccctgcaccaccaccaccgggcaccagcgtcgtcgaagctgctcactccatcgccgctccaagctgtgagtccgagcatcagcacaagaagatgcgctatccagctcgtccgagaaatctccgcgctcttctgtccatcgctctgctgctcgcttgtgctctgcagcagcggccggcctcagctaccaaaaaggcgagtagagagtaactcactgttccggggctttgactcgccgctcgctctcttttgggtgccatctctgtttgccgctgacggaaggctggctgctctccgctccgctgtctctctctatctctctcgcagtcg

SEQ ID NO: 189652 - DNA, 296 bp, Zea Mays
gcgaagaccaccaccacatggtgggagagcaagcatagaggcagggtgaggtcactgcagctgcaaccgaagcgagccaccgagcaggcaggcttgctttgggcaaaggcacgcagtcacgcacgcagccagcagcaacgaggccgaggcagaggcagtggtgggagtagtagatccagcgagagaggaagacaaaagcagaacagaactcaactgagctttctcgctatacagcttggctttctcgtccctcctcacgctcttcccctctctctgtgatctggcgattgggggag

SEQ ID NO: 189653 - DNA, 348 bp, Zea Mays
cttctccacgttcatctgcagcatcggcttcaccgcctccaagacagacgcctccttgtttatctacaaggctggcgacgagctggcctaccttctctacgtcgacgacatcattgtcaccgcgtcgtcttcagccctactccagcatgtcatcgcacgcctccactcggagttcgccatgaccgacctcggtgatctacaccacttcctcggcatcacggtgactcgggacagcagcgggttgttcctttcacagcgacagtacgccttcgatcttctctagcgtgctggcatgtccgagtgccaccctactgccacccctgtggacgccagggccaagctgtctgc

SEQ ID NO: 189654 - DNA, 373 bp, Zea Mays
atagaagaactagttgctacgaaatgtgccccgtgctgtgagcctagtcttacaaaattgcaggtatgcaaccctgggtacatttgtagcatgtacttggtcttaaaatatactgtgatgttttaatttcccctacccactgcaggcgtatgcagaggaagcgaaattgctgattaatgaagtaaacaatgcactatcatctttcttaacagtaagccccttgttagaatttacagccatacacttctctgcagttgacagaacaaagttattttgcatcctatattcttctgccaactctttcatggaacttttttacaatgtttcttgtcatgttaccttaggtagacaaattggaaacattatactcaag

SEQ ID NO: 189655 - DNA, 340 bp, Zea Mays
tggaagagcaaccacaaaactgctcagagaatgaacatctagttggagcaacatcacatgttattcagattgatgattaacctgatgaaattaggaaggagacaagactaatatggaaatcagatgaagatgttagagtggtaattattttccaatgcactttcagtttttattttctcacatggaagggtacttatttgcctctgtgtctttttcttgtgtagatgagtgcttggctgaagcattccattgattcattgagtggaaacaataaaaaaggagataagtattgggaggatgtggcgaacgattacaatcttactactaagaaaatccgatg

SEQ ID NO: 189656 - DNA, 369 bp, Zea Mays
tagaaattggagctcacggttgcaagattgggagcgatactagacggtgtggtgcgtgatgaggttgcggagctaacggcgggctcaatttatagattccaggggcggtggcgcttgaattgatgatggcgcggtggcggccggagagggaaaaggctactggtgcaagtgaactcgtggcaaccgtcgtggcgacaactccggtgatcggcgggaagctaaaacgaagcacggcgatgtggtggaggtactcagatacatggcgcaaggccgtgcgacggcggttccccggcgagcttatctgctcagccgcaaaacagaaaggagaaggtgacggtgagtcaccagagtgacctccagcacaccgac

SEQ ID NO: 189657 - DNA, 2037 bp, Zea Mays
aatagcttgcttaatgacgtacatgtctgcagctggtgaggtaaacttttgcataaatatgtcttgtctttgactctggttgcttcattgtggtagttacaattatgttccttttgttgtgttcatatgttgtaattttctattctcatgtttcatttcttaacaatcaattgttgttaattcttctgattttcatttcttcagatattactgtcatatcttccaattaacaatgcattctcttcaggtacatttagtttctggtggcagcgatggcctgctgatattatggagtgctgatcatatccatgactcacgtgagcttgtgcctaaaattagtatgaaggtactggcatactgactttgattcactgattatttatgtatcaagaaaaaataaaatggtacaaaatgtttgtaaataacttgtaaaaacattacttagcatgcaggttgcttaataatgtttttttgggtgttttctgaaggcccatgatggaggtgttgttgcagttgaactttctagggtgatggggagtgctccgcagctcattacaataggggctgataaaactttagccatatgggatactgttactttcaaggtatttattattaaatatttccatgaagttttattatttattatttcaaatagaccttaaagtatcacattttctgtttgctgctcaggaaataagacgcattaaaccagtgcctaaacttgcttgtcatagtgttgcatcgtggtgtcatccccgtgcaccaaaccttgatattctaacttgtgtcaaggactcacatatttggtatgtatttctgtgtctccagagacattagttggagatttttctctaatgatgctaatcatagcttattgactgttcaacgctctattattacagggccatagagcacccaacttattctgctttaacaagaccgctctgcgagctgtcatcactagttcccccacaggtccttgcactgcataagaaactgagggtattcttctgctcttattccttgaatggagtgtactgattttccatctcagtgacgatatttttagttactgtatgtgattttatgtttaacacattttgataatctgaaatattttttactcactcatctcaactttattaactgctatgtccaaggttaggcaattcacagtttgatgattttttgttgttgtttgcaatagttggaatagattgcatgctgtgccctgcaaagaaaaattgtcaccattgatactgagtctttatgggacatgcacacatttggacatctcaaatatcattatcattacctaacaaaaaagagaaaatggagctgatatgtactgttccaatggttcttattccagtaccctacgcctacaatttcatcggcagtcgttattgatggttgaatcttcgattacttgattggttgtggataaacctccagaatcattaataccagcatgacacaaagtaatgaaccgcctgtacccacgtttatttaggtcggctctcattcaagagactagtgataaaactcttgcaataatctctgcttgatctatattcttcaaattgaagcttgttttccgagtagaataactgtatttgaaacatgcaatgtagtacatgaaagagaggtagttccccttccccccttccaaaaaaaaaactcagtactctattgtgcaaatgcattttcctcaagtgtgctgctaaatatagattcaattttgtggttatattataggtttactgcatggtggcacaccccttgcagccgcatcttgttgctactggaactaatattggtatcatattaagcgagtttgacccaagagcacttccagctattgctcctttaccaacaccaacaggcaacaaggaacattctgctgtttacatagttgaaagagaacttaagttactgaatttccaattgtcaaacacagcgaatccatcccttgggaatgctggtgttgcatctgatgcaggaaggtcaatgaacaattcaatagaacagttg

SEQ ID NO: 189658 - DNA, 494 bp, Zea Mays
ttttaatgtaccaatatttgaacctcatccgccacagtactatatacatgccatctcagactcatggctacatgctgaaacactcttcactgtttcttttcataatttgacattgccacaggtgaatcgaacaatcgctcactgatgctcgttaatgcttattttgattattgtatactgaatgctgcacccattgcccatgcagacacaaataacacacacagaactcttggacttgaagcctcttccactgagtgctcttggcaacaaaacgtatgaggatctgtacagattttcccatttcaacccgatacaaactcaggtgcctttggaacccagttatctaccgttccattgccaatgccattatctgcattatagggattgtaattaaacttttaaagctattccaaccattgttttttgttttgcaactgttccaggcattatcagttctttttgcatagtggtgagttgtttgtgggaactgggaa

SEQ ID NO: 189659 - DNA, 366 bp, Zea Mays
cgcccatgccgttgtttgatgcgaactttgctgtgctaggatcagtttgggatgcgttttgaagtgctcggggtttgacttgatgcttgcttagttcattaaggccaatttcgtgattatcttcacgttcggttgggtcaagttcacgcccacgccgaatttggtcctttgggttgtctgtctccacctataggttgatgttccggtgtatgattataaattgtctccatacttgttcagttcaagtttcattgtattcgtcacatttccttaaacatcaggaccatcaggtgttttaggctctagccgtatttgaagtgattcctctcttttcatggatcaaaccgtgctgcacttctctccggt

SEQ ID NO: 189660 - DNA, 516 bp, Zea Mays
atgaagacaaggagaacacatcaaaggtgaaacgtgttacacgaggttccaaaaaacgcaaacatggtgacatggcatatgagggtgatgttgactgggaaactctaatgcaagagcaggggctgttctcaaacccctcagcaggttttccagatcagtcaataaaaacaaaaaataaaattaaaacttcagaagtttatgagggtggaggtgatactggtgttgctgcagtacgtgctggcctaaaggcaaagactattacaccgattgagaagataaagttcaaggaggttttgaagcgaaagggtggccttcaggagtacctagagtgcaggtaggttaatgcttccttcttaccatatcaatatcaaatttctgtgtttggtattaaccctgcttcatgatttccctatgtctgtttctttttgtattccagaaatatgatactaagtcgctggagcaaggatgtcaagcatttattggatcttgcagactgtggtgtttcagacgttccgt

SEQ ID NO: 189661 - DNA, 311 bp, Zea Mays
cgcgactcggatcgttgatccggtgatgggcggaccagattagtggaacacaacactttggccaggggcaatggagtccgtagatcatctagcgaacggatgagatggggttctagtgtatctgttcgctcattttgatcgagccgtagattctaggctcgatggtccggatcgggtgggtgcgcaccgttggatgacgatctggcggccttagtttagtaccggttcggttagggaaagatttaatctgagccctaggtttctaatcggacggctagagtttacccgtaccccttcgccatggctagttt

SEQ ID NO: 189662 - DNA, 711 bp, Zea Mays
ctactgtgcacatctcttgttgtcaagggatgtagtgtattttgtcaaggtagagagcagagattattccatgtaccaacctcgttcacctgctcaggtatatttttctagatatatgtgtgagtaaatcatgttaatattttagatgattttgacaaataagattgcacatcttttattgtggtaccatttcagggtactgtgtctagttgttcttgtgataactggaagtttatgtccatggggcagggccacctgtagtgcagtcaatctatacaaactttaattcttcctggaagaacatatttttggggtcatatatttgttttcatcttattcatctagcttcacaattgagtgctatatactatgtaacgcccaatattgcaatctggcatgtgtctttagatatgtatttttacttatgtatatttaatgactgcagatttcctaaaattactcttattcattaatacctgcattgttgcattgcttttatttgcttttatctggtagtaggtagaggaactcctacgacggaagcttgctaaagaggccgctgataaggaactggaagaatttgtccatttactcaagtctgccaaagcattgcctatggagtccaagcctcctaaagcgtcatggttggtggaagaaaaagtcaggcaaaaaatcgagtctcttcaagcatatgcagttgatgcatgtgat

SEQ ID NO: 189663 - DNA, 282 bp, Zea Mays
gtttcctggagagtttttaccgggtatcaacattgacaacatccagaaaggttgtttcaaacacaaccaaggtggcaagttgtaagggattaaaatgacaggccatatagtgtacgcaacattgaccatcccaaatggattgaagccatcagatgcaagacccagtcgaatgttacgaggattagaagcaaaatctttgtatatgttatctacatgcttccatgccctagagtcagcagggtgcctcattttgttatcttggactaagccctccttgtgcca

SEQ ID NO: 189664 - DNA, 1026 bp, Zea Mays
tgcagacgaatggtgcagcggtgaaggcaggaggaggaggaggacataggaggggataggagccgccgcagacatggctggcggggtggccgttggggtcgtggcgctgttcttggctgcagcttcatttggggctaatgccaacaccgactcgaatgatggtgagtgagttctgctcctttttagtcgttttcttcttctctcagagcactcttggcttccatgccacgcctactgcagaagaaatttcgggttggcgtatatgactgttgactggtttcgtgatatttcggttcagatacaggtgttgagccacaactctatacggtttcttcttcttcttcttcttgttgaaccagttaagatgaccaggggaatgctatcccttcgttttgctacttgcgaacatgcatcctagttaagcaaaaatgttgtagaacagcaaagcatatgaaagaaataccggctgctgactggtttcttgaaatttcggttcagatacaggtgttgagtccacaactctatgatttttttcttttcttgttgagccagttaagttgaccagtggaatgtcatcccttcgttttgctacttgcgaacatgcatcctagttgttataagaaaaaatgttgtagaacagcaaagcatatgccagaaataccatgtttacctgaaacatcaatcaccagttattatttactgattcgtcgcaagccttgttcttacatatgcagtgaatgccctcaatgtgttctacacaaccatgaattcgccgccgcagctgacgaactgggtgtcccaaaatggggatccctgtgggcagtcgtggctgggggtcacctgctcgggttccagagtgacagcaatgtgagctagctgaaaccttcagacgggttggttgttttcgcgtaacggcgaccgatccttctcggctgattttccttttttcttgtcctgaataacgctcgacagaaagttatctgggatgaggcttaacggcaccttgggctacaacatgaaccagct

SEQ ID NO: 189665 - DNA, 590 bp, Zea Mays
taagcaaatcagaaatgtcatcatcttcattaggttcctccataacctcattgtaatcatagtttccatgattcacaacagagctagtctcaccatgcaagttccatatcgtgtacccttttagaaacccatcgcatattaagtgctcacgtatttcacttgcctctttccaaaacgagttaacacactttctacaagggcataaaatcttgttccctacagccgaatttctaaatgcaaaagccaagaagctgtttacaccttgtaaatatgtcttgccgtgcctacatgcatcatcattttcattcttaggttaaattccatttaagctatagatatcacatttatatttgtgttataatggatttgtacctagcatcatcattgatccatgtcttatccaccatggtttaggactacttcttagaaatcagtgactgcaatcaaagttatagaaaaatatatttcaggttatcaactcacaactccctccttccccactaatttacatttaaacattgtagcataatcatgactgcaatcataatttgaagttttaaacaatgtagacataaaacttgcctgggatc

SEQ ID NO: 189666 - DNA, 339 bp, Zea Mays
acgcaaatatacttagactcagggaatagtaatggtggacggtgggttagttttggaaaaatggagggtctcttgtgtaaaaagactacggcgaagtggtatgttctaatttggactatcagatctgaaatcgacgagtatgattagatctaatcttaaggtgaactgttacacatttgtggccctcggatcacgcatcaacgctcaaaatttcaaggaacccttgatctatctccggcgaacagatcggggatctacgaccagatgcaccccacaccgaaacgttacccaagctctaatcctagccgcacactctacatcctatggctcacacggatc

SEQ ID NO: 189667 - DNA, 479 bp, Zea Mays
gaagatttttccaaatgcacacgttgatcacgtgtgcttggaggctttaaatcatattggtcatcattttcctcaggaggtcgttttttccctctactttccttgtacctattgttgtaatcctcataatgatcaacatcttgaactgcatcctttctgtaatggctctctgagcttctgcgtccatctttagcactcttatattcagctctatcactttcatgactacgggccactcgctcattagaaaacttgtcgtcatgttgcctcttatcccttacgtaatcatccttgtacttttccttatacttgtcgtcatcaaacctttgttccttagagctcctagatttaccatgttcatatctggacagggtctttctgtcatcactgtctctattgtcagtggaccacttatctgtatcttcagaatcatcttttcttcggctgtgtttttcagcttgcatatcaggattattgta

SEQ ID NO: 189668 - DNA, 351 bp, Zea Mays
agatttgcctaccacggtttcagaagttgcattttcggtgtttgctcccactacaatgctctcatcattgtgggtgctctctgatattatagtattgtccgaattatcttctactgtagcaggaatgggatcactggaatttttggatttgtcaagatcaggctcagcttctttctgctgcaggagttcctttatagttgtcgtctgatctgggtttgaagcaattgcgttctctttcatttggttgatatggctctctttctccacaagagctgcttccaattctttctgcgtgttggtaagatatgtcgtggtagtttctgaatccatgagcttgtttttcaattctgc

SEQ ID NO: 189669 - DNA, 363 bp, Zea Mays
gttgccgagtccttcatagtaagaccagaagagtcaaactcgacagaacaagaattatcaggagtaaaacggcgaatagaaagaagattgtggaccaaagaaggagcgacaagaacatcgggaatgcgaaaagagccgggagggccggcggcacccacagatgtgacaggaagacacgagccattcgccaccatgatggacgaagggagagaggaaggacggcgaacagaggtgagtataccaaggtcgggagtggtgtggtaggtagcaccggtgtccgcgatccactcgggacccatcggcggagtcagagtgggggagtctggaaggcagccagggcgaccgcgtcccaaccaaccagcc

SEQ ID NO: 189670 - DNA, 2655 bp, Zea Mays
gaaggcggaagaaggggagcggcagtcgcaggccgcagctcgttgatggtggttagggtttcgccgcccgcacgctcgacctgctgaagaatcgcccccctgttgaagaggtctgcgcctcgccctataaggctccggggaagaggagatagacatcagtggaccccggcgcgcggctgatggcggagcaggagcggagggacgcggaggctgggggcgatgccgcgggcgcagcggtggcgtctcacaccagcagcatgcaggtgaggtctccgcaccctacttctcggctgtcctgtacgattttgggagctttatgatgcgtagatccgctcgctgctatttgattggctaaacctgcgtccgttgcgtgccttcattttagtttgttagtgcgtagtaggttctggaagggagctgtcggaattttgcatggaggcggtggggaatttctgtgggccaaccgtgccttagatccgagttagctgccgttggagctggtaaattattgttctgagagggattgggtgtgcttatttcttggtgaactgtagtaatgagcgagatatcataagacttggtttttttgttcatgaggaatatgtgggtatgtttttttttgttttttgtgctatccccatgctgctgtaccagcacctgcatgtttgggaagtagtgaggcctgctttactgtggagttagcctgtgtcacttggtttctcactctgtcagtgaacttattggtgatagtctcgatgtgaacagttcagcacaatgagattgacaatttaaacaaagacgaatgtgccctgagcatgatgtaatcactacccatatgccatatcatttcgtaaacgtggggcatacttgattgaattatattgatacaatatatcagctactaccattttgattatttctatgccggcagtagtatccttctatcttgaaaactgtagagccttcccatctcatctgaaatttctatacaatcaaaagttccagcttaggtggatgtgatctacattgataaacttaacatctaggaagtaggaacagaagttgttttgatttaaatttattgcatcatttgattatatgtaccggtgggattttgttcctctgaagccaaatatcccaacttcattgaatgtctcacttcattgtagaaaaacaatcgacttttggtagtttgacctaaaagaaagataataaaaggcacccatgatactccctttcagtggttgttgcgtatgtcagaaaggtcaaaacagcttgtgatacctgccagctgatctatggtcatatttgtatccgtagttaactagttatactacccaatccaagtatcggtcacttcagtattaaacaaacactgatagccatgatttgttagacattgttgcaatggactagagcacgtgatgaatgtttcacttgcacagaatttttattgtggataagaggcccttgcagcagcatgtcattaggtctaggtgcagcagaggtaccaaggatagcaaagtatgacagtagctgggcataatgtgggagagcctagagtgcagatctaaccacgtcaaaagtcctacaagtcttaacgttcatatgattagaccgaaattttgtttttaggaatttgcaaattttgattagttcttactgtgttagtcattggtccaacgtccaatgaatgtttaatttgtgttaactactagcctttctagggtatctatatcgaggaggtccacacgcataatataatgatgaagcattcttctattttctgtctctcgagctctctagttctctctaccaagctatatctgtctgtctcattacaatccttaaccccattcagccatgtatattactaacgatggttacaattctaactgttccagcgtgtcaaagtataccgtttggctgatggtgggaagtgggacgatcaaggaacaggtcatgtttctattgattacattgaggtatgaagaatttctttgctaatatgggtggtatttataatttcttattcatgggtctaagctaattctcatactttctcctgattttctttgatagtgcccaaatatttgtttgcctcttgatctactttagttttgctaccctagtaccttgttgcaacatgcttcatttgaccctcattctgtttctacaaataatgaaattgtcaactattcatttttttcactgtcaagggaacagtgtcccaatgtaaaactaaagaaaaccttgtcgaagtagacatcattttcatatttcatactgtaatggtgattcatggaacagtgtcccaatgtaaaactaaagcaatagtccactaaaaatgaaaataagcacaaattacttgatgatgattcatggatcaatatatcggtgtaaaagtaaagaaatggtccagtacaaatggaaacaagcagaaattacttgtagtctatgcctctatggcaccatgatattctgtcattgtattatgatttctaatctgtgtgcttactttttggaccttatatgatttattatttcgttggtttcagggttcgaaagaactcggtttgactgttttagatgaagatgacaatgagacgctacttatgcacaacatcacatctgatgatatttacagaaaacaag

SEQ ID NO: 189671 - DNA, 499 bp, Zea Mays
taccagttagccatgtgttctgtttgacaaggagaaggaaacaggaacaaggtcggaggagaagagaaactcaactccagctaatgacaagcccatgtgtgcattgtgataggtgagagcttcgaaggctagctgctgcttcttgcctcttgcatttctcttttcttgctcgcgctccaaatcttcttattgcggtggcttggcaagcgtagtggttgtctgtgtctgcctggcgacgacatttgctgcacgcgatctcttgcagtcgctactcgctacaacaaggcttctggggatgccattgttagctgattcttttcctcactggtgaagggcagctggttgcttcagctaaaagagtcgagcagaccaacaatgcaatttagctggagcatgatcagaattcttgtctgtactgcagacactgctctggggtctgtttatgcgcaacaacggtttatgagaggagaggtggcccccatctgtggccgcaaaggag

SEQ ID NO: 189672 - DNA, 483 bp, Zea Mays
cttgttttgtatgattaaattgtctgctcagtgaccataagggaataagtgatacgtttgtattcactgaaattttattgagtctagtatattactatgaaacaatcagctaactttggttacatggtgaagggtatatctgcacctactgttgctagtaattgatagtttcatgaactgaataactttgttatccattccatctgtcaagtgttagaatatgtgtcatggatcagtaaatagggcttgttaaatgttataaagttaatttatttgattttgagccttgtttggcttgtggacaacggcccatatccataagtgactaagtggtaagtgccaatttatgctattttggtgacgatttgttaacggtgcacatgttactctttttgtttttggttcagctgtgcttgaattacttagcttttatgcaagtcgaagtacttgccaaaattcagtggctagtcaatttgtctccac

SEQ ID NO: 189673 - DNA, 483 bp, Zea Mays
tattaatgaggaaacctccgaggaggagaggaatgcatggaatccttctgaaagcaccagcaattgtggttccaggactatgcagcagtgggtatgctccaaacgatcagatatcaacaagaaattaagcaaaaaccatagtggtaaaacatttgacaaagtggcacctggagcacagaaatcggataggagcagcatgtttggctttaatgattctcaagttccagaaagtcctgttggggtgttttcttctgagtcattatacatggccacaacttcagaagccactggtgttgagcagagtaatggtccttcaaaagtgcttagatcgattcctacatggtcttcaaaaactcatcttcagagcagtgtcataccaaaagtacctagatcagctgctgctcttgcaaagagaaaaattaaggagattgggaggagagaagctaccaaactagataattatgatgtagtgaggaatcccac

SEQ ID NO: 189674 - DNA, 2052 bp, Zea Mays
ccagaagatggtagttactttcaaacgcctagttgccaggccatgctcaggagaatactgttgatgtggtgccttcagcacccagagtgtggatatcgccaaggtaagcaactcttttaaatacatgagtgtcaataagcctttgctgcatatctaattggctttgctgtctctgagaaatgtccatggggttgaaaccttttgtttgcatttcattagagataaattggtagcgcttgtaatttaataaactaaaactatatttttagattggattcttaggatatattaataggcactaagattctcttataagggaataatcacttgattttactatatgattctaaatctataaagctgtgataaatgccactgaatgactacttttgttggtattaaagtttgattaattagtttatccacatgattatccgtagctttctgcaattttttattttattgccaaatatgtactgatttatggactactttcacaggaatgcacgaactactagctcctctagtgtatgttcttcaagttgacattgataaactatctcaagtaaggaagctccatgaggattgcttcaatgatgattttgatggagtggctttcccagatacagatatgcttttcagttataaacctagaaaggactcaaactggcattccagggctgacaatggcgatgattctgaaagcgcttccagagttaacactcttgatgagcttgacctggatacgaaggaaataatttcacttagtgatgcatatggagccgagggtgaactaggcattgtattgtctgaaaggttcatggaacatgatgcttattcaatgtttgatggtttgatggacggaggtagtggagtggtctgcatggcagagtttttctctacatccaaggttggatctagctcaagtctagcacctgtcattgaagcctcagcatctttatttcatttgctttccattgttgagccatctcttcatagccatttcattgagctggatgtagaaccgcagtatttcgctcttcgttggctgcgagtcttgtttggacgagagttctgcctcgacgatcttttagttgtatgggatgaagtttttgcttgctccaatgatatgctacttagagaaaatgaagaatgcaactttaagatattgtgctcatctagaggggcattcatcgcagccatggcggtctctatgattcttcaccttagatcatctctactagccactgaaatcaatacgttatgtcttcagaggttattgaattttccaaacaacgttgatgtgcataagttaattgagaaagctaaatctctacagtctactgctattgatgcgaatacattatccccatctcttttatcaaagaaggatagctgtgattatgatagagtttatagtaatcttgctacttcaactcctccaaggactccgttgcatccattagctgagagttactgggaagagcagtggagaaacctgcataatgacggaactgctcttaaggagagtgataataagggtctttcttataagagatcattaaagcaatctttgagtcagaggcttggtttatctaggacagagtcagatccttctccagttaaggtagtcagtgtgaataatgacgcgaggaattcagtgagacggtgtcttctaaactcttattcagataaagtagtacaatccaatgaagttattggaaaatttgagcaagataaatttcctatcgtgtcgattcacaaggagactattttgagttctgaaaggtcttcacagctaaagctaaaggcggctagtgagaatttaacagtaagtccaccaccaagtgtggcgaagttcaatccacttatagattcaccggtgaagcctgctgacgagagttcagcgaaaaggacagaagattgttccagtggtgaaaattctccagtgttttatacagctagggctggtaatgaacatgagaattgtcatgataatgattccgagaagagcagtattacttcaaattcatgcgccggtgatgattatag

SEQ ID NO: 189675 - DNA, 371 bp, Zea Mays
ctaccatcaattgctcctatgcaatccttgaagtggggccaaaatctcccctctcgcaaacgaggatgaatctctatgaaatttgggtctttgggcttgattacgtcagatgacatcttatatagtgcattaatgacttcactatacttgcgactaatagtttccaaggagtgaccaaacttattccttatctgcctaaatgattgtggacccccacatgcccacaagaaaatacctagagcttccgttgtactgacaccacagcttggaaccagaccgtaactttgcaccaacgtatcatgcaatcgtctaaaaacagtacgccgcatgcaaaacatgtcaaagcagtcgttactattctccaaagttcg

SEQ ID NO: 189676 - DNA, 277 bp, Zea Mays
gatccagcctgaacgtctgcggtaccgacgatcagactgcgggggcgtgttagctgatatatcagacttgtgtctcctaccatataggcgcaggataccctaccatacatgtgcaggcatccttgcctttctagctacagccgcatataggaagatatggattcaatcctcccatttaggggcagtgattgtttccttccattccaggagatctcagggtactgtttctataaacctgagatctcccacctctctgtccctctatatatatgtgcgc

SEQ ID NO: 189677 - DNA, 552 bp, Zea Mays
tgaacatataagcctcagttgtcggaccagcaacatatcctgaaacgacatgactgatgaaaacacataaccaacgataatagtaaacatgtaggcctctattgtcggacgtccaccagctaagtgctctttttagtttctaacgcgtaagcattgcgaagccaagcgattcttccttcttttgtctccaaggttgcaaaaacgtctctatacttcttctgaaccagaagatgagtcgcaaacaaatgtagttcgctcccttctggtgatccatcttccttgacttgttgcatctgctttctaagctctattcgaactgggtcattgtcagaagaggtaatggacttgtttgtggtcaatgagcgggactcaaaagcctccacaagtcttttcatgtactcttccctcgaatcttttttcttctttggttttggggaatcatggcgcatcttacgcttcccagtagcatttgtgcaggggtcaggtgtgctgttttcacccccacctaaagtgtattccaaatgatcatcagaagatgaattagcatcctcg

SEQ ID NO: 189678 - DNA, 440 bp, Zea Mays
ccccaaagaggttaaggatgtattttcaatattgaaagactgtgcagctgaagcaaatcaaaatagcagtgtggagctccaggtttgaagtttgaacaaattactctggaatgacatgatggttgttgacatgttgtttgtgtgcatctgtataatctgattttgatacacaaagttactaactttatcattgcagatcacctatggacttctgttctttcttgtagcaacttttatttctgatgccctaagtacttctcttgagaaagcatcattgtcatcgtctgattcctcatttagacgtgaatttcatgaacttgtaagctttgatatgtgcattttcactgatcactgtttaatactttgattggacatataaatgttttatcatgacacactatgatttctttaaggtgatgaggacaggtaacaatatgact

SEQ ID NO: 189679 - DNA, 453 bp, Zea Mays
ttggtgggtacgtgaggagtggcctcccgcgggaggcgctagagttgttttggaggttggcggaagacggcaatgcagtgaggcctgacgaggtcacggtgatcggagcagtgtcgggatgtgcacagatgggggatttggagctagggaagaggctgcatgagtttgtggacaataaaggggtgaggtgcacggtgaggctgatgaacgcggtgatggatatgtatgtcaagtgtggcagtttagagttagcaaactcggtgtttgaaaggatcagtaacagaactgctgtttcttggacaaccatgatcgtggggcatgcgaggctggggatgatggaagatgcacggatgttgttcgatgagatgcctgaaagggatgtattcccatggaatgctctgatggctggttatgtacagaataagcagggcaaggaggctattgcactgtttc

SEQ ID NO: 189680 - DNA, 887 bp, Zea Mays
tggtactcttatttcatcagatggtgctgacctgggtagagaattggaagacagcttagtcgtagataatcaacatgttaacaaagatgacactagcactcagttactttcctctttcagtgaagcttcaagttccatgcacagttcatttgaaaatggatcgcttgaaaaaggatttatttgcaatgctgggcattttggtccatatgaagcaacaactgcccatagtgacaatgatgtgcttgggtctggggtatcaagttcatttgatgagctatcggtcagcacatatgcatgtgaaaacatacctattattcatgaatctaatacagatcataccatgactgaaaaaagcaaagataagtcgatcacatcaaataattcgtcatcatgttcgcctccatcttctgagataggcagtactcctgctgtacgaaggaaaaaggtcaaagacgtctcggagtatatgattagtgctgcaaaagagaaccctcagatagcagaaaggatccatgctgtgttacttgaaagtggtgttgtgccaccacctgacttgttttcagaagaatctaaggaacaaccaaaggacctgattgtttacgacacatctctgtttcaaacaacagatgaaatgataaggacaatgaatgagcttgaatccacagcacacgatggttgtgctggtcttggtccttcattgccacctgatcctggacatgagctccaaacaaagattgttccttatcggatgcctcctgacctcaagcctgtccagggattaggtgtttaccataagtttgatttccgggataacatcaatccctctatacctctctatgaaccaagtccagctcctcaggaaaatccattacaacttataaagcaaa

SEQ ID NO: 189681 - DNA, 445 bp, Zea Mays
cgcgccgacgctggcctgtgcctggagcagcagcacgaggaaggaaaacagcagctggagccgtccagagccctggcgaagccgccgccgcgcacccatggcaacgggagcgcctcctcccggagaatagcaacccgggaaccaggcgccagttcgctacccaccgtcgctggccgagcctctgcctctcaggttcccaatgccttggaggacgagacgggaccaccgctgcgttcaacgaccgggcacggaaatgttgggtcggcttggagatccgttgcctgtcccctgcatcgccatcacgccggggagaacagacgccgcgccgcctcggttgtttccggcgagctcgaggtgctcgagctattcgccggagcccattggtcccgccgcaccggaatggggtcctgtcctttgttccccgcccggcgtttctcgcgccgag

SEQ ID NO: 189682 - DNA, 300 bp, Zea Mays
aatttggtcggacagtgcgggtggccggagaggaagaaaggactctggcacatgacacaggtggcctctcaccgtggcaggtgctccggtgatcaccggacatgcatcgcatgattcactgtgacgagagccagcgctaaggcacgtggtgcgcgacggcgacagcacgacggcggtgagggttatccgagcgaccgacgctggggggagtacggcatgcttagccgcaaccgagctcgagtggatcagacgccgagatctttactgggttatgcttatccatggccacggcgcacgaat

SEQ ID NO: 189683 - DNA, 671 bp, Zea Mays
cccacctccaccccccaccccggcgtgcgtcgcgtctctcccggccggaggcggaggagcggagctgcggaggacgaccaccggcgcggacgcaggcgtcccgcattccccgacccggccccgcctgacccccgttgccacggcagctcggtccgacccgaccaactcgtaggccagcaggcgccacgtagaaatgtaacgctcgcactccatcccactcttcacccgccgttgtgtcgattctggtgtgtgctaacgatagggatcgctggggtggtttgcgggtgctcgatcgtgtcctcagctttggttcctcgctgcgtcgacgctgattgatcatcgaatactggttatcagttttgcaaatttctggatggtttcagttctggtatcatctttgtgcggctgtcttcagttttaaatcactgtctgtctgctttcatgttgattatcgtttgttggttcagttcttactgattcactcgaaatccttttgaagtctttcccccactttggtcaactcgtttttgcattgttgtattctggatcacgaagagtttctcaccgatgccatttgcactgacagacacgttcttcaattgttaacgtacaagtattacgatggtatcactctgctatttctgccccgggctcacaacgcggtcccggat

SEQ ID NO: 189684 - DNA, 997 bp, Zea Mays
aggagggcgcgcccgggtacatcggaccgcggctgatcctgtttggtggggccacggcgctcgaaggaaactctgccacgccgccctcttcggccgggagcgcggggatccgtatgctttctatcttatatatgtatataaatggtttgtgttttctgattttggaatgttggtaggccttatctcgcccctagtattgttctgggtatgcttgccattcagtagggtctgggctgcgctgaattttggatgcagtgataacttggtgcagtttggcattcagatgaatttatggtcttaatgttggtgcaataattctgaatgctaattttatagtggcagttagaaaactggtcgtggtctgatttttttactcaatacagaagtataaactgtcatgtcattttagactataattcaacttgctgcaaatgaattaaagtctttacaagggattgaattggattttatttgcgaaaacagggacttcaggtggcgatgggtgatttgctgttttacttagagattaaatacagtagtgctcaacctgatagtttggtttcatcgcactgctaggtgctagcttgagttgttcggtataaaaaacttatgatgattggttctctttacagaaaatttaatttctttgagctgaattgtgtgttatactggtgagttaatcatttttatgcgtgttcttggctcctatcacaatagcaggaggattctttttaggcaagttaggaggtgtatggaactatttcatgactggcattaggcgggaatttaaaggcttttctttgggttaccaattagaaacattctgcaatgtagagaaggaatttacctttttggacatttaaattgtacttcataatgaaaaagtaaatgagtctgctgttggaatggaatgccgtttttatttcccagtcaaacataaaggtgggtttctcaatgatctcttctattttaggtcttgctggtgccacagcagatg

SEQ ID NO: 189685 - DNA, 433 bp, Zea Mays
aatgagatattcaagttcaagaaccatgccctcaagtgagtttagtaattcttctatcatctgttacattgttaggataacaccgtacaataatgagtatatatacctatctagcgatcgatgtttgtgcattattttaaagacaaatataaatggaagcctagctattgataattttgcaccccgcttttcatttttttgaagaaaatccttcttttcgtttgaaggtaccaagaggactatgcacgaaaccctgacaagaatgagactttcggtcaatttattcagtcacatagatattcacagctgttccaggatgcttaccttgtacgctactaattgaattatacataccccatccacagtttctcatatcagttttaagatatttaattttctgcagatcccaatgtgcgcatgcatttggtcctgt

SEQ ID NO: 189686 - DNA, 516 bp, Zea Mays
cagagattgacttgttgattgatagattatctgctttagttagatttggaggggcatcatctgattggatccttcctttacattcactgcttggaccctctgatcaaaggaaagtgttccagtctccaccagataacttccgcaaggtgattatgtccactcctgtccccacaggcccacaaactgacacctactgcatcttaggccctgtttgaatcccatgatctaaagtttagccactaaattttagatcacttcagttcttgaggctccaaacaggaggtcaagtgctgtctaaaatttactcaacctcacaaaaactttagaccccacaagtgagctaaagtggtctaaagttttagtccttaactttaaccaactaaacttgagaccagagaatccaaacaggactttcatgttgtgttgcaggttattattgccacagacatagcagagaccagcattacaattgatgatgtagtatatgtagttgatactggaaagcacaaggagaac

SEQ ID NO: 189687 - DNA, 453 bp, Zea Mays
ggcccgtcttcgtttccggacaaccgtggatgattaccaagagcgcttctcgtcactgttgtgccacacctctccgttggcacctgaccagcaagtgcagctcttcacggcaggattgccagaccggattaaaatcgatgtcgagctgatgaacccacagaatctgcagcaggcttctcgactagcaagggcatatgaacgtcgttgtcattgatggtgctcaacagccgcagcagattggcagggcccccagaccatctagtcggccaccagtgctcacacacatgaccgacaatgccgccaagaatacaccccagcagccaccaacacaatcaccattcctgttcaagcgctcacccccgccgagatggcagaacgacgtaaacaagggctatgttacaattgtgacgagccctatgtacgcggccaccgttgtcccaggctattctatct

SEQ ID NO: 189688 - DNA, 486 bp, Zea Mays
gttgttttgtctaccgagagcaggcctgattcaaatcgttctgttttcaaagcaaacgttgctgttagcaatgtaacttctaatggcattcaagtttacccacatgtctatatccgggtaatgtttttgcgttgtatatttcaacatgcaagtctatagtattaacccatactgaaaagaatgaaatccatgttttatataggtaactgatcaaacatggagactaaacattcatgaacctattatttgggcactgtttgacttctacagcaatcttcgttttgtcaccaccatcaacagcacaactgtcacggaagtggatcctgagatacgaatagagtaagcttcaaattttccattgaaattacaagagcaactgttagatagactttcctaattttgggatttgtctttttgcatctaaaattgatgtgccatgtttccagtttgatgcattctgtcattcatcagttactagggtctagg

SEQ ID NO: 189689 - DNA, 520 bp, Zea Mays
ttattgcaataacaggtagcacacttttgaattccagcatatgtgtttttggagtattcaagaatactgtttattccatttagcacacttgtagtttgattaaatatatttgcagggtaagcaagggctcgttaaacacttgtacttgggaatactgtttatttttaatgaaagtgaaagtgagaactgtgggtttttctgtgctcaaagtgggtcatgcgaaaagatacggaagggtctgggaagctctactactgaaaattcggtatgcagatatgggtatctacttgtcaatgaattgaggatgttctttgtgtgactttgctttctatgtatcaggactttccaactcccatgttttctgaacctgcttatgagcaaaatgagcataggaacagtaagtgtttcttgttttcttctgtaatattttctgcatgtaagtacattgttctgatttccttcataatacagctgaagggccttacaggagcaccagagaacaacttttctctattgggca

SEQ ID NO: 189690 - DNA, 683 bp, Zea Mays
cagggagctttcactccacgccgcatcgatgggacttcttgccagccacagcattcaagccaacttcgcatcaaggagcaactatgcgaaatcgaatccattgaagatgatggtgcggctgggtggactacggtacattggaggcgccgcgggagagtcaattcggcagagcctttatgtcacccaacaagtagcctcccaactcacccccatccggtgtggaaaaatttgcaagtgagtgtgagaggtaaatgcttccgctgcttggccaaaggccactacgccattgattgcagggatccgatgaggtacctcggctgtggaggtgttggccacaaggcctggcagtgcccgaacaagcctgcctcgacaactgctgctactttctctccatcccctcatgtgccccctgcctcgacagttcgcatttcccacccctgtgccaggcaagcatggcaaggcccggcgatgcagctgagcgtccgcaagaaacatctgttgttcctgcttccactcggggcatggatagtgagctggcgaggctgagtacccacgcggtgtgggcctagctaggtgatgttcggccggcgacaggtacaagcacagtgagaagggcgttctgctctaggttcgggatgcacgaagaagacatcacggtggtgcagcattacccagaggatttc

SEQ ID NO: 189691 - DNA, 294 bp, Zea Mays
gtgggctccataggttagtatgggggcttagtagaggggttataaaagaaaggaaaatccttaggtcacatcatgcgaaatacatattcgacgagatagttgaggcattagacaaactagatagcacaacataggcagagtggcatcacgctgatgccagatagctagacatggcagaagaccttgagaggtgcagtgtagagtgggctagagctattggatctgatgaccacgttccaggaagcgagatccttcacagaaacatcgaaagggttaaactccattgaacacgaa

SEQ ID NO: 189692 - DNA, 411 bp, Zea Mays
cttgcaagaagcatgggagcatatattgacatgtgtttctcgttttgaaaatctacatcttgttggagagggagcacctccagatgccactttctttgcgctgcagcagccggaccttgataaatcaaaacaggctaagtcatcgattcttcctgttctgaaaaagaaggctcctaatgctacttcagcttctaaaagaggctcttatgatagcgctggtgtcggtggcaaagcttctggtgtggatcaaatgaataatgaggtgacaagcctcttggagcaagttgggatggctgaaatgaaccgtgtatttgtaagaagtcaaaaactcaacagcgagggtataattgattttgtgaaggctctctgtaaggtttcaatggaggaattacgttcggcttctgatccacg

SEQ ID NO: 189693 - DNA, 441 bp, Zea Mays
actgaatataaacagcccgaccagccttggtcataagcaccgccttccatccgggaagcatgactgcaatacgatcaatgatagattgcaattgcggcctagatagacgttttaaggataacggaagcccaagatatttgcatgggaaattagacaactggcaaggtaatgatgcctgcactgaagccagatcttcctcatcacaatgaattgggaaaacattactcttctgaatgttggtcttcagaccagaggcttcaccaaaaagatgtagaatccccttaaatgcctcaatatcaaccgcatccggccaaagaaaaacaaccacatcatccgcgtataaagagatccggtggtgaaggaatctcgaagaaaggggctggaggacccctaccgcagaggcacgctgcaccataatattaaggacatccataaccaaga

SEQ ID NO: 189694 - DNA, 327 bp, Zea Mays
gttcaagtgaagaaagaacaagcagaacatgggaaggcaactaatatgaggactttatttgaacagttaaactggatgcgaaactcaaacaggggtatttgacaattgaatgatgtggactgtggagcttgattgattaggaagaagaaaaccagttcacttgtgataattggtagttagcgaatatttaaggaacgaggcgtagcctgcggtgatgattacgcatatttagcttcttattcgactagtattcctatggtatcagaaattaacaggacctgatatggaagtggcttgattgttcacctgagataatttggaacaggc

SEQ ID NO: 189695 - DNA, 649 bp, Zea Mays
aacaccaagaattcggtgccgaagcggaggcgaaggggaggaggacgaagggaagggcagtgaccgaagagcgagcgcgccacgtttgatctgggtgagcatcggcttgttccgtgctttcgtagtttcgtttgccttttgctgtttctccggggttccggttgtctcgtggctgcatagtagccagtagggctgctggctgcaaaaaggttcgatcttggcagcagttttgaactgtacggaccggtggtgattttggtttagggattttgattttttttggttgtcgcgtgtggctgcaatctgcttctctttctggtctcctgtaggaagtggatttggttttggccaccgttcgtttgaaatgatatcgaatgtgaaaaggggatgtttttttccttctgcaataaaaaaatttgatgctgcttttgcaatctcgttcagaactttctaaacttacattcccattctcttttgtcgcaaacattttttgatctagttattactgcagtaccgtacaaaccactcggcctgtttggtcctttttgtttcctcgcaccaaggacgggcgtgaacgcgtacagggatgttcgtattcgctgttacattgttctatctatatgcacatcgtgccattttgtctcagttt

SEQ ID NO: 189696 - DNA, 400 bp, Zea Mays
gctcaatcttgggtgtttgttccagcagggccttgcccacttatcactttggccaagaaattaaagacaacggctaggagtctgcagagctggaatgacaaaaaagttgggaagattaagctgcagcttgagatggctagggagctcctacatcaattagaggtggcgcaggacaatcgttccttatctcctgccgaattgtggctccgaaacatgctcaagaagcactcccttgccctgtcctctatctctcataccatggcaaggttgaaatcgcggattgggtggctcaaagaaggggatgccaatacctctctttttcatgcacaaacaaggttcaggaagaaaaagaatttcattgcagcaatacactcagaggatgggcaaatctggactgccc

SEQ ID NO: 189697 - DNA, 295 bp, Zea Mays
cgctacacttggatttatttcatgaaacgccgctctgagctgatttctatttataaaacctttgctcgcatgattcacactcaattttccactcatattaaaacctttagttctgattctggtggtgaatatttatctgataattttcgccagtttttgacttcagagggcactcttgctcaactttcttgccctggtgctcatgcacagaacggtgtggctgaacgcaaacactgtcacattatagaaactgctcgcactttgttgatatcttcttttgttccttcacattttt

SEQ ID NO: 189698 - DNA, 312 bp, Zea Mays
acagccgggacatggagaaggtcaacgtgttcagcggcatctttagcagctggatcttcccggcggtcgccggcgccaccgccgcgttccaggtgatcatcgtggagttcctggggactttcgcgagcacggtgcacctgagcgggagactctggctcgctagcatgatgatcggctcgggaagcctgctgatgggcgccggcctcaagttcatccctgtcgatccgggcagtgaaggctcgtctgaccgccacgatgggtaccagcccatccccaccggccccaacgccgtgtgatttccaagaagacctc

SEQ ID NO: 189699 - DNA, 387 bp, Zea Mays
agatatgccttctggttgcaacttatcatcactgccaatggtgaaattggattctgtccggtaccgtttgtccaatgtacaatccacactttcatcaggatgggagtctgtacggagagttcgagttctaccacagcttcctgctaacagttcgttctcaaagcacagcttagcatacatgcaagcaagtgctcagtatatcaagcaggtgtctggcctattaaaggtcggtgtaactactctgcggagcagttcagcctatgaagcaccacaaggttaatatgctttcttctcccgtagacttcagcctcttgccctcttgacttggtctcatatattttttcttgcctcagaaacatactcctgccagttgaggcttaaaagttc

SEQ ID NO: 189700 - DNA, 393 bp, Zea Mays
ttgatatcctacctatacaacctatgcagttgtggtaggatctcgtatcctatcgtatcagaggagccgattgatgaactacttatgactccgagaagcagccattgatcccaccaccatcgatcgctgacgccaccacgaaagccctggggacaccaccatgttgctggccaatctctcaacccgcatatcgtcttggagtagcaacatacatcgtcctctgcagacaccatgcaccagggtttcccctacgggatgcccagggtacggggcgacaatgttctcatccttatccaccgccaccgttgtgttgcctccaccctgttcgccacgttgccagctaccctcctgcacattgcaagagcgagccaccaccgaccgtctgatcccctt

SEQ ID NO: 189701 - DNA, 500 bp, Zea Mays
gttagagcgagaggcgggaagaggtggagaaggacgggtgcagacagttctgccaaagtggccttaggcgagtcgtgactgcgtctgctacccgagcttggcctcggatgagtcgtgactgcgtctgctgcccgggcttggcctcggatgagtcgtgactgcctgtcccgcccgggcttggccttagatgagtcgtgattatgtatcccgctcgagggtgtcctcaggcaagtcgtgactgcgtctcccgccgggcttggccttgggcgattcttgacagcctctcccgcccgagagtggtctcgagcgagtcatgactgtgtatcccaccggaggatggcctcgggcgagttgtgactacttgtcttgccggaggttggccttgggccagtcgtgactgtctatcccactcgcagatggcctcgagcgagtcattactgcctgtcccgcccgcggatggcctcaggcgagttgtgactatctgtcccacctgaggatgg

SEQ ID NO: 189702 - DNA, 320 bp, Zea Mays
cgcgcatataaggaagccgggtccccacgccgttaacctagccacaactggttgcctcttctaccctctggcgcgacctcgcgcactggatctcctctccgctgccatacgccatcgtcacaggggggcttcgccgccgtcggctggagaaggaaggctacctccgccgctccactagctgtgagtactcctaaggacatacgctcgtacctcctactccggttgcaactagaatcgttcgataaaaggcacgcgtcacctggcgatttctcgccggagtggtagaaccgtcgtgcgccgtggacagggctcgcgcgcac

SEQ ID NO: 189703 - DNA, 1931 bp, Zea Mays
tgcacagggggacacagcctcctgagcaaggatgagatggcggaggctcgtgcggaggcggagcaggatttcgagagggaggcgaagaaggggaagggaaaaaggaagaggagtggcggcgagtcgtctggttttggcgtggatgacgacttggggatactcttcggtggggccaccactgggaagctcccacgctttgctaatcgcatcacagtaaaggttacctcctaaagtctgttactatgcagcaatgggtagaaagtggtagatcttccaatcgaactgcatccttaaccttgaaatacgctctgggggtctcttgactgcttagcataagtcaagagtactgtttatctagcgattagaaatgagaaaatgctatatagaccttaagcaggagcccctgttgtgcacttctctttaaataagataacagcagcagaagcaagcagactgctgccgacacccccttctaaatcaagggatttgacaggttggagacagcgaaatcaagataacagcagcagaagcaagcagggctagaagcaaaattgaatggtccagcagcggaatcgaggggtatatggtggaatcactggggtgaccgcatatgcataaggcgatgggccactgtggcgaacttagaccgctttgacacttaagcaacacttgaataatgtcttaataaccatgattagaattattgtctatttctggcctcttccaaataaacacagaattattgttatgtgggtgctctacctctcttctccatcaagcgcagagcagccggggcttgaccctggccctttgtcgtccctgttacatgctataatccctgtccactcgaatttattcaaaggcccaaggagctagacttttattcttatatcaattcacactgaacttctctggcatgtttgctctaacaaatagctggtgagagcaaacatattttccattgttaatcctggcaacgtttcagatggttcagatatccattcaaatcctgcagcagcagcacatatactgatgcacttcccatccaatatttctcatatttttgaactaaacgctcttcataaaatcttaatggatttagcttgttttggacagtttcagttgctagaatatggtacaagttatgcacctcgatgcacattaagattaaggtgatgtagggctacacgcgaatctttctttggtcattgcattagttgaggctacaggattgccatttggccctttgaatgtgatgtctaggatatatatcgctagctttgtgttgggtggtgttactgtgattattcttatttgttaccttgaaatgtttggattttggagcatgtgatgactggcctcaagttggtagcaattgtccttattttaagtcagctatgtttactgtttgtatctgtttattgagagcatgttaacatgagacatgtagtggcttctttaaatccttcacaaaatgctgctatattgctgaactggtaatgcccccctccccttgtcagaatatttcaccaaatatgaagctctggggtgttgtaattgaggttaaccagaaagatattgtgttaagtctacctggtggaattagaggctttgttcgctcagaggatgtttgcgacattgctttgcaggaaaatcgtaaggtagatattttcttcttaagtaattcataattgatattgctttgtcagtgtttagccatctggtgaaccaactgatactgttcttttgcaggatagtgggaacaatttatgcgcagaagttgttcatgttggtcagcttgttccttgtatagtcctacgagtcgacgatgatagtagagaaggaaaagtaaacaaacgggtttggctatcattgcgattaagcctattgtacaagggacttgccctggatggcttgcaggaaggaatggt

SEQ ID NO: 189704 - DNA, 327 bp, Zea Mays
aaaaaaatgaaggcatgggagagccagtggtatgagtacaacaaagaatggagttgcgcccaggcttacccgcggtaaagaagaggatattgccaagggtggggtaagtaaaacaacgctcctaaactaggataggatattggagattttagagaacatacatagtgtaattaccaaggtaagatcgagagatgagaaaggtaaaggtagtacccaaccggagcacaacaaaggatggagttaaaaactagcaagcgacaaggaagaggatacgaccaagggaaaaataggtaaagtacaatgctagtattgagatgaaaagaggag

SEQ ID NO: 189705 - DNA, 334 bp, Zea Mays
tgacgggaacatgagcgattacccagagatcaagcggttaggcaagagcagcagaagatacgggatcgggatcgcctgtcaattccctgtttaaaaatcagctagaccagatcgtgtgtcatacagttcataatgcaatgaatggatagttttagttcaaacgtctgtttagatgaggctccaacacccgcatccgagagagatgcccctgtttctccagatagagaattcgatatttttctcgttttttacagggttcctgtagacctccatcgtctctataccctgaccctgttttctctctttcgtcgatccatccccatttcccgtgatg

SEQ ID NO: 189706 - DNA, 444 bp, Zea Mays
cccctgccccctcgtcaagctcatcatccggttccgcctatcggatctcgccgtgcaccgccgctgattccacccaccgctccgcacgcatttgcaccccaactcctcacagatctccccagatctacgcgctccacgcactgccattttcccgctccgattcttcccccactccagtctacgccgcgcttaatcgcccgcccgctgtttcacttccgttgaccgattcccgctcgcatttccacaccctgcgcttggttcggaattggtctcgatggagtaaagtccttgcaatggcggaagacgcgcacgagttgttcgattcctccccgccgcgggaggagggctccgacgagcagctcgcggccgtaccgctcggcgacgaggcgggcgtcgtcgaggaggaggaggcgtcggatccggggatgagtaccagcatgccgg

SEQ ID NO: 189707 - DNA, 616 bp, Zea Mays
ggaagccatgcttctgatcagcacaaagtgttcccacagagtgccaggacgagatgtgtaaaacctgtggaaactactgagttactgacccactgtgccaagtggaatgaacattttatatttgaagttccagaacaggtagcggttctatttgtttcttttctttcccatcttcaatgttctagtgcgtcatttcattcataaaaaaaaaactatttctagcatgtgggcactgctgtatgttttaaccttcttctctagtgatataacatgcacctctcctatgtattcaatgaaaaatgcgcagttagcctttctgttattttgcatcatattttttattatcatgataagtctcaatgtctcacaataaataagttgctgaaacctataccggtgttatttttgttcaactggttcttattagtacagctgaggtttagggtgacttatttcttttgctttcccttttgcagtcataggatacctaatttgtgatgtattcccctacctattttgtcaccttgaatgctaattagatcgctctaatcctaatggtatactttgcaggcatcagctaatttagagattgaagtaacaaatcttgcatcaaaag

SEQ ID NO: 189708 - DNA, 521 bp, Zea Mays
catgcttccaaatgagcgtttagctctggtactaacagagaggtggagcttgatcagatccagcacgttctcgttgctgtccaagaaatggtccaagcttttgggttcgtctggagtgagcctgccgatccctgtggaagtgcaactgactggtattcctttacatgcatgggagttatcaacagttcagcagctactgaatcagtgtgtttgggtgcatgaagtccatcttgataccctggagctccggaatcttgacgtctttcgttgttctggatggtgctttgacccggcaaccatccctgcttccagagacctttggattgtggaacctacgggagttaacactgaagatggaaggcttggccttgtgtatcagatttctattagtttctcgacgttgaggagtgatcggttgatcccttctcaagattccggagtagatggtggtttttcaagacagaggaggcgtcatcgttcccgctctcctcctcatggcggtgatgataacgaaggcaggg

SEQ ID NO: 189709 - DNA, 449 bp, Zea Mays
tcagaacccttcttaaacacaatcttgaaatggagacccaacagtttactcatggctttcttttggagctcggaatgtaagtgttgagcatccagataacacaaactctgatggtctgttcgaatgatgaactcttggcgttgtaaatattgcctccagcgatccactgccataatgagggccaagaattctttgtcatagatagacaaatacttatgtctgtcgcccaaagccttgctcataaaggctactggctggcccttttgcataagaacagcaccaataccgacagcacaagcatcagtctctaacacaaaaacctcattgaaatcaggtaatgccaacactggggtacaagacatagcctgtttaagagccataaaagcctgttgtgccgcagtatcccactgaaattgctgttttctcagaagattagtcaatggtttagc

SEQ ID NO: 189710 - DNA, 300 bp, Zea Mays
ctgtctctccacgcgagtcgacttcggaagacctccaggtgcagcaggcggaagcagccgtgtccgaggagctacagcagcaacagagcaatgtggagactggtgggcctcaagaggagactactacagctgggctgagaaggggaacacgccagcgtaaggccaatgtgagattccagggcccagaatggagaacctgaagatatacgctcgctgagacctacggaggaggcaggatgtaacagaactacgtttatcttcttcctcaagtttcttcttctcctctcgctactgtcttcc

SEQ ID NO: 189711 - DNA, 479 bp, Zea Mays
cttactctgagattggcatctccgatgaagtcaaggaacaggtaatgtgcgtgtgttatgtcattatgtgccaacattttggtaaaatggaatatctgacgcaaaccgcaactgcttcggtgatttcaggttgagctcatcaatgcgcaactgaagaggtgcaagaagagaagtgatacccaggacatggaactctccatggattttatgatgatactccagaacaaggacgggaatgcagatagagctatattggaaaggctagccaagaagctcgagctgcaaagcctggcggatttgagagcggagactatggccattaaaaagctcatcaacgagaggaatggccagcaaccagaaagcaccaagcacataatagaactcctcaacaagttcaaggagattgcaggcatcgacgagaagaacatccttggggatgtctccataccaaaatatctggagaaatgcccgtctttgat

SEQ ID NO: 189712 - DNA, 386 bp, Zea Mays
ccgccgacggcaagtcgtacaagacggacgcgcaggccaaccacctgctctccgccaccgacgccatccgcgtcgccgccgacgacaaggccgacgtgccctcgccgctgtacgccaccgcgcgggtgtttaaggaggaggccgtctacagcttcccgctcaccgtcccgggctggcacttcatccgcctctacttcttcccgctcaagggcggcgacgtggacctcgcgtcggtgacctttagcgtcgtcaccgacgacaacgtcctgctccacagcttcaccccgggggacaagcccgtcatgaacgagtacctggtgaacgccaccgagaaccacctggcgctcaagttccagccgctcagtggctccgccgccttcgtcaac

SEQ ID NO: 189713 - DNA, 906 bp, Zea Mays
caacccccggaggaggatgcatatacacttcttcacgtagatcgccattgagaaaagcattcttgacatccatctgggagatagtccaagaagatgaggctgcaattgcaatcaaggttcgaacagtagtcatatgtgcaacaggagcaaaagtctcatcataatcaagtccttgagtctgttggaaaccacgagccacaagacgagctttatacctctcaatggaaccatctgattttgtcttaattttgaagacccatttgcatgtaataggaacatgtgagggtaaaggaacgatatcccatgtaccagtgcgttcaagagcagccaattcatcaatcatagctagctgccactcaagaatcccagaagcttcctgataagtagtgggttcaacaattgccacaccagctcgtgggaaaccatagcgatctggaggttcaatggtaccacgatcacgaagacgatatccctgattaaaaacatcgttagacacataattgttagtacaagaatcaggtacaggatcaggatcaggaccagccgcagggatagaccgggaacgacgaatgtaggtttggatgataggtggtttggaagagtaagtagaggatgacgtggaggtggaaggtggtgttatgggaatgagaacatcagatgtggatgtagaaggtgatggttcagcagcaggaatggaaggaagacacatgaaagaagtagaatctgtgggataatatgaggagtgagtagactagttgtgaaagaagggtcgattttcattgaagctcacatctctagaaattcgaatacgacgagtagatggatcataacaacgatatcctttgtgttcaggactgtatccaaggaatacacactctacagattgagcagtcaatttagtccgct

SEQ ID NO: 189714 - DNA, 440 bp, Zea Mays
ggcgggaacgcatgtaatcgtctcatctttccaggatccggctgcggcatgggtgcgccatgacgacgtccatctgtttcaaacatcaagacggacgtgtcgtaggtaccaacgacaaagagataggaatcaaaatcacacaacgcaattcaagaatattatcggcccattgcgtctacatcttccttgcacgctactgtctctctatatatcactcttttcccccattacaaggactttggatgagtcggtgctggctgatgagttttctcctccggcttagtttactgaaattgggcttctgtcttcttgggcactaaggtccatgatcgattcagccaacagctacgtaattacaagaaaccacgactactataccactccagttcgcagcagccaggaaaatgactcctctgtagattttcaggcgaccgagtact

SEQ ID NO: 189715 - DNA, 282 bp, Zea Mays
acgcgcaggtggaagaaggccggagcgtgtagaggggccccgcactgtcacatcgggccagaagggtcgtggtggccagatccttcacagaaaaaccagaggggtcaaactcaatggaacaagaattgtcggtggtgaaccgatgaacggaaaggagattgtgagtgatatgtggggctacgagaacatcgttgagaaagaatggtccagggagcaccgaggcacctactgaggtgaccggtagagtggaaccgtttccaacgacgatcgaggtagtgtgtg

SEQ ID NO: 189716 - DNA, 1105 bp, Zea Mays
attgcaatctatcgaaaggtgatatgttcttgtcaggagcaattgtaagttttttctacttataaacatagctgcattttctcctttgcatatgtcatgggtttctagtttcaaaccattggaatttactatcttcaacatccatttattatttttcttcaatgatcattatttttttctgacaacatttgaatttgtaattggagcaaaaaaatacttatttttcttataggaaacatgtttttactcatttgtactggagctttaataagaaagtgttgcatcgataaatgaaatttgtactgtaatgagtgaaaccattgctttgcaggccactttttgccaacagcttgctaacaattgtagagacattattggagcaaaatagacaggatgacttgcggaaattggcatgtcaaacactttttgactttataaataatcaggtatttaaacattcttgtagcatcaatttgcaaaatggatgcaccatgttttaatggtctctttttagactgttttgactcgtggaatattaacttctcattgtaggttgacagtacttacatgttcaatttagaaaaccagattcctaaactatgtcatctggcccaagagatgggtgaaaaggagaagatatgcattcttcatgcagctgggctacaagctctttcatctatggtatttgtttctcttgttatgccatgtggccttggtgtgcagctgtttggttcaagattagcttgtcctgcatttgtattttcattgataggagaaattcatagtataatgtgatatttttaaaatattctttctttctcatgcaccatctattcaaggtaatcaattcaatcccttctatcaagcagtgatcgtggacctgcttgaaagaggaggattctttttgtcaaacttgaactaaatcctttggatctcaaccccccttcctcttataaaaaggtcaataatgttccaacaaagttaaacaaaaaatatcatttcatttttcgtgctgctacatttgcattttttctgttttcccagaattgtaatgcctaatgttgatttgtgtgcttgcagatttggtttatgggtgagcattccc

SEQ ID NO: 189717 - DNA, 413 bp, Zea Mays
gtaaaatgaggtcgtggaacaatggaatcagaccatcgtcgacattagcatggagcatgatgaaggcgaaccggacgtcgactgagttctagagcgaggcagtgtccacgacggtgttcattctgaatcacacgccgacgaataacctgaagggcataacgcccttcgaggcatggcatggagctaaggaaacttgatgtctcgttcttgaggacatttgggtgcgtagccatatcaagacgacgaagccacacccttccaagctggaggacaggagcgcaccgctggtgctcctagggtatgatgtagacaacaaggcataccagatgttcgacttgcgtggaggcaaggtggtgaacttgtgtggcgtcgttttcaaagataagccaacctagtactagcgaagtccagac

SEQ ID NO: 189718 - DNA, 323 bp, Zea Mays
cttttatttgtgcgacatttgcactaggacgttcaccttcaaggtgtgttactgctggaacatctgaaaggaagcgtgttgcattctcttcagtaacttgctggtgcaggcgtccccgcttagctgatactgaatcatccggttttctcccccttttcctaggatggggagtacgagtagagtccataccctgcagaggtatctccactctctccggtgcatttgccgcaggattatgtgacttcgacactcttatatcagtaaaggcatctggcagattatttgctaagttttgcaggtgtattattcgttgaactttaagt

SEQ ID NO: 189719 - DNA, 395 bp, Zea Mays
acatcccatgtacatgtgtgatgaagggcattcaattcatcagtcatagcaagctgccactcaggtataccagaagcctctttataagattggttcagcaatgactgcaccagcatggggaaacccataacgttctggagctgcaatagtgccacggtcacgaagatgataaccctgattaaaaacaacatgagagtcatcattgttagtacaagtatcaacaacaggatcatcgtcaggactggccgtgggagtagagcgaggacgacgaatgtaagtctgagtgacatgtggtttggaagagtaagactgagatggtggggaagtggaaggtgatgtgatgggaataagaaaatctggggtagaaacagtaggtggtgatactgatgaagttt

SEQ ID NO: 189720 - DNA, 1104 bp, Zea Mays
attcatttgaaatattgaactatcaaatttgtttcactctcacatattccttctagctaaacactgaacaaaatttgtggaaatttgtaacatctccttttcttttgcgagccttacagaagatggtgggtctgcaaaaaaggcaaagttgctacctgatcagagtgatgaagatattcatttgtcacaagacattcttgccagtcggaaggaggacatctgttttgacgagctatgtgatgcagaaccttctgttgataatgattctctgaatcccggagcaggaaatgaaacctggggtctactaaacggccatgtgttagcaagaatcttccattttatgagggcagatgtgaaagcacttatttcttctgcagctacctgtaggagctggaatgctgctgtgaagtattacagaaacatgtgtagattcattgatctgtcttctgttggccctctttgcactgattctgtgttttgtgatattatggtatgtgtcttgcctatctgtttgatctcttgagaaattacttctgtcatctcctaacgttgaactcaaaatcactcctctttctttcaggctggttatgagaagcaaaatattaggacccttattttagctggttgttcgaatcttagttcgcatgcccttggcagagtacttgagcagcttccacaaatatcttatgttgacatccatggttgcggtcatctaggggatctgaaaaataaatttcagcatgtaaaatggatcaggagctcattgaatccagaggagtcatatcggaaaattaaaaccttgaagcagataggtgatgggaacaactacgcatccaaagttgcaaggaacttcaccaatcatctggatggttctgatgagcttgatgggtattttgctgatatttcaaatagagagaatgctaacctttcatttggacaaggtttctataaacgatcaaaattgcttgatgctagaaagtcctctgcggttttgtcgagggatgcagaaatgaggcggttgatgcagagacaggcagagaccagttacagaaagatggaagagttcatcataaacagactgagagaaattatgaggagcaacag

SEQ ID NO: 189721 - DNA, 323 bp, Zea Mays
aaaactaaatatcataatagtttaaagttgtaactattagcttctcaaatattccactgattccagcatctattagcaaatgatcattcacccctcttgctttgttagttttgaccgtagctgtgcaaaatcaaaatagatggaattaatatcctacaatgcagtacatacctaatgggggctaccaaaggctcctatcagtgaaaaattcttaggcatgctgacaaaatgcatggagaagcaggggaggaggcagtatgacagatttcaaggaatgcaatattttaagatttatgcttgaataggaagacaaggatattagc

SEQ ID NO: 189722 - DNA, 702 bp, Zea Mays
gtgaaagaggagagttcagtatcaggagagcgtgtgctatgtctgatcgccacctatgctgtcggcaaggagaagattttgctggaggtcgcacagcgctgtgggtgttcaatccatgtggacagtaggaagatgaagattttgacactgttggggttcggtgggaagaatagcgtttttactgaggacgcaacagggacggatgtgcatgttcttgggtggaatttgttaggggagacttcgccctacttccagccgaattttgtgaaattgaaggagatcatgatggagagagggtatgctaaggctgttgggtttgtaccaactgggtggatgtatgaaaccaagaaggaaggttttgctgttagggtgaaagattcactcgaaatccatcttgttccttatagtgagcactcaagttacaatgagttgcgcgactatgttaagtttttgcacccaaagagtgtgatccctactgccggagtggatgctgggaagctcgatagtaaggaggcagttgctctgcagaagcattttgctgggttggttgatgagacagcaaacaaacaggagttcttgatggcattccatcgtaggtcaatagatgctactcgtagctgcaaagatgtggttgttaattgctcgagccagcttgatggggaggatgctgctttgttaccagcaatctcttctgcttctgaa

SEQ ID NO: 189723 - DNA, 572 bp, Zea Mays
caacggttggagtcagttttaaaggagccagagccctcccaaacagggccttagagttttgatgactactagtggccagtggtagtggagtggcagcccacaaattccggcagatttccgagcgtggtgggggtctgggggaggtggcagtcgctccgtcgacgggctgccctccatcactctcctgccatccgtcctgttcggatccagaacaaaccactgccacgcgcccacgcctcgacgtctcctctcgatctcgcacgtcctgaccggcccatcgccatcgccacagcatcgggaccgagcagctcgccgaggatgctgcagctgggctgagcctgaggagagcgaccgatcgagagatcatcgatcgaggatcagggacgactcagggtgtgaccgtccgtgtgcgcgaggttgggcgcgcgggcaaagatggagagttacctgaacgagaacttcgggggcgtcaaggcgaagcactcgtcggaggaggccctggggcgatggcggagcgtggtcggcgtcgtcaagaaccccaccaggcggttccgcttcaccgccaacctggg

SEQ ID NO: 189724 - DNA, 414 bp, Zea Mays
gaaggaggccattgtctgttggcttggtttaaggccactcgacctaaggagctggggggacttgggattagcgacttaaggaaccatagctgggctttgagggctcggtggccttggttgcagaaaacggatcgaaacagaccttgggtcgatttcccaatccatgtatatgatgtggttcagaagttgatggctgtggctgttatcactgagattggagatggcgccaataccttgttctggaaggataggtggctgggggagagatgcgttaaagacttaggtcctgcagtgcttgatttggtgcctaatcgtctagtgaacaagaggacagttaaagatgcacttcccaacttcgattgcaaggggctgtgtcagttagagtttttgccgaaattctggacctttgtgaag

SEQ ID NO: 189725 - DNA, 796 bp, Zea Mays
gatcttgctgaatgaattttgtggtttttgagccatcctggtaaaccttggcatggccagtggagagacaaacgcagggaacacccagaggtgtgcttatctcatctttaccttgaaacacactgtttgttttttctagttctagttactactggaaggctcttcagtgtttttttaaaaaactacccactgatgtgctaactgcgagacttcaagatttttgtttacagaaatcttttgctatttaagtagctgtcagaaatcttgggagcactactatatagacattttaatataaattgtgagtgctggtagccttatcttgtctttctgtttagggggaatacccttccaaatggtgacatctatgttggcaactttgctggtttagttcctcatggatttggaaagtatatgtggacagatggaactctttattatggcgagtgggatacaagcaagatgagtggtagaggagcaattcagtggccttcaggtgcttcatatgatggagatctttgtggaggtttcattgacggaacaggcagtttcaaaggagttgatggatctgtatataaaggttcttggaggatgaatagaaagcatggaatgggcacaatggtttacgccaacgatgatacttacgaaggtttatggaatgagggcttgccagatggatttggtaaatatacatgggttgatggcaacatctacattggactttggaaatctggtaaaatgaatggcagaggagtgatgcaatggacaaatggcgatactcttgactgtaattggc

SEQ ID NO: 189726 - DNA, 469 bp, Zea Mays
aaagggaaatggcgtctcattgaagacaacatatcatgcctagaaatattgatccggttggaatactgatcaagacaacaataacccttatggtgaggggagtaacggaggaaaacacacaaggaggagcgagtttgaggaccagtggcagaaaggttggggtagctttggcagctgaaaacacggagatgagtatatgagggtggggatccaaagagagcgatatggggtgtggataagttgattgctttagttggtagaatattgaggaggacattatcctgaaacaaggagcgaacgacactattgatggtgcgaaacatgcattcggttttacccttttgaggcgaagtgtaggggaaagacatatgaagttggatgacgttggagtgaaagaaattgcgggcgctatgttcattgaattcgcgacctttatcgcattggatgccctaaatgggaacaccaaatt

SEQ ID NO: 189727 - DNA, 1652 bp, Zea Mays
ccatgggcgtgctgttgccagctaggctgttcgtgcgccggatgctcagggttgtcaggctcaacccgttgcagcgcagcgccaagagtggatgaggtgaaaatttttactccgctggtcttagctcgcttcttgtgaaaaagacgcagcttttttccgcctttttttttctttcctttcttctttgagccgtccaaggttccgttttcttttcttttcttttctagagattgggtttctgctgcagttagttcgcgtgtcaaattcgggttcgattggcggcaggaagctgttaattgcatctaaccttcgcggcctttcggtttccacgtttggtaatgataggcccagttgtgagggaactggttcttaggatttatcaagtgcgttcaactgtcgggggttgacttgtcttctcttcttcacttccagtctcgcgagttggcatccaaacagctgcacatgtatagattctttttcgttgttttgggccttctgtcatgtttcttttgatcttctgcgtgtttgcttgatcatggaaaggggtagcgtgtatcgatcttgcattttgtgtgtgtgtgtgacacaacgcattgtgcatcttgttccttagatcttttaccttactcactgcagtgtcttaatcatttgatgggcaggtaatttctcgcgagcgcattcagcacagcaggttactattggctgctcgtccacttaagcaggttgaggtatccatttggttcgacacagtgaagaactgaagatacgcattgtgcttgcttgtcttgcggggctcacaaacatcctgctggtgtgctgtgctgggaaggtcacataatccacttggctatatgccggggtgggaatgtgaatcggggcttcattagtgcaggcagcaggcttgttaacttggtaattagtcaatgaaacccatactctttaatgacttcttttggccactgttagcctgtgtttgatataatgtagctgttcatttgtgcttccttccaaaagttccatattttgttctttattggagcatcaattttagatggcaatgtatacctgaacatcttcaaactgtctacacaatatgtctgcattgtttttgtgcttatgccagtagaattaacaattaacaagtagtatctgttcattactttagttcatgttttgtgccccatgaaattggtaatggaattgcaaattggagttagacatcatgctttgaaatgcacaaactgccacaataaagccgtgacatccagctgagtgaaactgtcttttcatgcatatactctcagtaatcatcactaaatttatctggaggagtttattgttctattgtaagctgccaatttctttgtttcttctgtcaatcaatgaatattgcacgcttgtcttttttccacatttaggttgatatttcagaacctttttctgtgatttattttattatacagttgagggtttgattcactagtctcttgcacagttttgcaacaagcatgggggcaaaagttgaaggggaaagctatatgcctggatattatgccacaggggatctcaacgtggaagcaagtggtaggtggtctccatactatgaggagatgacatcaaatggccagttatgcaatggcttcgcaacaaaa

SEQ ID NO: 189728 - DNA, 300 bp, Zea Mays
gaatccttgacttcagggtcccctgctcagtctgattgttataaagaaaatggtgtgggcgtactgaaatctgaagctgcactggagtatttgtgcaacctaccacctcacaggtcacgtttagcaaattcaacatttatgtttatggttctgatactgcatgaatcacaataaaatcccaatttcagatatgaagctgtttatgcaaaagacattccagaggtgattagtggagaagcattttcagagaaatatggagatcacgatgacacagtgacagttattgatcctaaaagatct

SEQ ID NO: 189729 - DNA, 514 bp, Zea Mays
ccgccagccatctcccaatcatcttcccatggtcgacacctctagatcgacatccccgccgacacgaccatccctggtgcgatcgtgcggcccgagccaccgtcggctctgttaacggcgcagacacctccaactctagaggcgactgcgtgcacgctcgatcagccctcgtctccctcctcggctccttcctcatcgtcgtgcgctcccaccaagaccacatcccctgcgctcggcacctcccctctgctccagactgacgccacaccctgtaccccgacacctcccctctacactaggccgacgcgcgcgcctagggctctccactgcttctcccagcaagaccacgccctctccccacctgcgatgagctctcctcctgtgaagttctctccaccgcgtcaagcagcaccggctctgacaaccatgatgttgtcaccagatccagcagctcccggctccacctccaccacccgtgccctccgtcgtggtctcatcgacccatggcgtgatg

SEQ ID NO: 189730 - DNA, 482 bp, Zea Mays
acctccactggtcacactcttcctcaacctttttcttaaaaatgtgctagtttccccctcgatcattaaagatctcatgtccgtccgtcaatttaccactgacaacaattgttttgtcgaatttgatccatttggctgttctgtgaaggatctccccacttgatgcgagctcatcaaatgtgatagctccagacctctctaccctctgcgagtacctgctgccacccttcatgcgtgtacaacttccttgtggccccagtgtctcggacaccttggttctgcaattttatcccacttagcacagtcgtccgctattccatgtaataaaagtgctagtcctactttgtgtcatgcttgtcagttaggcagtcacactcggctacctttttatgcaccatccattcatgccactcacaattttcaattaatacactgtgatcttcagacctcgactgtcaccagtgtatccaaccacaaatatt

SEQ ID NO: 189731 - DNA, 455 bp, Zea Mays
ggcaatggatgacaatgatggcattatcttggaagatgatgacaactctagggcgctagttgtgtatggacaaaaacaagaaatgtgtctcacggttcttccggttgttccttccgggtcacaccacaagcaatctcgggaccatgatatagatgctcgaagcaaagttaggaagttgctccagttattccaggcgacataccgaaagcttacacaagttgaggaacaaggtaaacgcaaagttggaaggattgacattgaagcagctaaggcactaaagaacgaccctatttataaaaagcttggggctgttgtgggaaattttcccggtgtcgaagttggcgatgaatttcattttagagttgagctgtccataattggtctccatggcccacttcaagcaggtattgccacttctaaggtgaatggtatcaatgttgctataagtatcgttg

SEQ ID NO: 189732 - DNA, 422 bp, Zea Mays
aaaaagggggttcttctcatgcgcaacatgttaacacactccacatcattgaagttgtaaattctattcaagtttctgtgcctctcttcatccattgcactcattggggcataagtgatcctaggtcgtgccacttgacactggacaagtctagaaacaaaaaatgcatacacaacagcaacaagtccagctgccctcactattaacatgcgcctctcatcatcatgatccatctagatgcaaaggaacagagccaagtatcacataaaagctcaccagcagtaacatgatgcagtactagatcataggcatggcaacaaaataagctcagatctagggaccaaatcataggcatggcaacaataagctcagattaaatgctataaaatcataggcatggcaacttaagctcagatctagtg

SEQ ID NO: 189733 - DNA, 2083 bp, Zea Mays
aagcaagcttgcagacattaatggcatttgtagacaagtcagttgggaaaagctcaatacgcagtgcatctctcgcttcaaagttatttgccttatctcaaggctggggtggaaaagaaggtggtcttggattagtagcatgttctctacccagtgtatctgatccagtttccactgaggttggatccacactccattttgagttctatcgtgctgctgataaatcagagaaatcccagtgtctagagaaagagaacaagttggaagtaattcatttatcgaatgtcaattcgtgcaaggaggcagatcttgaaatattggacaggttggtcaaggattacagtgtgccacaagctttaaggtttcttcttcttacaagactgagatttgcaagggcttttgactctttaacatgtcgacaccagtatatctgtatccgcttgtatgcttttattgttcttgtccaagcaggccatgatctggaagttgtatcaacatttttgaacaatgaaccagaattcattgatgagctgttatcactacttagctatgaggatgagatacccgaaaagattcggatactgggagtcctttcattagtcgcactgtgccaagatcgacctcaccagcctactgtattgtcctcggtaacttctggtggtcatcggggtatccttcctattctcatgcagaatacagtggattctatcatcaatggttctatgaaatggtccataatatttgctgaagcacttctttcgcttgtatctatgctggtatcatcaacaccaggttctctagctctacaagaagcaggttttataccaactattttgcctcttctcaaagacacaaacacgcaacatttacatctagttagtaaggcagtgcatgttattgagagcttcctggattatcacaatccttcttcagcagtgttcagagatctaggtggactagatgacactattgctcgtcttaagctagaagtatctcaagttgaggttgattcaaaactaattgaccattctaccaatgaaggaaacgaggttgaaagttatccacctgtgcaagatatacaaccttcatgttctgaatccttgattttgtatcataggaagaacttaataaaagttttattacgtacaatatctctggcaacatatgtgcctggtagttctgctcgtgttgatggttcagaagagaatgtgttacctccatgtttatgtgcgatttttaagagaggcaaggacttcggtggtggtgttttctcacttgctgcaaatgttatgagtgatctcatacataaagatccaacatgctatactgttcttgattcagctggtttgccacaagcatttcttgatgccataatgtgtggtggactttacaactccgatgcagtctcatgtataccacagtgtttggatgcattgtgcctgaacaataatggtcttcaattggtaaaggaccggaatgctttaagatgttttgtgaaaatctttacgtctagatcatatatgaaagctcttagtggtgacacagcgggagctttatcaagtggacttgatgaattaatgcgtcatgcaccatcattacgatcctctggagttagcatgtttattgaaatcttgaacactatttttaaagtgtggtgtggtgtagactctatcccctataaggaatctgataattactctgcagttattcccatggatactgatgtggtggttgctacctcacagagtgagggtgtacctcctgaggtaggatgctcaggcgaaacagttgatgctcctttagatgctgtaacatcatcatccattgagttatttcttcctgagtgcatatgcaatgttgctcgcctgcttgaaactgttctgcaaaatgctgatatatgtaggctatttattgagaaaaaaggcatagaagctgttcttcaactgtttaagttgccatcaatacctgtatctgtctcaattggtcagagtatttctgttgcattcaaaaacttctcacctcagcattctgtttctcttgcacgagcagtgtgctcattctttagagaccaccttaaaataac

SEQ ID NO: 189734 - DNA, 643 bp, Zea Mays
catcatgtttgatttccaccgaatggcatccggcaatacagtgctgtcccttataaactttactatttgctcttccaagtcccagcgtttactcttgttaaaacctatcaacaatgatgttattgtaaccaaatcaacactgaagccttgctgctccatctccttcaccaactctacagcctctgcaacttggtccccaatcccctccttgcagaactccctcaccatgatactataagcaattccatccaacagttgccctttcctccttagctcgtaaaaaagccgacatgctgcttctgccctcccattattaaacagcccatctatcacagtgttgtgtgtgcttgctgagcattggattccatcagccaccattgtctcaaaaaaactgcatgcctcatcaagcttcttcactttaaacagcccatcaagaagtgaattgtacaccaccacgtcactcaccccaatgatgccccgcatctcatgaaacacacgcagtgcatcatccatccgaaaactcttgcagcacccattcatgactgctcgataagtgaatacatctggctcgattccagaagatttcatttcatcatagatcaccaaagcatcaggtacccgcccaccaacaacaagggcccgg

SEQ ID NO: 189735 - DNA, 316 bp, Zea Mays
ggatgacaagggtgtggcaccggatgttgtgacatacaataccctgatcgcagggctttctggtgtgcttgagatggatggggcaatgggtttgcttgaggagatgattcaaggagatactctagttgagcccgacgtggtgactttcaactcagttatacatggactatgtaagatcggtcggatgagacaggcaatcagtgttcgtgagatgatggccgagagagggtgcatgtgtaacttggtgacatataattatctgattggtggattccttagggttcacaaggttaatatggctatgaatctaatgagt

SEQ ID NO: 189736 - DNA, 293 bp, Zea Mays
agtgcatgggaacattctctgatatatgagaaagaaaacggacactggaagtgcaagtggtgcagtattgagggtgatcatggtttaactagattgatgtggcatcttgttggatggcagaatcgacctcagtgcccaaatataccaaaggatgttgctgaaaagatgaaggatcaaatgatgtcaaagaaggagcagaaagcgagatcaggtttgtttgacggcaatggctgttgtgaggtgttgtgctcttctaatagttcacaacttgatcagaaccatctcactgcaag

SEQ ID NO: 189737 - DNA, 1506 bp, Zea Mays
gtgggagctagatcagaaccttgatcaacccatggatgaggaggcgggcaggctgaagaatatgtacagagaaaaggtctggcatttctctcttttcagtccttttcatgttgattttgttttttccccctcaaggcctcaatgctttgcagtagatactgcacacaagattagtgtctgcgttaatgcgtatgacgatccatctcattgttcatgtgcactccgttctctgagaacatctagattctggaataaatgaaccatttcaacacgactacattttgactgcacgaacatgtgtcctttccaaattgtagatgacacatgttcgtaaccaaggagcgagcccttttgttttaaaaacttggttcggctcctgggaccatattaccatttttcctaaccaaggagcgagcccttttattttaaacaagtctatgatccattctacttccaatgaaatcactaccagaaatttctctggtttggaagaagaatactagtttttgatttaagtaaatagattgctaaatcaagaatttctgttgactctggtttcttttcttgcagaagttctcatcagctttgttactacggctggcatttcagagccttggggtggtctttggtgacttgggcacgtcacctttgtatgtgttctataatatatttcctcgcggaataggtgagggcgaggatgaggatgttattggagctctttccttgattatttacaccctcactctcataccgcttctcaagtatgtttttgttgtcttgagggcaaatgacaatggtcaaggtaagatgcttgatcctcaaagctttgttttgtttgaaaggactgcaagagtttttgtgacaagtttcatgagacaataggaaaagaaaaaaatagcaagaacaaagtacaaaagcacattttcgtcagctccttcactgcagacagacagcaatgtgcaaccatgtttttatttaaacgaaatgtcttaccaaccccttaaggtctgcatgccttagaaggtgaattaccaccagcaatacttctcaaataactaaatttgtatacaatagaaaaatagagattttactgtacttgggaagtatgatagcacatcacacttttgacatatcacacctcttgaatttgtaataagaatacttttcctttcttgagagatgtcagggtgctgaagagcatttttttaataatgattaaacttttgacctgagataaatttttgctgcttctcagtgtttgcataatacgtgacttctaaggtggcaacatgttgcactttctggcaggtggtacatttgctctttattccctattatgccgtcacgcaaagatcaacaccatacctaatcaacacaggaccgacgaggaattgacgacgtatagtcggcaaacctatgaagagaattcagttgcagcgaaaataaagagatggatagagtcacatgcatataagagaaacattcttcttattcttgttttaattg

SEQ ID NO: 189738 - DNA, 391 bp, Zea Mays
tggaacattggcggcggcgcctctcccagaagctagtaaagccttggatattcagaggtctatcagtgtttgcccgaaacgcccttgccgagccaatcagcctgcttctcctgctgatgggcagaaaaagaagaagagacgtcttcggcgagtgtctagcttggatcgggatgctggtccttcggctcctgctgctgaggaagtgcccgtgcctgaatttactgaagctgatcccaatgggtgtgacccatctgacgctgaccccaatgggtgtgctgtccgtgttgctgatgaagatgaggaggaggacgaagatgaaatccctctgattcggaagaacagtcggcgctacatagccagtggggaaagcagtggcgttccttctcctgct

SEQ ID NO: 189739 - DNA, 583 bp, Zea Mays
cttgcagccacatgcttgcgagttgcggtacccagcttagctttttcgagtccttgctaatcttggtggggacgacggagacctgatgctatgcttccttccctccctgtgctgttgagttccgcttccacagctcgtgtatggccgacacggtaatcgctgcgaaacgaggtcatgcgcgtcttccttgtgctttcggatgcaccgaggcttgccatccaaaattcgctgcaatgcttagctagatcgaaggcctacttacgctcagaggtgtcagcttggggatccccatcttttatctcttgtcgtggttaaaacagcggcctgatatgtcaggtgtttgttccgcaaaagggttggacttcccacgttttgggatgagagtttgttcggaatagcatgctcaaagtcatggaatttggtcgcagggagtgatcaagtaggtactaggacagtcctctccctttggtggtgctgttgattccttgcaagacctgtacctctgtgctcagataatccagcatgtgctgcattcagatgggagattgaatgaaagtgtgtaataccagtagcttcctcaaat

SEQ ID NO: 189740 - DNA, 403 bp, Zea Mays
caacactaaccaagtgctaagatgggcatgtcatcagattggatataatagtaatgagtagaagaagcttctagcttcaattgagcatgtgcgttgctgaaagcttataatggttggcacatctaaacctacaaagccaagaccaatccatcaaccatcaagaaacacctgcgtgcctggccaactgaccaccagcaggtgccgaatcagtgtgaagcttagaatctacaacaaacatgaacaccatcccattgcaaaaaccctatacgtgagatcagatagaaacaaaaaagatgctatgtgcttattggcaagaaacgtaagtcgctacccaaggggatggctgctgcgtcactgtcactgctgaccttatcttgttgcttctgtcggttgcaccaccacc

SEQ ID NO: 189741 - DNA, 383 bp, Zea Mays
tagctctcccgctattgaagacctaaagctgtgtttagagtacacgggccaacactctaagcttgttgactcatttatctcatcgcttcgatatcgtctacttactgctggtgcatcaacaaatgatatattgcaccaatatgtgtccactataaaggcattgcggacaattgaccccaccggggtgttcttggaagcagttggtgaaccaattagggattatctgagaggtagaaaagacactatcaaatgcatagtgacaatgctaactgatgggtcaggaggaagtggaagtggaacaggcaatgcaggtgacaatcttctggaagagttgaacagagatgctgaaaaccaggaaaatgctgattacgacgatcatgcaa

SEQ ID NO: 189742 - DNA, 644 bp, Zea Mays
ggttcctctggttatccgcgtgttggcaccgaaagtaaggaaactgaagctactaggttctcgaaaggtttgtgtttggttactgcttatctatccaccataatgacatttgtaatttttgatttgctttgtgcttgacctcatcattattttttgcattctgccagcacacaggtgccagtcatcgaaaggcaattcttcgtttccttttgcagtttgattcaaatgaacttgagctttttttttctttacttctgaggtccttgatccctggcagcctccagcttaaaatgtttggttctcagccagacaaccttcttggaagtttctctgacattgttggaacttcaacagaaatttgtgtagagaattttacatggaaaaaggcaaatggtttcattcatctggttgaagaaatttttggtacttttgatatgccacatataagcccatttcttaatgttttattaatcattgtcgctcgcttgctggagagttgcatgaggaatcttagaaatgagagtgatgggaaatatccttgcaaccaaacaaatgaccatggtaatggttgttccataaattctgaagtgggcaattctgtgaacgtggatgaatgctttaaagaaatgcatctagaaggccat

SEQ ID NO: 189743 - DNA, 557 bp, Zea Mays
cagtgtcggtgatgagggcacgacaaatgtggcaacagaagtcgccactgctgcgagggaaccaaagtgctgctagcacaagatcttgaaatgtggccacgtgacctgacgctcatcgcgttctagccaccagaaccatgtatgtgcgtggccggtgaggtgatacgatgccagccaggccttgttggactccaaggtgcgctggctccagaagaattgctcgcatccgtttaaccacccagagggtcaccgatgtcgtcgtagatggggaaagatggggtgctgcggtcgccgacatggtagcagcagcgagggtcggtgccaggggctagtacaccggtcctggtatggttgcccctggcatcgtcagccatgcagctggtgataaagacggccctaagggcacaacgcaactggtaggcatcgcctcccacgaagatgtaggtgccggagcgggcgacaacggccaggccactggtgctagcgtgctgctggagagcgccatgttgattgcgttgagcctcgcaaacagatcgtcgaagtacgcctggtcggga

SEQ ID NO: 189744 - DNA, 271 bp, Zea Mays
gtctaccgtacctgacttgtattatgtcgcgtcgcgtcgcgtcgacagtcagctgagtgaacgaaagttagttaattaatttgaaagggactctgttgttggctcctgcttgtttattctggcgacgtccataccgatccatgtgtattgtgtactcaaatcatcactcggatgtgcaaaacccaaaagatattagttgagcatgctgagcacaccatgttccaacaacgtgtttgtatggtttcccagaggcctgctcgtgacgtcggct

SEQ ID NO: 189745 - DNA, 292 bp, Zea Mays
cacatcattccaccaaccaaacaccccatacaggtatcactaaagctgggttcatggattcttagaaaagctacaagagggtattcatgctttagatataacagaacagtaattttcagtctagttgcttaagcagttaaaagtaattcattcctttgtccatgggcaatgttggttctgccaagaggtaacctgcttttcatgacagtgaacctgttatgcaatgggcaatcttgctcattgtgcatgagggattattttgcttggcatttggacacacattggattgctt

SEQ ID NO: 189746 - DNA, 307 bp, Zea Mays
tacgcatccagaaattgttgttggtaagcagaaccctagcccaaagtctcatgctaataaccccgcaaggaaactggcacgtaaaatacttgaggacagcttggtaaagctggatagcatgcctagcataaattctagaattatcagatgggaacttgggtcctcctggctacaacagttacagaaaaagaattctccagcatctgtgaatgttaagcggaatgcaacaaaggctgataaagaatcagctgtcaaaggtcttggaaagcattttgaacaattaaagaaaattaaaaagaaagaatgc

SEQ ID NO: 189747 - DNA, 508 bp, Zea Mays
gattgatgatgcacttaaatcatcatgggaatggctgctcaagttcaaatcaggtgtctcgcacatggcatttcaggcgagcccctcctttctttttgtaacaaataaccctatcttctcggcctccagttgtctcatgtggaatctgaatgtcaggccaccggcaatgaaggtgtcaggttactggctattaagtttgttgaaaaaacagttcttatgtacacaccagatcctgatgtcccatctgatccgccaactgaaacaacagaaggtatggcttatatttcctttcatatggaagtggaccctattttccatgtttaggaacttttgggtgcatgttgatttaggcatctgtaaaacgtttgcagatatggcattcaatgtagcttggttacgaggaggtcaccctttgcttaatgttggggatctggccatggaagccagccagagtcttggattgttgctagagcagctcaagtctcctaaagtaaagtcactcagtact

SEQ ID NO: 189748 - DNA, 362 bp, Zea Mays
gctaataagactggctagtcattgaattcacagcaggaatgaatagtgatgcaactgctagcgtagggaaattgcaactccacagaaattattgttgaagcaaaccaaagtagtttagcagaactgacacatgttgaataagattgaggccagaagccgagacccttgcaattacaatgtgaggtcaaacagggacaagtccacaagtgccctagtaactgataacgatcaacccattaaaaaaataatccaatcgtgtaccatcatatatatgcgctgatgcgcacatggaagaagataacaccagcagcagcaggaaaagggaacctcgatttcttattagtgaagcagctaatttgccg

SEQ ID NO: 189749 - DNA, 442 bp, Zea Mays
cccaccttcatgaagccctttgctgcctttcttgtacaatctatggaaaagaatctaaaggttataaacccccttacaagcttcaagcttctcagatggtcacactatcttctgaaatggagtcaatttgccacactttcaaaagttgcttttaccagactggccagcgcacaagcagtcttatgtcaggtccttatggacgggtccttccgtcggcgccgaacttgcaaacagttattcattcatcttttatctgaggtaattattggcaatagtaaataaatttagatcaagtcataattgtgtcctgctcatatcttatcgtttcattttccagcctagtggaatatataagatgtacatggaggagctcaaagatttaaggatttccatgagagattctcctgcatttttgaatctaatactggattttaccattagt

SEQ ID NO: 189750 - DNA, 955 bp, Zea Mays
ctcagcttaatgaagccctcaatgctagcgatgctagatcaactattgggtctgaatctgcttcagtaatttcttccccaaagataacagaatcaactgctgactcatcttcagtgacgaaaaggcttgaggaggaattggcaaaaagggatgcccttattgaggtagatacgcagtggatcctttcatcgctaacgctaattatcaccagttccccatgaaatgcatgtactataataagttagctgaaagtttaaacaatgggcattctgattccagtgaatttaaacccatagagtgacctaaagttgttcatcttcagttgtttgaaatgatagttgcatgatagaattggcagatgggatgggttcactgattggagcaatttgcattgaacttatgagcacatacttaccattaccaggaaacatcacaagttcagtagtagaacaaggtttcaatgttgtggatgattggatgttctttttcatggtaccatcctaaataaaacatactcctgatatctaaattgagcaagtgtgacctgttaatttctgactgttccatgtttaacttttgttttgctatcttcaactacaagtttagaaatctcctcacactgcagttttagtctaaaaccttttgaatgggtgtctgattagaagttgaatttttgctatctatgctgccactattcttgccatccttgtgtgctccaccatgactgttgatgcatgatctgtcttttctgtaagttaacacaattcaagttttctgttgacttcatgttgaaactttgttttcttacagtttgatctaaatatcttttgctcatttgtttgatatcattttttcaaacctttcctttttttgttacaaaataaatacagaaattacatgaagagaatgagaagctttttgacagacttacagagaagtcaggattaggaagtgc

SEQ ID NO: 189751 - DNA, 637 bp, Zea Mays
tttggggggaggcagtgaatgcagcggtgtacctcctgaatcggtccacatccaaaagcactggaggcaagaccccatatctgctttgggccagaagccctccactagtacatcatctgcgcacctttggctgtctggcacatgtcaaggtcacaacaccaaatctcaggaaactaaatgacaggagcagacccatgatctttgtgggatatgaaccaggatcaatggcgtacagagtgtatgatccttctcacaatctaatacatataagtcgtgatgttatttttgatgaaggtacataatggaaatggggagaagagcaggccatgaatgatgatttctatatagagttcatggaatcaggaggggttgggacacagcagcagatggatgctccactgtctggtccaacggcaagtccgcagtgcagaggaggcactggaacattccctgcagcatcaccacctgcacaccatcagaattcaggaagtccttcacattcagctccaccgggtggaactcacgggatgtctggttcagggtcaggtaactcagtctcatcaccagcatcgccggaacgattcacatccccatcaccgccacaaattgcagaagaggacctcgacacagaccatgg

SEQ ID NO: 189752 - DNA, 400 bp, Zea Mays
ttgttcatatgttccatataacaaaaagggttacctcgtgaaaatttggagcattcttctagattcatgtgttgatgcctcacctttgcttgtcataaacaatggaatgatgtccatctttattggttctcattcatatttgtttctttgcattgatggttataggtgagtgttgcctattacatggaattctatgcttctttttttctgatgtacctcatgctctatttttctatcatttaagattattgtatcagtaatttgtttaaattatatttgatgagaaaattagtaccatctggtgtgtggatactgacttttcttagaacttgtttcctattggttttgtagtggttcagtgaggtggagtgtcaaattggaaggccgtatcgagtgttct

SEQ ID NO: 189753 - DNA, 416 bp, Zea Mays
ggacccatacagccaagacaaaaacaaagacttctagacaggtctttatcctccaatctaaattcagtcaccaataaaaccaccatcaacagcagcaacatcatcaactaagaagaaaatgaagttttcttgaaaaataactcaccaaaacatttggcaacacgtgggcattattgattttggattggcaatagtccccagacaataccaaacatctcatgaaatttattgttgctcgagtgcttgaaagattatcagattaattagaccatacatatgggaggtactattgttgaattaaataggactgttttgacgtgcgacaatatgtacattaatttcaattattaaccatcaggtgccattaagagtttaagacagtctcaatggaaggttgttcatgtctcagtttccaa

SEQ ID NO: 189754 - DNA, 700 bp, Zea Mays
ataggtttctggaatattttagcaagtttgactgggacaactattgcataagtttaaatggccctgttgctttgtcgtctttgccaaacttaattggtgggctacctttcatattttcattggcagattaatgtattgaggcatattctctaagttatctcgaaattttatcctgcttgcagttgaagctacagttacacataccagtgacttattgtttgacaaagaattcctcaagagctccatggataaagcaactgtacctccaaaaaattccgattcatgctatccgaggtttcgtcctaaacatctaaacatagttgatccactgaaggagtacaacaatcttggcagaagtgtcaacagaggtttgaatttgatctaaccaagatatacatataactcttttctaagttttcctatacaatattttgctgctgcttgtactcataattgcatcccaatttattaagtcttgctgctgcttgtactcataattgcataaacccatatgtgtagctagctagcattgggtttgcctggcctcatctgcttaatttaataaggtgattttgtgcagctagctttaatcgcattcgaacagctttcttatatggtgctcgaaagcttggtcatattgtcacgttaccatcagaagttattcctgatgaaatttatgagtttttcaaaaacactttgg

SEQ ID NO: 189755 - DNA, 491 bp, Zea Mays
gtggagacctgccgtgcaggggcaaggtggaaagaattgtcggaattgtgcttcacgcagtttgtccagctctaatggtattttttacagcattttgtcaacataagattttgctgggtgctatttaaaagacaattgggggtttgcatttacatagactacatgctaccgtgttacactatgaagattatcattaagtggccatgcgtacatattttgatgttgaaaattctgatcacaagttagagctggtcttggcacaaacttcttgagaaaacaagctttcgaaagtttttattacctgaccaatcatgttaatttttaacataaagtaaactcgatacacactttaaccctcttaaatggttacacaaaaccaatgcattactttttttatctcattgaagattctgctggacgaagtgctatttctggaaaggagaatggaataagtttgatcatgggaaaaggtagtggttctactccgataa

SEQ ID NO: 189756 - DNA, 968 bp, Zea Mays
cccggaagtcccttgggaactgattattcacattccaagcaacatcaatatcatcacgattcagcgcaaggatgtttgattgaacgaatgcagtgttgaacatgatgcggaacattgtttccttatgctctatattatcgccaatatggatgaattcaaggaccacatctccataaacacggcaaaacacacttagttttatagggacttctgcctgcatcgcaaccattggtcagtagactttggatttggatataaacataccagtaattaggagacaatcacctgtccataatgtggaagatgcttgcttgtttttggcatctcataaaggacttttgcactcttgttaccggggcttgagtcttgcccatgcacacgcaaatatggcctacaaccaccatctacgtcaaaccgtggaacaacatggagaactactgaatccaagatgaggggtctgctaataggaggccattctgaaccacctccttgtcttgttatatagtgcaaatatctcaaatgtgaaggctgaggattcaagggaaaaaactgttgtataaagtcccttcgagcctgcttatagaccatttctagtgtcttctgctcaccagtgtatgttttgcgatacaaaagcagtccagccaacatgaatgcaagaactggccaaccccctctctcacaatgcatcaaaagcatattatgctgaccttccaccgatagccaattttcacatgatttcaagaaatggtggatcatctcaagctgaagcaatggacacccttcatactgttgtgggtagtccattactgtcatgtcatactcagataatatgtctgaaattcggcttcttttgtccccagaccaaaaattggataccataaatgatgcgtccggaaaaaattcctgcaactgcgcaacaatgccgctcaagtaatcccggtactcatcctcacccatggaatcagtcg

SEQ ID NO: 189757 - DNA, 484 bp, Zea Mays
cgatgacgggccgctcgaatcagacgaaggatcggcagcgcgacgacgggccgcacgaagcagaagaaggattagcatgatgatacgcctgggccttctaggagtgcgtaagggcgagtagaggagcagcgcagcctgggacagggacctgagagcgtatggttgagaagagcgagaggaagaagcaggagcaagatcaccgtcggccagggtgaccgaggtaatcgccccacagggagattgtatttccttcgatgcctagttacatgctactgcttcccctttatagaccagggtcggcatcaactgataagagataaacttgcttaacaactccctgctattatttagctaacaactcccttctattatctagctaacaacccagctattatttagctaacaactccctgctattatctagctaacaacctagctattatttagctaatccttatctgctggaacttaagaattatctgct

SEQ ID NO: 189758 - DNA, 602 bp, Zea Mays
tctcgccttttcgctctgcagtgtgcagtgcaggtggggaaaaaagctaaggtagcgtagcgtgcgttttgcttgtgcatggcatgtgctccgatcctcctcctccgacctcccggcccattctttctcccttcttcttgagggggcaccctccgtcctttcctcttcttcttccttcagaaatcgcaagaaaatggggaagagaagccagaagcgccttattcgacgccaccaggacggcagcataggctgcatggcaggcctcatccgcatgttctattcccgccatgacgccaataagctcctgttggacaggaagcagccagggagtagaaggcacagtttcagtgccttttctggtaagtgtttctctcaagtactattgctcaacaaataatcttgagtttgtacttatgcaccccagaatggttgcaggacgaaggggccactcaagaaagaattccaaggacttggacgaaatagatgaatacggcgattatgtaagttctcttcatacacgatggccagtgtgttcttcaatctccagatcagtaaacaagtttagctgaacaatacaacagtctgttgaatggttgtccttc

SEQ ID NO: 189759 - DNA, 506 bp, Zea Mays
gaaatctccagccaccatccaaggaccatcgcattcatttctaatatctctaagttcctgaaggaactggatttttcctccctctccctgagggccataaacacatgttagccaccaggcctgcccctcagccttacaaaactggactgaaatgctatgatgtttaagattttgttgtcctgtgtgacctatgtgtctcctccaagcaatcagaatgccaccacttgcccccacagatggaaggtacacatattctgaaaaatcagctcccaacatcgacaaaatagtcctcctagtaatgatctgcatttttgtttcttgtaaacatactacatcaacctgggaagaatccaccaactccttaattgagtcttgcctaacagaggagttcagccccctcacattccataccagcagttttgtgggatccatgaaatacaaacacaagaaactactgaaaaacccgggtggccaaaaaatctaatacaccaggtcaggtggagggg

SEQ ID NO: 189760 - DNA, 340 bp, Zea Mays
cttggtagggaggaagatgcccttgacaccgtggttgtgggacctgtagcactgatttctgaggtgatgaaggcgacatccgagacgaggaagcagaaggctaacgaggccactgaggaagtctgtttagaggagggtgcttcagatgctaaggaggatgttgccgagaaagaagataacaatcttcagccaacaaagcccaactacatcgatatggtcagtctatcattaagcctagggacctggagctcttgaagaaacttagttacattgaagatcataatattatccgttttgctggtgacgagaccacttctgagttgaaggaggatgagattgt

SEQ ID NO: 189761 - DNA, 665 bp, Zea Mays
acaccttccctatgcatgatcagtcacataaccaaaaaaaatgttaaagatacactaaataagcactacggtttaccaatattcgctgcagtctaacatcatcgtacaaatgacaatgtcgaattcatgtttacactataattaaacagaaacctggattagaaccaaggtgataaggcagcaaatataataatataaatctaaatcctaaaggggaagggttaatcaacacatcacagaaccaaccgaataaatgacaaacaaacaatgcttccagtgaacatcattaaaaaaatcagatgcctcaagtagcgaaaacacaaccagcaaatccaaatacagcgagaggataacaccaatgatgcatggagtacacagataacaggtgcttggtggaggtcagagaagaattcctacctaacttctccgcatacacagataacaggtgcttggtggaggtccgagaagaattcctacttagcatctccgcatcctatttgagtagttaatcaagtaaggcaaatgcgaacacccatcagacccatctatctggagttttatagcacattctccgtcgatggaacctaagatgtcaaaagcagatacgacgtacccaaggggtagcttggattgaaacagtaggaccatcctggacaggcattcca

SEQ ID NO: 189762 - DNA, 440 bp, Zea Mays
tggcaagctaattaacagagacagaaatattgctgctttctgctctgggagggccttaatatcacaagttcacaactgtaagtattaattattaacttaatatactataagctaataatcattgtttgccttatgactgatcaagatcaggtaagggagagggtggtgtcagcttctagttgttcggcataagtgcgtgtgagagtttggtaacagaaaattgtaggtagatatccaatgagtttttgtcgcgttttggaatctactaatcacctcttctttaattgcctgtggctatctttgtctggagggtggtgcaagtggccctggatctgaaaagatgtcctcagggctttgactccctttttggtgattggctgagtaattttggtcatgatgttaaaaatttaatcacgctcagggtgggggatgttctctgg

SEQ ID NO: 189763 - DNA, 327 bp, Zea Mays
tcctgttctcaagcctctcttctcctccactctcccctgcattcccctcgccaactaccacgcagcagccacaacaataacatagggttaaagccatccctcactttcgctaatcgttcctcacattaattggtagctctgtcccgccgccttgtggctctgcatatattcgtagtttgctcctttggagcggtagcactcatcttcacgaccgctcgtcggacttcgcacgtcggctctacggccgctcgctcctgtctacccgccggcctctcgctcgtgcgcctgcccgccgatgcacatcacaaccacccaccagcgccctct

SEQ ID NO: 189764 - DNA, 349 bp, Zea Mays
tatgtatgatctagtgctctacaagctgaccctgaatagcatatgctaattgctaaccatgtctaaggtactctgcaaagaaaccattgtaaaggaacatatgacaagggcaataggtcccttggcatcttgttcttctgttatttataactgtctacttctacattgaacatcaaaatttattttaacttgatcatagaaataaagagtcccaacaaatactcaacattttaaaatttgaaaatgtgaaaagttgaagtaaaaattatgaggcaacctgttttctcccagcatgggtgagcacaccaccatatttcagaatcatcagggcttcaatcggtcgttcctc

SEQ ID NO: 189765 - DNA, 317 bp, Zea Mays
gccgccgtggccctggctcgggtggccaccaggagatctgtcctccctccctcaaacgacgcctccatctcctcgcatttccttctccttttccccttttcaaacattcaggagccgaaggtgccagccaccctttgctcggcgcgtgtcccggcgtagctcacgacgcatcctcacctgcctgcaccgagccaaggagagtcgttggctatgcgcgttagctccgctgctgggtggtcaccatcgtccgagcacaacacagtgggtaccatcctctcactgaattacttataggaagcctcatcatgtagtttgtg

SEQ ID NO: 189766 - DNA, 1230 bp, Zea Mays
ctggggaagaggccccgtagcagtggctctggagtctgggttttgaattgcgtcgctacgatcttggttatcgctcattctcgttgcagactagcagtccctcccttgtgctagtagcggttagactgcttcgttatgctggttctctagtttttggcataactctggacaattatgcttcacttcaaacctgggcacttgtattgaagttggcagatagttcgactaagccaacattgtctatgggtgattgtggggttttattttttttcgtattgtctataaatgtctggcatggtgtgtggttggcttcgatgtctcttctaaagtaaatttccctctagcttattcaagcatctggtgtccctgatgaattgacttctgttaacctacattgcgcatgttgcccactagcatattctctctgtaattagctgccactatttgactcatggctaggctagttgtagttctatgcatttagctaagttggacacccaccttgctgacagttatgtatctagcaggtattttagttctatacttctatgcatcagtagttctctgaatttagatgcctgtatcattgaatatacttttgacatctgtccagtttccatattctgcttagttcatccgttgaacagtactgtggtactccactacaaaaaatcaaacgttcaccaaatcagaggataatgattaagtaaatttgttcagatttctgcaactaagttatattgcatgttacaccaactctgttgtttcatttcgacctgtctaatagaagtaggaaaaatgttgttttatgccttttagccaggttcctcttcgtttagtggttgccacctttttctttaatgagctggtggggtccttggttatgtcaatgtgtggtgacaaactgaatgacaaaacaaaagccaacagtgaaatgcagttctattgggataatggagtattttacaattgaaacaggcaatgtgcaacttggtttgatctggtaacatttatgtttctacttcgtgcagtttgtgagcatggttacacgttagcccagagtttggatccgaacagcgaagggagaggagtattgcagttcaaaaccggtttaatgtcagtgatcagggtatgtccatttcagttacacatcttacatgatttcatactgtaagatgcccttttctgaactattacagtattggagtttttttttgaattttcatattt

SEQ ID NO: 189767 - DNA, 320 bp, Zea Mays
atttaccatgcttgatcatatattttctgagctatagatcaacgttctatgatgctaatgtgcctctgagctacagatcaatgttctatgatgctagtgtgcctctgagctatagatcaatgttctatgaaattcctttttagcaactagcacaatacatctaagccaaacttagacctctaatctccttttctattttattactctagcaatggatcctgctattgcacgtcggctgctaattgcaaaggccgtggtccttgtagcagttatgtcagcctggctggatgcatggttgaggcaccgactgcatgctagga

SEQ ID NO: 189768 - DNA, 469 bp, Zea Mays
ggaagacgtcgtggatgcgggcgccctccggaagagcaaggcggacagcgacatcgttgatgagttcaacgacgcgatacggtccgacgaagcgtggcttgagcttaccacccgtatcttgcggcagtgaggacgccgatcgttgccgaagacgaaggagagcccagtcgccgacctggtagctgaccgagcggtggtcgcggtcgtattgcagcttctgcgtagcctgtgcctgctcgaggcggtagcgtacatcggcgaggaactccgccctctcctccatggactttgcgactgcttgcaccctggtgtcgcccggctcataggatctgatcgagggtgggtcgcgcccgtacaccacgcggaacggagtgtcgcgcagggaggactggaacggtgtgttgaagaggtactcagcccaaggtagccacctgacccattggcgtggtcgatcccccgtcaaacaccg

SEQ ID NO: 189769 - DNA, 876 bp, Zea Mays
cacttcctcaccgacgataacgcggacacagtcttcgagcacgccgccttcctcgcgctctggctcacgcgcttcgtcctcccgggtcatccggagtccaccatgcgccaggccgtcttccccatcgccgtccgcctcgcgcgcggggaccgcgttgccctcgcgcccgccgtccttgcctcgatctaccgggacctccgcgagatcaaggccttcctcatcgccacgggcgccgccgccaccaccggcaacgccgatatgatctcctccttatccgtctactcgccactctacattcttcagctctggatgtgggagcgcttccctgccctcaggccagcaaaggtgaacccactcgttgatggcgatccgcttgccgctcggtggcatgatctgagcaggaagctgaacccggcgcagatacgtgaggccctcagcacaggatgcaactttgtgtggcagccttatgtcagctccatggagcacactgggtgggttcacagcagtgatctagccgaggatgatgaactggcatcgctcgcacaatttttgcacccctgtgagctcgtagggatggattgcattgagcagtacctcccgcaccgtgttgccagacagtttggactggaccaagatgtgcctgcagatgttcaccgtgccaaccaggattgggcgattgcttggcagacctaccagctggaaggtaagaatgtggctttcttcatccctcactctgagcctgggatcacaacacggtatgcacagtggtggaggcagcaacttctgccttctggcattgatgctgctacagcaagtgctccagtagagtggaagacttccaagcgcaaggtgaaaaagacaccagcggccatggaa

SEQ ID NO: 189770 - DNA, 352 bp, Zea Mays
gctggaacagacctatgcagtgcagtcccgggcaagaacagtcaacaccaggattgcattggccatgactcggaaaggtaactcgacaatttctgagtatgttacaaaaatgaaggcacttgcagatgagatggcatctgctcggaagcccattgatgaagaagaactagtctcctacatccttgcgggactagatgaagaatacaaccctgtggtctctgtccttgttgcacagaaggattttgtctcagttggggaggcatactcgcaactcctcaattttgagagcagaatggctttgctgtatggaggatcctagccatcggctaatgttgctgcccgtcatggtagt

SEQ ID NO: 189771 - DNA, 1344 bp, Zea Mays
ggaaaacaagtcctctgctgatgaggatcttggcagagggcctgccttgactgggaagaaaaggagggactgcaggggttctgcggatgaggacagaaacgtgacaaaaagggtgttgagatccgacgcaatgaagctgcgggctgaggctgaggcagcttgtgtggtagctgtggaggttagtaaaactgacagtttggagaggaaacgctgtgaggctattgtggaggctgagccttgtaatagcaggctgctgatggaagttacttgcaatggtgaggaagccaacgaattggttaacttggactccagtgacgtctcggaagagtcagctaggtgttctgagaataatatgggaatgcctagtgttcctgcaacagattcttctcaagataacggtttaggcacgcaaagtagccttgcagaatcagatattaagacaatgaagtcagatgagaagatgtctactgcaactctttcagagtgcaatgactccagagctggaatgaacagtttgagtgttgatgaggctcaagatgacaaagtgagacatgggccttgtcagggtgaggtcatagactcagcaatggctaatgatgctggcacaagtacaaatttaatcaaaatcagccctaccagcggatcagaatctgttaagcaggagaataatgtggttggtaccgaggaagtgatactccacagtagcgatacgaaagttgagaagcattctcacattgacgatgtttgtacagaaactgagatttctttgactgataatggaatatgcgcagtagataaccacaccgatctaactgggtgcactaagcaggaggagaggggcagccccatgaatgaagccaatgatgtttcatcacatgacattgtatttacaaggagaggtagaaaatcatgtgaggcaaagcagaggacatgtgaagaggaggcacggtttgagaagcgaatcacaaggtcagctacagttaggcagagagaagtttctgcgagctcacacaaaacttccacaaatgaggctgcactagaaggcagagggaggaagggagatattgttgctcactatacaaggaaagtaagcagtgcagtatctccaaaaggtcaccatgctgagctgggagactgtaataccagtatgccgaaacaaacagtgaaagaaacggtggttgatcgaagagactcaggtgtccctgagaatgataatcatgcgaatgtcacagagaataaggagtcagaaaatggaaaggagatcaatttgaagacccaaccacctgtgggaattgttaagaaaacatccggaggaggtgtttctgcggtggatcagaatgtctc

SEQ ID NO: 189772 - DNA, 281 bp, Zea Mays
gaaagatctgacagaaagggaaacaccaatggatagattaatttgtggagatgtgggctttggcaaaacagaagtcgcaatgcgtgctatattcattgttgtgtctgcaggatttcaagctatggttcttgctccaacaataatacttgctaagcaacattatgatgtaatgactgagcgctttgccaactatccagagatgaaggtcgcaatatttagtggtgctcaggtatgccatggcagaagttagtttagtccacaatgcaacacatttcatttcc

SEQ ID NO: 189773 - DNA, 456 bp, Zea Mays
tggagcagttcgcgcaggagaggatccccgcagctgagaagatgaaatggggacttgatgggtcactgggttctctgcaggacttcaatgcgccggattctctgcaggacttcattgtgcccggggatttgaaggcttgctgtgacttgtctcgtcggtatggggtgctcggcggttcgtcgccaagcgacagctctcgccgccctatccttaggccgtgcgacgaaaaggggaagtcaggtgtcttagcggtagaagaggatggctggtctgttgtgaagcctaagttctggtggcggaaaagttcaaattttcttggggatttcaagcagcaagatgtgatccgaggaaccgattttttcaagcaacagctcagaggtaaatgtttcaattgcctggcgtcagatcactttgcttacctctgttcggcacctgttcgctgctggcaatgcctac

SEQ ID NO: 189774 - DNA, 347 bp, Zea Mays
agacatgtctgttctcagactgaaggtttggtgccggtcacctgtgctgctgccggcggtggtggatctccttgctgaagagccgatggtctgtggagaggatgagagctgggttcctagcacgttggtgttccctgtttctgtggtggttcttcattctgatggaagttcaacttccggtgtggatcctcctgcgccatccccttcgggctttgtcgacgaagatagtgatcatgagcatcatatggaacggccggggcgccctgcgtcttctgttcgggttccaattcatttgcgtctgggtcagcgcagtcgttctgggctggtggatgatatgtctgttgtgg

SEQ ID NO: 189775 - DNA, 364 bp, Zea Mays
gccgtggctctgccgtgcgggtgaagctcgccagcgcgattacagccggtgaggctcatccgattgcggccggttggctataaattgagggcgagcgttgcttcttcaccgtatcccacctctcagctactaagtgcccgactcaagctcaccggaatagcctccgaacctgtttcctctctgttctaactccgccgcgaagaacatctccgtggccagccttccccgagtgagtacttacccaattgtttcatgttcttgcttacaattagtctcctattgcccccggtatcaaccaatcaaatttcggccgaagcctttcaccagaacgcgtgttgtcctgaagaacaccgccgtaacccac

SEQ ID NO: 189776 - DNA, 371 bp, Zea Mays
cataggaataaaaaaaaagaaaataaaaagtaaagcattgtacgctggtgggccgaaaccccttgttccggcctagctcagtctcacccactggccagcctttcaacccgtgcaacccatacttcacgtgcgtcacctacatgtgggacccgctctgtcagcctattcccctctcatcaatccgatcgaatccggcgggcgctctcgccattaccgcgggctcggttgcggcggccgagctcaacggctcacgcctatttctccggggggttgcgtcgcccgcgccccagtccatcctcactccgcatctggcataaccgaactgccgtgatccccgccgcgtgtggtgttgccgattagttcatcctctg

SEQ ID NO: 189777 - DNA, 275 bp, Zea Mays
gttttgcggagaagcttttctctcggttgcagaaatgcaatgagcgatttgaggtcatactcattttttgtacacgcataacgttgctaatgccttctttgaccttctctttggcaagaatcaagcatttaagcttcgagaaaatctttttcactgcaggtaaggatgatgatgctaaaagtaatcgcgaggaccattgggctgcatcacttggttttgttgaacttctacccgtatcttcaaagatacgttcaagtatgttatttaagatggta

SEQ ID NO: 189778 - DNA, 601 bp, Zea Mays
ctttttttgtctcacaaatttattaccgcacatacataagctcgaagtttgtgacgagcaggcataccgatctcagcgcctagtccctgcagtccggagatgaggacgttggagccgaagaggcgcttcatggtctcgcgcccgtagacggcgagctggcggctgtggaggtcctcatcgatctctggcgccctgccgcccatctccgcaaccaccttctccttgtcctgagcaactgcggcggcgcgaagggccttgttgtgcaagtcctggtcctcgccggcgtcgaccccccgcttccggggaagcatatagagtaggagtccgccgagtagcgcgagcacggcggccgcagcgaggaagtacgaggcggagggcgggggcagggggaggcgcgtcagatccaggtcgtgcggaggccgcgggtcgtggccgagcctgcgtggatcgggctacggtgaggccggaagcgatcgagagagatcaccttggaggagcctggattcgatggccggcgagcagacctctccgctctgcttcagctctggtctggcctaatagggttagtaatgggcccacttgtcagtgtcttgtgttttcc

SEQ ID NO: 189779 - DNA, 1010 bp, Zea Mays
gaggatctcactctggaggagctcaccatgacgaaccaacaaccttctccggccgtcgctctcgccgccaccactgagcccttgcagcagtccccgcagcgatccagattcaactccgtgggggctgccaacgggaacgccaactcgcaccaagcgtggcggtaataatagtggtggacgacaacaacagcagcaccgccccaacggtgggcagcagctgcaggacagtgcacagctgcaattcggtgccaaacctgcggcgcaccagctggtccctggccctctgtctacaatctgtggacagggaccatccacatgtggccaggcgcatgtcctcccttggcgccacctcgtcctcagcagcatgctttcatcgcccaacaacaccttctcctctaacaccaactgagggggttgacccatggctgcgcttgggttctatcaccccatggtcagcctgccctcctaggacacccatttgctagcctctgctttcagcacggagacgctgcagcagcgccgacctccgagtggtacttcgactcgggtgctacttcccacatgacttcttccaacaatgtttcacatacctcttccccgcgggcgactgaaccatctccaacatcagcaccaccgtcatcgcctccatcgtcgctacccaagggtgcaattgatgtccagttagtgaccaacttgcactcgatggcgacacgggccaagctcggcttttgcattccagccctgatccatgctttgcacctctcctcgatgcccaagacctatcatggtggccttgcttacccgagttggcgtgccaccatggaggagcatgctgctcttctggagaatcatacttgggacctcgtacctcgaccatctcatgccaacgtggtgacaggcaaacgggtcttcaagcacaaatttcatgcagacgggacactgaagcggtacaaggcgctttgggttcttcgaggttttacccagcacccaggtgtggatttctcagagac

SEQ ID NO: 189780 - DNA, 337 bp, Zea Mays
acattagatttctggacattattatgtagcccagaagcctcgccgaataggtgaagaatatccactatggttgctatatcttcggcagctggtcgcaagaagaggactacatcatcagcatacatagagactcggtgatgcacagatcttgtagcaaggggttgaagaagtcctgccccttcagctgcagtgaccattcgcccaagcacatccatgactagaatgaagagcatcggtgagagggggtcaccctgtcgtagtccttgacgatgaacaatatgtttgcccggaaacccatttactatcacttgagtggaagaggttgcaagcagcccac

SEQ ID NO: 189781 - DNA, 397 bp, Zea Mays
tcccgctcgcggactgggctcataagcgaatcgacagaatcagaagatccttcctttggaaatgggaagaaaacactaatggaggtcactgtttagtgaattggacaacgatcacaagaccaaaggacttgtgcgggttagggattccggagcttgataaatttggtagagtgttacgccttcgttggttgtggaaggaatgggtggatgataccaaaccatgggttggcatggataccccgacagacaacactgatcgagcacttttcactgcctcaacaaaggttgtcattggagatggccataaatgttgtttctggcatgacgcatggcttgatgaagaggagcacgccacttagcacctagtccctttgcgatgtccgggatgaaaaacgaa

SEQ ID NO: 189782 - DNA, 312 bp, Zea Mays
ccggagaggtgggctggaggtcggccatggggagaagcagcgccgtagaggaggcgcgctggggtggagggcaggaatcaggacctaggcggctgataccatgtgagagagttggaagcgtgtgtttgtatattgatgatgatagacagtacatgtacaagtatatataggggaggaaggtgagaggtaaaaggaagccatctacacctaaggaaagatctagaatacaatcagatcctcaatcatagtgattgagatcctcccctaatcctctctatctatatcagagacaacacttccatatagggcggc

SEQ ID NO: 189783 - DNA, 451 bp, Zea Mays
ggggcctgctggaggcaaatgatgtcgaccgtgctgctgcaggtgttgaggatttggatggtgctgctggtgcctgatatgaggtggtgttggggctggcagatagcagcagacgccgctcatacactcggccagatgcattgcccgttgaagtgtctctggcatttccatctccacatcagtgcgtaggggctcccccaatcctgttgtgtacatgttggtctgctgccgatgagtcatgtcgtcacagcggcataggattgtcaagaactgccgagtgtagtcttcgacggtgccggtgcgctgcaatgctttcaagtcagccatgccgttgaaacggagtggtggcccaaaacgcatctggaggaattctataaatcttgaccaagtgagtgcaccaccaatgtcacgctccagggcataaaaccactctgctgcgacgccttccaag

SEQ ID NO: 189784 - DNA, 292 bp, Zea Mays
cttgtacaaaagtccgaaaggcaacatcgaggtggagagatcttcatagttaccgaggaactccttgatagcgaccgaagcctaacgggtagtgccaccgcactcacgaatcacatcatgcatctcaacagtgacggtcccgatgatccacgaaagaaccacactatccatcaggcgttgggatgggatagtgaggaaaatggtgtcggtgaggacgtggtcatccaaggcgtagagctagagggcgaggaggacagggtcacgccagcgggtgtaggtggaggaagtcggg

SEQ ID NO: 189785 - DNA, 582 bp, Zea Mays
caaggtctttaaagactgtaattaactaacacagttatctaggaaatgcttaggaaataaggcttattaactacatttctccttatcgaggagtggaaggcccatctccttgggcacggccccgacaattacttccagcgcacgcctgtcatcgcgaaactggacagggccgccctcgatggcatcccagagatcgcgcgcctgcatcctcagcttcatggtctggctccactcgtagtagttcgtcttgtccagcatcggccacgacgtgccgctgccggagtcgcggtacaccacccttccttgcggcgactcgtagcgaccgccgccgcggcagcgcctccggtcccgcagtggtgactgcgagcgcctcctgtctcgcggtggagtccgcgtccgcctattcctctctgtctcctcttcctcctcccagtcctcctcatcttctcccttctcggcggcgatttcggcccgtagctcctgcgttgtccttgccgccgcttctgcagcagccgccgcctgctttgctgcctggactgccagcgctgctgcttcctctgcagccttcaagcgcgcggcccg

SEQ ID NO: 189786 - DNA, 759 bp, Zea Mays
gctgttgagcttgcatctggcctacattggtatttgaaatactggtgtggcgcacatatctcctgggacaagactgggggtgcccagctggcttcgattccttctcctggatctctgccacgggtgcagggcaagggagtcaagattgagcgtcctgttccgtggaattactatcagaatgtcgtcacttctagttgtgagtcctttcttgccttaaacatttgttttcataatctttgtttgattccaaatctattaatttcttgatttcttcagtgtcatcctccttgtcctttgtaacagtcagtacttactttctagatgtgtggcaagtataagggcatggtgtggtcttggaaatacgattcttgccatacattctattgatgcagtaacgatctactagtagtacatctgttgcaaatgaagaactaatgtttcagcatttgttctcctacaccctaatcgtacagatttcatcctatgacttttggctctgttgacctgtcccttccaacttctaacatttgtcctactggattttttataacttgtaattttgaaagaaacgactctgaagcttcccactatttatgtggattccaacattttctctatctgacaaaattcatttagcgttctatagactcttttgtgtggtgggactggaaaagatgggagaaagaaattgactggatggcgcttcaaggaattaacttgcctttagcatttactggacaggaatctatctggcagaag

SEQ ID NO: 189787 - DNA, 447 bp, Zea Mays
gaagctccaaggtgatgtggccatggccccgccggcgacgcgcccatccgagcagtgcatagcatggcgataccccatccgtggaccggtgcgggcgagctcgacagcagtggcatcaaatctcaccccccttcacccatgctccgttcttcagtgcttcagatggtgacccgtattagcctcacgtcgagaggaacccacacgcgatggcgacaatgaacttcgatggcagcggcacttagcggaagagaatggtatgcatgggagcctcagatgtacccccacgaggtctgctgcaggtggtgaggagaggaagtaggggcgcggtggagggagcacgccatgggaatccgggagggccagccaagccgcctaggccgggagcacccaccacggatgaacggcgccgcccagccatgggagaggttgttgggggtaggatcgaat

SEQ ID NO: 189788 - DNA, 898 bp, Zea Mays
catccgtgcactttttccggacagggaatgttttacacttgtgcgacctgtgaacaatgagaaagatctccaacgtcttgatcaacttcctgtaagtatttcttcctttgaactacagctgctatttgtggccttgtacttaaaattctcagcaaatatcatatgttgcaggttagattcaaacttttcctaagctcatttgcgcaaatagcaaagtacccacatacatattgttgtatatattttttgaccatgtattctgaacttctgattggattggactattttaaaaagtttggaaattttcttgaaggtagtgggttaaggtaccagtaagacaaatgaagcttttgtatgctgcagtgcaaactatattattttgtgcattttcccggtaactgtacatttttttatggtaataacatatacttacatggtaccagactaccagtccaataaggcagtctttgacacaacttcggtcactgatttgaattgtgatatttttgtaaaacctgtagattgctcttgaaacatatttacactttaaacagtttgatggcatttacaaattatgtctgtcccttcatgacgtgagccagaatcataatgcacgttctggcataattatattgttctagcagattgatgttggtgcaataattcctaatttcagattgatgttggtgcaataattcctaatttctgtgatgcagctgagtaatttccgtccagagttcagatccggtctggatgctttcacgaaatttgttcttgaccgaacaagaccaaaacaacttggagctactacaatgacaggtcccatccttgctggattgacacaatcgtttcttgatgctattaataatggtgctgtccctacaatctcttcatcatg

SEQ ID NO: 189789 - DNA, 717 bp, Zea Mays
cagaaaaaagaagaaaatcacgtaagtatgacctgaaacatcagcctaatatcgatgactatgcggcaatagataaccataacattggcttgatgtacttacgtcgcaacctaatggaagaattgattgatgacgttgacacttttgatgagaaagttgttggatcgtttgtgagaataagaattcctggtacagggcaaagacaggacatttatagacttgtacaaattgttggtaagggttgttttacttcttagttggtattgtttgtcttaactgcattatactaaaattttcttctattgtttccaggcactggaagatctgcagaaaaatataaatctgggaaaaggactactgatataacgctagtgatactaaacttagacaagcgggaggcagtaactattgacataatctcaaaccaggagttcactgaagtatttttcttctcagtttgaacttaatagttttactagtattacacagtttactaaaatctaatacttataaggttgtctttcacttcgaatactgttgactttaactgctgttggaagatccttgaccttgttacttgacttcatggatacaaacatgcacttcatcagtaaatttgctactctattttgttcaaatttcatgctttttctgatttgcaatggttttttcttttctaggaggagtgcaaacgcttgcgtcagagcataaagtatg

SEQ ID NO: 189790 - DNA, 330 bp, Zea Mays
gtcgaacagcgatttcgtgcctcccgaccgccacccattatttgaccatagagactggtaaggttgttttggcctcccgtgagctatagcacacgttttcatggccgagcgaccatttttatgctcgtgttcctccacacgtgtttttctccccggagcaccttaaagcggttcttggcctcccgcgagctatatcacacatttccgtggccaaacagccaattttatgtatccgacctgccaccttcgttttagaccggggaggccgttatggcatttttttgccacccatgagctatagcacacgattttatggaaacctagacccta

SEQ ID NO: 189791 - DNA, 675 bp, Zea Mays
aggctactgatgaggcaaagtacatgaaggatgcaattgctgatcgcatgaagctggtccaggaactccattctaaacttgatgaacgctcaattcaagacgttgaacaactgcaaagttttgaggatgatgtacagtttgccaagactgctgctatagctgcggacgacagtagaaaagcagctttccagctagcatttgacgaggatcagcaaattgttgcagtaagttgttacctcattttatggttttaccaaacataatgtttagatatttaatattccatataaattgatttatgtttcataacaggacaagtggattcatattctccgtgctctgagtgatgagagggggccatggtctgctgctccttttccaaataatattgtgacatactggaaacttgacaaaactgaagataaatggcggcgccgactgaagctcaagcggaactataagtttgatgagtgcctttgtcatccatcatccatcaaatctagtaacgataatgctgccccaactgttgacccatctgctaatgccaagataacagaaaaaatgaagcacttacttttgaaaggagtgcgtggaattacaggggatatcagttctgaatcatgtgaggatagcaacgacatgattgatcctccccagaatgtcccgccagagaac

SEQ ID NO: 189792 - DNA, 701 bp, Zea Mays
cgcccccggtacctctggttgacctcgcccccattcctccggctccgcttcgtgttctccggcctcgcccctgttcatccaaccttcggttctagcccctcgtgaaggtaggccagcctgggtatgtagaatttggatgtcagtttccttatattccacatcggttgcattcgacccgtgcataagggtgtgcaaccagttcattggaacatggccccaaattttactacattagctcatttaggattggaggcatactgttttatcacttgcagttcaatttttttccaagatattgattcacttcgtggctgcagtagcctacgtcattatgttcatgacgtttctccttttagtctttagatcacaatcactcacccaccctcaacaattcgtcaattcactgatgaacaatctgtaatcgccaaaagtcaggaggggctggccgaaagcaactatatagcatagagggtcagacagcagtagcaattaatcttctttcaattttagtccaattctataatctatgtttctattatttttatttcatatgatctatgatgaataagtataacttgaatagtgaatgtgtgcctggctgcatatatattgctctagtataccttctttagacatatttttatataatacctaggtcgaccgttgtatctaatggtcgttgatccggtgacctcccccac

SEQ ID NO: 189793 - DNA, 368 bp, Zea Mays
tggaggtcttgagctgatgcgcttggtgcagatgtgtccgtggtgccagtgggcagagttttcgaattccttggcactggagtatgagccggacgatcgacgaccgtgcgtgtggcttgaggttgatttcccatggaggagttcgaggtgtggctcaggcttgcagcgggttgcggcttttggcgtggcacagcgttggcgacggcgcagttcatgacggcttctttcgcttcctttcccagtttgtggtggtctagtgttttgttgagtgtgttgtttgcatggtggtggtgttcgcttcggcgtgttactctgtcgtcgttgtgctgagttggtatggtgtcggcgtgttgatgtcccaatccaac

SEQ ID NO: 189794 - DNA, 399 bp, Zea Mays
atactgagagtgaccttgatgtaaattctggagcctgggatttaaaaggaaacagtctaaagttaattgaacctggggaatctgtgaccgatgatcgtatattgggtgcccgcatgacaaaggccagccttgttcctccagttactaggaagtatgaagttatcgaggagtaccttattgtagcagatttggaggaagtacagcgaaaaatgagagttgctttacctgatgactattctgagaagttgctgtcacagaagaatggcaccgaaaacttggaacttccagaggttaaggattatcaaccccgaaaagtagcaggagatgaaattcttgagcaagaagtatatggcatagatccatacacacacaatctactgagtgacattatgcctgctg

SEQ ID NO: 189795 - DNA, 461 bp, Zea Mays
cctgtaaggcttcaaggtggaaggataaggaacccaattgcatactaacaaagaaggaaaggaagaaagcaactccttgcaaagtactacgatacttccctattaaagataggctcaaaagaatgtttatgtgtagagaaacagcacctctcctaagatggcatgatgaggagcgcatcaaggatggtttgctacgacatccagctgatgctccagtgtggaagaggtttgatgaaaagtttccacaatttgcatcagattctcgtaatattcgttttgcattggctactgatgggtttaatccatttgggaagatgagttctatgcatagttgttggcctgttgttttggtagtctataacctcccgccatggctttgcatgaaagatcacaatattatgttgtccttgatgattcctggtcctaaaagcccaggagatcgaattcatgtgttctttgag

SEQ ID NO: 189796 - DNA, 309 bp, Zea Mays
agacgatatagtaggtgacacgaatgatgacatggcaagtgatgtggataggtgacatggcaggtgatgtggaaaaatgacgtggcaggtgatggggaaaggtgacgtgtcagctgaactggcgagtgacacattttatagtaatgccaaaacacatgttaacaaaagtagaaacaataatatagccacgtttgtattgtgtgcctatgcatatcaatacgttatatagtaacgtcaaagtgtgtattaagacttgtagaaacgattttgtacatacatctatatttgtttgtaataatatagacacgt

SEQ ID NO: 189797 - DNA, 353 bp, Zea Mays
gccaaacaacacaacgaggtgggacggacgaccggctccctgacaatcaaacctacaagaggaatgggtcgacctgatactattaagccatgccaggtggacaagacgcgacatcaccaaaccatgtccgagccatgtgtatagtaccgagggggacctcagcatcggagtctccgcagcaacaacccacatgccagaagggacaggacaacacgccatacctactgtatgccaacgcatgctgaaaggtgacgcaatagccatgacggaagatgaagctgtactggacaagaccctcaacctcacctcatcgtgagcatgctctgcgggacccatcaggtaccgctacgttg

SEQ ID NO: 189798 - DNA, 288 bp, Zea Mays
gttacctcgtgccgtaccatcgtcacgatatgcggcggggatcgttttgcaaacgcaatagcactcatcatgctcacgctcacgctcctggtaaaggaaacgatggaaagttgctagtatatacactgctacaagaaattgctaatcccctgtcggaataaagcgatgccttgttttgattggagctcgccttttacagcgtcagcttagtgtgaaagaacagtctttgcatcgacttgcaacagtggtgtttcccgtgctccccagggaaggggccagcgacaggtg

SEQ ID NO: 189799 - DNA, 970 bp, Zea Mays
tgttgggattgggaactgtgtcttaagaatagacacaactaaagtgggtagaggaaaagactttactgtggaaggacctgtaaaatgtcatcttgaaaagcttattgatggtgtccgcttagttggtaagcatgatggtggtgtgactgatttgtccatatctcaatggatgagcacccgcctggcttccggatccaaggatggcacggtttgtacgaagcttactacttttgtcattgaatattttgcaaaactgcactctgttgatttgaatggtaccttaagtttactcaaagaatttatcacatgaatagtctattcattaggcactgtatatctgttctaaaagctcaaatgtgaatatgtatctttgtggttcaatcttattagactataacccctctttcatacgatttaggaatcttccagacactagccacttaaacagtatgtgctaccacatatgttaagatatactccaagacattattagtataatagaattgctgttgtattcttattcttatatattcatttttgtaccttggaacttcacgtccactcgaaaaggcagatagcagtacctgtgctttctgtatatgagtatatctgcaatgtattgcaaagctattgtattgggaagaaagcataacaagcacgacaattttttttaaacctgtccgtagatgtgtagcctttgttataccagaaaatctcccatgcagcgaggcttctgtagcaatcactgggaaaccataccagctgctggcttaaaacctgtaatcaagctaccaacagtcttatgtcttagctgcccaaaaaattccatgttagaaacaatattatctagagaagtgccatgcatctctactggccccttgtgatgttcattcatcttttgcaggttaaaatctgggatgatcgcaagcaagtgccattatctatttttaagccccatgatggtcaagcg

SEQ ID NO: 189800 - DNA, 381 bp, Zea Mays
gaacgaaacctgcaccaccggcaccgcggcgcgacgcgaaccagcaacccgacaggcgttgggagaagaggcctcgtgagtaggttcacgccgccggaccacccgtcgctcgtgcccgtaccaccccgtggaggcgagcggacactggacgacatcctcgacgcctagtgcccgtaccacaaggatatgcgccacaccttacggaactgtagggacttcaagcactccgtcgggaatggccgaccgttccaacctctaccacctcccccaccacgaggagagcctggtgagcccaagcagcctcagcaaccagaagggggagggggtggagcattcccacgcgttgacagggaggccaacgtcattttcggaggccacgga

SEQ ID NO: 189801 - DNA, 389 bp, Zea Mays
gacccatatatgtctgggtaattctaggaatagagaggatcttctgtataccaccacgatcaacaaagagtgcagcaaattttcgatgggcagccaatgcacaaattaatttaagaacatcagggagttgagcaaagtggtcacatccctcctggtctttcatgctcatttgcaataatgtgaggcaaacatcaacacctttttcatggagaacaggacccaaagcttcaacatactctcccaaaatctgtagacactggatgctatatttttctctaagttgtaagagctgtgatttgtcactgataacaaaattttccaaatcctggtcttcgctggtttgtacagcttcttccgctgcacgttcttcaccaacttgatttgtgctt

SEQ ID NO: 189802 - DNA, 984 bp, Zea Mays
ggcgaagcccgaggtagacttgtgtgtatcaggacaacttgcccaatcaacatcgtagtaaacctctagctcggtctgtgtacaaggtcggatcaacaagccgagacgtagagtgtcatgaacgtaacgaacgatgcgcttcagagcagctagatgaggctcacgaggatcatgcatatgaagacagatctgctgaactacataggcgatggcagacctggtgaagatgaggtaatggagagccctgccaggctatggaaatccacagggtcagccactggatcaccaacagtaccaggcaactttggattgacattaacgggggtggagcagggcttgcactcaaccatgtcgacacagtcgaggatgtcaatcatgtactggcgctgagacatgaacaatccatctgccatgtgttgaacctgcatccttaagaagtgatgaagtttgccgagatcctttatagagaattcttgctaaagcggggtgatggtgcgacagagaagaacaactgaagaagctgtcagaacaatgtcatcgacatataacattaggtacaccatatcatcgccgcgacgataaacgaatattgaggtgtcagacttcgcttcaacaaaaccaagtgagagcagaaatgaggcaaactgactgtaccaggctcggggtgtttgcttgataccgtataaggaccgattcagccgacagacaaaattcagatgagcaacatcagcaaaacccgacggttgtgagcagtatactgtctcaatagagtcccatgaggaaaagcgttcttgatgtcaagctgatgaatgggccagttgcgggacagagccaaggagaggactgtgcgcactgtagcaggcttcacaacaggactaaatgagacaattagggcgggttatagggagtagccatgcggacggaaacgtttccgctcccgccccgtcggaacccaccccttggcgctacctctcccgccgacgc

SEQ ID NO: 189803 - DNA, 547 bp, Zea Mays
gtcattgtcgatccgatttgggaatttatccttcacggtcttggtgttgagggcgcggtagtcaacgttgaaacgccatgacttgtccttcttgcgcacgagcgagacgggtgcggagaacatcaacatactgggtctgatgatgccttgccgaagcatgttgtcgcactcccgctccatctcgtccttcaacaactggcaactgctagtagcggtatggcctgacggcgataggcattgtgtccgacaagaggttgatgcagtggtcgaagtgttgtggcagaggcagaccggcgggctcggcaaatatgttcgcgaactctgtgagaattgcaggagattatcataggagagcgaacacccgtagtgaggcacgagaacgccatggtgaggcacgagaagccccagatgatcggtccgagggtgcaaagccacttgcacccgagtaccacctcgtaaccctctaaggtgatgacgaggaagtcaatgcggaacgactcgtcgttgatggagaacgcgagcgcagagcaggccccaaggcatggca

SEQ ID NO: 189804 - DNA, 417 bp, Zea Mays
gttcgggactatttcccttacataactgaaactgaaacaacaacgtttactgattgtgttaaatgccttatcacattcacaagtagtaaattcagcagtgatgccagtcttaatgccattgcatttcttcggttttgtgctgtcaaactcgctgaggaaggatttattagtcatgagaaggatactgaacagcaaccaagtaaaatagattcatcagatgggaacagcatggtgcataaggacgatcatgtttacttctgggttcctttgcttgctggtattttttttcacaaagttacacggatcttactggaaaatttagaaatgcttcatgttgtaacatattttatttgaatctctcttttccaggtctagctagattgacaacggactcaagaccaactatcagaaaaggtt

SEQ ID NO: 189805 - DNA, 351 bp, Zea Mays
cgtagaagtgttggccgtgttccccttttcttgatttgagttcccagagggctgatggaagttggatttattttgcttcgggtatgggcagtccttgatgaaatgtccagactttccacagttgaagcacccactggaagtactgggaagggcagggtaacgaataccaggggcactcgactgattggtaggagcaggggcagtagtgggacgaataaagacaggctgcttgaatggatatgacggtgggcgaggcaaggaatgattttgatttataggtcagatcaccaacctggttctcttttcaggcccttgatttgacctctcacccgcataaccctttgattttcc

SEQ ID NO: 189806 - DNA, 284 bp, Zea Mays
accattttctggcaacttcatgagagcagcagaaacaaactcgttattcacatgccatggaccacttgatggaaggaatagcttctgcagaatatcaattgttgttgattgttctgaagagacgtcatttcctagttggcaattgggagaacctgaactttctgtggcaccagcctccaaaagtccatttaaaaagtctgtttctaggtgaaagcatataccatccgaaaaataagatgtgcatgtgtatgaaggataaaatgaaaaaataagacacatctaaa

SEQ ID NO: 189807 - DNA, 657 bp, Zea Mays
cgataccgtctggattgttaaagatgggcctttcttatgcaatttccccctgatctgcttgatctttgcatcaaccctcgcagtgaaaccaatctttgtcttctgcctggccttcgaccgctccctcttccacatcgtctggtcttcaacatctttctttaggtacttgatctcttgaatcacatggtgatcaagtggattgcacgatctctggtaggatatgtgtatcaggtaggggatgttgcaggcagcagtcaccagaagcgtcgctgcccagtatatgggagctggcccaaggacttctaataggatctggtagttgtcgccagacctcaatgtcatcccataggcgaggatgaagagataccaagttgttatgctgccccatacaaagagatgttgaatccatgtgaaatggctcattgttagggcaatctgcatgttgacagcccagatgatgcaggtgaacatggtagttcccaccgcagcaatgtctgcagtctgccccccaacacggattgcctgatcatagaatatgcagagattgaggaagaatatggccagagaggagtagaggccattccccatccatccaaggatccggtaccaatcaaagaaaagattctttggcccttgctggtataatgctgggaactg

SEQ ID NO: 189808 - DNA, 678 bp, Zea Mays
gagtaaagtgtcccttggctttgaggctctggcacgcgctcaatatcttttgaggagaaaaccatctttggagaagatgcccattcttgaacaggtgtgatgttattacttctacatgaacaagttcttctgaatagtaaatacaaaatcatgccataacttattcattggtggtccagattgaagaatcacttgaagagcttgcgcctgcttgcacattggagcttctaagcttgcctcagacacttgaaaattctgaacgcaggcgaggtgctattgcagctctctgtgaactgcttagacagggccttgatgttgaatcatcttgtagagtccatgactggccttgtttcttgggtcaagcaatggacaaactattagccaatgaaattgtggatcttcttacttgggatactttggctacaactcgtaaaaataaaagatcgttggagtcccagagccagcgggttgtagttgacttcaattgcttttacatggcgatgcttgctcaccttgcatttggatttacaacccgccagactgagttggtaccctctttttctcactcgcttggcaacctgtagaagttgctatctctttgcattatttttaatttgttttacatctgtgcagatcaagaaagctaaaaccatctgtgaatgtttagttgcatctgag

SEQ ID NO: 189809 - DNA, 283 bp, Zea Mays
gcgtgatttagacacacacgattagagtaatactcctgccttggagcagtggctggtctttagacatatgtaccgttcagagaatgcaaacatatatataggcgcccagacccagccgccaagctccagctgcatgcaaaagctgaaaaaacaagacgccagctcagttctatatggtaagaccaactccagcagtctccgtataaggccgtgtatccatcaaatatacgcgcccgcgcactgttcacggctccagcaggtaccgcaaacagctccgcaaaaa

SEQ ID NO: 189810 - DNA, 898 bp, Zea Mays
ctctctctctcctccctgcctgccaagtcccaacacaaaaccctctcgtcgtccccaacaccgcttcgcctcgaccgcgatgatcacctcccacgcgcggaggtagccgccgagcagctcgccgccgtccatccagaggctcccgccgagggtttcctcgacgcggctcttgcgcgtctaccgtacgtaagtacgttggtcgcgtggttttcactcgagttcctgcggattggtgcgcgcgctacccgtgtggccgtgtccccgactccacatgagcgaggtgcggaaaccgctcctttctcgccttctccctcattactgctatcgcggaaggttctagctagctcgcgcccctctcatcctatgccttactgcgttgcgaggaactgacggtattgtccttcgtttgatccaacgtatatgagcccgtagcgtacgtctcaatttagtctgactgacgcatggctcacgtggttgtgttgtgctcggcgagagccgggcgtggacgcgtggttgccgccctaaaccatgggattgggacggggcttccgaatgttctcatctgataggtgcgcgattgtgctcgtaggttggtttgggtcgcgtactcgtgttattatgttatgcgaacgacgaggttcaagttgtagaagattctaccaacctggtagcgcctttttgttttttttttggtcggcagatgactgctgtgtacagttgctttattggtgtctcactgtctctgaccatgttgccagctttcccatgcgcgcgccaccaaaagctcggtgctggatttctgaatcttcaagcttgggctagctgcctagcttcaaaacggggcctctatttccgttggttggttgaattgcctgacgtgattcgtctcagcatcatc

SEQ ID NO: 189811 - DNA, 604 bp, Zea Mays
ggcgtcgccgtcaggatcggtgatgaccggagaggttggctggaggtcggccatggggagaagcagcgccgtagaggaggcgcgcgggggtggagggcaggaatcaggacctaggcggctgataccatgtgagatagttggaagcgtgtgtttgtatattgatgatgatagacagcacatgtacaggtatatataggggaggaaggtgagaggtaaaaggaagccttctacacctaaggaaagatctagagtacaatcagatcctcaatcatagtgattgagatcctcccctaatcctctctatctatatcagagacaatacttccatatagggcggccggcatatctgccaggcgtcagccaggatacagtttctaacaattaccaagagcccggctattgccagacacgtgtttgggggggcacaccctggaagacctacattggctctaaggtaggggtccatcattgccaaggaactagatctgcggggacggacctgtaaggttgtactagcaaccgacatgcataagaacgaccgaaacccagagccctagggctacagggcactccggtattcaagacactctcaaacttagagttc

SEQ ID NO: 189812 - DNA, 475 bp, Zea Mays
ccccattcctatcccatccccgaaaaaagagcagcgctctgcagaggattctgttccgttcttaatccagtcttcgccatccgtatctgaacttttgtgtcatcatccatgcggctgatactaacaattagtatagcactagtagtctagtataccacaactcatccaatacatcacccttctggagcttcagtcactgacggatgaaccccataatatcttgccatgacatctatcagcagccagccaggatctgttttccgtgcaaagtgcagatgcggtggggatgctgagaccacggcatcacgtgcaggagctcatgtattatgttgctcaagctaatcatgtgtactactaccatctgccaaccagagtacactgcctcagctaagcaacactgctaattaaggactatcacgtgaaagcgctctgctcgtaactcgaattactagattggttggcccctgtccctgtt

SEQ ID NO: 189813 - DNA, 553 bp, Zea Mays
ccgctcggcggggtgcggccgccctcgctcctcatccaaattatccaatccactcgattccgattggcaactacccttcaccccgcgcgcgcaaccgctagctcctgccgccaagcgcaaccggacgaccgccgccctccctacgccaggaggtgcccaggtgtaggtccttcgccggcgacgaacacccacaaggttcccttcctttgtgcatacggatgtaacggatctgagttctccaattcctacaagttaggagaataggagtagtaatttacaagcgtattattatgcctactactaatttgttttctctctctttgatttgattgattgacccaccgtacgtaacccaccatttccagagcaaccgcaagggcatgtgacaagctgccgcctgcctttgccgcaggcaatgtgctccgacatgtcgggtcagcgccaccaccacgcaaccaggtatttcgatcctcttctcttgcgttaagcttaatcaatccgcagcctcctctggcttggctcaggggttgcaaccaatccatctacttaaccg

SEQ ID NO: 189814 - DNA, 537 bp, Zea Mays
gaaccgtcatctctcattgtatcaatgcctgcctcctcatgcagctgcaagggatgtgttcctccctcctcggaacctccaaagttgcgcgctttcacttcctctcgagcagtatgtccaaaaggaatcgggaaagaacaggattccgccgcctaatctttgcccccttttgtgaaatgaaataggccgaactggcccctgtttgtccgcagactatgggccggtgccggttagcgaaccggtgaagtcccgggagctatctggcaacacaccaaaggcagcgcagagaagaaagcaaggagcgaagggggggcaaggatgcagctagagagatcacggagagaagataaaaaaaaggaacgcaggacgacaccctcggcgtggcgacaacctgtaactgttggtggcacccccccaacaccagaatcgctaccacacacgagagcaaagcaaacctagagctggggttgccggatcaatggcggaagcagctaggcgctgctccgggccgtaaaggaacgccccccaagaggcagc

SEQ ID NO: 189815 - DNA, 552 bp, Zea Mays
tatagctaactacatgtcatactgtcatgtgtcgcctgcatatagaaccttcattgcatccctgcagactgtgtccatcccgaaagattggagatgtgcaaaacagaatccaaggtggaaggaggctatggaagaagaattacatgctctcataaggaacaaaacatgggaacttgctatgctcccagaagggaagaaggctgtgggctgtaagtggatcttcactgtaaaacagacccctgagggaaagatagacaagtacaaagcaagactgatcgcaaaaggatacagtcaaacatatgggattgactatgatgagacttttgcaccagtggcaaagatgggcactgttagaactttgatctcatgtgcagttaattttggatggcccctttaccaactagatgtgaaaaatgcatttcttcatggtgacctacaggaagaggtctatatggaaattccacctgggtttgcgaatggacagactgttgggaaggtgtgcaaacttaagaagtcactctatggcctgaagcagtcaccacgtgcatggtt

SEQ ID NO: 189816 - DNA, 278 bp, Zea Mays
tcgaagtcctatttatacggcgagcaggatgaggcagtctttgctgccaggaacggatggctgctgttaaattaagtgacgccgagcaagaagctacttgtttagtccagtaaattgataagaccggtgaggcggtgactattttagcatctggtgatggtgagtatgcgaagctggtggataatatcttttgttgcctatgacaaatgggggctactcatattttaatcaattacacctagtcctcgctctcatatatgaatacagcagcaaactgg

SEQ ID NO: 189817 - DNA, 631 bp, Zea Mays
gagaatttataatcaaacctgatcagaaaagcttgacacacctggatgaccagcggttgtccaccccttggcaacagaaagctctgacgaagttgctgggattgcaatatcggatctgctacaaaaagggagcagaaaatcgggtggccgatgcattgtcgcgccgaccagacatagatcaagacacagccacattaaatcagttggttagctcgtcggtggtgcctaaatggttggaagaggttatgtagggttttgagaatgatgcccaagcccagaaaataattggagtgctagcaacaggggtgagttacctccgtatgagttgactgatggggtgatcagacataagggacgagtttggttggaccataatgtatcacttcaaacgaaggttatgcatgcactacatgatagtgctctggggggccattctggttttcctgtaacctacaggcgagccaaatccatcttcagctggccagggatgaaagagcagataaaggcctttgttcaatcgtgccatatcttgcagagtgcaaaacctgaccgtgccaagtatccagggctgctagttccactacctgtgccggaccactcctggcaaaccatcagcatggacttcataacg

SEQ ID NO: 189818 - DNA, 765 bp, Zea Mays
tctcttgtaaatatattgggtcttaagaggtagggtcaatcattctattttcttactgttgttaacttgactaaaactttatgtttttttttaccatgaagctgagttttaccagtgtttagcatatgcaccctgaagatcgtttgaactgttgattcgacttcatgacatcatcatcttattgaacctgagcagcatgacaggagagcaggttcaggccccttcaagtcctagggatggcgaggatgttgcaattaccattggccggcccaaggttttcttccatttcaacattttctgacacctgtttgaagattcctcactctccttttagaaaaagatgaaaattaagagttagcgactatatcgatcttaaagtttgttcggtgtatgtttctgtctctcgtgaagtttaggatgagaagttgactcgtttcaatacccttacattgttttctgcatgtgaatattcacttaatcagagatagctgggttgctcattttagttttgtttggaatgtcatttggttcatgcatgtctgatcttctgtggttgttaagttttaacttcactcattcttgttggttttagtgactagaagattctattccattttgacttatgaaattgtagaagtgatatacttatatcattgatgagtttactttattttttggacagcaaagtggacctaagttcggcaccatgatgggtgtctttgttccatgcttgcagaatatcttgggaatcatttattatatccg

SEQ ID NO: 189819 - DNA, 380 bp, Zea Mays
ccttgccactggaccaatagctggcgaatcccacgagccaggcgcccggctgtgaccactgctggcacgggcaccacagcgccgttgtgcgtggggggtaatgccgggggtgttgccggtggtgtgccgacgaacttcttgagcactccaacatggaacacatcatggaggcgggcccctggcggaagctcgagccggacagccacgacgttgatgatctccaggacgcgatacggtccaacgaaccgtggcttgagcttgccggtggaggtccgtggtagtgatgctgtcgggcgttaccggagtcgtagtagtgcccagtccccaacttggtactccaccggacggtggtgctgatcatagacacgcttttggaccgc

SEQ ID NO: 189820 - DNA, 450 bp, Zea Mays
gctggttctgcccccgtcttggttgcttgttttactattttccatggagccggtctgttttttggtgtggaatgtcaggggtctcaacagtcgtgctaagagagattctgtcaagtctgtggttgtaagccttaaacctgctgttgtttgtctccaggaaaccaaattggattctgtctcagattttaacattcttactattcttgggtccgggttcagtaattttgtttttaatcctgcccatgggtccagaggaggtattttaatcgcttggcgtgatggttcgtttgtctcagcggcctcagttatcaaaaacaattctgtttcagttcagttgcaaagtgcagatggtcctctttggtggttcactggggtatatggacctcatcaagacagtttgaaacctgcttttctccaagaattaagagatattagaaatacttgtgtggg

SEQ ID NO: 189821 - DNA, 494 bp, Zea Mays
gtcacatggcagcccggtgttggcatcgttttgatgagaactacgtcccagaagaacgccatgtcaacgctgccatcaccatgaacgcgtataatgtcgacaccaactggtacaccgacacgggagcaacagatcatatcacaagtgatctgaacaagttgacgatgagggagaagtatcatggaaatgaccagattcacactgcatctggttcaggtatggaaatcaaatatgttggtcatactactgttccaactcaactccgtaatttacatctaaacaatgttcttcacgtccctgaagctaaaaaaaatttagtctctgttcatcgccttgctaaagataactctgcctttgttgagtttcatcctgattttttccttatcaaggatcaggctacgaggaaaacgattcttaaggggccatgtcgtcgtggactgtatccccttcctgctgatcatcaagtcaagcaggcgaatgctgttgacaagcca

SEQ ID NO: 189822 - DNA, 545 bp, Zea Mays
taacaaataacaagttatctgagctggcatgcttggcattgtatctcatgtatgagaaaaaacaaggaaaggattcattttggtacccctacattaaggaacttgaccgacatcgaggaagggggcagctagctgttgaatcaccacttttatggactgaaagtgaactggattaccttactggaagccccttgaaggttagtggttttactatgttgcatctcaattctcaatataacattattgctttttgatattgaaggattacacgatattctgtaagaacattaatatcctaacatagctgatatatttgcaggatgaagttgttgctagagatgaggcaataaggagagagtataatgagcttgacacattgtggtttatggcaggttcactatttcaggtattccttgatctttcaagcatattttctttctaggattggctatatcatcaactgatcctctttctcacagcgatttttgttttcagcaatatccttttgacatacctactgaggcttttccgtttgaaatattcaa

SEQ ID NO: 189823 - DNA, 273 bp, Zea Mays
taaacatttgaatgctgagagttctctagaacagaatcaaccaagtacgttggaagtggctgcagtttcagtgaaatcatcccctatgacggaacaaaccaacactagcatttcacatttggcattggaaaccaccattatgggtgatgcatccatgcattctgtctcaactgttatcagctttgccccaggctcgtatgaaatgcagagtgaaggagtgctggctgaactagaagctggaaagactttgcagaaatcacaatcttctgcctc

SEQ ID NO: 189824 - DNA, 281 bp, Zea Mays
cataacgggttgggaggacgcgccggtggaggaaggctgaagcatgtagaggggccccgagctatcacagattcacagcggacgaggggggtcctggtggccagatccttcacagagaaaccaaaagggtcaaactcaatggaacaagaattggcgatggtgaaccgacgaacagaaagaagattgtgagtaatgtgaggagctacgagaacattgttgagatagaacggtccaaggagaaccgaggcacatactgaggtgtccggcagagtggaactgtt

SEQ ID NO: 189825 - DNA, 319 bp, Zea Mays
ctggtgcggattctggtgaaagcaaaggatcgtttctgcaagactctgaagctggagaaaaggatgtctaccttagccactcctgcatccacgacgagatactacatcaacggcgacgagctgggaggaaggagtactctgtcatgccacaagtgtaccatgagtctcgggaggatgcggagcgtgtaagaggacgacacttgttgggcatgtcatcttggcgtgctccgcacgagaatgccaggaagccaatacgaatatacctcaattatgatgccgtcgggcattcgcccgaccgtgattgtaaaaatgttggcga

SEQ ID NO: 189826 - DNA, 308 bp, Zea Mays
gtggaaaaaaggtgccttacaaccttaacctttgtttgtatagttcactcacgtaatttggctaaattttccaaggtcattattttattttgagaaacaatgtggcatattgatgtgttttgtttttcttgagtggacataaacaccgtctaggtatgccttgaatagaggggattataggaaacctgaaatcacaaaatgtcattcgctagcccaatgacgtcttcatccactagttgtactctaataccctcacgtgcaattacaatgcccttgacatcagggaaacgtcatttgtggtataaaag

SEQ ID NO: 189827 - DNA, 424 bp, Zea Mays
cccacaccgtcggctactccaccgtccgggctggttggttgggacgcgactgccctggctgccttccagactcccactctgactctaccgatgagtcctgagtggatcgcggacaccggtgctacctaccacaccactcctgaccctggtatactcacctctgttcgccctccttcttcctctctcccttcgtccatcatggtggcgaatggctcgtgtcttcctgtcacatctgtgggtgccgtcgaccctcccggctcttttcacattcccgatgttcttgtcgctccttctttggtccacaatcttctttctattcgtcggtttactgctgataattcttgttctgtcgagtttgactcttctggtcttactgtgaaggactcggcaactcggcgccccctcctcagatgtgacagcaccg

SEQ ID NO: 189828 - DNA, 289 bp, Zea Mays
tgttcatcatcaacacatgaatcacgtggaacctccattccatccgcaaaagggcaccacctgtgaagtatgcttcctccatgtctctacgacgtcacagttcaccgatatagtgatattttcacgatgggcctcccctccacggtgtgtgttagaattagccatatagccctagtgggccttataactgtagttgggctaggctcacccagtgctgcatatatgtagatataaattgtaccgcattgcctactaacgtagggtgttagttctatgctctgtatataat

SEQ ID NO: 189829 - DNA, 531 bp, Zea Mays
ggaaaggcaggaaagatatcaaaggaggtcactgcattgattggtgtaagaaaaaggagtttcctagagattcacattatatatgttgctatagctctactactactgctaccaagttgctctcctctcctctactactactagggtgtttggtatgacccgcttcactacaaaaatagatctattctaggtgtttagtatggctatatagcaaaacttcaagagggagctagtcacagccaatcaaacactcttaactacaattgtctgaaattcagatttaaactcctattcataatatgaaaattcagacacattggcagccccactttgaatcaccttttctccaagttcccttattgatggaaccagtatatcagactaacagtatatcctcggtcgacccccttattgatggaaccagctgtgcactaggtacctattaggatggatgtgttctgcaccggtgcgtctaacagagttgatgaagacgcgaccaaacttgaatggcagacaacgagcagctccggt

SEQ ID NO: 189830 - DNA, 958 bp, Zea Mays
ttgttggtgaagaaggcagacaatacatggcggttttgtatcgactatcgtgagttgaatgcaaaaacagtaaaagacaagtttccaatcccagtggttgatggacttctagatgagctacggggttcatgcttcttcaccaagcttgatcttcgcagtggatatcatcaagtccgaatgcatcccagcgacatccacaagacagctttccgaacacattgtggtatttcgagtttcttgtaatgccattcggccttaccaatgcaccatccactttccaggctctcatgaatggcatcttgaagcccttcattcggaagttcacactggttttcttcgacgacatcttgatatatagttcgtcctggacagaccacctgaggcatgtaaagcaggtgttccagttgctgagtgacaacaagctggttctcaagcgttccaaatgctccttcggtgaaccgacaatgtcatatcttggacatattgtatcagcacagggggtcgccatggatccatctaaagtggatgcagtggagtcatggccaataccgcgtacactcaaagctctccgcggttttcttggtcttacaggatattatcgcaagttcatagctggttatgggtctgttgcaagccctctcactgctcttctaaaaagggatgccttccaatggacagatgaggcagcagaggctttttgccagctgaaacaatcactattaacagcaccacttcttcagttacccgatttcaccaaaagattcttcattgactgtgatgcgtcgggctcaggatttggggcagttctacaccaaggggatggagccatagcatttttcagcaggcctgtgtctcgccatcatcagaaactgccagcctatgagagggaattgattgggttggtcaaagcagttcggcattggagaccatatgtatggggtcgaccattcacagtccg

SEQ ID NO: 189831 - DNA, 348 bp, Zea Mays
gtggtcgtcttcgcgtggacggagctagtaaacgagaattgttatcctcgccgattggggcgagtgtgggtgaaggggagctgcgaaatctttttgagagtgaggaattgaggataatgttgttcaactacagggagatgagtatcatcctgaaggttgagccaatgtaatatatgatgccctcgctgtgtgtatgtaatcgtgctttgtatgataaggctgcgcgccttcgttgatccggccgcgtccgtaggcgacttctgcacggcgagtttgttggaaaaggcttcgattttgcgcacttattgtgctattccggctccacccttaggtgacttttgcacggag

SEQ ID NO: 189832 - DNA, 620 bp, Zea Mays
gcctttttttttgtcaaatctccgagatatgtatgttctgcgctccatgtcgtgcaaaatcacatctgggtgaatgctctaccgctgccatttgtcaaatctccgagctgaagcatcatgctaccatgaagtttgtcagcaatgtgagagaaccaaccagtcccaagtgaatgcgtcggcccaatgtccgtgtgcaggccgaagtgagcctaaacgtgtgtgtggcgtagcgcctgcgtgcgcgaactggtgtggcgtctgtgtgtacataatgaacctgatacatatatcttgcctagggaaggaaacacattcactgaatattgaagaatagaactgcttcctgttgccttcgttctcctctctctgctaccttcgtcttcctctcattcttccctagatctctcctcttctccattccctagcagtagctaacaattggtatcagaggtttcgatcctcgacaattcgtcgccatggatccttcctcgaggacagattcggtgcttacgctggcactagcgaaccaaacgcgctccctgctcgccgagttggacacgcgcctccactccatcgacgccaagcgggagactcgggagagcgctctcgagtcccggtcg

SEQ ID NO: 189833 - DNA, 630 bp, Zea Mays
aatgaaaaggagtttcctcgtcaactacaaggtacgaatatttgtaaactatttttgtcaataccatgattgcttgcatattaatgttttatcttacatttgtaggtaagtactatagatgtgggttatcataatcgacctagatatctagctctatataaagggtggaagataccacttagggcgtgatggtgagcgcctaacaactatgttctggagtaggcagatgcagtgatgcattatcctaaaacgaaacttgcattcttattaggaggtcagactcatgagctgcctttttctgaaatagtaagtacatgcatcaatttgctttcaattacctcaatcttcttaatgtctcgacattcgttcatttgccccattaaccacgcattaatgctactaaaaacaacattaactggttactggctcacaaccgtgcgctcgcgtgaagatgtgtgaacaagcagcagcacaaagttagggaggaactaacttggttttgtttctacattggtacctggacttgtgaatccagcagaagcagttggagagtttggtaaatctactggcagagacaaacaggtaatgttgctatgcaccttcctctcagtctaataatagtgaaattca

SEQ ID NO: 189834 - DNA, 390 bp, Zea Mays
gcccttttccctgatcgagaatgtttcacactggtgcgcccattgaacaatgaaaatgaacttcaacgtcttgatcaaatccctgtaagctccattctcttgtattttcattatggaaacatgcatatcacagcaatgctattttcctcatttaacacatttccaatcggaaatgtttgaccagctcgagaaattgcgccctgaatttcaagctggactggacgaattaacaaggtttatttttgagaggacaaggcctaagcaagttgctggtacaatcatgacaggaccagtactagctggtattacacagtccttcctggatgcaataaacaatggagctgtgcctaccatttcatcttcttggcaggtattttgtcgcttgagcca

SEQ ID NO: 189835 - DNA, 303 bp, Zea Mays
cttcgcagtgggaggtccccgacaatggcagcacggaggatgaactccggtgaggttgtgccggcggatttaagcaacggccggtgctcccgagcggcgtacaccagattaaaccctccccgaacgattcccctaacttaattttacgattggtaagctatcacgccctgtccacgtgaaccgcgaacgatgaggacaatggtacgtgttcccggtgatccctggcggtccggttcaattaaagggttcgaggggtttgcggggtacctaaggaggctagaacaagcggcagagggacttgag

SEQ ID NO: 189836 - DNA, 321 bp, Zea Mays
tacctctatgtatgctcttataatcctcctctccatatgcaatacaacaacagttcacatgctctcatgatatcagaagtttgggtctcgatccatctcacccctccactaccttaggcgtgccctcccggctgtgcccctaccctgtgcccctctcttgcgtgcccgtccaggttgtgcccctcccctgcgtgcctgtctaggctgcgcctctcctctgcgcgccaccctaggccgcgtcctcccttgatgtgatggcaggctccactttcgccgaccctgctacccaagtcggttaggccgctgctaaagcttagcgcg

SEQ ID NO: 189837 - DNA, 1497 bp, Zea Mays
cagaggaggagacagactccccccgtcgccgccctcgcgcctcctccgcccgcagctcaagccgagcgtcaccccgtcggctaccttccattctcgccgcacttctcccactgggcacctcgcgccctcgtgacggtataaatagcccctagtcactcctcggcgctcctcaaacccaccaaaccctagcccacttagcggcggcggcgctagaggtggaacgagaccttggcggaggtagcgagggtagcgctgctcgctcgctcgttgggtttccatcccctactgcctagagcgagctctacgcgacgatgagcagccttgtcgagcggctgcgcgtgcggtcggagaggcggccgcggtacgcgctcgacgagtccgacgacgacctcccgctgcgcgttggggccggaaaggggaaggatcaacagaacgacgcgcccgccgagcggatcgagcgcgaggacgcggtatggctgatcggggtctcgcttctctttgcttgttgttgcgatttttactgaggctgggtagctattgtttttatggggggattgagcctattattgctaggatttctgctctgcatcgggagttatgttgctagatggctaaaactgttgcaaaacaggatgaaacagttgtgtaattccgtgtggagcaggggaatgcaggtgcctgactggtgttgggatgtttctaggaatatatggttagacgacatggttgcttgatgcttttagggagctgaattgtgaatctgggttctccccctctgttttcttgggtctgatttcaggtatgagatgctaagtctaggtacttactacttagtatgacgagactgggttaacatcgaaaaatgttaactttattgaaatttgtgcattctgaactgaggacctaagggtctgtggttttgaggttgacacatttggttggtatcatgctacctaaatttgaattcaaatggaagaatcagatgtgacacccatgtttgttaactggcttgacgtagctgtgtaaatactacgctacccatgttgtgcaggtgagttagtagttttctctatatatatgataggtggtccgctcaagcttgacctaggactcttgatgaaattatcataagagaggacattcaaatatttgaaattttatttgttaccagtttaccacttcactgtcggctctccagaacagtaagatagtgatcttatccttatcattttgaattctgggatatcttgctaaaaaactgaaccttgtcttctctatataccggagctctaaacgtctatgatgcaccatcctgaatttcaatctcctctagttcatgtgattttgtttttttaatcttgttttttctatctgcataatcctgtagctttagttggttcattcttattttatatgtgcagaaagaagaagcttgccagcgctgtggaaaaagtgataatctagtctcttgttcaacatgtacatacaaatttcaca

SEQ ID NO: 189838 - DNA, 902 bp, Zea Mays
gttgcattcacagattaagaacatccgtgatcaagcatatattttagttaaagctgctatggcaagttcgggtgcttttgatcataacttcacagagattgatgcatggttggttttcttgcctggttatgaggccaaatggtgtgtaagagagaacctaagaattggagcacctaataaattatcacacattgtgatcccttttctgtgtgatgctatttcggtagttggtaataacctgtataaataccaagagcacacacacaagcttatctctaaatcaggccagttggaaggtactactttctctgtgaatgtcaatagatcagtagttgctattttgtcaaattaatattaattgtatgtcaaatatctgctcaggctaagctgtccatgtttcatcatatcagatgtattgcctaatactcatgctgtagatcagtagtatgccaaatggaatgtcaacagtatgcagttgactaaaaaaaacttgccaaggtttgagagggtatagccttccatagttatcatctgaccatgttagcaacttatttgttcaaatgctctgtcatgttatgatttgtttaatttcagtcagttcttttccttttggacttggatttatgtacctcatcctaaaatcactccataacacttattataaacgctgtacatgttgcatttgttctttgactatgaatcactggctcatcttgttgatgcgtctcactcttttcacttctactacttgaatattgcctgatgagattcaacttcatctgtatctcagccttttctgttgtgctttgtaggccgttctccagatttcagccctctgattatttgtgttcttcagaaatgccttaggctactcgacacagcatctagaagtacaaagttac

SEQ ID NO: 189839 - DNA, 429 bp, Zea Mays
cttttacaccatacgagacagattaccatgcacttttcaccatatttatcactgtttcaacaacaacgactcggacaacacctccatccggtatgctcaggtacgcgtacgagcccccaacccaggcttcggctctctgctcggtcaagatgcgagatacaggggccagacgtcctccccctggttcaagtcaaccatcagtacaaaggccattccgtcgcccataccggctacagggctcggattcgtctcccactcttgaatacaacaagcttgggcgcttcagggaaccctccttgaggctataaaaggagtctagggcttccaaggggaggaggagaacacttcaccagttttcatcctccacgaccgatattggcacctgcctcaatcaccaccagggacttgggatccactctctctcccggc

SEQ ID NO: 189840 - DNA, 393 bp, Zea Mays
gtctctctgaaaaaaaatcaatcatgtgttgtgcaaattcaagtaaagcagtttgaaggcggagggtagctatccaccatcctcggcaaaagtgatggcaaaacaattgcctcggccatattcccaaaccttacccccaaaatattagccatatcccacattccccattgaaaagacgtgaatggcatgggacacatgactgaagggaggtctgatgatggtccgcctagcttcaagaggtcatgaggaagtgctaacctttgatacgcagacaatacgaggaagctgaagtacaagtgaaaatcgtgttgaagattcgagaagtgatgctaaacataccctttagtggcaccgttgctggctatcatataacttggtgacctaaaggaaagc

SEQ ID NO: 189841 - DNA, 330 bp, Zea Mays
atctggggttaaacctgacagcattattggacttggtgttctttcagcttgttgccatgcaggtttggtgttgaagggccttaatacatacagctccatggtaaatgatcacggggttcatccaactgaggagatgtgtgcctgtatggttgatttactgggccgatctgggaatgtttaccatgccttggattttgtgaagtcaatgagtgtggagccaggctctagtgtctggggagcacttctggatgcctctgttaagtacgacaacaaagaaatccaagatctggcttccaggtctcttcttagattggaacaagggaaaccatc

SEQ ID NO: 189842 - DNA, 636 bp, Zea Mays
ttttgctcaaaagttatgtttgtaatgttggatcgattcacaagtgttttgacatacgagtttgagttgttgtgacacataataataatagcttgacatgtgggggtgttgtagattcttttgtgggaaggcattatgctaggcgccaaatttagtttgttaagaagtactaaaagttaggcaataattaaggaggcttatcctcccgggagagttattttatcccctagaaaatctgtaatatggttaggcacctaagctataaaggtggccttagattgtactaggagattatcaaagaagttgtgcctgtgggtgcggctgcttgatcaccctggcagaacctacgccatctggtgatcttagctcccagccgccacacaggataccctattccctgcgttcttctactcaatccaccttgatatcccacccttcgtggtgcactcctccccgccctgcgcatcgtagccgggttcacaacaatttggtatcagattccaaagctgcagcgacatccatgtccggcagcgacgaagatcctgggaagatgactgactccgagaagctggaccgtattttgggacagctggccacaatgaacaaccgcctggacgcccacgctcaacggctcgc

SEQ ID NO: 189843 - DNA, 410 bp, Zea Mays
agttagggaacaaaccaacacgttccatctcatcccgtatcacataggcctcctcaacccttccagccatgcaaagcataccaatgatgatgttatatgtagaggaatttggctctgcatcctttttcattgcctcaaacaagatcagtgcttgatcaacttcacacttcttcccaaggcaagtgagaatcgaattaaatgacacaacagatggaatacaacccctatcctttaactgatcaagaagcttataggcattctcaaactggcctgctgacccataacccatgatcattgtattatacgcatacgcacaaggcacagctctttctgtctccatctgaccaaacagctcctcagcctcacttagcttccctgccttgcacaacacccaaatcatgctcgtgtac

SEQ ID NO: 189844 - DNA, 369 bp, Zea Mays
gtggggctggatttggtcgggtttagttcctggatgttgccggtgggtgaccactggtgtgcaggcagcgcagccgtcacaagccatggtgttggatatgttggtgctgggaggaagaactgtcacagggcatgcttgaagaatggtgtggtctgctctttcgacgatagtggtgtcagggtgtctatgctgtgttcatctcttccatctgaagatgtaagtttcagcagcaaaatgtcattagttaattcaacaggctttgcacagaagaagaaagggagtaaggtatggcgaagatcccagggtggtaagaaattggtaaggcatagagctccgaagcatggcctgggaaaggacagacatggtcac

SEQ ID NO: 189845 - DNA, 377 bp, Zea Mays
gggagaggaagaaggagcgagaggcagtgttgtcgaactctcggccattgtcacaccgaagggcacgaaccgggcgacaaaactgggtggagacctaggcaaagaagtgggtaagggtggagaaggtatcagactaggcgcaaaggaaaggtccaaagaaagtgagagaagccatcaagaatgaccagatagtatttgtaaccagaaaggctgaggacaagagaggtccagagatcacaatgaacaagatcaaaggcctgagcagccctggacgtggaagtggaaaaagaaagacgagagtgacggccgagctggcaggcatgtcagagatgcctagaggaaccccgactagaagagatagcggagcagctggagag

SEQ ID NO: 189846 - DNA, 598 bp, Zea Mays
gcccatgtacaatcaagtatggcctacaaccaccatctgtgtcaaaccgcggaacaacatggagaactattgaatccaagatgaggggtctgctaataggaggccattctgaaccacctccttgtcttgttatatagtgcagatatctcaaatgtgaaggctggggattcaagggaaagaactgctgtataaagtccctgcgagcctgcttgtagaccatttctagtgtcctctgctcgccagtatatattttgcgatacaaaagcagtccggccaacatgaatgcaagcactggccaaccccctctctcgcaatgcatcaaaagcatgttatgttgtccttccactgatagccaattttcacatgatttcaagaaatggtggatcatctcgagctgaagcaacggacatccttcatactgttgtgggtagtccattactgtcatgtcatactcagataaaatatctgatatccggcttcttttgtccccagaccaaaaattggatgccataagtgatgtgtccggaaaaaattcctgcaattgcgcgacaatgccactcaagtaatcccgatactcatcctcacccatggaatcagt

SEQ ID NO: 189847 - DNA, 317 bp, Zea Mays
gttgtagacgaagatctgcatttagattcttctcatgattcagatcttgcttcagttcttcaacctgtgaccatgggtcatacccatctgagagccgtttccctgagccatttgaatcatggatcatcttctttgcccctctcagtccttcatattctcttctgagtgcatccctctcctccctgaggctactcatctccttggagagatcttgcccacgccgactctccttcacaatttgctttcggagagtctgcaactccatatctgagacatccaatttcctggttaaagtggctatttcacttcttagcttc

SEQ ID NO: 189848 - DNA, 318 bp, Zea Mays
aagtccaccaacggaaaggctcccaaggcatgcctgatagaaggtttcaggccctgacgaaactggctcgccttctccatctcattaaaagccacatgagggacaaagcggaccatcttgttgaagcccacttcatactctgtgacagacttcttctcttgcttgaaagactgcaaatcaatcttcattttctccaggaaggtgaccgggtagaacctcctttcaaactgcctgatgaagacatcccaagtcaggactcctggtgaggaggagtgcgctgcctgcacgcctctccaccaaatttgagcctctcccttc

SEQ ID NO: 189849 - DNA, 819 bp, Zea Mays
cgaaaatgaagcgaaaataactacagaaaggacacccccagtatccataggtgatgctaagacagtcaaggtgcatacacttcctggagctacttgtggagttaacttgcagtgcatggttgaagcagagaacattcaacaagagaaatacaaagaaaccaatgggagattgattgctgaaaatactatttcagagcagaagtgtgaagatagatctaattccagtcgttcaaattcatgtgctactccggtgactgtggatcaatgttctcatttatctaatgagattgggaaaggtgacaactgtttatctagtgaagtttctgttggagctgctcccataacaggcaaaactgaatctagtttgacatctgttcattgcgctaaccaagaggatgagaaagcttacgcagcccctgtggacactaaaatacctttagtcattatggatgaaaagcctgataagcatgagtttaaaactatggttgtagggtgtagtcaaggctcaatggaacctaaaagtttggaaaatagaactagtattgtaaatggaacctcaatggacgcctatagagataaaatacctaatgaagatcacagtgcttctgcagttgacactggagtatctgtgaagctatatgctcagcaaatggagacgattgaggaaaaaactggctcagttttaccagattcggaacactcttctagttgcaaagatgtgttggtgaccttgactgagtcaaagccacttaaaaatgacattcttgaaatggatgatgcagttattaaggtaggaatgactggtcagagtttcaatga

SEQ ID NO: 189850 - DNA, 473 bp, Zea Mays
tccttggaaatacatcttatgatagtactttggttaatgatgttttctgcattcttgagtctgaggagcagaatagtgatgctgaatttgtagtgaaggacttggaacgaattgatgccgaggtttattctcctatatacacatcctataccttcctagtgattcgttttggatggttgtttaggcaatctatgatattgtaatccgagttcttacttggcattttcattctgctcgcatgatagttaaactgaaagctatctgtccctcatctttctctttgacatgttattcttattgtttttcacacccatctaattatctgaaattcatgtccatccaggtcaggctcattaaatgcactattggaaatattatagttgatatctcattcaaccaaactggtgggatctgcgcactctgcttccttgagctggtgattaacacattttattttgtggaaatcatatttc

SEQ ID NO: 189851 - DNA, 356 bp, Zea Mays
caggaatgcgaattcagtccaaagaaattatgggagaagaaacgatgttattagaccaactaaatctgtatgcatggtgtctgtaccagagctctctaacgtcaacatactgggcacgaaggatctctgaattctgccttctaagcctgcatggtgcaaccttcatttgactctctgagtggcaaagtagactacattagcatacgtatagggtggcacgtagaccaatgaacgacggccacaatctaaaagacactccatcccatgagggagttattataccagtcggggaggataccgcattaccattgctatcaaatgatcaactacgtttatctctactatagtcaggtgcc

SEQ ID NO: 189852 - DNA, 393 bp, Zea Mays
ctttcacactcatctccctgctccgcaatggtgaacaaatctgggtccctgcctttctgatgtgttcatcccacagtgagcgaatttgggccgttacttttgctgatatattatgttcctgtataaagtcgccatctttattcgattccgaataatgccgcgcacacctcggtagattttcctcgtggaattcccgcaaacacgacgtcacaaaagtcgctattgccatccatctttgttggaacgggacagaaaccatgttcttctccgccggagttgtggccttcgcgtctagtctaatcggccctctctctggtgggtttgaacagttcagatgcgtgatgccgcccgcacttgcagcgccacaacctcggcggatggcagccacctggg

SEQ ID NO: 189853 - DNA, 333 bp, Zea Mays
gtcctatcgtctccccacccatgattgtcatcagcatgctcgccagtcctggcttcagcctccttccggtggctctataggggtgcctcccttgactctcttctcatactccatgtcttcgccacccctcctactcccgtcgattgggttgtcgactctggtgccttgttccacaccactcctggcccctcgagttgtctctttacaccatccccatagccccacctttccttcctccatcattgtcggtaatgggtcgactcatgtctgtcacctcagcaggtgacatagtcctttctggtcctttatacctcaacaacatccttgttgccc

SEQ ID NO: 189854 - DNA, 384 bp, Zea Mays
ggaagagcgagagaagagacatacagtcggtagttgggcaccttaacgaacatgggaccaagcttctggccggtgaggagacaaggatgagcaatcctccatttgtcctagctgtggactgtggttccgggcagacggcgcaaaatcaacgctgcatgtggactggaggacaaggggatgcgtctgcgggaacttactgtggggcgtgcagggaagaagcggaaagcaggacatgttgcctgattttcttctctccttattccatctctcccgaccccctcttcccgcgtgttttccttctgcatgtcccacgtgatttccttcccacatggcaggcgctgcacccgcgtgggagttttgctgctggggcccagacctttttcc

SEQ ID NO: 189855 - DNA, 337 bp, Zea Mays
ccggtgctacggtgacgatgatttttccaccctagaatatgttctacgctgactcaacctacgggctgtgcatgaccgtcatgaagacgactgatgtgggagtccaaatattggggaatcgggcgactaggtccttcggaactaccttcaacattcaaggcatgatatttggcttttgatattcaacatgttgattacgtgcgcttttacgtgagtattcaactctcatctattttgtttgaatgatttttctagttcattttcctggtaacagagaatatcattagtcttggtttgttttatcactcgcaggtgaacagacttgactcgatgcgct

SEQ ID NO: 189856 - DNA, 619 bp, Zea Mays
gcagagcgaagtctaatgatcctagatggaactatggatattggatagagattgggaatcgagataaggtcacatgcaacctttgcaagaccgtgacaatgggaggaatcaagaggttaaaagaacatcttgctggtggttatgcggacacattaatgtgttctaagactacaactgagattagaaaagaagtgaaggcatatttggacaagaacaagaggactaggcctactttccttgatgatgatgatcatgatggtcaggggcagcaaggcgaagaggattccaccacatctatgcaacaacctagctcggggacaactgccaaaaggaagagagctgcatttcagtttagaacaactgcacagccacagacatcaaacaaggaaaagaaaaagggaaaattgcaaccatgcttcgaagaactactgaacaagttgtggatgagaggcgctcctcagggtcacaccaccaaaccaccatggaagcatgcactaagtctaaggctgacaaagattatgtcaacaagcaatgagctatgtagttctatgagtgtggtgtaccttttaatgccattaattctagacagtttcacattgcttgtgaggccactgctcaa

SEQ ID NO: 189857 - DNA, 1386 bp, Zea Mays
gagggagagtaaagtagcgcgccgcagccgcagcggaggaaaggcaagggcggcgagggaacacgcggttgcttgcggaaacccgctcgactcggtctctccgcccgcgagttgggttgatcggagggtttgatgacgggggcgcgggagccggtggccatggagataccagcggaggaagggccagcggcggcgagggcgccgccgcggcggattaggaggaggctggtggagggggcgcgcggcggtggggcgccggcgagcgtggaggagatcgaggccaggcttagggaggccgagctccggaggcaggtacgtgtccctttcgtcctgtttccttcttcccgccgcgtgctagtttggtttacgttgcttcttgcttgctcgtagttgccagttgggttgcttcggcgtgaactgtgaagtcgaaataattcgtagcggtcacgataattacttgatcgctttttactggtgcggtgaggcgaggccagggtagttgttctccgcccgtttctgaagctgttctttttttttttctggatttctcctgcgatttcattggccattaattccaaattggagttccttttggcgagacaaaacctgttttactcttttcatgtgcgaatttgttggcaagtaagggtgtaggaacgaggaattgggaggtgcagactgcagagtgtgtggattgtggaaggtttgggaaaattggatgagcaccgttaaaggatctctggtttagaaaatactactgaaagatttagttgtagaaaactagcacctgaaggttgctccgttgtttcgttttaccatccacgttgacttgtccggaaaaaaattggttggagcaacacaagcaccgaccgcgtggattggcttagaagtaacttgacacacatgtacctctgcaaaatttggtgaccaaaaacatggttggagctttttgttgcttaatgtgaattgtgatttgctagtcgatgttttgttaaatttgctctaaaccgtttaatgaggagtctcttgatgggtctctaggggcctaagttaaaaaaattaagcccgtctcttcacggactttcgtagtctttcgtagtccgatggttcttgtcgtagtccaatggttcttgagagttgtcgtgtttactgtttgtttgattcattttgggagtaaagtgtcataggaaacaactattggagtcgaattggactgattgcagtataggataacttgttgacttttcgaatgttgtttttcagcaattccgtgaatggttggcctgcaaagcaaggaagaagccacggagcccgtcgtggtcctctcaagaagaagaccatgggcagcgccttgaagcgaagcttctggctgctgagcataaaagg

SEQ ID NO: 189858 - DNA, 813 bp, Zea Mays
cagatgaagaaaagttttgacatgagtgaccttgggctgtttacctactatttgggtttagaggtgaagcagaaaccaggggaaatcactgtgtgtcagagtgcttatgctgaaaagattgttgagatctcaggaatgaaaggttgtaaccctgctgacacaccaatggaacagcatatcaagctgttgccgggcaagtcagagctggtagctaatgcaacaaagtacaggagcctagttgggagtttgagatatctggtgaactcaaggcctgatctagcttattctgtgggcatgattagcagattcatggagacaccgaactcagaacattggggggcaatgaagagaatcattagatatgttgcaggtaccaccaagcttggttgcaagtatgtcaaaggagcactttcagacttggttggtttcactgacagtgatcacgcaggtgatctggagaagaggaagagtacatcaggggtgttgttcttctatggtggcaatgcagtttcttggagttcacagaagcaaaaggtggtgtctttatcatcttgtgaatctgagtacatagctgcagctacaggagcctgtcagggagtgtggcttagcagattggtggcagacataacctgtagtgacgtgaagaagttcaagcttttcatcgacaacaggtctgccgaggagctgagtaagaatccagtgtttcatgagagatcaaagcacatagataccaggtaccactacatcagggaatgtgtggctgatggggtgctggaggtgcagcatgtaagcactgaagatcagctcgccgac

SEQ ID NO: 189859 - DNA, 979 bp, Zea Mays
gtacatgaattattcaaaattgtaaatgggtatgaatcctgaactttggtttggggaacagcaccatatcctgaagttgcccctgttttgctttgaaaacaaaattcaggagtcgtgcgatcattcgatttacttgaagtctgggcagaagaaaagctagaaagattacatccaaatacatatacttctggtggatcggtagcagtttcatctttcctgctatgatgtggaattctgcatcctatacctaactttgtcatcttctctgggagagcacctgcacactccactgtactgtgagctgaactacaggtgtcagtattttcatcattgacaaaattcccaccgtcatccatggctatgcttgcagagtgcgaaacagagcttcgggtttcatttctttcaaatagaaaggtctctgttggacaattagaattatcaccttccaagctctgtgacatgactctgtctcctgcattcaaatctggtgtcttctctggtggcaaacaataagtgccattagcggaattagaaacgttgctatttgctgtagagaaaaaatcactgcttgaactagaagtattgctatttgcagagaggaattcactgctcctatctgatgtgctgccagtttccttcccaaaaacagcgcctgggattcctccacttccaaacgtaaacactttgggttgataaccacttttcgtctcatgcaagggcatgtcacttcctatacacaaccgtgttatcttttccagaggaaaatctgcatcacaaacacatttagcaacagtggaagaactggtattggcaccagagtcaacattgtttatattatccacatgaccacttaatgtggtacttcgaaacgtgaaagcttctggtgctccattagtacgatcaatccccccacccctggaaggtgcttgactgcctatattgaactgcatcgacttcccagccataccttttgcatcag

SEQ ID NO: 189860 - DNA, 349 bp, Zea Mays
tgctgttatggatccaaagaaaatttttgtttggaatgtcgggggccttaactcggcatcaagacagagctctgttcgttcttttgttgaagcttgtggagctgatattgtttgtcttcaagagaccaaaatgcagaacctttctaggggaaatgtgatgttcatcttgggggctgattttgagcagtttctgtccttacttctaggggcgccagtggtggaattctccttgcctggaaacaacatcttcaagtgactgggctgagtagagttgattcctatagtatatctgtgcaatttcagaaatctaatgggccatcctggtggttgaccggtgtttatggaccac

SEQ ID NO: 189861 - DNA, 291 bp, Zea Mays
ctggtgagtaatggcagagaccgtcctctagctgttcagcctgattaatccaaatctaccatcttaatttgctgaaggaagaaggattgagttatataagtttgcaagacgaattgttagtctttgtgcttcatcatccggttgtgagcgaaattggagcaagtttgaatttgtaagttaactaacatgatcatattacactatgcaatttgtagttgttactcctttatttattgttgtttgcaacttgtagatgcataccaagaaaaggaacaggctagagcacaaaag

SEQ ID NO: 189862 - DNA, 286 bp, Zea Mays
gtgagcggtggccaagaatttatagaagattgggaacgagtccgtgcagcgatgttcgtggatctgcgaacgaaaccccagaatttcggcgagccacaagcggagctgttacggctgggtaggcgacgagaggttgttgtagcccgtcgagcttgaggagaaagagaagatgacaaccgaggcccacacgtaagtgaaccggtggggtaatgggattgctggcaaggaatggccatggtacagcgactgcgtatggggacggagggtagaatctggcgagtggggc

SEQ ID NO: 189863 - DNA, 354 bp, Zea Mays
cacgaagcctacgacaggggagatgccgccgccccacaaggacagcggtagccctgtacttgttccatccaagcctgaagtggggaagaccgaaggcgagatgaagacggcggcggtggacgtcaagaagccggtgtcagggcaggaagaacagaagccagcggcgaagaagaagccgagccggaaatacagctctggcgctccaaggagggagatggaagacggcgaaaggagcaagggcggccgtgttgaaattgaaacccaagtggggaaggcgacaccacagctggaaggggagcgacctatgcgaaagaagctccagaaggcgatcaggttggttcagctcctcatgtc

SEQ ID NO: 189864 - DNA, 333 bp, Zea Mays
aaacgcgatccccaaatgacctgaatgaacagggcacttcttcgacgagtgtttcacattacgctggaatcccgtcaagtgacattgttgttgtttctgaattccagcgtccaagcaataaaaatgaggatgtcgaggatataactgtcattccaaataaagagaatgataaggatatcaatgctatgcccgttattccagataaagggaatgtcgttgatggcaaccatatcctcgccattccttgcgccatgttgagtaatctagctagatggtgtatccgttcgttccgatcttaattgttcctttatgtctcctatccctttttactcc

SEQ ID NO: 189865 - DNA, 446 bp, Zea Mays
gtcttttttacaaattacaattgtgcccctgaggtattattactgccttttcccttttttcacacttattgcaccttcgtccgagatttctcctctgacgaagctggttacttcgatccgcattcttgttgtttgtgcgcatagatgaagcttctcttctcgtagcttcggccaacagacaacttcactctaccattatcgtacacctgaaatagccgaagacctgtttcgtctgactttcattgtacacctgaaacacacttaatatgtaatacagatattttgaggatcttcaacaatgtaggcctccaacactactcagaccacctaaccaactcatctagatgccttttcgctttagaggagttaacattgtaggttgaactaaaaaggaatagattatccgtgtgaatttgcccccagatatttagtactatataacttta

SEQ ID NO: 189866 - DNA, 420 bp, Zea Mays
cgaggctcgcaagttgtttgacgaaatgcccgcaaaggatgttgttgcgtggactgccatgctgtctgggtactgccaggttggccgggttgatgaggcgcgcactctatttgatgaaatgccaaagaggaatgttgtgtcgtggacagctatggtctctggctacgctcagaatgggcaggtgaaccttgcccggaagctgttcgaggtgatgcctgagcgaaatgaggtgtcgtggactgcaatgctatttgggtatatacaggctggccgcatagaggatgctgaggagctgtttaatgcaatgccagatcacccattggctgcctgcaatgggatgattgttgggtttgggcagcaggggatggtggatgctgccaagtcagtctttgacaggatgtgtgagagagatgatggaac

SEQ ID NO: 189867 - DNA, 438 bp, Zea Mays
gtgaagaagaagttcaagttcgttcacggggacgacataaggatcgtcctaatccccgagaactgcagcctgttgcaggtgatggacatcgcccggtacaagtacaacccgcacctcaagtcgttccttctcaagttcatggacaaggagggggacctggtgaccatcacctccaccgaagatctgaggtgggtggaggacctctacccgcaggtgcccgtccggctgcacatcaaggaggtgagccccgagcgggagatcaccagggacctggtgatgccccagcagctgtcctgtctccctgagcgagagccgaacctgaaccactacagcgcccacactacctccgacgagtacgagtgcgggagctcgaggagggacgacgagcggagtcaccctccttgcgccaccgacgagtggatggtgcagttcgctcgc

SEQ ID NO: 189868 - DNA, 346 bp, Zea Mays
ctgcgctcgacgcaggagctcttcacgcgcgcacctcgcctttccttctcctgttgttggggacggtgcggccgcacgcgcggtggttctccacggacccgtggacgtcgacgcgcacatggacgatccctggaagcacagggggaatacggcgaggtgcacaacggtgaaccagatcaccgggagcaggagagtgggtgctagggatggagatggccaccatcaccgtcgacatggaaactagagttgtccctccacttgccgcatggatcctctctgcctttagttcctcacctcttctctctctttgcaggtctgcgaggtagtaccatcgacgaggcttctc

SEQ ID NO: 189869 - DNA, 764 bp, Zea Mays
agccgcagctccaacaatctggtatcagagatgccaggcaacgacgacaacaccagcgatgtcgcatctgctgccgtgaccaattccaccaacgcagcgctagagcaaaagatcgacaccatgacgaaggcaagtcgatctcaccaccgccatcactcaaatgatcagtaggccaccaacaccaccaccgcccccaacgtccaccagccctaccatatggcatgccaggttacggcgggatacctcccttgtcaaaccccaccgcgccacccataccatcaccgccgatcaccaccacagccgctccactcccatccacctcaactaaccttccaccgccaacctcagccttgttgccacccacatctaccatgcccatacccatccatcagatacccttcccacactccccatcaccaatcccaggcttttccgaaccccaccataccgcttacccaccgcagcaaaaccctcccaaccagcaccaccacaaccttccttttcccacattcgacggcaaagaggatcttgttggttggttgtcccgctgtgagagcttcttctacaatcaagggacgccgaaggtggataaagtctggatggccacgtactatctcacgggcgctgcacagttgtggtctgtcatgctacggcgcgacaagcccacactacactggccgcgcttcaagacgttgtgccagcaacgttttgggcctcctccgcacacgaacacgttgggcgaggtggcacgcctgccgttccgc

SEQ ID NO: 189870 - DNA, 300 bp, Zea Mays
gtgggcttgaagccccgcacacgcgttggtgatgctcgtcgtggacgtcggcaccgggtgcggccccgcagtagggctggtggtatgatggccgggccaagcaacgacttcgaccagcttagcgccatggtcaccgtgctgctcaaccttgtcaacctacccctccggtgaggtgtggggctgccagacgcctcctgtgaggctgtgacatagctggatacttagtagtggatcaataatgtactctgcaattgattaccttggttttgttgcatcgcgtacacctaactatcaatcatt

SEQ ID NO: 189871 - DNA, 287 bp, Zea Mays
cagcgtgttgcctctacgttcttccgagccatagatgagcagcaaggtactccctatattttccgcggggacgcacaagcttctgctgggactcctgaaataaaagaaccacgtgatgaaccatctgaagatagtgaccaggaggagcttgacaggttcatctcagagatagaaactgcagcagagaagcaatgggaggaagaagaggctgcagagaaagaagaatcttcaagaatgcgatattgggagagggaagatgtaggtgaccggagggatttcaatagaag

SEQ ID NO: 189872 - DNA, 770 bp, Zea Mays
gcagttgatgccctcaaggctattaggggcagcttgatagatccacacggaaatcttagcagctggaaccgaggagatccatgcatgggaaattggtcccatgttatctgttacaatgcaacaggcagtgatggatacttccatgtaaaagaattgtatgagcataagcgatctctttgtcaatcaagtgcttgttatattccacactacaccttaacatttggttatgagttacttttggtgatgagtgactaaacctgaacttagttttgttataaatttgtttactgccttagtaggccaaaagtttgcacctggatcttttttccaacatttttgggaagataaaaattgattacctattaactgctatcacacattctctctccaaagcagaaatatgttggagcattcattatactcttcctgatttgcattgttggaaaatagacaatattttgtttggaacataatgtgttaatactattctgttatgactgaagttagctatttttacaatcagatgtaattactgtgattctgtgcacttgtttcacttgaccacatcttccatccaccagtttcctctcaaaagcataggagagcaacatgtcatttcaataaagaagagaataatttacaaccgcaaaaaagcccaccccaccccacccgccagttaattccatagctattaaagcatttacgtgtataacacaaatttgattgcagacagctcctaagtttgaatctatctggaattttggctcctg

SEQ ID NO: 189873 - DNA, 544 bp, Zea Mays
accaaatggtgcaagaagctgctttaactgctttagcatcagcagcagattcttctcaggtagatcaggaaatacagttcaatccttcttgttaacatagtaatctaacataaattttcaatcttatttattcaggaacacttccaaaaatattatgatgcagtaatgccatacctcaaggctattctcatgaatgcaactgataaatccaacagaatgttgcgtgccaaatccatggaatgcatcagtttagttggtatggcagttgggaaacaaaagtttaaggatgatgctaagcaggtaatggtttgctagttccccttatattacagtatacagtcgagtccataactctttccgtctataaaagtgttaaaacattattttttgtggcctttgtactcaataaacgaaatcaaattgggttgtaggatgttatatgctatctgttctgtatctgttaatgctattgataattcattttggtgttaggtgatggaggtccttatgacactgcaaggatctcagatggaggctgatgacc

SEQ ID NO: 189874 - DNA, 1700 bp, Zea Mays
gagaaggaaaagagcagcgcaagaatatctgctacagtttctggcctttctgatgacaaattgcggggtctatctactggcagtgaagggtgggaaaaaaagatgaagcgtaagcgctctgttggaacaatgctcagcagaggcagtgatgtggatcgagatgtcaaatccgcgggccagcatagaccagccaatgaagtacgcccacggtctagtgatggccttgggtataggtaaaaaacttgtccttgccattaatttttgttccttgggttaaacttagctaatttctggtttccaactccctgaaatgattgtctgattcatcatcatgctgaactaaaacatgtaatcttgcgaaaaactaaacactgataagatatatgtggtatgttcacaaattgatatcatctgataccatgaaatacagatacaagggtccaacatatcgagtagaatgatactactgtatacatgcatcatcagaaaggtggtgtttggcagcttgtgtttctagctcttgcttggactattctttgatcaacacgtcttttttgtcatttgcaacctgaatctgcttccagcactatatttggagatcttctttgcctgggtatccatgttagagctcatctttcttaattctcacattgcagacatggagtttcggccggagcactagtaggtaacaagttggatggcacttctcagcagaataacattgtatcccgcattctgtccaagtcagatgccgattatgtggctcagccaaatgaaagaagagaacgtcatcctggagttgaaaaagaaaggaccacattaaaaggaaacaagtaagctaagatacttctgttgtcctgataattcacgttttttccttgttgtatacatatatgtgaaagagtattgcaagattgccatttatttgatgatatgcaatttgttaactagggcaaattcttctgatgatatgcaaaacgtaagcttaaacccattgcccaaggctaaagcatgcagggcaccaagaactagttcacttgctatgaactcgtcttctaatttccaacgttcaactggaggaagtgatgagtgggaagaaacaccttacccaaataaagcctcgcctttgggaggcatgacaaatcgcaaacgttccacacattcaaatgcttcctcacctcctattgcctgggttgggcaacgcccacagaagatgtcaaggacaagaagagcaaatgttgtttctccagtgtcaaattttgatgaagcgttatctgaaggatcaccacttgacactgccactagatcggcacctatagagtctggcagtgtcttgctgacaaagaacacatcaacaaccaaaatggataacatctcatctcctgctgggttgtcagaaagtgagggatcggctgtgaatgaaagcaagtccaaggagaaagccatgcatagtggtgaagtcgggaacgagggtgcaaatgcagcccataatgcaatgggattgatattttcatcaaataaaaataggattcctttgaaagaggagcttgaagatggcagtattcgtcgtcaagggaggagtggaaggggagctatgcatgtcaaggggtgttctcccataccaaaagaaaaactggacactgcagaaacaagaaagccaacaaaaggtggaagacctggatctgaaaagaacgagaggt

SEQ ID NO: 189875 - DNA, 739 bp, Zea Mays
cccggctatagagttcagtttctctccccactttccccatttttaccgcacctctctctttctctctcctccggtcctccctcaaccccagcagcttcgtctcccctcccctctccccagaaatcggaactagatagatagatcagccctatctttgcctcctcccggacgactcggcgcaaggtcgcagcttttctctcgatctttcgcgcttcctctttttgacgcttgctccgcatggggttcctggagatctttggggcggttcgctgctgagatggttcgccgcatcacgcgctgctgtgactctcaacaggtgggcttccgtagactttccactttcttactccgatctactgtacggagcagccggggagtagtattcactaaccttctctgccggctgagagcgtgagctcggtggaggagtcctgatctagccaaagattggatttttgtggggttgattcgaggtgttttttttcttgcgcgatttggtggtgtgggcttccttcctttcattttcgtagcatctatctttatattccttccgatttcgtgtcacttctagtccatatctcgcactagtgatgacttgcttgactagtttcttgactggtttcctctgtttatcatcgtcgcttcagttcttccgatccgacgagccccggtgatggacggcacgccgatctctgcgtcctctacggcaggcgtcgacgttggcgcggtggcgaccggc

SEQ ID NO: 189876 - DNA, 1186 bp, Zea Mays
atcttccaaagctgttgaagtgtggtacacttgagcaccttcggctggtttagtgtagggtgatctcacaccagatgtcaactctctcaatttctgctccaacaggagtcccaaaaattttccatctatgacatcaagtttagtgtttgatgtattgcttgaagttgacacagtgttctgattccctaatatttgtttttccactgaatgattggggaagtgggtgccatgtagtgacttatgaactggcgaggtaaatgtgaatgaaacaatctcagtgctgactttctttttgtttgttgaaaaagatgactgctcatcaatcacaatattgtgccgaatccgcctctggctcctgtcagaattaatactatcacttgactggcttgtatcagagtacactcttctgtcttgtaatcttcttggcttcgggattgctttggatacagaattatttcttacatttgcacgagcatctggctgcaagtccacctttctgctaccttgactactgcttccagcaaatgtgttggcagccctcgcttttcttggatgggcatttatttggtgaatattgctccgttgcctactgggggttgctgggtttgagtgcactttatgtttggtgactgtagcattctgttttctgctgtttggcacaagcacactagacgaacttgtgcccagttggttactatccttttgtctgttcagcccacttctttcagcattgctattttcagggttcttgtgggtttcaagctttttaccaaattttctcatcccccctttttcctgggcatgcatagctcgagcagtatctaatctattgccgggtttgacctttggagcaactggagcacatccatttgcctgtgagatcctggaagacgaggtgccctccgaacctctcaaccttccatctgaaggttttccacttggcggcctaaaagacgcagagccatcacgtttcctcagtgcttcattaagcttctgtgacctttgttggactcctatgagctctcctgggttgtaggcacgtgcagcatttgtgttcccaacatcgtgaactctgtaagaactgatattttctactccaggtctgatgatccttgatgctgcttccattatatcagctgcattcctgctggatatatggttagggtttttcatgggagacagcaac

SEQ ID NO: 189877 - DNA, 284 bp, Zea Mays
gctggtacctgcagaggtccgcttcaatcttcggcaggccaacattctttgagaaagtcctaacaaccttggcctcggttcgattccaaaggcatcttagcttcccttcattgactccgccaaacagcagagcccctggtttgtacccacaggatacaacatatttctttagctcttctttttcagtttctgataactcttgtcccagtatatcttgaaaattgaagtgttcctcttccaaagtatcttcaatttgctcttttccttcctcaattgtcgtgtcc

SEQ ID NO: 189878 - DNA, 2267 bp, Zea Mays
cccggtccattcccggcctttgcaaattcgctctatcgccccgcggaatttcgagctggatgacgggatgagtttctctttcatcggccacgtattttgtttttcgaaagaaagcgactggggctagtctctctctggcgttttgctgacttttccgaccaataattcagagcagacaaaaaggggtttcggtaccaagaacgaggagtcgaggaccgtatgcgagtggtggtggtcgcctggtcggagcagttgttggcgttgactaaccggggactaactaactaacctcgtcgtgaatgaatctgcagacatctcgcagatactgcaggaggctcagaaccggtggctgcggcccaccgagatctgcgagatactgtccaactacaagctcttctccatcgccgccgagccgcccaacatgccgaggagtacggtttctctccctatgttttttgtgctctctttaggtgcatgctgtggcttctgaacactggcctcataaatatgcttattaaattccattagcaatcgtgatgtatttatgctgtgggctatggaagagttgttgtctgctggcagcttggcatgggcatttcggctgtgtatatttctttggagtagctagtgatacagcttatggtaaatttttcgcttgctttgcgggctcgacaggtcttcctctgcttgctatgaagccatcgaaaacatgttctcattctgaaacagaaatctggcacaacttgatgtgttgggggatctggtgggtaaattttatggtaaatagtttgtgattttcgctaggcaacacaaccacatggcggttttcctttcgagtcattgctgatgatacgtcagccacgcccagtgtcctctttcattagttttttaagaagaaacgtagttttgtttcggttagcacaaatagtacaacagttacattatagccctacagtttgattgctcgatttggtcaaagctattcttatagtagtattagctctacagtttgattgcttcatttggtcaaagctattcttatagttcggaatgctggccctctcattggcactgattctcattacttaacttccatctgatcgcaataggtggctctctttttctatttgatcgcaaagtactgaggtacttcagaaaggatggacacaactggagaaagaaaaaagatggcaagactgtcaaagaagctcatgagaaactgaaagtgagtaactattttattttgaaagaaaatcaatatctcgaatgctgcgcaaaaaagtttaactgtggatgctggaatgttctgtatcattttgggcatttgctacttgttattgtgcattctgtaacttctgtagcggtagtgataaatattttttgtgtgtatactgcctatccagtatagatggtgtccatgcttgtggagttttttttaaacaacttgcatatcgcaccgctatccatactcatagagctgttaacaatttccatcttatgctgccacattcaatttagaccttagcaatgagcattgcattgggggagaagctgttgcatgcagatgggaagtgttgcataccttaggctggggcataattccatcatctcactgactgagcatgttacctgttaactgatacttacatgaaagatgtgtttatgtcaaatttactgcaagcttaagtcctacttaattatctggtagtagtatagattgagtcctatttctttagtgccttcacttgttctctaaagcttgttattataggctggcagcattgatgtactccattgctactatgcccatggagaggagaacgaaaactttcaaaggcgaacatattggctgttggaagagtaagtgctgactgttgcattcatgtcattccacactcatttgggtggtagactggtagttaactcatactcagaggaaaagtgtgactgatatgactttcttatttttcagggatttcactcatattgttcttgtacattacctagaagtcaaggtacattcttttcatagtcgattaaccttctctctcatctttcccctttttgtgtatttccttgttgggtgacttgtcactggaaaatggcttgtgggagatcttatttgatgagtacacatcggatttatcacctgtgctaggaaatacgtctaaaacacctatattcaccagctgtagtaacaaatatatctgaaataccacatgagctaatgctcgctcacatacttgtgacatcactgacatgtacca

SEQ ID NO: 189879 - DNA, 336 bp, Zea Mays
cccgttctttgcacaagaaaaatgatagcccagaaacatcaacctcctaatcacgcatcgccttttcggcgacaaaagcaagagcatattttgtgaaaacgaaaggagaagctagcactgcgaattggtggacaaacagaccaaacgaccgggttggaatggacggacagcgatggcagcttgtccgcagcttggctctgggcaaatattgcctcgcatgcctaaagaatatgtattatgagtatgaatttacgactgactcagccttaaactccaagcgacaagctctgcaaaggggcaattgtatactgcgctgttcgcttcctgcccaagcca

SEQ ID NO: 189880 - DNA, 459 bp, Zea Mays
aggttggggtaacacgcacacctaaaaacgcaaagatggtcataggagggagtggtgccaaaaagagcaaagcggggtgtgggggcgctaatcgtcgtagtagggagttgattaaggaggtgagtagcagtgtgaatgctcttagcccagtaacaagtaggaacaaatgcctaaaagagcaaagagcgcaatatgttgtcgctagtgcgaatcatgcactcagtcttgtccttctaagaagtataggggtatgacatctggagctagacatcatgaggggaggaaaagaactggaaggagttatcaaactcacagtccttgtcatactagacggtcttaatagtacaaccgaactgagtggaaacccaagcgaataagtgcagaagagataaaagtatcagacttggaacgcaaggaaaaagtccacgaataatgagagcaatcatcaagaaccaccag

SEQ ID NO: 189881 - DNA, 1008 bp, Zea Mays
ctccaggttcgactaaaagagttggacctattgttagaccgactacacccaaatcctctgtccccactatcagtgcatttgatagaattgaagattcagatgacgaggaggatcttgtcccagatgccaagaatgatactgcttacttgaccccaaatggtgctattgtaagtatcagatccctatgcttactctaaacaagtgataccaatctgtctgctagttccactagatctgtatctatcaattgcatgtattctttgacttgaggatcttcacattttgagctttgtttagctaaatgcaatctgactcaaaatctttgccattccaggaggttcaactcagtgtttgctgtttaggccttagcctatgttacaccggttatcaagtagagtttcttagtctatgttgcaacgcaagtgacttatatactgatcaattaatacacatatattcatgtgagcagtgagcatgtttagttgtgtttgtagatacgaatcatggtaccatctgtctatcctgggttggtatacagctgcaatagtatgattggattgttgccaagttagtaactatcgaccattgaaaagagttacactgttcatttggaaaaaaaactagtttaaactgcttatgacattataaatggaaatttattctgttttctgtagatgttgtctcactgaaatatgaaatgttttttatgtgctgtgtaaactttgttgtgcattttctcatgtgctgcagtccaacaatttttttttcaatgtaggggcaatattccattttccttgcaaatgtatcctacttactggtattatatactaacagtggcttctttcatttttgttctttctctcagggatcagatctcacagataaagcgagccagaatggggaattaacatcagcaccatcaacgcagatgattagatcccatagtgcaactggcagcctgcatgtaccccagcttaacccaatagcagctgatatacttcgaaagga

SEQ ID NO: 189882 - DNA, 628 bp, Zea Mays
tgcccacattcgcttgtattcattgctagtgcattgcaagccgacaaggcctggtgaggtgattaggaaaatcataatcccatgttaggacctcatcatttaaagtaaacttcgtcagacgagttagcttcgtcaagttgttaaaaacatccaaatggccagagtgcgatcaactgcaagggtatctcgtgaaggagaagggaccgatgtcactgagacaacgccaattttagaagtcatgtaacgatcaggactagttgtgacagagggagctattgacgaaggtactcatgatgctgaagctgaacatgctgttgctgaagaagaaaatgttgatgaagttgagacgattacagtattctgatccccacaaaacccaaccatctagattttgagaaatctactatgtccgaagacgacatgcccatgatgatgaagcttgtctactttggggaaactgaaagaaaaattgtccgatttgccggagaagagactactcctgcaccgaagaatgaagaagtagtggtttttaagagcttcttcagagcaggactgcgatttcctctgaacgagatgataggggaggtgctaaagaattttgaaatatatcttcatcagctgactccta

SEQ ID NO: 189883 - DNA, 1779 bp, Zea Mays
gccgtgttgcgggagttggagtggaatttaatctccttgacctgggaggtagaactaccaggaaagtcatgagatccttgcatattatctccgagaatgagggaattagtcaggaagccttggatgaatatactcagcttttcaagcgccccctgacccgtagtgaggtggaggctcttgctgccctatttgggtggagagccccctgagttggttccccttcaataagggtgttgttttctggttggtgatgtaaactgtgtttcttaatggatccatccaaaattcttatttggaatgtgcgaggtctcaattctcgtgctcgtcaagattctgttagagaattagctctgtccgttaaggctgagttggtatgtttgcaggaaactaagatgcaatctattgctagaagcaccttaatttctgttttgggtgctgaattttctgaatatgtcttcttgccttcgattggagccagtggaggaattctggtggcctggaaaaatcatttgagattcacaggtgcgagcagagttgataatcacagtgtctccattcagttccataagcaagaaggaggtacctggtggttaacctgtgtatatggtccccaaggggatgatgagaagatctcttttctgcaggagctaagaaatgtaagagagggctgcaatggtccttgggttgttgctggggatttcaacttaatctacaaagcctctgacaagaacaacaacaatttcagcagagctatgatgggaaggtttaggcgatttatcaatgatctcgaccttaaagaaattcctctccatggtcggcgttttacttggtcaaatcaacaactggagcctgttctggtcaggttggacagagtcctatgctcagttgactgggagtttctcttccctgatgtgctgctgcaaagttctgcttcccaagactctgatcattgcccattaattctgggtcttcgagataataaatcagggagtcgacgttttcattttgaggctttttggcctaaattggagggatttcatgatactgtacgcgatgcctgggactcagttggaacaacgaattgtcctttcctcactcttcactataaactgaagaagacagccaggaggttgcaagcttggagtgataggcaggttggtcacattagatctcaactagctttggcaaaagaaatttctcataagctggaaattgctcaggatgaaagggtgttgactccggatgaattttggctgaaaggcaagcttaaaaaacattctttgcttttatcctccctgaagcgtactatggctaggatgagatcaaggattttgtggctcaaggatggtgatgccaacacaaaattcttccacctgcatgccaaacaccgtaagagaaagaattttattgctacgttggttgatggggatgatatccttactagccatagggacaaggctgcagcagtggatggtttcttttcaaatttaattggttcatgctgggacagagagcaagcagtggatttggaggcccttggcctttctcagcatgatttggctgcgcttgaggctccctgttcggaaagggaaatatgggaaaccattaagcttttaccttctgataaagctccggggccggatggatttactggctgtttttataagtcctgctggaccgttatcaaatctgatatcatggctgctattcaagctatctggaataataactttgttaattttgacaagttgaattctgcttacattaccttgatcccaa

SEQ ID NO: 189884 - DNA, 485 bp, Zea Mays
aataaatcaacagataactcatatcaccaggcaggaatctctacgccttcaactccatcaatggattatggggttttgaattatactgaagaatataatcttgaatctgtgctggtgaattttctaggtgaaatatatagttgtcacaatgaatgcccacacagtgattgcaagaacaagaatgaattgtgtccttcactgaagtccctaatccataaaaaggtcaatgaattgaataatcttccccacaatattggccgtgggcaatctcaagagggcagtgatgctaagccatctgaccaaaataatctttataacaccatggcagcccaatccaaacaattcaaggatgcattggaaatactgggttcgaacagtgaactttttgtgaagctgcttcagaagccaaatcaacatatagctgatagtatccaacagcatgaaaacagtaaggtgtctgctggattagagcctgacaaaattca

SEQ ID NO: 189885 - DNA, 342 bp, Zea Mays
ggtgtgaaaggtgtcgggcttgagctacagaggaaaaatctagagaaaacgagagaaatcatgaaaacgagagaaatcatccaggatgaccagatagtattggtaaccggagatgcttggaacaaggggtgtccaaaggtcacagtggatgaggtcgaaggggagcttgggacatagaagagaagggtaagcgagtatgacgcccgagctgatagagatgacaaagcgaggtggagttaccgtatgggcaaggaatggccgatagtcgagagaggacgtcgtggtcgaggtggccaagacaacggtgccaagtggaggtaggggtagtggaggcaagggcgt

SEQ ID NO: 189886 - DNA, 478 bp, Zea Mays
ctcgaccgttgttgagcccccgtcgcgtcgttgcctcggtgaggtccgcctcgccgtcagcaactcgggacacccctcgatttgcccttagcccatcttgttcgcccggtccacgctcaccggagtgtttccctgtgcagccagagtccatcgccttcaacccaaggcttccccacgtccccgccgtcgcccaagcgctcctatgttcgcactcaaggtgagcaaccttcctatgcacttatttcgtccgttactgccctagtgtccgcacaattcatcgccagagttgatccacgccaccgttagaccgcctcgccgtgttccgcgccctctggtgcctctgtgcctgtattgcacccacgactgagtttgccagatcgccctgagcatgcctgagcccttccctaaacccctagagctctgtcgtggtcgttcctcttgtctccggcgacctcaccgccgaggagcaagagcggcg

SEQ ID NO: 189887 - DNA, 852 bp, Zea Mays
gtgatgtgtcagacaaggatgcaaaaaacttggagaagttcaaggaaggcagtagcttacgtgtccgtatacttggagtgcggaatcttgaaggagttgcaataggcaccataaaagtaattacaccatgtcacccaaaaggaatgctagtggcacacttatactattgtgtcctgatttatttcacttgaatttatacttttcatttttcaacaaagatactgagcacctttcttttgttttatctttcatagcttgtgtcacatcatttaccttttggcatctgttttgttcctcatgccttttgaatttgttgtgaacacacatgcatattatatccatgtttatatggtaatataggagttgacatattgtaagttttaaattggttttcatatggtatagaagacttgaactggtgtcaacttgcatgtttagtatatgtccatgtttacatggtaatataggttactgatattggttcattcaattttattgccttaggatatgctctctgtgtttgcaggacagtgcttttgaagggtctgttttcactcatgatgatgttaaacctggaatgttagtgagagctaaggttgctactgttgagccattcggtgctattgtacagttttcaagtggcgtgaaagcactttgtccgcttcctcacatgtcagagttggaacatgttgttaaaccaccaaagaaatttaaggttgctcatttccacatcaattgtttgcacatgaattttttatgttaagagatgttgaatatgatgatgaatgaactttaactttgttctatgtttaggttggagctgagcttcttttccgtgtgttgggctgcaaa

SEQ ID NO: 189888 - DNA, 327 bp, Zea Mays
tcttaatactgcatagtgggcattgcacattagtgttttaggtcttttggttttaagttgtggttttgtgaaagactgtgatctttggtgatgttctgcctgctagatctaatagtgtgatgttttatttagatgttgtgcgatgcgagttagtcccaaatgttagactattgtaattatagaaagcctaattatggtagtcagcccttgattgtaggctgcccttgattggcttgtacgcctgtgcggttgccttgtgagcaaccccggcctctcctatgtatacgcacacattgccgtggaatagaatcaagtcattcccacaat

SEQ ID NO: 189889 - DNA, 506 bp, Zea Mays
cgacacattatcaagaactatgctgttgataatcttgaggagttcatgactccatatatctctattgctaatgaacctgctgaaaatcctttgataatcgtagaagacccaagttcttcacagctatgtggtgctaaatgtttcagtgaatcaactggagaaatgaggcaatcctccaagaaatcaaggagatattctgaaatccctcaagatctttatgccagaattcctgataacgctgcttcatccaaggacaactcaaaggccaccgatgtcttcaatccagggaccccaaatcacctgctacctgtacttggcctttgtgctccaaatgctgatcaggtgaactcatacaaaaactcaatttgtgcaccaagcataaaggagcataaaagggccagtggtgacgtagtcaacaaacaactgtcaactcccgctgaccattctaatgagcttagaaacgaagttcaatcagcttctgataaggtcatctttcctggtgcatc

SEQ ID NO: 189890 - DNA, 462 bp, Zea Mays
ggcaatcatgagtgtgttgtcgtaactatcacttgaatcggaatcattgtcacgagccataggaggcataccgtatgaagggggtctgaacttgagtataagagaggaaagtgcagagaaaacgagcaatcatggtacccatatatatagacgagaaggagggtagcatataagaggaagtgttgcagataatctcagcccacatgtttggtttcctgtacagtgtgggaagttgcatctgcgaatgcttaaagcaattagtgtttggttcacgaatgaatccatacgagttagtggcgtggaaaaaggacgtctcagccaggctgagcgcatacggtcgctggttggatacgagcgcatgcaggctcccagtatgctcaggattgtttttaagctcattttttgttatattttctaattaaaaaatttaatcgtcaaaccaaattcatatttgcattttaa

SEQ ID NO: 189891 - DNA, 355 bp, Zea Mays
ctaagctggacaaactgcgacaggctgttaagagtgatgcagagatgaggttcgagagggaaagggaagaactcggaatgaaagttgaatcacgggttcaaaaggctgagaacaatcgtatgcaactaatgcatgatcgtttgaagaggcaggctgcattagaggagaggacaaaaaggtactttatgcaaagattgacttgggaaaacaagtacagggagcgtgtacaatctgcaatacagaagtgtaatgctgctgagaagagacgattggggctgcttgaatctgagaaaagacgggcacagagtaggctcttgcaggttcaacttgctgtgaagactgcctctaaccagag

SEQ ID NO: 189892 - DNA, 474 bp, Zea Mays
tggatgacgacgaggacgacgagacaaccatccgcaacgtagacgatgaatacgacgacgatttcgaggacggggatgagggagatgagggcgatgaggaggcggtggacgaggagagcggtggtgagtacgaggaagaggcgggggaggacgaggacaagcgggaggataccgcagcgcggaggcgggactcggaggagtataagtcgcggcgggtggcgaagctggtcgccgaggtgcgggagttcggggaggacgtcatcgactacaacgagctcgccgggatctacgacttccccatcgacaagtttcaggtatcgttttggttcctgactcggtgggctagccctgattctatttgttgaactgtgcaactccatccaatgctgggtcggtaaagttaaatgtagttttgatatttttgtggaagatctctcacacgtgtaattcgtattttgtaacgataaggtaaag

SEQ ID NO: 189893 - DNA, 318 bp, Zea Mays
cgccaacaacacgttccactgttgtgccaatccggtgaggcggtaggaggtgagccacaccttgtcaacctccaaggcgcgctgaccatagaagaagtgctgacatcgtgtgcgccagacgagaggatcgtccttgccattcgggaactcaagcctgtggaagcgggaccggattgttatggttgttatgatggtggctagtgttgagggagcgtaaggaggccggccaggtatcttgcccacggcggagcaagaggaaagggtttttcttcttaattctttcttgctcaattggattgataatctcttctccttata

SEQ ID NO: 189894 - DNA, 326 bp, Zea Mays
gtggagtagcacgccggagttaccccgcctagcgcaatgactagtgttgatatactacgcggaggtgactgcgagttcactagggaaggactcacctgcggttaggagcgaagcctggcgtagtgcagtccatggcagtgcatgtgtcccccgcgagccatcacctcacaaccacgatcacacaactccagtctccatgaccccgtgatcagcacacgctagcaaccctcctcgactaaactttgagggctcggcgagggcgatgatcgatctctctctgttcccttacgcccgcactcgacggtggccatggctgtcctttctca

SEQ ID NO: 189895 - DNA, 365 bp, Zea Mays
accagatcagaccggcaccacacaggcgcacggaggagcagcgaggcacacggaggaccttgctgcaagagcacagcaccttcttcaatcccttccaaatctccaccagagagcaatctcaagaaaccagggaccgaaatcaatccaagtattggagccgtgagaggagagggagcagggaggtgaggatatcacgcgcaaggaaccagtcggccaaaaaccagagagatagccagttcccccagccagggaaacgcccgctcctcttaaggagctgacctcaagagattgcacagaagtggcgaggaaaccggccgagccgttgagcgccgccatcaacggagcagtagcaaccaccgccgcca

SEQ ID NO: 189896 - DNA, 645 bp, Zea Mays
agacggcggcgtacatcagccagacggacgtgcacgtcggcgagatgacggtcaaggagacgctcgacttctccgccaggtgccagggcgtcggcaccaaatacggtaggttaattaagttttgctttggtaaaattttgttgcttcttcagttcagtcgatgtgggttttgacgcgcgtctttattttccagatctcatgaccgagttggcgaggagggagaaggaggccggcatccgcccggagcctgaagtcgacctcttcatgaaggtaacgtagctagggattgtttgtctctcagcacgaacaaacctagcttgtcgcgcgcgcggcaccacatccattaaggaaaacgacacatcaagttcaaatcatatatgcacggtcccaacaagtggtgcatatagacgacagaaacatgttgtctaaacttatataactaattgagccttttttttgaaagctaactaaaaacaatcatctggaccccagtaagtgggacatccacataagtaaagtactcgatcagctggtgctgtgaagtctcatgatcaaagtacaccatgcctaatagtctctgcatatatgctatccttatactcatcatgtttctactgtttccaggccacttcaatggaaggtgtg

SEQ ID NO: 189897 - DNA, 324 bp, Zea Mays
cggtcgtaggtgggcagcttctctagcgcggcccagcgaagcgcctcctcgtcgtcctcctccctggaggagcgcgagaacacgtcgtcaccgcgccgccaaatggagccgctgtcgccccgccgcatactcgccaccttctgaatgtcccccgccgcgtccatctcgccgtccctcctccttccctctgctgccgcctcctgctccccctaccaatccgcaccacaagtccacaacgccgagcaggcaccgggttaccaacgagattccgttgtgttggaggcttggagccttggaggggatggggcgtgcgcttgccacgct

SEQ ID NO: 189898 - DNA, 508 bp, Zea Mays
agggtattttgaaacgtgaatgagcagtacgaccttttggtaatagaagcgaagccacgccagaggaggcaacaacaagcacaattttttgtcgggacctcaaatgtgtgagtatagcgttccacaagaaagttttacccgtcccaccatgcccacatacgaaaaatatgcccggcgagcaggacatcgcagattcagtcagcctttcgaaaatgaaccgttggtcagcattcaactgcgagacagcaacggcggcatgggcacgcaatagcaatggttcagacctcagttcgtcgtttatgagccggttgccaaacacttcgtcaccacaggccgataagattggcaggtcataatcagctatgttggcaccactgttagcaaacgtgtctgctagtttcctcgaaagcaacgtaaggagttgttcatgtggagctgtgtagcgcgggttgccgagagcttctctaagtccacggtgtatgtcatcggtgaagtagatccaatattt

SEQ ID NO: 189899 - DNA, 405 bp, Zea Mays
ttccgtgtagcttggattctcacggccattgccaaaaggcacaaacctatatgtgactgggtactgcagcaggtttatcgcagcagcaaacacatcgatgcagaaacctcccaccgttccagtttgattgtctactgatataaactgacggtagcttaccctgtcgggaactccaatcctcagctcattcccgttgttagggaacacccatccccggggcctcgttacagtctcgcctggccagatggcagcgtggagctcctggtttgcactgacattgaatggtttcttgtacagagtctcaggggacacaacggacagcccagagtagttggaccaatagccaatcgtcctcaaaccagaccctactacgtttacaatgtcatatgcaggctggataaggtt

SEQ ID NO: 189900 - DNA, 857 bp, Zea Mays
gaaaaccaaataggcaagtagagctgcaatgtctatggtatgtttggaactcctacagataattgttagcagctaaattcctaactaattgttagctgaacctccaaccaacaattagcccattagttgactcaattcccagttaaaaggtgctaaagactaatctgcactttattcatccagagtaccgcactcagctggccccctttcttgaacccacccgaccccttcattccatcagcggacaccgtcacctacagtgtactaaaccgtttaaccctaaaaaccgccattcatcgatgacggtttacgaaaacctgtctgcttttcattttaaattataaaacgcttttcaggtttaccagccaagaaacagcgttttccggccggttttcggtgtttctcagtggattttcggtttccttggtaaattttagtgcatatgttttcaaattaaaaaaacaaaattcagcaaaaaaacaagggggtttcggcaaaattcagtgttttatcgaaaatgatggttgatttttttagaaaaaaccaaaattaaatatgaaatctcttctgtgctatctattaagtcaatagtgtagaccacggtactaccatgacttcaccctctccagaccccaccgacagatatgcggcccgtcatggcctctattggtcattccgatctcgaggtccaagcatggcggccttgcattggagacccaagcccaacacaactagcttcagtttggtacacctagtggctcgacggtccggcaacaattagcaacagcgacatgcacgtagaagcgacagttgagtttaagcgcagaaacaaccccagccccaacagtgtatagttg

SEQ ID NO: 189901 - DNA, 406 bp, Zea Mays
ccttctccgtggatgatacaaaggatccctcagctgaagcaagtttaatgggcgggaaattttataatgacatctgggtaaatggtggccgagagatggcccacgaaattatgaagaaaagcgagaaatacatccatgacgcccgagtacaagcaaaacaagctgaagaagctacagagcgcaagagacgcataggtattgtttcgcggcgtcttgcttcggcatttgtttttgtaacttcagactgattaattttttcactgtagctgaattatctccaccaccggaactgtttgatcccctggccgacccagaaacgaagaaagcgttggagatcatcaatatggccgaatctattgttgacgaagttgttaacaagttgctaaatgaagttgaggagaatatc

SEQ ID NO: 189902 - DNA, 287 bp, Zea Mays
catgtttgaagaagagtgaggctgagaatgggcaagatggtggacgacatcttgacttcaacgatcagtgacttcgtcgtcaactacatccactttgagggagcagggggagtgaaagtgaactgctattcttcatcgggctcacctacccaacacctagttcgccactagctccagcgagtccttccacaaccaacagcaccagccacacctcactctcatgcaccgatgcccacacctcgagaaatcagcactggcaactttggtctgtgatggacaacacacgg

SEQ ID NO: 189903 - DNA, 409 bp, Zea Mays
cgatatttgatttaaaaatgcccacccttaacgtcgagtgactgtaggagaccggtcaactgtcgggtcgtcatcttgttgtgttgacaagtgaagcactcgtaggtgaagtcacggacgagtactcgatcaaagtctgtgcagccgtgcaggcgctgaagggtcttttccatcccttcgtggacaacaaaatgggtcaatgcaaccaccttgtggcacaaatcgagctacacttacacgatgtgcttgctatagagaaggaagtcatcaatggtggagtagactgggccaagaggtgcccaaggggccaatgtgctagacttccaggtgcctcgagtatcgaggcaacaagttccctgtggtctggtgggtcagatactccgagggcagggcaacaggtgttcctgga

SEQ ID NO: 189904 - DNA, 482 bp, Zea Mays
gaagaatcgattggcatactttattaggttgttgattatgtattcgcttggtggatctgacgcagcttccgtggcaaaattgaaattttccaacttaactttttgatcgtggtttcgaaattttttcgttcgataactaaaaaaattggaggttcttatggttgttgggaggcacgcatgggtccgatggatgaaagggccatggaccatgaagtcccatattcatttgtcggtggaaggaaggaaaagaaaagtagattacaagcacttggtagctgtttacatttcacacttgttatacccaacatctcacgcaaggggaccgaccacttggaagcttctccgatttgaccccatgtggatttgtggactcctatgcttcatttttttagtactggggaccttcgttcactaaaataattactcccacaagcctgccactgttgcacgataagggaaaaaatagcttatactgattgcta

SEQ ID NO: 189905 - DNA, 521 bp, Zea Mays
ttcatcatttgggaaattgtccggctggtaagagcgacactaattatcacagtgaagctaggttttgtcatgacaaaatcagaagcaatcctggctgcatcaatggcatcaacaactggtatactaatatcagctttctttgaagcaggggcatcatttactccatcaccaagtaacaatatggtaagaaaaaataacatgtgtcagtaacaaataataactaaatattacggacttaactgttgagtactatggtcaaatgaaccatatggctaagctagcaatgatcatgtcatgagaaatatgacatccatacatagacaatggaggcaccaaatcaaatgaaaaatgatgacaaacgaccacatatggacctgcggccttcctcggtagcatgctataactgtttgacaagataggcgcgcttcgccatgcttatattcaaggcgtgttgatccaggttaagtactcgacaatagcaataaagttgtcgatatttttatctagcatctctgtagctg

SEQ ID NO: 189906 - DNA, 772 bp, Zea Mays
ggccctgaagatccaaaagagtgcgcctgagtttgcgcaagctgctcttcatgaaatcgagttcctgtcagagatcaccaagaaggacccattgaactgcaaatgcattattcagctgatagatcacttcaagcacacggggcctaacggacagcatatctgcctcgtctttgagttactgggagatagcttgcttaagctggtacagtacaaccggtacaaaggcatcgggcttgatagggtgaggcaaatatgcaagtcgatcttggtaggtcttgactacttgcacaatgagcttggcatcatccactcagatttgaagctcgagaaccttctccttctctcgaccattgatccctccaaggaccccattcgctctggcctcaaaccttgccttgagaggcctgagggaaaccctaacggtgaagctgggattaatgcgattgagaataagctaaagatgagagcaaggagggtgcttgcaaagcttgctgagaaaagaaaatcagctgtggaatcttcacgctcagaaaggagcttgggtggaattgatcttacatgcaagattgtagactttgggaatgcttgctgggccgacaaacaatttacagattttattcagacaaggcagtaccgggcaccagaggtcattctaggtgcaggatactcgttttctgttgacatgtggtcatttgcgtgtatcgcttttgagctcgcaaccggagaaatgctatttacacccaaggaaggccatggatacagtgaagatgag

SEQ ID NO: 189907 - DNA, 422 bp, Zea Mays
gagagaagagatgtgccaagagcaaagggtgcaacagcagcaatcaccactgccaccacctccaccaccacttccaccccgggacaagcatgggaatttatgagccacaagccgcctaccttcgccagctctctagatcctctgcacgccgatgactggttgaagtcagtggagaagatactggatattgcacaatgttctgactgggagaaggttttatatacttctggtcgtctgactggtcctgctgctgattggtgggattcctacactgctgcccacgatgctgctgatactatcacatgggcggaatttgtgacttagttcagaaattatcatatacttcctggactgatgaagatcaagaagaaagaatttctgtcgctgaagcaggggagcatgtcagtcagcgagtaccgcga

SEQ ID NO: 189908 - DNA, 457 bp, Zea Mays
aacacagctataggttaggagcttgatttgagctcactgttcgagtttgtgattggcttgcaacatccgagtcccaacccgtgtgcgggtgcgagtgcgagtgtagtagactggagttttgtagctctccctattgcagcatctgattctgagtccatttctgtagatgtattaggttctccatgccgttgcccgttggattgggagccgatttttagctgtagtccgggatgctacgtttgccctttgtttttggacgaacagaacatggccgtttttgcactgtacaagtaactttagactttatagctcttgatagtgtgttttagttcttatttggtccttacaaagcagtatgggtggatcctaacattgtttgccatcgctgtgcaatctattttatctcatgttatgtctcttaaagcctgttcgatgttccaacttccaactatgggct

SEQ ID NO: 189909 - DNA, 374 bp, Zea Mays
gttaatttgtgggaactaaagggtccatctggaaagtaacggcctggttgttaggtgagacgtgtggagaaaaacaaatgtactctatgtgcttcgcttcgcgtgtgatgcgcgacacacaaaactcatgttttaaaggagtagagatagagatattcctcaacccgttttttgacccccttggccccatgatctaggaactttgtgattgttgtcttgtttctaaggtgtcctttagtttttgctaaagtatgtaatattaagggttacttggataccgaggcgtggttaatttgtgggaacgaaaccgaacatgcggttgcatggcaattgagatggagttgtgattaaatgattgtttacttggtgattac

SEQ ID NO: 189910 - DNA, 534 bp, Zea Mays
tcagaccccataaatagcaactgtcctggtgtctctggtagagaatatgtggaagctgttgcacagcatgctcgaggtccaataattgccccactaggggttgccttctgttctggtcatttcggtgggaattcaaaaaccttgacacttccctctggtgctagcagtgatgactctatttgttgttatgaccttggtcagctgtgtgatacttcatcactgagacagcgtatggggagaatagcagaaacagaagggttggatgctgtgtcattagaatgtgctaattcattgaataatggagttgatttttacttgaaataccttattggatcatgtattgagctagtaagagcaagatctcagcatgatcgaataaatcatatggcactaaaacaacagttaagtcaaaagctaataaatggtgtgcagctccaaaatcaggtgcatggtcaaagtgccactacatgtccgcaaatcagctcggtttcattgcaagacttcaaggctctatcagagacaattcctcagctg

SEQ ID NO: 189911 - DNA, 293 bp, Zea Mays
attctgtggtggatgtgcttgtgaaggtggggcaaatgggtgaggcaactagactcattcaagctgattgatggggtgacacaagaacagatcaaggtgtggctgggttctaacaaaagtatttaacagaaggtggtcagtgccttacatgatcgggcacttggatgtcaaatctatcggtgtgtcaaatctactttcagctggcctggaagggaagaacagatcaaagcatatgtgcagtcctgctaccatactgtattgggcaaatctccatttgaagtgctagatgttgc

SEQ ID NO: 189912 - DNA, 534 bp, Zea Mays
acattttgatcaagtcgttggtgattgcttcatggattgtgtcaactgtcttattggttttgcaaataacaagtgcactcctcggattagtttgaaggctattgctctcctgcgtatatgtgaagatcgtttggcagaggtacagattatctgtaaccatcacctacatatttatgagaactggggacgaccttttgtattcactctcatttatctttattgtacagggattcattccaggcggtgctgttaaacctattgatgttgttccagaggccaattttgatgtgtctgagcattactggtttcctatgctagctggtttgtctgatttgactttggactctagaccagaagtcagacattgtgcactggaagtgttgtttgatttgttgaatgaaagaggacataagttctcttctcccttctgggagagtatttttcatcgtgtactatttccaatttttgatcatgtaaggcatgctgggagggatggactttcttcttctggggatgattggcttcgtgatacta

SEQ ID NO: 189913 - DNA, 524 bp, Zea Mays
caactgctgttggaaccatggtggtcattcaggtacctagcttagctgtgtcaattttgttgtcaggtcagtgctgatgcaatagcgaatatcacctatcccttcgcatgttgtttcttttagggtggaattggtcctactggcttatccgctgaggaccttcatgttcttgatcttacacaacaacgaccgcggtggcataggtggattctcttgctactctactgtggtttaaattggacttttagtttgactgtttgctgaggattcgatttcttttgcacagagtggtggttcaaggtcctggtcctggtccacggtatggacatgtgatggccttggttggtcaacgattcttattgacaattggtggcaatgatggtaggaaattgctcgtgtctgttatgtctagattattgctacatacagatcattccagctgatcgatgttgatagtaagactgcatcaatgtttcaggaaaacgacccctggcagatgtatgggcccttgatactgcggccaa

SEQ ID NO: 189914 - DNA, 445 bp, Zea Mays
atcagcaaactctaaggcgctatcatgataaggccatacgacgtcgatccttcacagtgggagatctcgtcctccgccgatttctaacgggggagggacggcataaattgtcacctctatgggaaggaccattcatagtagcagaagtcactcggccgggatcatatcgtctcacttagatggacgacacggaaattgggaactcatggaacatagaacacctcagaaagttttacccctagctacatcccagaagctattgggacgacgatgtattctgtaaatcgagaaatatatcatcaataaaaaggcttcaaaggcactcagattgttcgctgtcaattggcatacttacttaactcggggtgaccactatgccctactaacagagcaatcggcttaagtcggcaatgacttaaggcggtgcgacatgctcacgcttact

SEQ ID NO: 189915 - DNA, 1021 bp, Zea Mays
tctatgtattatatagctattcgaatgtaaaaagaaaagccatcatattcaccataataatcgggaaaaaatgttcggtcaaagcatttttattttgggctaactacccactgcattcacccctattggcaaatactatctgatgttttttttcttttgcatagactcggatggtagtataaagtttccggtgttctataggaatcatccatgtgttggttccaaggacacttctaatgacgagatgaaagcagacatatccatcaatgcgacagaggatagaagcattaacagttttctatttctgatgcccatcaacatcggcacaccacctgttatgaaccttgtcgggatcgacacaggatcgacactttcttgggtatagtgccagccatgccagccacattgccataaacaagccgccaaggcgggtcagatctttgaccctagtagatcaaccacatttcatcgtgcgggctggatatcaagagaatgccttgtagtcaaggattcccttggtctcgagtttgctaactgcatggagaaggagaatacttgtttgtactcagttacctacgggggcaggtggtcgtacacggctggcaaagtggtttgtgacaaacttaccattgggacaaacaccaggttcagcttcatgttcggctgtagcctggacgtggagtacaagaactacgaagaagcggggattgttggttttggctactcaggcatctcattcttcgagcaagtttcaagtcagatcaactataaagatttcagctactgtctgcccatcaatgagacagccataggatacatgaatcttagtgactaccgtggccagggcgcagatgttctttacactccgctattccggaccacctctaaaccgacctattcactgacggtagaagagatcgtggccaacggccaaaacctagggttggcaccttcacagatagtcgtggactctgggtcattgtggactatcctatcgagcgacacattcgattgtctcgat

SEQ ID NO: 189916 - DNA, 432 bp, Zea Mays
tgatcaaatggccgagatggaggtaagactgtaggtgcctcaaaaatatccatgaattctcccagcaacccttgcaaatctgtatgaatttcgttgatgctcactgcagtcacctcttccaacagagcaaacacccagatatcatttccgcgcaaccaccgctccacttgtaaagaagatacctcctgcaccacttgttgttgtggatgatttcccaccaactggacctcgatccctttgtccacaaaactgatcacctgagcttcccaatcacaatgcataggactgtgccttctcaaccaatcatagcctaaaatagcatcataggcccccagccctagcaccctcatatcattctggtatgtgtgtccgttggcccaccactccagtgatcgcaccattgtgtcactatacataatctctccatttgcc

SEQ ID NO: 189917 - DNA, 375 bp, Zea Mays
gtggcattgtggaaggggaaggcaataaggcagttgatgctggcactggcattcctgtcatcccaacagtggcagcaccagcatcagcatcatcgccagcgccgacagcggcaacaccagtggagttcttacatgtgaaggttggggcaaagaagcgagggcggcccaaaggcagcaagaacaaaaaagctgtggttgaggtaaattagggctatggaatgacacatgtgaaggttggggcaaagaagcgaggatgccctgactgcctgaaggcagcaagaacaagaaagtggtgattgagatcgattagggctatggcatgctgatcgctgcatcattcgacatctgcatcagttgtaaactacattgtgtatg

SEQ ID NO: 189918 - DNA, 526 bp, Zea Mays
gagtcctatggcgagctgagagcagcgtccgatgacctggcagcttgcacggcaataggagtgaacaaccgatggcgaggtcgaacgaggagcatgacctcgcgaccagtccaagctgcagcgaaagggagaccacatctaatacagaataagcggtttaatggcgtggttggggcgagttggaagagaggcagatgagttcgacaaggcacaagagctgagtgacggcatccgcgacagcgcaccgggaagccggcgagccccacgaataagggcacggtcagagaagtgctgaaaccgacagcttccaaggctaggacaacgacaacgggctagggcaacgtcgaaagagttcgacaccatggcgaatgggagatcgacgaccggcacaaaaggcacgacgccagacgtagtgaaacgacgaagtacgtagactgggacggtctagttaggacagcaagggcattgatggggattccacagcggcgcgcccagagagaactcgcgagcatgatctcgagcaggg

SEQ ID NO: 189919 - DNA, 467 bp, Zea Mays
ggctccttggaactactagttggcttgttctttacgttactgcaaaatgatcaaacaaataggtttaccagagtttaaggtccttgttttgttgcttaagtgtttttaacagttcaagggttgttcgacagagtgatgctaaagaaaccatttatgaacgaaattgccatttatatggatttatttctatccattgtttggctgcgattttgcggaactaattgttgttgagtgttgacaaaggagagttgcttgatttgttggcttttatgcataataaggtggtggatgttttgtgttgtaaatagtaaattctaatacacgtggtgactgaactggcactggatattgattttgcgaactttgggatctaataatccgatagcttgtcaattctaccgctgtagtatatatgatgtaccactatcttcatttcaaagagaaatattattacgcatgcatctgtg

SEQ ID NO: 189920 - DNA, 462 bp, Zea Mays
ttagaaaagactattcgccccctctagtccaccatatagaccctacagcagcgaccgatgacacccataagtaatggttataactagtgcttcatatatattgtatgcatctcgttcattttttattaatcatatcctagaaatgatgttcgtacctaggacgatcggatcaaaagttgctgcggcattaatccatgatcggaatgctcgacaccaatattgggaaccatccacaagtgtgtcaagtattgctcaccaatttctaaaatataattgcgcctaaaaataaaggactaataaatacatcaccgaacatacatcactcgtcaacacaagacatctcattgtttattattcaatatattgagtaggacactatatatagattcaacacatacacttaaatgtatgaaatcaaccatgaaagcaagatcagacatcacactcgcattattcaattga

SEQ ID NO: 189921 - DNA, 325 bp, Zea Mays
agagctagaagtaaaggccacaaaggcctatcgcgagaagctagaggctgcaacgcagggcgacatggaccaagctcattcactttttgttgaggcatatcgcgacctaggtgctgagacatcccccttctataagtctgggaggagctggacaccctcttcctcgactggctgtaggaggaattggtgagtctcccggcgatcgctacagggctgatgtcttacgcctcccttgtcacctgcgagggtgctgccaatgccctttcccacgaaggttgtcatcattttgaggtctttgagcagagcgactaggacttcaatcggg

SEQ ID NO: 189922 - DNA, 720 bp, Zea Mays
gtggatacagaatggtgccaacctctggagatagtaaaagaagacactattgttatagcaatgagaaagcagggtggtactcagaaatttgtaaaagctgagatacgtggttatgaggaaggttcaagattcttgattgtattccgtctgggcccagcatatggaccaatcaggtagtatgaaatggtaataagagcatccagacatttgtttcccagttttacgactatgaccattgtatgattgtttgtaggattgagaaccggacgagtcataccacaatcagtacttgccagtctggtttaggggaggagagttggatccaagtgaagccacatgcaaccagaaaatattcttgggatgacccatatggacagaaagttattgatgttagcattgataaaggcgatgatacttgtgtcctatgtgttgacctggaaaatcctattggaagttccaccagttttagggaacatggcctcatgtttactgttgataccagtgacattaagatattgaagtttgctgattacataaggaaagaggaagtatatggattgcctggatctgaactgactgatcaccaaggatcgtcattgaaggaaaatgagacagagccaggtgctggacccttggagctcattgttgaacttggagttgttggaatatctttgattgatcataagccaagagagcttttatacttgcatctgcagaagg

SEQ ID NO: 189923 - DNA, 1716 bp, Zea Mays
tgggggttcaaccgaacccccatgcccgacaacactgtgagttgcttcctgtatcctgtcccaaatttccctgggaattacgcttcttttgttggggctatgtttttgcttgcttgcttctttcttcggtaggattgctggtgcggagtctttgcttcggactggggttttccgcttcctatatgggagacgaattaaagtagtcagccgtgctccattttgttgcccgttatgttttgcattgttcggaattccttaatcatgtatgagtaggtttaaagtagggtttatggcagaccatgctgttagttggtttgccatttcatgaactctagatgggggaaacagtggagtttgatcatctgatgatcttctgcaggggcttgaaattggccttaaaggctccaagggagccccaatgccaggaacggaaggaagagtggcaaaggatttgaagaaagctcctgcctccttggaggaaagcaatgcttctcgtgatgaggatcctggcggagggcctgccttgactgggaagaaaaggaaggaccggaggggttccgcggatgacaacaggaatgtgacaagaagggtgttgaggtccgacgccatgaagctgcgtgctgaggctgaggcaccatgtggagcgggtgtggaggttagcaaaactgatagtttggagaggaaacactgtgacactactgtggaggctgaggcttgcaaaagtagtgtgctgatggaagttgcctgcaatggtggggaagccaacggattagttaacttggatgcgagcgatgtttcggaagaatcaactaggtgttctgataataatatgggaatgcctggtgttcctgcaacagatttttctcaagatggtggcttagctcaaggtagcattgcagaatcagatgataagacagtcaagtcagatgaggtgtccgctgtaactcattcagagcagaatgactcccaagctggaataaacagttataatgctgatgaggcccaagataacaaagtgagacatgggccttgtcaggatgaggtcatagactcagcaattactaatggtgccaacacaagtacagatttaaccaaaaccagccctaccagtggatcagaatctgttaagcaggatgatagtaagcaggagaataatttggttcatactgaaggagtgatactccacagtggtgatccgaaagttgagaatcattctcaaattgaggacacttgtacagaaactgagatttctttgactgggaatggaagatgtgcagctgataaccacactgatcgaactgggtacactaagcaggaggagaggggcagccctgtgaacgaaaccaatgatatttcggcacatgacattgtttttacaaggagaggtagaaaatcatgtgaggcaaagcaggggacatgtgaagaggagtcacggtttgagaagcgagttacgagatcagctacagttagacagagagaagtttctggaagcttatgcaaaactaccacgaatgagactgcactaggaagcagagggaggaagggagatattattgctcactatacaaggaaagtgagcagtgcagtatctccaaaaggtcaccatgctgagctgggagaatgtaataccagtatggagaatcaaacagtgaaacaaaaggtggttgatcgaagagattcaggtgccactaagaatgataatgatgcgaatgacac

SEQ ID NO: 189924 - DNA, 384 bp, Zea Mays
tgtggaaatgacttggagatagtgctatcgtttggctaaccaagttgttgaaccatatttttcgatcaaacaggatgcccggtaagtggaggagtacattagtaccaatcttcaagaacaagggagatattcaaagttgtaccaactatcgagggattaagctcatgagccacactatgaagctaggagagagagagttattgagcatcgcctgagaggaatgacacatatcaccatgaaccaatttggattcatgcctggaagttcaatcatggaacaattttcttaataagacaggtcatggagcgatataaggagcagaagaaggacttgcacatggtttttatcgacttggaaaaggcctatgataaaatacctaggaat

SEQ ID NO: 189925 - DNA, 802 bp, Zea Mays
tggcggtgctgggccgcgacgagggggagacggaggcggtgggcagggctgcgggcaaggtgccgcataagctgcgacgtcagccagccgtcagccgtgcagccagattctgagagctctggggagggattggtggcgcaggacgacgggccgcggcggccgccattcgacatcaacctcgccgtcgtgctcgccgggttcgcgtttgaagcctataccagtcctccggtgagcactttgctcccgtcacaacctactcgtccctatccttgaactggactagtccaagccggtggtggaggcaaccgccatggattagcttacgtggcacgattggtcgtcgtatttcacaggcagatgtgggctggcgcgaaactgatgcggctgactgtcagacagtgttcctgtccgagtaagtcctaggcccacccttctttacagagcttggaccaattgttgtagctatatggtgctaattgctaagccgttactgtaaatgttatgaatgatgtacccatgccacaactattgcagtgtgtttcttcgtgaagtatacgatggacggcttgtcgtcaggctgaagaaaggcataaaccttcctgcaatggatccatgggtatgatgatgcgtagttgtgcatgctgctgaatagtcattatatttatattaagccgcattctctagtggatcactacaacgtttttatgtttggagttattaatcaaagtgctacttttctactctaacaattcccttagccaattcttttgttttcagggtactagtgatccttatgtaattc

SEQ ID NO: 189926 - DNA, 1096 bp, Zea Mays
gaccatttagaaggcgatcctggtttagaaggtggtaaaaactccccaatatttacagacatcttgaacatggtatgtggttgcgttgataacacatcctctgacaggtatgcatcacattaaccgagataatgccgtgtcacacttttgcacaagtactaacatgagtatggttctatgtactgtagtactgttctccaagtcttgaaagtgcttctcaatgctgttgcttcaaataggtttagaggtaatttttacaagcatattctctactcgtatttttattaggtaagtttagctaatgctgtttttttaaaaatgcatttatgagatatgagcttataaataataacatcatgcattaaccggttaagcttatgcacaacactgcaacatgcctgtattaatttggacaatgttcgttctcattttttttttctgtatctgtaagtgtatgaaaatcatataaggaaataagttgcaagttgtttataaattcttatattttactgtaacaaagccagtggggccaaagtagttctgcatgtagatatatttctatgttaaagtacaatgtaagctgcaaaacacaattcatcttttgtgtttgattctgttttttggaatgcagttcatggagagccattgcttggggtcattagagtatgctataacattgctcttaataggtacctgttatatcactaccttcttgtttgcagtatgttgccttgttgccctttggaccatgtatgataatttattcatttgtattttgttagcaagagccctgtgaaccaggctacctcaaaggctatgttaacccagatgatcagcattgtattcaggagaatggaatctgagcaggtaaagaattccacatatcttatcttgtgcctaggaaaatgattcattgaggttgtttctctaggtattattttactttcttggttccaggtttctgtattgcctgcaagctctgtggttaaagatacaccttcatctatcacaaatgaatctgaaaatggagaaatatctaccgatggccaagatgaggaaaaagttactccgggagatgcattgtctatgaatcggc

SEQ ID NO: 189927 - DNA, 493 bp, Zea Mays
gtcatcgcttttcgggtctgtagaacctgcttgatgtttttgaagcatgctagctttgatcatgtatgtgttctgcaatgttagaaaggattatggtacatagtgtaaaaaggaagcaacttgccgcttgggttgcattttctctgctctttttttgagacatacttcttagatggtgatgccagaacttttttgttaaggtggtctgaaagctcgtcagcatcctgtaagtggacaagaattgtaaaatagcgtgcctaatgtataacataatttcatatgtgtttaaagtatgtgaaatatcgatcctaaaaagagtgaggtaggagaggcttgctggttggtattgacattagtaggaaaaaaatactagatcgatctaagagaaaccagacgactttttcttcaaaaaagaaacctaagcgtgctttgacaagaattcgaatctagatgttttgagtgtatatccatattgacgccaacattgtgtaac

SEQ ID NO: 189928 - DNA, 385 bp, Zea Mays
tcgtcaataaccactagataatatttataaccagaaacactgataacatgagaggtccacaaatcagtgtatgagatcaaaatcatgcacatgctaagaggagctagagaaaggaagtcaaatatgatgacctagctgacatgtgtggcatagatgctcagaggtgcccctagtacaagagacaactgaactactacacaatttggacaacacgtcagggctaggatgaccagatcaacgatgccaagtgctggaggtagtggaagtagtcagtgtgtgcgactgcggcgaggacaaaagcgatgtgtagtggaagcggtaggtggagaagtggacgcaggcagtcgcaaggtgtacaggggccagagctatcatagtaggcgag

SEQ ID NO: 189929 - DNA, 315 bp, Zea Mays
cctcaaggagggctcccagtagcgccatggtttgttgcgtataggagaggaggcatgtctgagcccctgtagtcagtatggtcgccgatatggccttcatacttgttgctaacttgaacccgaaggtggttgtccgttccctgtatttgcatctttgaccgagcagagagccgaggccagcgtctggggctcgaacacgtacttgagcctgcctgatgaaggcgttgcctgagtcgtagttgttgccacagtgataagcatggtaaaaagcgcatggtaatccgtcccatatggtgtaaagcagacttgacgtcg

SEQ ID NO: 189930 - DNA, 523 bp, Zea Mays
ggagaatgcagtgaagctgttggatgaaatggtggcaggaggggtggagccaaatgcaactgtttatactagcgtcgttgcattattgtgtgacaaagggtggatttcagatgctttgagagttgtggaggatatggtccagcgaaaggtgatattggatgaggctctgtatacgactgtcttgagtggtttttgtaataaaggggatttggtatctgcaagaaggtggtttgatgagatgcaaagaaaaggtttggcaactgatggggtgacctacacaacgatgatcaatgggctttgtcgggctgttgagctggaagaggcagagaaattgcttcaggaaatgtgggccaggcggttggatgttgatgaagtaacatacacagtgctcattgatgggtactgcaagagagggaagatggcggaggcctttcagatgcataatgcaatggttcagagaggagtgacaccaaatgtagtgacatatacagctttgacagatggactatgcaagcaaggggat

SEQ ID NO: 189931 - DNA, 3941 bp, Zea Mays
acatcactccgcttttgcggccgcttgtggcggtgccttccacggggctgcggctgcgctccgccggagcgagcaaatatccttgcccccacgagaccctcgcacagtcgcacctctccgacgtgaccggcgccgtagaaccaccgggtcttcccttgtggttcgtgctctccctctctacccgggtcccgggctgctcccctctacttcgcaatcgctggatcgcacgccaagggcctggcttgcgcgtttcgatctgcatggccagagtgtttcatgcgcgtttgggctctctgatgtttggatggggaggaggttccagggtttggggttgagttcgcgatagggttttggggggtttgtagggattttcagggtttgcggtgttgtgcacggatcctgatctggggccaggattgtttgtctagattcctgccgttgcaccaggatgtctctctgcgtgattactggttactcaagttagtgttggctggcaccgtgcgatgtaggctgcagcgctgtcggagtcagtagggggggggggggggggggctggcgcatgctgaacggatgcccccatgattattttttcattgacttcagtgcatgctttaatatttatttcatggattaactgatttgagccccatataatcatataattctagctccatcactggcagtggaacagatgtacgaaacttgaacaggcgtaatgatatactattattaactagcaaacatgttcgtgctttgcaatggaacacactttggaactggactgtatgctcacttttctaattcgtatgagcagaggtcgtgagttttaggtcacggacgggatattaaaccaattatgactctagtcgtactactcttaaaattggtgagaactgtgcttgggggagtgtagggacagactgaccaagagagagagagagagagagagactaagagagagtgatggatcaaaatttggaggaagaaatttccactctttaattttataataatatataaatatataagtaaagatttattattattaagtgatttatgacaaggccatgaacttctagatgaatgttctctgatgttcttgtcttgcctcgttgcttgtttgcaatggctatttattgtaaaatctggtttttgctagtagaattgggtactgtgcttgttgcatctgcatatcctctactccatgcttgcgagtttcttttagaaggatgcaaaagaaactgcatttatgtgttttgtgagtagtaggaaaagtatagttctgcagctatttaactatgtaagcgcatgcaaatttgaaggcatatagccagtttatgtggtttcaatcttgtaacattaagtattgtctagggcagcaatgccatttttaccacgtttaccaattgcttactttgttgatatctttccattattcattgtgaagctaccgtgttggcccagggattattcaagaacatggagagaaagagaaaccccattgtctttctggatgtatctgtaggtgatgagccagatgaaagaatgatctttgaggtatgtttgttattactgtttctcaaatccgtattcagatggtagtgcaagcatgactaagaccgtgcaagttgcaacatcaaagatcaggagctgtagctttgtctttttatatcgaaggctaatggtggtacttgtctacttgattctgtttaaaagcatgagaacctttttttgcagttgttcgctgatgttgcaccccttgtgactgagaacttcagagctttatgcacaggtaaccttctcaccacttccttttcgtcaaatcagtaaaagttcatctgttagttagtgttacttattattttgtaaattggtttatgtggcaattggacatgttgctcgagatttttaatggtcgtggtttcacataatgcgttcatcaaaatacttgcgtttttattgtcagactattaaatatttgaagtagcatgatatgatgtaaaatgctgtaaattcacaaagccacactcttctgaaattataaaaaactgacaattccaagagcttgctttgagcaacaacactttttattgcctacggcgtagagcgacacccttttagtgcttggaggttactgagtagtaaaacactcaagtacactggagatttagaccatgcttagtgcttacaatggccacttaatgacatggtgctaggaaataggaaccaagtgcaaatcatgtcatattgtttaggagggattgtgatgttatcaccaaattgctagggttatgctacaattgcccttgtttatccagatgtgggtcatatccagggaaagttagatctgttgacgccccatccaaacagtaaaaatgaaaactgtttcactgagagtttctgtggtgaataatgttccagtgctaagattgcaattctttttaattttaggaaactacaagtttaatttcaagttcaagtgtaactttcttttaattactttgggatgcttgtgaaattttactctgattgaaataggccacagtttttctgctttgtttaatttcgctccaacgattccagttgttgaggaaatatttttcctatatttatgtacaaatgctttacttcctatccttactaatacaagcccattaggacattgatgcattgtccaatgcttaagtttgactagcaatatcaagaaaaatggataatatcaaaataaaagagttcatattttgaaaatttaccctgatgaatctactaatcgagatcttctgttgcaaatctttgtgaattatagatattgatgtttggaactagaaacaatttgacctaggacaaacttaaatgaacatgtacttgtggccaatggaagtaatgtgtagcttctttttgcaacattgaagaatgccgcaataatgtcttctattactgctcctactactgttttaattatctgcactaggcaattgtaactgatgttctggtgatactaatccttctatcatcacttggtagtcctaatgatttttattgttatttttttctttgcttaaaacccactttggaatatcattcaaacttccactctgtcatctttcaagccatatccaatgtgccattctgtgattctgtttgaatatttccgaaatctgagaacctaatcttttctttctgtgatgatcaaagatacacatttcgatgttcattgtttcataggaatttagttaatttcctggcaaagtaattctgcatccttaatggttgactatatttttatatatgtttagctttaatatactggactacaaatttatgatctctttttaaattatgaaacttcattttgaatttttgagcaaggtgattatgttactacaagggagtctcttacagatttcatgtaaagttggatgcatgacataccggttgatgtttctattttgaaaagttatgttttggcagacaatttgttataatattcttcggtttatgacatcaactaaaatcaggatatggaacgaagattctgaacttgtgtacatcagtaaacacatacatactcgcattcgcatgcaattagtataacttgggctgtagactttttagtccgtttcttgtcttgtaagctttccgcctaatttatgcataaaaagctattttgatgttgatctgagcggttaatatactaatatgtgttttggaaatcttctgataatgtagtgggtacctttgttctttgtgtcacagcccaccttgtgcttgtgcatagacaaatccacagaatatattccattctcagtttaaaaaggcctccttatttcctagcattgttgctcttaattgatgttgcacactttaggtgagctgggaattggacacaagactaagaagccattatgttacaagggatcatcgttccaccgtgtcatcga

SEQ ID NO: 189932 - DNA, 611 bp, Zea Mays
gtcggtgaggggcactggtgcagcctggagcgagttcgtagacgagccacgaggggcacaatggccaccgctaaaatggggtaagagaacctacaagtgaaaaaacaaacgatggatgaccagaacgtgccacgaagtcaggatcgtggagaaaatccaactcagaaagggagtcgagaagggaaaatccgcctcgtcgatggttgacgtgacgagagatcaagagacgaggagtggtgaggtcaagacactggtaccctttgtgattagggtagtacccaagaagacacgacaagtagagcgaggaacaagcttatgggaaacaatggcagaaaggttagggtggcacggacacccaaaaacacgaagatggtcataggagggagtggtgccaaaaagagcaagtgtggatgcatgagtcgttgtagtaggaaggcgattaagaagctgggtggcgatgtaggaggctctcagcccaatagcaagcaggaacggatgcctgaaaaaagtagggacacatgacattattagtagtgtgaatcatgcgttcagtcttgccattctgagggaacaagctgcctggcaagggaatcggcagtagtgcgctcatt

SEQ ID NO: 189933 - DNA, 843 bp, Zea Mays
caaacatctgtcctttttgaatgcagtatcttggaaatttgcactgaattgaatgaaacagtggaagttggtcctttattacagtcagaactaaaaggatcctggaactctctgaagttgaaagtttcaaaattttctcttttctcctgttcaaatgttggaggcatcagcagtgccagttttctttgggtgaatcatggtgaaggtgagctttggggttctgttagtgctaagaatgataaagtctctggagaaagtaaagattttcttatagtcgcttgcaaggactctgcctgcaggcggggtgacggtgaaggtactaatgcgctgtctattggcgctgctggctgttcggtgacccacatcaggaacccaaagctaaaagagaactacacttatgttgatgttcgttctggtacaattgtagcacctggtggccgtatggattggatcaatgtgatatgcctgctgttcagttcaggttcaaatggaactgaaaagtcagttgataataacacagtaaatagctaccaattgaatgatccttattcgtcatctttgtttctcgagttctctgatgttgctgttagctatgaacctcattttaaaaatttcactcttagtgctgcaccaactgaccccaagtttttctcatgccttttagctgcatcatcatttaaactccataataaatctgcatcagcctctgcagctgctgattttgatatccagttacgtgatcttggaatcctcatttctcaatcatctggctcaacaaatgccacctgcagttacagtgtaggttaccttcatcaagcaggttatactaaggttgcccagaat

SEQ ID NO: 189934 - DNA, 358 bp, Zea Mays
gccgaggccctggccgagttcgccgccatctgcatgctctggacgcgcgggtggtcaggatgctcgtccatggccttcgttcgccatggatgcatgctctgtactcttctacaagcaaattctgctacatggcacctagccaacgttgtgtacttgtgttgccattggttattagtacaacgctacggagctttagttgtagaaaggacttctctacaatagtttagttcggtctctattaaagtttttttggctccgtccctgtactactacggagatttagttggttgtcagcacgtctgaacatcatcacattgttcttgttcagcagcagttagccagcatcaacagaaactgc

SEQ ID NO: 189935 - DNA, 407 bp, Zea Mays
tcaaccaactcagccatcgacgatgaggatgcatgagcaaatctggaccatcttttgagcatcaaactgaaacggggtcccctcagaggtcttccttcgttgagaaccttggttgtcgtgtcttcatccggtagaaacaacaggaagtcttcagggtaggtctgatgaatcttcatgtcctccaacttaacaccaaaacaatgcctcacctccttcaacacgtcagaaccagaaaccccaggtcgtgtaccagccacagagacgaatagagcacgacgaagggcaatttcctccctagcaaggacttcagaaaaatccagaacacaggaggaggctgagggtggcctagccacctcagagctgaaactatctagatggggagaaggaggtgggcatgcctgagtggg

SEQ ID NO: 189936 - DNA, 386 bp, Zea Mays
cctactttaaggtgaagtcaaggcgatgtccctccccttgattgagtctagattctagaaaacaagttgcgttctgaatgagtaaaatgacctcaccaacatgaattacaagcagccacctgattgcaacctggtcctatttgtgttaaactaatcaaattgttagttctatgacaactcttaatgaaaacaagattatcgagatgcatatgctagatggatacctatggctgtgtgatttaccacctgatgagttcatttaagaaaatggtgagtcaataaaaaatattgggtttgtagtctcgatttttctttgtccaaagtactccatttttaatcagctaatgaaaccgtctaattaggagatctcagtttttttatatata

SEQ ID NO: 189937 - DNA, 382 bp, Zea Mays
caggatatagaccagtgagggagcgacaagaggcggaggaagaggaggtggtgccggtggtcgtgctgctgctgctgctcgtggtggtggctgtgcaggtgcggagatcgtcgatcgatcgctgcggttcgtcggcggcggtgtcgagatgtcgatggacttcggtgccccggcggatgaccccaaggctttccgcaacatctgccgcgaccgtacgtctgcaccacgcgcgcgactttgattgatctccgctcttcctcacgtcgtctgctttacgaattgacgacccgactgctcggttccgctgttgctcgtttgtgctctcctcagggatactgaaggacctgcttaagcctgacaaggataaggagaccaaaagctc

SEQ ID NO: 189938 - DNA, 313 bp, Zea Mays
gtgatagcaatatgacgctaacattgttgtatatttaagtaattcacaagattggagaacacatataaaggggcctccaatgttttttccatactaaaaccatctataaagtgttgcaattgtgaactagacagtcatctccctctacacgtggtgcttgatcatcacccacatcatcaaaacaaccttttggactttggtgagattagatagttgtactttgcagtataattatattggcttcacagtttagtggtatgccttgagaattagacacatatgagtcgcccatttgtgaccattttaaaaaaat

SEQ ID NO: 189939 - DNA, 343 bp, Zea Mays
ttatatgaccttcaccctgagatctccttgctttatggagaagataatggtgcagctaccttatccagcaaagagcagggtattgacactacagctgaaagattggtggacacttctccctcttaccgctataatgagcccaggattaaagtcataggggttggaggtggtggctccaatgctgtgaacaggatgattgaaagctccatgaagggtgtggaattctggattgtgaacactgattttcaggctatgcggatgtcacccattgaaccagaaaataggttacagattggccaagaattgacacgtggtcttggtgctggtgggaacccagaaattg

SEQ ID NO: 189940 - DNA, 521 bp, Zea Mays
ccgatttggtgaaggcagactctccctgaagatcttgtacctcgccgcatatcgccgggaagacggcagctcgtagagacgccatcatgttgacggcaacagccggacgtcgacacctgcttggccgccgtgctgatggagtgcagccgtggtcgccctaaccacggtcgaaaatgatccgccgcggttgaagatgcctgcacgtcggatcgagggaggctgcatcgccaacgcgagcggctgaggaacgaagcggcgaccagatttttactaaccctatgcggtgggatgtgagaaggtttggctgaggtaagcagggagttgtgagtcacagcgtcaggcttgcgagtgtagttgcgtcaagcccaagcgagtgtaaaaaataaaaataaaagagggagacaaggagcgtgatgacctgtatgtttgtgggccgaatatagactggactgatatctgagaacgagtcaggaattgagtggagattcggccaatagaattagaaatgaggtaattaatag

SEQ ID NO: 189941 - DNA, 417 bp, Zea Mays
cccagccctacggcacgccatgcggcggtgtatggacgctttatgagatcctcgactcccaatgtctgtactacaaggaaatgcgccacaccctatgaatctacttggacttcaagaactccattggccatggctgaccattccagccactatcgccacccccacagcgaggagaacctatcgagcagggtcaaccacagcagtagggcaggggcagtggcagtggtgaagccttcccgcacattgacagggaggtcaatgttattttcagaggccacggggccctcgagaacaagaggcaacaaaagctcaccgatcagtaggtctaggtggtaaccaatagcacctgacgctgtatcggtggtcggaacacgccatcatgtttagccaagccatccagtggctcaacttcgatca

SEQ ID NO: 189942 - DNA, 382 bp, Zea Mays
gcccattgcactgaactcagttttggttgctagagattcttctgttattttagaggttgctcttccccgtgcatgcagtagatcgcgtgaattcagagatggccagtctgcactctgcagtgggtgtgattgtttgtattgtccatcttgcaagtacaagttgggcgattctttcttttttacccagctcgtgttctatagaaagaccagtcagcatgtgtggcagccaggaaactggcagatgtaactgtcgaaatctcctgaacagaatggctggtggataccggtacaaccattttctctaattctccgtttctgctctctgtgagaaataagttgagggtgtcattgcttttcctggtacgagctgaacacataccat

SEQ ID NO: 189943 - DNA, 383 bp, Zea Mays
cttttttaaatactgtttatctgcaaagaatgcgcacattggttgatcgccatgaagttgtcaagctttatgaggatgtctttaagaaaaagatcagcattcaccaaccaaaaatgctccatgttaatccacattgcttggttgttggaagtgcctctattagaagaaataacatccaatcatataaagtgcaaaacaatcaactcaacatatttccaggtgtccttaatagtcttgaagcagccatgcactgtatccagcaaggttggttgtgcattcttattggacaaaattcagctggtaaaacatcattaatccgcttgctggctcagctttctggaaatacgttgaatgagttaaatctgtcgtctgcaactgatgtg

SEQ ID NO: 189944 - DNA, 910 bp, Zea Mays
ctccccaaaacggcatgcgctccctacttttttaggcctcgattcttgttcggttctgggctaaggctctccacaccaccacttacctgcttaattgtcttcccaataaaacgatcagtgcttgcacccctcacactttgcctcatggatgctttcttgtttctttgcttttggccaccgcaaagggggcctttcctctccctgtactggtcctttatggaccttttcctttctcttcttaatataatgatatgcatctctcttgcgcgttcaataaaaaacctcactttgccttatttgactccactcctagtcatgagcatcttcgcgtcttcggttgtgcttgctaccccaacctttccacctccgctcctcataaacttgtccccattcgactcattgtgtctttcttgactactcccctgatcacaaagggcagtgtctcggtctttccacccagcgccttttgatctctcaccacgtcgtcttcaacaagtcttcctttcccttcacctccccctccacctctgtttctgatttggattcccttttcgcgactgaccatgtggattcccctagatagccacctctagtttttcccctgcaggttcgtcctccgccacgtcacatgtggccctggtgtcaccagtcgtgtcgtgtgcgacctcgacgtcccccaccatgccccctacggccccaccatccccagtcgtgttgtgcgcagcctcagcggcctctttcgggccccacacaacttcggtacctcgctaccaagatcttatgcatgtctatcggcaatgtgcacgggatccacacatgaatttgacgcctcctacgccacttgcaaccttgctgcgtttcgccggccccatccatgtctatcaccgttgtacacaggatcgtcatcgac

SEQ ID NO: 189945 - DNA, 413 bp, Zea Mays
ttgggttatgagtcaggtacaaaagggtatagattgtttgatcctaccactgagaagctgtgtatcagcagagatgtagtgtttgaagaaagtgaaagatgggactgggagagtgcagaaaagaatcagcagactgaaactacaattcctttcactacacagtttcagtttagtgtgccagatcagacaatacaagcaccagctggttcaggtgatacgagtgagtcttcagggggtgctgctgcatcaccaccctcaccacaaacacctatgacaccttcagtgtcccagaatcaatcccaagctacatctgctgcctcaggttcaaataatagctctcagtcagtgaatgcaggaagttcagacatggttcctttgagatacagaacaatatctgacttattagactcaac

SEQ ID NO: 189946 - DNA, 462 bp, Zea Mays
ttcccctccacctagcatgcccgtcaggccctctcttcgccaccctgccatggagctcgtcccatgcccaacgccggccaacctcacttcccatggtcgtcccttcctccttcctccctatggtcgacggcctcaccttccatggcttccaagatctgctcaacatccattctagcgcgcacccctgcttccgtttcctggtggccgacgccccctccctggagctcgcccttgctcatccactcgtcctcgtcttcattgcgggcatcagcgcccttcgcctcctgccggtgagcagctcgccgccggtcgttgcgactccatcccgcttggtcacgtttgtctcgctgctccttccaatcagcacctagcgctgctcatcccgtcgttgatctgcgctccaagctctccttgatgttgtattcggtgggcaggagagaaattggaggaatctggcgaaga

SEQ ID NO: 189947 - DNA, 287 bp, Zea Mays
cttttactgaattttctaattctctaaactgggcatcaaattctataaagtgcaggggctaaatcataaactttctcagactcagtaaacaatctgagtggacggcgggttttatttttaagaaagtcaggggctcttatgcataataggcgggcgaaggggtatcggccaacttgagtcatccgaacagaattgagggcccagattagaaccatgctttaagtgaatcggaacataatgtgggccacccaatcaagatccaacactccagatcagaccccaaactc

SEQ ID NO: 189948 - DNA, 577 bp, Zea Mays
gtacttcttctggcgacgcccatcggcggtctcgatgacgaactcagtggagaagatgttagtgagtttggcgccgtatccgttcctcccgccggtggtcttcttctcgttgtcgttgtagttgctactggtgaggaggtggcccaatatcatctctggcacgtagacgccctcctcctggtggacctcgacggggatcccgtcgccgttgttgtatacggagatgcagcagctgtcgacgtcaatctcgacgcggagcgcgtccatcttgggatcccgctgcttgttgtcggcggcgttgacgaggatctcgtcgaagatcttgtagagtccagggacgtaggtgaccgagcggttcaccatggcaccgtcctcgtatatccaaagcgcctgggtgtgcttctccacggagccgatgtaggtgtcagggcgcagcaggatgtgctccagctgcgttttcttctggtacatctcctcgatggtcttggccccgccgcctgcggcggcgttgtggccggagctggagtgcaggggggccgccatggcggcgacgcgttgcacacggaggtcgtgtgcc

SEQ ID NO: 189949 - DNA, 508 bp, Zea Mays
gtcgccctaacatggttttacgttccaggggtaagggctcaaggagtgttctcaagcgtctgaaaaatgggacaactatccatgatgctggctacttcattccaatagagctggatggtccagaggtacacactcctgttctctttcccttgcttgctttgcttgtattttttcccattctctgctagctgttatgagtggcttttcatcttctgatggtttagcaatcttactgagtgcgccactcgctccaggacgccctgttatccgttctcagaatggttctgcgcccatcgcctgcagaaaaaacacccgatttgaagcatctacaggatcaagttatgcgaggtgtttgctatgagaatgctatggtatttacatgttcaccacaagacagtatggggtacaaatgtttgaagtgacaactgtgacttaattgttctttccagctttgggatgttaggagtatgcattctcaaattgttggaccagtaacatatatgtggcg

SEQ ID NO: 189950 - DNA, 532 bp, Zea Mays
gtgtgataaccattcctgaagatcggcatgaggaatggcgtccgaggcggaaactcccagactgcgaggggaacgcccatataagacttcaaacggtgaagtgcccagggaagaatgtaatgaagtgttgtaccaatattccgccagcggcagccatttacgccagtgatgtgggtgagaactcacaaaacaacgaaggaatgtttccaaacattgattaacccgttcggtctggccatccgactgtgggtgataggacgaactcattcgtagcatggtgccagacaaccggaatagctccttccagaatgtacttgtaaaaattatgtcacggtccgagacgatggcttctggtagaccatgtaagcggtatacaaaatccatgaacagttgggcgattttcagagcagtaaagggatgcgccaatgcaaggaaatgtgcgaatttagaaaatttgtcgacgactaccaggatgcagtcatatctcccagatttaggcagtccctcaataaagtccatcgaaatcacttgc

SEQ ID NO: 189951 - DNA, 1254 bp, Zea Mays
accgcctcagcctcttccttgccgtcgccgccaccattgccgcagcgctgctagcttccgtcgctgcggaaaacggcatgaacgacgttgaggcgctgatgcagctcaagaagtccttcaccaactcctcgtcgctctcgtcgtggctcattaccgataaggacgggaacaggtccccctgcgcgccggactcgcaccactggcacggcgtggtgtgctcccatggagtggtcaccggcctccgcctgaacggcctcaagctcggcggcaccatcgaagtcaactcgctcgccagcttcccgcgcctcaggtccatctccttcgccagtaacaacttctccggcccactccccgccttccaccagatcaaggcgctcaagtcgatgtacctctccaacaaccagttcaccggcagcatccccgacgacttcttcgtcaatctcagccacctcaagaagctctggctcaatgacaaccagctctccggctccattccagcttccatctcacaggccacgtccctcctcgagctccgcctcgatcgcaacgccttcacgggggagctcccctccgtgcctccgccggcgctcaagtcgcttaacgtatctgataatgaccttgagggcgtcgtcccggaggcgttccgaaagttcgacgccagcaggttcgccggcaacgagtacctctgcttcgtgccgacccgcgtgaagccgtgcaagcgcgagcagcctgtcaccagctcgtccaggcgggctatcatggtgctcgccacgttgcttctctcggccttcgtgatggtcatcgccctgcacttgtgcagcagccagcctagcagcagccgccgtgcccgcaagctcgacatggagggcctcgaggagaagtcgcccgagtacgtggccgtcaagaaggcgtcgtcgacaccgcagaagagctcctcgtggctcgggaggagggcagggtcgtcgcttggtgggcttggacacagacgggccgcttctgccgcgaaggtggacgatctaagcagcagatccgcgggggatctggtcatggtgaacgaaagcaagggcgtctttgggctcacggacctcatgaaggcggcggccgaggtgatcgggagcggtgggctcgggtcggcatacaaggcggtgatggccaacggcgtggccgtcgtggtcaagcgctcccgcgacatgaaccgggcgaccaaggacgcgttcgaatccgagatgaagcggctcggcgcgatgcggcatg

SEQ ID NO: 189952 - DNA, 542 bp, Zea Mays
ataataatgatatgtagctctcctacgtgtccgataaagaaaatatgatgcaacatgagataatttggacttcaggatgctcggtctgtgatagtatgatactgtgatgtaccagacttaacctttgtattgatttctccttttctttggactaccaagagagaactatacaagacttgttacatttcttctgactcctatcaaccagttctggatcgatcagcaaatgatggtgaaggccctatacacaaatcacgcaagaatttactgtagccagacgaacactttgattgctgccggctatccgtaacatgagtgatgcgtctgtgggtgcgtgtgttcgatcgatagtgcagtacggacaataatagtatatagcaataatggttgtcgatgctgtacggccgcctgtggacttgacccgaagaccaggctggccagtttgggagctaaggctcaaacggtgaatttttataacatgaagtctgcacactacccaaaaaatgcagcacaaagttgaatttttataacatgaagtctgc

SEQ ID NO: 189953 - DNA, 470 bp, Zea Mays
tattggagtagcgagggtgtagaggggcccgaagctattgtacctggcgatcaagctcctggaacgaagatccgtcacagaaaggccaagagggtcaaattctatagaacaattgttatcagaagtaaactaacgaacgaaaataaggttttgaacaatatcgggagcaacaaggatgttactaagatagaagggacccggtatgatggagtgggcagaagctgtgacaggtaaagtggacccgtttccaacaataatggaagtggagcgtggtgggcgaaataaggagatgttaccactgacaggagtcatatgactagaagcgctggaatccatgacccaatctgttacgccaggaggattgaggatcatggtgctaaagttgctggcgagggactgctgatcccaggatccagtccacagagtccatggtgcagtcggggaagcaggaactgcggggggctgttgcg

SEQ ID NO: 189954 - DNA, 528 bp, Zea Mays
agcgaacgcacactttgtacgcttgtcgaagaggtggtggcggtgcagctcgtcgagcacggcgcggaggtgtcgaagatggtctgcccatgtcttgctgtatatgagaatatcgtcaaaaaagacaaggacgaaccggcggagaaacgggcagagcacgtcgttcatgagcgcctggaacgtcgctggcgcgttgcagaggccgaacgccattaccaggaactcatacaacccatcgtgagtgcggaacgccgccttgtggatatcttcaggacgcatgcgcacttggtggtacccagaacgcaggtccagcttggagaagtaccgtgccccatggagctcgtccagcagctcgtcgaccacgggaatggggaaggcgtccttcaccgtgagcgcgttgagggcgcggtaatcgacgcaaaagcgccaggacccatcgggcttcttgacgaggaggaccggcgacgagaagggcgagtcgctgcggcgtacgatcccttgctccatcatggcggcgcactggcgttc

SEQ ID NO: 189955 - DNA, 335 bp, Zea Mays
tttataaccctagggtctgcactacacactacacaaagttgctgtcccctagtctgcaacactagagagtagagatgctatcctgttgtcctttagatgttaaaggaggacaaccaaaagactcctgctgtcctctagatgctaaaggagtagatgttaaaggaggacagtcaaaagactgttgtccttcacaaggctgaaaagagatgctgctgtccctacaacgaagactaagatgctctaaggaatgagatgccatgcaacaaaagattgagatgctgctgtccctgcagtcctccacaagaccatgctgctgtctctgcagtcctccacaa

SEQ ID NO: 189956 - DNA, 347 bp, Zea Mays
gtctatcacggcggggcaggggctagggcaggcaggcaacacgtggcccgaccaacatgcgggcgtggttgacggaggctggggcgaggaccgtgggatcaacggtgcgcgagcgagagaatatcgaaggcagaaccatggtgcacagggtgtggacgcgtacaatgcagtcttatagagtagtagagaaatacatgatttatgacataattgttggacttggttggtggggacttggtcgttcgccccgcctcgcagacttgctcgacggggatttggtcggtaaatgggccagagggaggtttatggcctcaccttgggtagcagccccaagcattcgtgcgata

SEQ ID NO: 189957 - DNA, 563 bp, Zea Mays
acccggctgaaaaggcgatcactgcattctctgtgctgcagaagagcttctacatgtgagtcatagacttatagttgttgccgactctgagtcggtgaactccaaaggatttagtgctctaatgtgaattctgtgcctggcagatatgttggagatagttctggaagtgtgtccccattgaagcttgatttggctcagagatgtctagctgacctgccgtactggattccttttactgaatcttatggtatgatgctgctaaactagaaatatctgtctaacttgctcataatcaactttgtcaagcagtctcattttttgtatttttccagtatgtggttatattcaaaggtagcagagattggtttaatttttagaatagttcttgcaaaaagagctgccgtaattgaagtggaacaccaaaatttgacccattttgtttttggttttttgtttctttgctgaaggttccactaccagtgccggtaatgatgtggaagtagtatttgtttcaccccagcctttgtctgaatcgaacaggtcaatctcttcctagtgctcag

SEQ ID NO: 189958 - DNA, 783 bp, Zea Mays
cttcatttcttctcccctaaaggacattaggcactagctccatccgattaagtcccaagatctcccacttcctggacacagctgtggccctgcacttgcacatggagcactgagcggtggtgcaggggatggggacatggcttcggcagtggcctttgaggcactgatgctggcggatatgccgtgggtggtgccacttgcttcttccacaagaagcacactcgcggatcagcgacacagagatcacggaggcacaccacagaagacatgcagtgcagaagggtgctctactctggtgccatggctccatgcccgcatggcggcctatactgtgctggtgtcacaacacagcatcttggtggatctctaagaccagtgtaggtgcactatggtgaaggcgggctaggggaagggaaaggggtgtcctcggtggcagacatcgactccactggggatgccgtggttcagggctagcagcgacaacatggcagcaaaggatgacaacagtgagacctgcctctcagtcgccatggcaaaggtgagtctaactgcgcccggcgctcagcctacgtggggtcttccttgtcgtggcctatgttgatttgatagtcaagagggaaaagggaaggagagcacgcattaggtgttggacctctgacctgtggctgcacaatgcaagcacaaggcagaacgcgagacacgcagcaacacagcaaggaacgccagcctctgacgtgcagtggcctatgaccgtggtgatgaacaattgaacatgtgtggtgc

SEQ ID NO: 189959 - DNA, 507 bp, Zea Mays
ggttgtcattagaaattgagagagaattgggctccaaaattgactgtcaggctgtctgaatgcaactctcccatggtacagtgctctattggtgattagaccgccagcgcaagtgctcaccgccgacgacctatccgcgccgcgatttgcgccggggtcgaggtgatcgggcggcaaacatctccccgcgaagacctctttgctccggataagactgccgcggtggagggcactagctccggctgccacgcggccatccctccttccggccatgtccggtcaccggcgccgcccttctctgttcggccacgccatcatggatttgactgccttacggccgtggttgtaggcgtggcatccttaggagtattctccttgcgccgttgcgtcggtgaacgccacgggtacagccaccgtatccttcctcatctccggccgccgcgttgctcgaccaaattgagtgccaccgacgaagtctcttataaattgagctcgtgactagcttcg

SEQ ID NO: 189960 - DNA, 942 bp, Zea Mays
atgaaatctgtagtgggactgtggcctattatttatttctgactgtatacaatataattttcattctggttccttatcctttatctctgagactttactattaggctctgtttggttcacaggaattgagaggaattggaaagtaatctagtaatgaattgggaagcactttctaattctatatattggattcaattcatgggaagggtacccctcaccttcaatgtcactggtggcttcatttttatggttggttggcagatagcccatgtcacatgtggtatatgtattatgtctagtaggattgcttgtcactttgtcctcaatgcaatgtgttcattgcattagttgtgattattttttatattatgaaaatttcccttgagtatgcactacatactgtaccagtttgagccgaacagaattgtgaccttgcttgataattcatgactcactttttaattccttctctgcagaatcttccgtctctttcgctaactgtttggatcattttacgtggagattgcatgccatcaccttccttgaagtgaaaaatatatgggctgatcttggcatttcatgggaggttttgaagatgatgaaccaccctcaaaacgcgcaagagcatcctcagtagaatctgcaagtttaccagactgtttcttgttttcaaaatctgccaatcctttgggaagtacaatggctagacctttgccttcccaagggaaagaagctatggttggttccaagggtgttattaagaaggaggaatttgttaggataatcagcaaaactctgtatagtcttggatatgagaaaagtggagcagttctggaagaggaatcagggattactttacataaccctatggtgaatcttttcagagagcaggtgattgatgggaattgggataatgcggttgttaccttgaataagattggc

SEQ ID NO: 189961 - DNA, 463 bp, Zea Mays
gagatatggccgcttgcttcttggatttccaggcaataggagaggatccaagaagaatacagtaacctgtagtagaacaacggtcaacagggtcacttgcccaagtggcatcagaatacgcatgtagctgaagaggactagcagaatcatagagtaaacatcttgattgtgtcccacgtaagtatcgaagcacacgaagcaaatgaccataatgaactgaggttggtttggatacaaattggctcaacatatgaacaacatgagcaatatcaggtctggtgatggtgagataaacaagactaaccacaatatgacgatatcgagtggggtctgctagaggtgtcccatcctgcggtcgaagttttaaatgaatatccattggtgttgcaactgtccgagtatcagtaattccagatcgatcgagaagatcttgtatatacttggattgagacagataagaacc

SEQ ID NO: 189962 - DNA, 367 bp, Zea Mays
atgtaatcttatcgattggagctgcacaaattttgattgcaatatactacagatcatttttaagtggtgatataattgtccaagctaaaattaattcacttatgattccttgtattctcttctttcataaaatgccaagatcagtgaaacatcaatggaaaactcaacaaagttgacagtcctttttgaagtcactgtattttatgaacatattcaacaccactttttttattccccttattttgtaaccataatactgcctgtgttaggtgcgtcattgtaaggtggctggctggagaccatgccctcagtgtgttgaggatttaatcttatatagttccttctaggagaaggaatatcaatagca

SEQ ID NO: 189963 - DNA, 343 bp, Zea Mays
gttctccgccggcatacagaggtcagcgtagtggagcttcctttggtcgtgctcaaggcacagatcactatgttcagggttcgtcctcctgccatggttttcgtgaagctagctgcagggatcctcaggttgtgcagaaagtgactcttgagccaccccatggctcggttatagctccgacatcctctcctgaagccggtttacagacgcttgaggctggccaccccacaccctccgctcatggttttaccgaagatgttggtggtggattatgcgttgtgcagaatgtgatcttggagccaccccctggttcggtcacagttccgacgcttgtatctactca

SEQ ID NO: 189964 - DNA, 373 bp, Zea Mays
agcttccacacgccgcagggcgccatccaggccaagcagcaggtctccatcctcttcaagtccttcgtcggcagcttcctctggtccctcttccagtggttctactccgcggggccaggctgcggcttcagctccttccccacgttcggcatggaggcctaccgccgccgcttcttcttcgacttctccgccacctacgtcggcgtcggcatgatctgcccctacatcatcaacttctcgctgctgctgggctccgtcgtctcctggggcctcatgtggccctacatcgagagcaagcgcggcctctggtacgacgccgagctgccgcggagcagcctccacggcctcaacggctaccagatcttcatctcca

SEQ ID NO: 189965 - DNA, 568 bp, Zea Mays
cggagatcgagacagcctgagcacccagagtgatctcctcgagggcgaggtcgtcgcggacctggaggaaggtaggaaaggggcgctggcgcatgatcaacgaccggaggtgggtgtagcgattgccgaggccgcggaggacgttgaggactaggatgcggtcctccacggggcagcccagatcaccaagtgagtccgccatggtcttcatcttgcggtagtacgcactgacactgaggtccccctggatgaaggtgcgaaaagcagcgtcgaggcgaagagcccgggcctcggcgttgcccatgaactggccctcgatggcaagccaaacagcccgagcgtgaggaaggttgcggaggaggctgtggaggtcaacggagatcgtccccacgatccaggtgagcacgatgctgtcaaggcgcacccacgcggcagtcggcgccacgccggtggggtcaaagaggacgtgttcatccagagcgtagcggcgatggatgaggagtaagtcccgccagcgtgcgtatgacggcgactcgggctccaggacgacaagaaccatcaggcgaaa

SEQ ID NO: 189966 - DNA, 331 bp, Zea Mays
agaggcgactgagactcttctacgcagtcgggacgagatacttgctgaagtccgtcaacgtcttcttcaagcccagcagatgtccaagaaatactacgacgccaaccaccgcaacgtggagtatgctgtgggagactgggtttggctacgcctgctgcaccgaacagcgcagtccttggacccccgtgccaagcgcaagcttgggccacggtatgcgggaccatttcaagtggtggaacgcatcggcagcgtcgcctaccgtctacagcttccggacggggcgcgcatccacgacgttttccacgtagggctgctgaagcctcaccatggc

SEQ ID NO: 189967 - DNA, 331 bp, Zea Mays
aacatatcttaacctaaattaatgtcttccaccaactcatccgtgaacaatgacctaacctacatcacaggttgcctagttcatctattccaaaagcaaagtaaaactctgttaaaacctacctacctcgtgtacctcggctatcctaactatatatccttagccatatgtccttaactcgaatgacaaccccaagaataaaggccaaagaagaccaaccacgtcaaaggaggataagcatcaactcaagtcttcaaggatcaagctggatcattggatgaatcaagatccacaaatcttggatggagtctttccttaccgcactcttccc

SEQ ID NO: 189968 - DNA, 293 bp, Zea Mays
tcccagtccactgcctcctgccaaaataaatccgtccgctctccagcttggtggcacaatcccatcgaaagctagggtttcaagcctcttccgacttctccttcccttcccttccccaccacaacgcggccgccatagacgcggtaccgcgcgaactcccatagatctgagcgagccaccctgcgaatcatcccctgacgcaccaaatctggtcagaaacggtgaagagttcggacacgatcttaagcgtcgttgatttaagaccacacacaaacacatctgtttgcccttcc

SEQ ID NO: 189969 - DNA, 342 bp, Zea Mays
agaagatggatctcagatattaagggggccctctcggtgggagttttggtggattaccttcagatttggaaccttatgtctgagatagtgctgcagcctactattgaagacaaacatgttttcagtattgccccagacggtatctattcagcaaaagtggcttacgaaggattcttcatgggatctaccttttccgccattattccagggtgtggaggacttgggccccgcctaaatgtagattttttctttggcttgttgcgcacaacaggtgctggaccgctgacagattagctagaagagggctggatcaccctccgatatgccctctgtgtgatcaag

SEQ ID NO: 189970 - DNA, 746 bp, Zea Mays
ccacaggctgtttctttgcattcatataggtgttatgagcaaagtatcattgacatgttactttctgatgaggctgacaatagtagcaaccagatagtcacttctgcttgcatagttggtgaaagtggcatgggaaagactgagctagtccatcgaatttacaataaccgaatgattttggatacctttgatttgagaatatggctgcatatgtgtgataaaaagaggctattaggtaagatagtagagctcactacttttgcatcctgtggtgatgcctcaatcagtgttcttgaagaaattgtaatagaagaacttgctagcaagaggttgttacttgtactagacgattctgaaatcaaggaccagtatttctggggttatctatggaagctacttaatgtttgtgcaaaaggaagcgctgtcattgtaactaccaagagcatggtagatgctaaccagactggagcaatgcaaaccttttacttgagtcctctatccaaagaagaatgctttatgattttcaaggaacatgtgcttgaagatttagttgtgaataattactgtcagttagaaagcattggctggaagtttgcggagaaatgtggtggcaatccaatgtgcattaaagccctaagtgggttgttatgtcattctgaagttggattgtctgaaattgatatgattgttgatggtatcttaccagcattaagattatgctacgatcttttgccagcacaccttca

SEQ ID NO: 189971 - DNA, 482 bp, Zea Mays
ctcatactcaccacctctgacacttgccagcagtagagaattccaggcaatgtgaaagctctcctcatgctgccattgctcaaataacagatgcgcgtctccagatcggccacatttgatgcacatgtcaatcaacgcagcatcactccatggactagacacacatccacacttgatcacaaacgcatgaacctgctcgctcaccttcctatccgcagcaatagcacaagcattcagcacgcctgtcaccgtgacatctgagatctccagcccatcctccaccatttgcctaaacaaacccagccctcggagccccgccttcttggcaaaagtggcgcgcacgccttccttgttccgacaaaacccagtgagaaccgcattgtatgtaacgaagttcctctgcggcatccgctcaaacacatccagtgccatgtcaacgagaccaaactccatgtacccattcagcaaaccagtccacgaaa

SEQ ID NO: 189972 - DNA, 457 bp, Zea Mays
caaacagtgaagaattgaagaaggtcaaacaagtaatgcattttacagtctttgcagcatatcacttgatccttgaaacatctttctttgaagatcaaagggtttttctgaatgatagtactacaaaagaaacttctgctactgctacagaagggacttatggtgttgctgctcttagtgggcctattcctaactttccttcacatgatgattctccggcacttagactgttccatgccacttctaatagctatgctgatgtgaacaaacctttgatatctccaagaaatgtggataaattcagtgcagtatccagcagctcttcaaatgaccttgaacaaggtgcaaatgtcaggtccaataatgccgagaggttaacattaccagtccaagggccactaaggaaattgttcgctgacatgttatgtcaccagaatatttacttacccgttacatc

SEQ ID NO: 189973 - DNA, 298 bp, Zea Mays
ctctggtggtttgggcgcggagggggctgtgcaacatgttgtttgcgtagagaccccttcatgcgtgctggatttctccactgaaatggcaagggaagaggctgcgctgcggaaggccctgttcgtcacagttgctagtaccaggcctgaggttccagcagttgacatcatcgaagaaatagctcaaagtttcaacgtcaatagagctaacatgtctattcatcggaccttgccggaagatttcttggtgttttttcccgatgaagatacagtttcaagggtgctcaatggaggaaag

SEQ ID NO: 189974 - DNA, 659 bp, Zea Mays
tgcgagagggttgcaatgctatgatggaggtggttagggaggcggaccattgggttgtctccaaacttgagaaggctcacaaccatgagctcggcacttgtagcgccaaggttgggtaccttcgtgcgagaagttctcttggtggctctgataaggccacaatggtggggcctgacgagatggcgtttcttaggcagaatgtcctgggggaaggaggagacgcccagggccttcttgattatctcaagaagatgcaagccaatgacccggcgttctgccatgctatacaggttgacaagaatggctgtgtggtgaatgttttctgggctgatgctagggccaaagcagcttatcggcatttcggggatgctataacgttcgacacgacgtacaagaagaacaagcatatgatgccctttgttactttctcgggagtcaaccatcatctgcagactgttatttttggatgtgcattgcttatggaagagactgagttctcgtttatatggctatttgaaacatggttagcggcaatgggaggtaaggcaccatgctcattggtcactgaccaaaacagggccatgaaggctgcaattgggaaggtttttccgaattcctgtcaccgtttctgtaagtggagtattctgagtagaaccaag

SEQ ID NO: 189975 - DNA, 616 bp, Zea Mays
catattgtttccatgcacgctcatgttcctccctcattgtatttgttgacttcacagcctcttgtagcaatggctcgcctagttggtaaggtgttggaggcttataccctgaaccaaactgtgatgtggcctcaattgcaatctaaaactgcctagctgctgcggcattgaaaggtacaccacactcatagaagaacaaagcccactgcatgtccacatagtgttttgtcctcctttactttttgcactagccaagattgtgggctgataagagtctgaaagtctctcatccaccacctcctctggtgttctccgcaacatctcaactacggacttggctggctttggctgtgctttactacttgccttaaattgcaaggttgattgtctttttttggctgttgtaccagaactaggctgcaccttggatgcttgagactccacaacagatgtatcattcgccccatctgttgctgccacctccaccacttcatcatcttcttcatcttcatctagaaacattagtctttttctcttgtttgcctccaaataacttgtcatctccttccttaatccactgctagccttgggacataactttgcatctccatatgcc

SEQ ID NO: 189976 - DNA, 531 bp, Zea Mays
aagaaacataatcttaacagggacacaaggtgatcttgtcaatttttctgtacacataatcacagcttttatgccatgcactggagtaaacatttacagtctaagaatatactgatttgtgtctagtccacgcttatccacatagcttagtaaactaacctatttgctcaacctcaaaagagaagttcaaccagcaagaatcttgaagccttcctccaaggacttcgaccaaagcaaggcctgcagcagatagctgtaatgcaagaaaatagataactgatggtgattcccatggctggtccctgcattaacatccatgattagatgcaatccaaaggtgcctgcataggaagaatctacaaataggtggacatatgaatatgtgcacatccaggaatacagaatcagcaaaatagactggtaaaacatagataccttgctaaacccaccagcttcgcccaccaagaatgagccacagaccatcccttgccctcaatgtaccagattatatgaaacgcaacttgtgctaaa

SEQ ID NO: 189977 - DNA, 724 bp, Zea Mays
ttggtgaatattctttagtcttgaagcaagttcttccggttaactacatcacaaccagtccggttactagttgggcgcaagtcttgcagcgatctgtaaggagtacatcgcaagatatgctttccctggctaaaatacaggctgcagaagtcattgctaaggttcaaggtgaaggcattaatctggtgcaacaaagatatcaggatctcgtaaatcaaatggaaagttatgtttcatgtgtggagaaacttgcgagggagtgttctgaactgatgaattctattgggttgaataacgaagtgcaatcaaaagagcggatactttctgtattcatgaactctgttcagttgccttcacaaaagaaggatggtgatagtactcatttatcgcattcaggaagtcctcagcagggtgagatcaaaactccagccaagggcgatgtacaggagacaacaggtaaggtcctctctattcttgggattgctgtgagtcagctatatggtgatattagagccaaagtgtctgaactctcaattaaagctattggaaaagctaaatttaggacagatgattctggtcttcaagctgatgctggaatgagcttgcaagtatttgaacaacatatagaaaaatgtgcattaatttctggagttgttgatgaagtgcatgaagttattgggagaaccttagcagaaacaagtgctgcttatgcaaagcccagtcc

SEQ ID NO: 189978 - DNA, 345 bp, Zea Mays
atgaggcacatgtttagggggaggatgtactacaacttgaccccttgagactaatgagtttgcttgagtgattttgatagtctcaaagatggattgaaagagaaaaggtggacttggacaaagaagaggcttccactgcatttcggtatcaatgtatcttgtcccaagtccctatctatgttctctcgttacctttggttttacttgaaatttttgtcagacaatggggttaagaggccaaatagttcttctgttttggtgcttaatgccaaagggggagaaattaaggccaaagcaactagatcagctaccacttgtggagttcaaaggtttagtgaaagtata

SEQ ID NO: 189979 - DNA, 773 bp, Zea Mays
gaggagttagcggaggtacaagaagttatgacgtgtaacgtggagaatttcccctgcaaatacctgggcatgcctctctcagtcaggaaactaaggaaaaatgacttgattttgttagtggataaggttgttgatcattgaatgggatggaaagcgaccttagtgcatcctgcgcgacgtgcaacccttgtcaaggcagttctcacggcagtgcctgtttaccatttcattgccttacaatgtcccaaatgggtgattaaggcaattgacaagataaggagaggctttctatggaagggaagatattaaagggggtcactgtctaatgaattggaaccgagtatgcagacccctagagctagatggtttcggcattcacaatctagagtctcttggttgagcgttgaacatgaggtggctttggttgaaaaaaaactcaacctaatcggccttggtctaggttagatattcaggtgcatccaaatgttgcagctatgtttgcaatctcggtggtgactttagttgggaatggggaaagtactcttttctggacggacaaatggttgcacgggggctccttggaccaaatggctccggagctctcccagctcattccaaagagggttttcaaagaaaggacagttaaggatgccttgctaaataggcagtggatggattaaggatattagggggtctgcatgtgcaggccttgattgagtttctattgctctgggatgttttgcttggcattcaactcatgcccggggtgccag

SEQ ID NO: 189980 - DNA, 721 bp, Zea Mays
aaagagtggagaccttagggagaaactttgtagtacgtaggtttggggagattggcaccgactctaagaagtctaccgtaagcaaaatttatgggagtacacaggcaatgcctgagcatgatagccattcaagtgataatttggagagtgatgaacgtaggacagttcaattgcatagaggagcaaatgttaaaatggggaaatttgttagtagggatgctgaaactacagattttgatgatagagctgctttcaaaacttttgaggtatttactgatgtcaggaataggccacggatccttcgaatggaaatggaagagagaatccagaagttagctagtcggtaagtcttctatatacttgattattatgttgaaatgctcgagttgtcctggtttaggtctgacatagtactctttatttttgaaaagttgggcctttttggtgcttcaatgtaatcttagaatgagcatcacttttctttgcaattgcccagctttcatccaatttacctacaaactgctccttgtattcactgatattaccatctaccatcatcattcacacttaaaatataaccatgctgctcgacttggagtttttcccctgttgaattaacaccaatgaacttagtgtggttccatcaatccttatggttatttatttttcgaaggctcaatgctacagatgtaaatactccagagtggaaattctccaaaat

SEQ ID NO: 189981 - DNA, 428 bp, Zea Mays
tgttgatcaagttgactgagttcctccccttcacttcctcaggtttgctgagagaaccgaaatggggtcacttgaaggagttgcataaagctatcaagctttgtgaaccagcattggttgcaggagacccaattgtaacttcacttggcaatgctcagcaggttgttaattagtacagcattaaagttcactcttctgctcttgaacacaataatgttttatacatgactgacttggtaatttcctctttaggcatctgtttttagatcaagcaccgatgcctgtgtggccttccttgagaacaaggataaagtatcttatgctagggtatcattcaatggaatgcattatgatctacctccctggtccataagtattctcccagactgcaaaacaacagtctacaacaccgccagcgtgagattggg

SEQ ID NO: 189982 - DNA, 380 bp, Zea Mays
atgatcggttagtgtttcacttgtctagtcgataaatgttgtcataaataattgtgctaaaattggtcatgagaatgcagtgggcacgtggtgtgtttggatgtgacaagtagattggaagtgtggggtctgtcgaagcactgtgatgtcgaacgtgtatatcgaagtgcattgtagtgataattgcgttaagttaatcggtagtgtctcgggtgcacgccacgacatggttgtatgcgagacaaggtaatatacggtgtgctcgacacgaatgttcggtcgatataagtagaaattgttttggcttaattagagaggtggtgacatgccaaagtagtcatcgctttctctatatttataagtcgagtcgtgtcgatgcg

SEQ ID NO: 189983 - DNA, 350 bp, Zea Mays
cgcgatcaatttttactgaccctctacaagttctctctccaggttcacgtccactttgacgctctggtcccctccccggattgggatcgaatggactgcgtcctcaagtcctggattctcggctccctcaccgacaacctcgccgagaacgtttcccagggtggcactgctcgggacacctggctcgctgtcgagtcctagttctttgggaaccgggagatacacgccatccggcttgagacacggtttcacaacttcatccagggcgaccttcccattgtcgagtactgtcgttgcctcaagatggctgatgacctcaacgccctgggtaaagtcgtctccgaccgcac

SEQ ID NO: 189984 - DNA, 371 bp, Zea Mays
aagagattgctgccatagcttcagcatcagccattgtggtgcttctgttagttgcactcaccctgtgcatctgcacaaggaaatggcgtctgaaaccatcagagcgctcctttgcgagcaaagaagtcaaggttttcgctgatgttgatattggagcccccctgacatatgagaccgtcgttcgcgccactgggaatttcaacgctagcaactgcattggtaacggcggctttggcgcgacatacagagccgaggtggcacctggagttcttgtggcaataaagaggcttgctattgggaagcagcacggcgacaaggagttccaagcagaagtgaggatcctcgggcaatgccgtcatcctcatcttgtc

SEQ ID NO: 189985 - DNA, 309 bp, Zea Mays
ctttgtttcttcatgatccatgagcggtcattttattttgcatatccttggtaatcttgttgtctccttgtaactccacttggtaattaattttctttacttcaaccattctgttgcaaccttacctatcttacccttgactgttttctccactttaccacctagcgagtcttgcctgaactctatccttatgcttttcattagtatcatctttacctttgacacctctatatcttacttgatgtttgtctcatacctgccctttaaaatcacctctctcccgtcttattctgagagctatactttacc

SEQ ID NO: 189986 - DNA, 277 bp, Zea Mays
gcagaaaatgcgaacataccatttggtggcaaacctattgtgcttggaggagactttcgccaaattttacccgttgtgcggaaaggctcacgatctgccatagtgaacgcatcaattacaagctcaccgctgtggcaacatgcaactgttttgaaactacgaacaaatatgaggctctccaacgcttctttacatgggaaggaacgtgcagacatggaacaatttagcaaatgggtcttggatatcggcgatggtgctctgccggccgtgacaagag

SEQ ID NO: 189987 - DNA, 1073 bp, Zea Mays
tggcattcctaataggcctcatgatggaacagagtcttctagaaatggtacaattgaggatatatgtgctgatgaatcagccaatcatagtggtcacaatttagaaatgcgaaaggatacggacagtaaatcccatgaaaaggagtcacataagcgagaacaagtcaagaagatattatcagtatgttctggtgatgagaccaatataatgaaagatgatcaagtagtcagagaaaatgtttcagcttccaaaaaaggtgaagatgagacatctgatttgccagcagaaaaggatgataccatacttccagtcaccagagcttgtacaatgatcaggaccaatcaagatcatacagatgaaagtaaacagcatgggaaaatagaacaaataacaaataaggactacaatgatgctggatatgagttcttgatcaaatgggttggaaaatcaaatattcacaacagttgggtttctgaatccgaggtaaaaatattagcaaaaaggaaactagaaaactacaaagcgaagtatggaatgagtttgataaacatttgcaaggaacagtggtgccagccacagcgagttattggtcttcgtgcttctgtagatgaagtggaagaggttttaatcaaatggtgtggtcttccttatgatgaatgcacttgggaaagatcagatgaacctaccctgatgaaatatagccatttggtcactcagttcaagaattttgaatgccaggctttggataaagatgtggtaaaagattatgcaaatgcaaggaaccgacatgagcttaatgtgttagttgatcagccaaaagaacttcagggcggcatgctcttccctcatcaattggaagcgttgaactggctgcggaaatgctggtacaagtcaaaaaatgttatccttgctgatgagatgggtcttggaaagacagtgtcagcttgtgcttttctatcatccctatattgtgaatttaagattaatttgccatgtcttgtcttggttcctctttctacaatgcccaattggatggctgaattttcatcttgggctcctcatttaaatgttg

SEQ ID NO: 189988 - DNA, 1216 bp, Zea Mays
tggggggtcatacccatacaacaccttgaacggagagcatcccagtgacgagtgatgggcagtgttataccaaaattcagccaagggtagccaggctttccacttctgcggctgagcatgaacagcgcaccgtaaatacatttccaaacattggttcacacgttcactttgaccatcactttgtgggtgatatgctgtgctcagactcaatttggtgcccatcagcttgaacagttgagtccaaaagtgactggtaaatatcttatcacgatcactaacaatggacttgggaaggccatgaagcttgacaacctggtccaacagaatctgcgccacctgtgctgcagtaaacggatgtttgagggccaaaaaatgtgcatacttcgagaaccgatccacgaccaccaagattgtgtcgtaaccctcagatttcggtaatttctcgatgaaatccatggtaatatcttgccaggctccctgtggcaccgacagaggctgtaacaacccagctgggtggactcgctccccttttgctcgctggcaagttgggcactgtttaatgaaatcttccacatcacctttcatgcctttccacagaaataacttcttcagacgatggtaagtagcatgaattcctgagtgaccacccacagcgctgtcatgcacagcagctaccaatttagtcctcagtgccgagttgttgcctacccaaatcagattgccttttcgaatcacgccctgagacaacgagtaaccatgttcatcggggctctgcacacataatcgtgccaaaagatgttgagcgtcagtatctgtcacatatgaatttatgacctcctgaatccaaagaggttggacctcactcactgctgtcaaagccatggcatgacctatcctggacagggcatcagcaactttgttttctcgaccttgtttgtacacaactcggaactgcatacccataagcttcgacatagccttacgttgtaagtcggactgaaggtcctgagtccccaagaagctgagagccttatggtctgtccgaatctcaaattctcccatttgaagataatttctccaacgatcaactaccataattaaggcaagaaactctttttcgtagatggatagcttttgagtcttgatccccaacgacttactcagatatgcaataggccgaccttgctgcattaatactgctccgactcctttttca

SEQ ID NO: 189989 - DNA, 335 bp, Zea Mays
gctgcggcggcaaggtgggctgtcgtgcgaggtcagcgaggacaggtcgtctgggagcacctgaggctgtgcgaggtgccggcaggctatgacatttctagagtaagtaatactctgggggcatctcccgctcgcttagctgtgcccgccaggccatggagcgtgaggacgccgacggcgctctcgattcgtgggctcaattctgcactctttccaacgagcttctcgccggagacggtgatctcgccgtcggcccacgcctagctcccgtcgttggtgacctctgcacacgcggcctcgccacgctcgtccgcgactacttcctccactccctc

SEQ ID NO: 189990 - DNA, 3084 bp, Zea Mays
ccatggagcagtcacgccagttcttccgcaccccgccggaccgcagccgcgtacgcaagacgggcttcgtcgaggtccgctcgttctggaacatttataggagcttcgacaggctgtgggtcatgctgcttctctacctgcaagctgcagcaatcgtggcgtgggagggcgccaagtggccgtgggatgatctgctctcttcccgtggctcagagtccaaggacacacaggtgcgcgtgctcaccgttttcatcacctgggctgcgctccggttcctccagtctctgctggacatcggcacacagttccgccgcgcatttagggatggccgaatgcttgctgtgcgcatggtgctcaaggccgttgttgcagccgcttgggttgttgcgttcgctgtcctatacatgagggtctggaaccagaggacagacaatgggcagtggtcgtcagcagctgattcacggatgaggagcttcctctatgcagctgcagcgtttgttatccctgaggtccttgccatcgtgctcttcattgtgccttgggtgcgaaacgcattggagaagacaaattggaagatctgttacgccctgacctggtggttccagagccgcagctttgttggccgaggactacgtgagggcacatttgacaatgtcaagtactccatcttttgggtgcttttgctcgccgtgaagtttgccttcagctattttctccaaatcaggccacttgtaaaacccacaaaagagatatacaatctgaatggaatccagtacacttggcatgagttctttggccaaagcaatcgttttgcggtgtttgtgctctggttaccagtggtgttgatctacctcatggatatccagatttggtatgctatattttcttctctgtcgggtgcatttgtggggctttttgcacatttgggagagatcagggacatgaaacagctgcgacttaggttccagttctttgcaagtgccatgtcattcaacatcatgccagaggagcagcaggtgaatgagagcttcttgcccagccgttttcgcaatttctggcagcgattacagctaaggtatggtttcagcagatcctttcggaagattgagtcaaatcaggtggaggcacggcggtttgcacttgtttggaatgagataataagcaagttccgggaggaagacattgttagtgatcgtgaggttgagcttcttgagctgccacctgagctgtggaatgtgcgtgtaatccgttggccttgtttcttgctctgtaatgagctgtcacttgcacttggtcaggcaaaagaagttacaggatctgatcgtaggctatggaggaagatatgtaagaatgattatcgtcgttgtgcagtgattgaggtctatgatagtgcaaaacacatgctgcttgagatcataaaggaggggactgaggagcatggtattgttacacaactgttcagcgattttgatggatccatgaagatggagaagttcactgtggagtataagatgactgagctgcacaatatccatacaaggcttgtagctctattggtcctcatcctcaaacccaccaaagatgttaccaagatagttaatgctttgcagactctctatgatgttgttgttcgtgatttccaagctgagaagaggagcatggaacaactgagaagtgaaggtcttgcacagtcaaggcccaccaggcttctctttgtggatgcagttgtgcttcctgaagaggacaatgctaccttctataagcaagtgaggcgcatgcacaccatcctgacctccagagactctatgattaatgtcccacagaaccttgaagctcgtcggaggattgcctttttcagcaattcattgtttatgaacataccaagggcaacccaggttgagaagatgatgtctttcagtgtcttgacgccttattataaggaggaggtgttgtacagcaaggaccaactctataaagagaatgaagatggcatctcaatattatactatctaaaacagatttacccagatgagtgggagtacttcgtagagcgaatgaaacgtgaggggatgtctgatattaatgagctgtacagtgagaaggaaaggctgagggatcttcggcactgggtctcatataggggacagacattatcacgtactgtgagaggaatgatgtactattatgaagctctcaagatgctgacctttttggattctgcctctgaacatgatttaaagactggatcaagggagttagctactatgggttcctcaagaattggatcctcaaggcatgacggagttgctggtgggtcagggtattacagcagggcatcttcctctcatgcattgagtagagcaagcagtagtgtgagctccttgtttaaaggaagcgaatatgggactgtcctcatgaaatacacatatgtagttgcatgccaggtatatggacagcagaaagctaagaatgaccccaatgcttttgaaatattggagctaatgaaaaattatgaagcattacgtgttgcttatgttgatgaaaggcagatcaatggcaacgaaaaagagttcttctctgttctcgtgaaatatgaccaacaattgcagcgggaggttgaaatctatcgggttaagttgcctggagagttgaagattggcgaaggaaagccagaaaatcagaatcatgcactcatcttcacaaggggcgatgcagttcaaactattgatatgaaccaagacaactactttgaagaagctctaaagatgagaaacctactagaagagttcaatcgttattatggaattcgcaagcctaaaattcttggggttcgggaacacgtcttcacgggttcagtttcttctcttgcttggttcatgtctgcccaggagacaagttttgtcactctggggcagcgtgttctggctgatccacttaaagtcagaatgcattatggccacccagatgtttttgatcgtctttggtttttgggccgaggtggtatcagtaaagcatcaagaataatcaacattagtgaggacatttttgctggtttcaactgtactctccgtggtggtaatgtta

SEQ ID NO: 189991 - DNA, 361 bp, Zea Mays
tgaactaaagaatgaactaacctaatgaataagttaatgggcatgagcgcgagtactcggactggaaattggtatcctcatcactctgttcccctcacttttgggctgatactgtctctactgccacgtatctcactaagatttagctttctttgactctttagggtggtgttccttttgggcatctttgtggtaaggtgccgactactccaacctttgtctttttggctatgtgtgctatgtgcctcttgcaccttgtgagcgcactaaatttactacttagtcagttgagtgtgttttccttgggtatagtgctgagcacaagggatactgtggttgagatctgattgctcgacagatg

SEQ ID NO: 189992 - DNA, 277 bp, Zea Mays
cccctacggcgtgcccccaatgactccggctccgccccagctcctacctccggggatccccaccccgacaccttggtccccactggctggaggatgggactcagcctccatcgtcgtcgccttcagtaccccatggcgatgacacaaccacccccctccgacagggtggtcgactccagtgcgtcctaccacaccacctccatcgcgggcacgttatctcgctctcatccccccattcctcccacccctcctcgatcgtcgtcgagaacagttccac

SEQ ID NO: 189993 - DNA, 431 bp, Zea Mays
cggaggaggagacgggagatgcgccagcagttggtgcggagcggcgcgctccttctccttcaaaagctccggctacgaggagaagcggtgcagcaagcaaagccgaagcaggggatgtggccgtggaggtagtatcaagcttggccactcgccagcgcaagacgatgaaagcagcagcagctgctgctgaggcagaggagaaggcaccacgaagggccacgaggcgcggcgcggtgacgagtacccttatgcagcaggagctacaagagaaaccacaaggtgagaaactggagtgatttcatcccaatcaatttgcactaactcagatgatgcttttgttgatatcaagtttgatggttgagccgacaatgatgtcttctctgatgcagaggctataggtgcaacagatgaggccgcgagggctctaccca

SEQ ID NO: 189994 - DNA, 373 bp, Zea Mays
gcaagtgaagcaataacaagatcttttgagcggtttctgctgcttgctggaggatctagtgctgtaaatacaggtgtatcagaggaaggccccaagggggctaaggaggtcctgtatattttgaatgctttgatatgctgccttccccttatggcctccaaaccttccaatactatcttgaaatattttaaaccactattagatttgcatcaaccaattttgataaggagtcttctggacattctgcatgctgtttgtgagagtccaaccgtacagctcaaatctgatgtgttattggaccttctgtgctcgttgggtctgtcagtgtcttcagaaaggaaatcaggagatgaaatggcttcaattgcacgac

SEQ ID NO: 189995 - DNA, 588 bp, Zea Mays
gtcgatagccgcggcctgagcacaatgtatgagtagggttgtgagatcaactggctcctcctctgcaccagaacctgatctccccttccttcgccctcgcttatttctagatcctttcacatatcccccgctgatctgtgcatcggctggcattggtgagtggaactcacagttcttgtcggtacacaacagcaccttgtcaaacatctcccggacagtctcttcgtcacacagtgccgactgtttgctcttcctcccctccatctccatgtcctcgtcacgcgggttcttctgacccttatgagcagcaccaactaaaccctcccgcaccatttcacgaggcagactacttgtgaccacatcgcgaaaccttccgcttcctgtagaatcacagtcatcagtgatccaagactttacttcatagccctgtgctgcgataggcttggcagactcgaggatgtcgacgaatggtttctcgacggcggcgaggagtgctgaatcctccacaggcgcgctggtaataggataggattcctcgtcctcgtcttcaagaaggaactggttgatgtatgctaggaccgcgtcgtc

SEQ ID NO: 189996 - DNA, 2148 bp, Zea Mays
aaactacttgctctaaagtttgtggaaacatggattttgtgttgcacacctcaagccaacagtgaccaagtacagccaactgagggtaccattttccagtttaaagttaacaagtgaatgggcaatatttttttgaaagagaatgactttcacattgacaagtacaccttacatacaggaaaaaactggagatttgatacttcacgatcatctcaatttcatcctagccttgatcctgctattttggaagctgatgcacatcgagctctcctcctcctcctggatattctgcgaacagcttatgcccatcgagggtccttcctagttggcaccatcaactcgtaagaatttctaccaactttatcgtatatgttgagcagaagtgatttgttacactcactatcctgccatttcatcctctctttgaactagctttctctgtgtatgaagatgaacctgaatttatttaatgaatggcatcagttcctagctatctacatgtttatcttgacttataaatatgctaacattatggagcaattgaattactttaggtgatcaactggtatcctaccctttttgttacacaacctaggttctttgtgatccactgacattattttgacctttgtgggcttgtgtgtttggctccttgcttgcttgctgcgagcccaggcccagctatgcatgcaggtgtagctatctttgaagcttgagacagtgtatcattttgtgctgtttatcttgcaaagccgcatagctgtctgagatgtatttatttgtgttctgaaatataatatatggcacttgtcagtcttgcagcagttgtaaagatccgaccgatttactatgaccgcgtgttgccagttttgcttgattttgaccctggcttggagactgcaaagggggcacattcagcaagcctgcggtatgctgtaagagcagcttttttggggtttctacggagtccccaccaggcaatgattgaggttagctcatctacaggttacacatgtagattatggttcagttgtcattaataaattatctgatttaatttacatacttcatgcctcgatacagctcaaagattcttaaactgttgctataattgaattttgcttgcgaggaagtataacttggctagcatgttaatgtgttcttacaccaggttatgatcaattaacggatggtagtacaaatatgattgttgatagtaaatatgccttgatgcatgaagctcatatgtaaattgaggactcgattcagccctagtatatatgtattataatttagaaatctatgtggattttgtcaaaactttaaagatgattttttaagcagatctttacaaccaaggatgttgctccttgtcatggggtggcagccaagggcatgaggcccatagggataggctcagggttaggattagtggataaagattagataagattgagttacttacttgggattagattagataagattgagttagttacttggggggcaagtcttcctatctatataaggatgagttgtacctccttaagggggaatcaatcaatgaagaagaattagtcccatatctctctaatagtctagtcccccccccccccccaagccgactccgcctggctatcattcccttatgaactaggaaccataacactcctcaatcttaatatggattcgtgcggtaaaaaagtgatactaacgaagtcggagttatgataagaaagatggaatcatgcactcactataggatttgaatgtatgacattaggtttttgtagactactagactcattctaccaaactcaaaccaagatttttgtggcaacggtatctggtctgagctgtcaagtttcctttcagggagccactcctgtgaagacaatccctactcccctctcttttcttctcgatctggttgcttgtttgtgtttgttgttgtaacttaataaaggactaatttttggagacatcttgttttcttttgagaaattgtacatcaattctgcattgcttttcctaaatgtgtgtaggatttacatattcatatttgttttttgatgtatattgcttgtcaagctaaccagacttccttctcttgacagtctaaagacatattggtaaggcggctgcgtg

SEQ ID NO: 189997 - DNA, 322 bp, Zea Mays
atgtgcatgataggaagcggttaaatgatttgttcttatacattgccagcacatgattagtgttactaggctcatcataaaaagatcgtactacgtactacgctaatttaataatacccattcatcaagaaaagattacagtatagtttaaggttcaatgtacctgagggtactttggtcattttgaggcgcagatcgacatgcatgattgtcacctgtgccgtgtgcggctgtgcggcgctgcttccaccgaggcgagcgagcgttacaaattaaaatactccctccgagccaaaaaaaaaagcattcatttcgtatctcg

SEQ ID NO: 189998 - DNA, 464 bp, Zea Mays
actctatcggccggtctccacataggcactggacccgtcgacaagctgattgcatactccgatgctgactgggctgggtgcccagactctcgttgctccacatcaggcttctgtgtctttctcggcaacaatttgatttcctggtcctccaaacggcaaaccaccgtgtcacggtccagtgcggaggccgagtacagggctgttgctcatgtggtcgcagaatgctgttggcttcgacaactccttcaggaacttcatcttcccttgaaggtcgccacagtcgtttactgtgacaacatcagcgccgtctacatgacagccaacccggtccatcaccgtcgtaccaagcacatcgagattgacatccacttcgtccgtgagaaggtggctctcggtgaggtccgagttctccatgtgtcgtccaagtatcaattcgctgatatcatgactaaaggcctgccaat

SEQ ID NO: 189999 - DNA, 509 bp, Zea Mays
agctgcatctgctgttgttgaggctgcattgtcaattagtgtctcacggtaatggggagaaatgcttacaagttacacatgcacattatgtttctcattgttttatgtcactgatctgttatttatctgagttcagtttggtgttacagaagtgcaaatcaagttggtgaagagcgtgcaatggaagaagctgtccaaaccagcgaagaccaggatttggaaaattttgttatcagtgacaaagcacagctattacaacttagagaaaattatagcatccagtgtctacagattttaggagagtatgttgaagctttgggtcctgtactccatgaaaaaggtgttgatgtttgcctcacattattgcaaaggagcatgaaaaaccaggagggatgtgaccactttgctcaactccttgatgtccttaaattggtttgtgcactggctgcccatcgaaaatttgctgcactctttgttgatcgtggtggtattcagaaaatcgtctctat

SEQ ID NO: 190000 - DNA, 370 bp, Zea Mays
agctaaagctactctcgctccatcaaaccaaccctcccaccatcaccaaagatatatactattactacatagttaacaaactttatctgcctcctgtcctgctaatctatatatcccctctccactactgctaccttctctcgcgcgtctctgctcaaagaataatgtcagcgtagcctagctagctcatagggattcctctttcatccctcctgagatcgacgatctcaccaattaagaacacacacgcacacagcagctacgtacgtacctagctagctagcatgatggaccatcagctgttcgacgaccccttcgggagcagcatctcgtcgctggaggcggaaatcttctccgccgccgcccagct

SEQ ID NO: 190001 - DNA, 640 bp, Zea Mays
cggcattatcctccgccccagtcttacagctgccaaatttttctgtaccatttgagctggaaactgatgcttcagctggaggaattggggctgttctcagccaacaagggcaccccattgcctttgtcagtaaagctttgggcatcaagaatcaaggtctttcaacatacgaaaaagagtacctggcgattttaatggctgttgaccagtggagggcatatcttcagcatgacgagttcatcatatacacggatcagcgaagcttagcccatctgaccgagcagcaactgaataccttttggcaacgtaaagtattcaccaagttattaggactccaatacaaggtggtttataaaaaaggtgttgagaatggagctgctgacgcactttcgaggcgaccttcggataatcttgattgttatcacatttcctcaggcacaccggtttggctgtcagaagtaacagcaggctatgagacggatccacacactcagcagcttattgccgaactcactcttcatcaagctccagatagtcctttccaacttaaagctgggctactccgatacaaagggcgcatttgggtaggtgctaatccttccctccaactgaagatcgtgtctacaatgcacgacagtgc

SEQ ID NO: 190002 - DNA, 302 bp, Zea Mays
gagccgccgtcctctccatccggccatcctgatccctatgtaccatcccctccacaactcccctgctccaccacacggccacaacaaggcaagaattcgtcagccactgacatccagcaaggcagcaagccgatttctagcaaggcggcaagcctccgcctccagcaaggcaagttgttggtcgccggccatcagtccaagaccagaggccaccctgactcgtttcctcatgcatgtgatgttgttggctgttactattggccgcatatagcacatagttgtttcttgtgatgcagttggtt

SEQ ID NO: 190003 - DNA, 519 bp, Zea Mays
gtcatgtgggaggtagcaccggtgtcgaagtaccagtcagtctgctggggcggagtcagggacacagtgctgaagacggatgcaagggactgagcgtcccaagatggagtagtcggctgagccagcatgccgtgggtagcgcttccctacaaagggccggtctgcagagtgtgctgcagaggggcgcttccctgtccttgaagagcaccatgaacgtattgctgggtctggtgggccagcagcgcctggtgaggagcgatggagacaggagcagcgtagaaagcctgctgttgctgggccgtcggaggcagcagggcctggtgctgcgccaggagaccttgctgctgctgtggggtcggcgcccgtgggccgggccacatctggatggccccagtccaaggattttggagggagggtcacaggccggaggcactcccgtgctggctgccgggaccagtgccagggaatggaagaataccctggcggccttggccacccctcttgctgcgacggttgggg

SEQ ID NO: 190004 - DNA, 400 bp, Zea Mays
aaaagatcatccggcaaggggaatgcgacctggcatctctttgacctaccgcacctgcccctaatgtaagtaaaacagatgacatacaatctcttaggcattatatagatggcagcgagatcaattgatataatacatagagggcatgagcggaaaatttagggaaatggcacgcatatttgaaaaatctgtcgtttccaatttcccatcacatgagattgatgttagaaccaccacacgccaatcatcgactgtaaacatgcagtcacaaacctagccatcttctggcatgccgatgaattcatacgccaggcaatcgcagcctcctccatcgatttgggataaacccacaattctgcgcatggccggactgtctgggcctggcctcggcccacccgac

SEQ ID NO: 190005 - DNA, 351 bp, Zea Mays
gttgatgcatcatcactgtttgcatcttcatctactgcaacttgtgatgataagtcaaaaggtcagagcattagagggaaagataagaagaaaacaatttctaatgctctatattgccctgtggtttctggtgttgaatcacagagcatttgttccacagaaattcttccaaatgatcctgcagtctctgttgagaatgctttgccatctgcacagaacacggtatcaatgaatgagctttgttcggctagcttgttaaaccgtgagggtaatgcgtgtaaaagtgctctttcagatgattctgaactgcctatccacatttcacctaaatcaagtaataaaagagagtca

SEQ ID NO: 190006 - DNA, 374 bp, Zea Mays
atccaaggatgatctacctatatcccactcaaatcatgcgcaacaaccgtttcagaaattttcagcccacaacgtacatatagggcctgattggttaccctgatgagaccgaactcggctccggaggtacaacatctttatacgttctcgtgtttggttctccagcctggctctagcgatacaagttatgcttgtttggatgactgcatttatagctggacctggcttagatgatgcaaaactgataagtgagcttggctcataagatacaggatttatttgcgtttctctggagcctggctcacataaacctgctctagatcagccaggtcacgaagacacaagccaggatgtctccgtccgaaaaccaaaca

SEQ ID NO: 190007 - DNA, 439 bp, Zea Mays
agtaacaatgagcaatgtggattggcctcaatgtgactatgaacagcatgacaacatacctaacaaccagtgccagcagctctgcctgacggattgtttatgtgctgtcgctgtgtttcgtgatagtgacaatacatgttggaagaagaagttgcctttaacaaataatgttgtaggggatagtgtgcagaggacagtttacatcaaggtaccaaaaaacaacagtcaacaacctgagcttcttgattccaacagatggaagaaagataagaagcactggatccttggaagttcattgtttctaggaagctctatcttgctgaacattgtcctgatctctgttatactcttcggtacttactgtactataaccataaatgaaagcccgtctgtgcagtcatcaaacaatctaggattgcccctgaaagccttcaattac

SEQ ID NO: 190008 - DNA, 762 bp, Zea Mays
aaaaaatgtatctagcttaatagattcatctcatcttaaaagattctatcctacactcatagatctatcttatctcaaaaggtcttaacttatcctaatgtatatagatccatcttatcttaagaggttttctcttatcttaataaattcatcttatcttgaaggattcatcttatcctaaccactttacttatctcatcttgatagatctaactaatctcaaaagattctatttcatcttatcttaataagcatacttatccaccctagtttaacaaccatgatctaatgcaaattaattagatcatatctagtcaaactagtcataccaatctaatctagatcccatctaacctaatatgatctaatctaaagtgagttacttaacggactagttgatactagtgaaatagattagaccctgctggccatgttttaacttaaattagtacatcataccaaaccacccatgaacaaataacttaccagcatatttatggtgaccatccctcctagatgttgccataatacacttatcttatgccaccagcctgttaaccatttgtccttacccacaagttatcctaactacatgaacctaattcggataaaaacttcaagaatgaagatcgaagatgttcgacctcatcaaatcaaggaaggataagattcaagatagatcttcaaaggaattaggattcacaatcttggatagaacctttcctcaccctaccctttcttaaccaaacctatctatactct

SEQ ID NO: 190009 - DNA, 381 bp, Zea Mays
tgtccacaaataatgtgagcaatcatcaagaatgactaaataatatttgaacctagaaatgcttgggacgggtgaggtccaaaggtcacaatggattaactgaaaatttcgtgtggcacgtgatgaagacacatgaaatggaagacgggtgtggccacctaactaacacgcatgacataaaggatcactagcagttttattacatgaaatcccggaatctgctagtttggatagggcttcatgaccggggtgcccgaggcgctgatgccaaagtgacgaggatgtggtggcatggaaggtggaggtcggcagccgtagaggatagagcgggtcggagctgacacagcggacgatctatctccgagtgcgaagatccttcac

SEQ ID NO: 190010 - DNA, 897 bp, Zea Mays
cattggatgtagtaagttatccctggttcatatttttatatgttttgtctttgttggctctgttgctacaacaccccctcccctctaactcttagttttgtattcacatggtgacatgatttgttttgttcattgatatcagatatgcaaagataaagatgaagctgaagtatggttcgctgggctgaaaacactgatttcacgttgtcaccaaagaaaatggagaactgaatctagaagtgatttgctttcctctggtgcaactagtccgaggacttacacacgacggagttctcctttgagttcacctttcagcagcaatgacagcatccacaaggtattactgtctctattgtctattgtattaaaatcctacctagatgactagaagactagagtaaaacattcgagttttcaacccttaattgtgctgggaagtctcttcatagttagaagggatccagttttcatgttgttggttcagctagcgatttctccactcaaatcattctggaaacaccttgttttcactgatgtgttcaatcagagcaggaagccttggcagaaatttgatgacagatgacactagagtgcaaagctagaaaagaaagctttttttgtcaaattgctagtgtacttaatcacttttaatggtttctccttcccttcacattactttgcaatatatgtcatctttttttatattgtcatttatttttgaaaatgaatttttataccaggatggcagtgacaattatcgactccgtactccatatggaagcccaccaaagaatggattggagaaggcattttctgatgtcatgctgtatgcagttcctccccgtggtttctttccatcagattctaatgctggatctgtccattctatgtcttctg

SEQ ID NO: 190011 - DNA, 526 bp, Zea Mays
tttaaaggataatttcaaggtaagcatttaggtgaagatacatatattacaagggttaaaggcgataacagacaagggcgtaagggaagaggtgaaagtgcaggggaaccaagggtacgagtacaagaaagaatgaagttaagggaaccaagggtacgagtacaacaaagaatgaagctaagggcaggctggcgcgtggcaaatatgaggttacgaccaaaagacgggataagtagaataccactcccgaaatgagatgacaagttggagattttagataacagacataatgtcatcaccaaggtatggtcgagagatgggaaaggtcaaggcaacgctaaacagagacacaacataggatggagttgaagatttacaagcgatgaggaagaggatacgaccaagggaacagtaggtaaagtacaatgctcagattgagatggaaaagaggagattttaaagggccagtataagataaacatcaaggtaagatatagaggtgataagggtaaatctgataatgatg

SEQ ID NO: 190012 - DNA, 336 bp, Zea Mays
ctttttattccacagagtctacctccttcatgagccttcctcccatttctgaaaattcatcagtatcaccacctactgtttctaacccaaatgttcttattcccatcacaccacctttcacttccacaccatctcagtcttactcttccaaaccacctgtcactcagacttacatttgtcgtcctcgctctactcccacggccagtcctgatgatgatcctgttgctgatacttgtactaacaatgatgactctcatgttgtttttaatcaggggtatcatcttcgtgaccgtggcactattgcagctccagaacgttatgggttttcccgtgctg

SEQ ID NO: 190013 - DNA, 271 bp, Zea Mays
ctggctcattaacggtggcgtggaccacgagcactgggcagatccgtggtggtgataaagagggcaggagggaggccagaccctccgtggcgaggagtgctgcacttggaggatgtgggccctggcgagctggagccgaagctgatggagaagcactaccaaacactggtatcggcaggtggggagcaacctgagcgggagcctaggggagctggagccgctgggagcttcgtgacagtagtaccaaacatgatctaagtaaacgtcatat

SEQ ID NO: 190014 - DNA, 320 bp, Zea Mays
tcaggtccgcactaccggtcgtatagaccagataacaagacaacccataggaggaaggaagcatggtggagggatccgatttggtgagatggagcgtgatgccctcctcgcccatggttcgtcctacctcttgcatgacaggctccactcctgctcggattaccacatcgcagatgtgtgctccttctgtgggagcctgctgactgcgacaatgatcaaatccgatacccagaagaaagtcaagcacgagatgcttgggctccccactgtgagaccagcgaagaactttgcatgccaggcctgcaaaacaagcaagggga

SEQ ID NO: 190015 - DNA, 625 bp, Zea Mays
taggaagtggcgccagtcacatggtttaggagaacacgaagatagtagcgctccccctcggccggatgagcagagactattctaccgacttgtccacccgtatctcgtttcctcttttgccatatttttcccttaccactctgccaagtgtaccattcagggaagtcacgatacaggatgccacgagcctccttgtgtagactattcgcctcaaaatatgctgtgagcattgacctatcaacacctggacggttgacgactcgctcgaccatttgccgctcgtgaaacgccaccatgtgcatgtttggaagatggagttgcagctgcatcacaggtggagatatctgactaagctcaaagccatatatcctccataaggcttctggaggagtcacccaccttgcatctctgtactgcttgatctcatctacatcatcatctgccttgctcgcatctctcataacaacagaagcacgatcatggcctttgtatatgtacttgaacaggtatttaacagccttgatgctcccacatgcctcaacattgatgtgacagttgaagagacgaaggaggtatgggttgtaagggacaacccatctattgtccaattcgcaccctcgaacct

SEQ ID NO: 190016 - DNA, 575 bp, Zea Mays
atcgtgttgggtttgagtggtttatcacgacccttctgtggtgtaccgacccattggtaggcgagaagcggggaagagaaacaggctgacacgcttcgcacatgacgcacacatgacacacgaaattgatgcttgaaagtagtagagattagtaggcaagaagcgggaaagaggaacaaacctacacgcttcgcacgcgactcacgacgcacgaaacttgtgcttgaaaggagtagataagagaagtatgccttttaagggcttaatcattatacgagtttctatcaagtcctaatgagccaaaacagattagattgaaccacttagggaggatcacgaagacgtttgtgccatcttgttgatgtggccgagacgtttgtaccaccgctaggcgtcgttgtccttgggttgggcaagctgcgctacctggcgcaccatctgaagccatagtacgtacaactgattcttctgcagctccacccgggcgagcaaccggtttcgtgatcccagatgcgaaggatgccgtgctcgacctcaacacgggagccaccctcgtcgagttgacccacactgat

SEQ ID NO: 190017 - DNA, 459 bp, Zea Mays
atcctatctacgcaatcacacgccattacaggaagggaatgatgcattacaggaaaggaatgatgcactgctaacacccccccgtcagtcggagcgtcgaagccttggacgttcagactggaccgaaattccatgaagaccgaagtaggtagccctttggtgaagatatcagcgtactgtgaggatgttggaacctgaagaacacgaatttcaccgagggccacgcgctcgcgaacaaagtgaagatcaatctcaatatgtttggtgcgctgatgttggacaggattggaggacatgtacacagtactgatgttatcacaataaaccaaggttgtgcggctcagggggacgtggagttcctgtagtaactgacgcaaccaagtgacttctgcaacggcatttgcaacagctcggtattcagcctcagcactggagcgggagacagtgttctggcgcttg

SEQ ID NO: 190018 - DNA, 325 bp, Zea Mays
gttcttcacagattcattaggtcctaatacattactactacaactacttatcctaaatccaatcacacactctattataccttgactggtaaaacaaaatatcctagcttatacctttgccttgcatcttacttttacgattttctacaagtctctgctcctgcagcatcaatgatctcccagatccaacaatgtcaggcacttcatttgtcttactcttatcaatcttcattcttgtagagcacctgcttatctttgtggacttcatcctatctcattcatggaactcataaaacatgttagtccacctagttatattaattac

SEQ ID NO: 190019 - DNA, 358 bp, Zea Mays
cggagctcgacctctaagtcctcgtcgatgtgtcctcctcttgttcattgctccgtcgtcttcacgtatggggtccgtctgttgctcgtgcatgtgtcccttgttctgccaacctattctttttatagaccgaggaagcggtcggccagcggtgggttcctcaggaaggagccaccgggtgatggtaaaaccatacgttttatctggggtaaaggcacgcgagcccgtggacctcaggaacacttggttgcatcgtattctttatggcagacagcgtgggaagtatggggcccgagcgttatcatttgggttgtgtcaacccgtgaccttcatagcctggggcttagcgcggttcgtc

SEQ ID NO: 190020 - DNA, 413 bp, Zea Mays
gcaatcagcagtgccggagcgagggaggccttcaacgaagtccaatgaaactgtgtgccaagctgtgtgtgggaccggcaagggttggagcttgcccggataagcagacctgtccggtttcgcttgcaaacaaatctggcactgttgcacaaattcatggactgattgtcgcagtttggcccaagcaaacatactcttaactcgacgatatgtaacaggtgccccagagtgaccaccaacaggagagcaatgaagggctgtcaggatccgagttttaagttggtcatcagcgcccacccaaatgcgtcctttgtatttcaggagtccatcgaccagagtaaaatgaggcacaacactaggagctattgccaacttggacagcaatgactgagccgcagtgtcttgactataac

SEQ ID NO: 190021 - DNA, 575 bp, Zea Mays
gtgagatggagtgaccacgggtggcgaggaggaagtcccacctgcaacaacagtagagcaaggcaccgaaaccatatcgtcgtcaaggagaaagtcatgggaggcgtgggaggaggcatctgaggtggctgcaaagggaaaagtgggtctcgtcgaatatgacatggcgagagatgatgatgcgacgtgtcgataggtcgaggcagcggtaacctttgtgcgaggggggatatccgaggaagacgcatgccgtggagcgagggacgagcttatgtttggaggttgcttgcatgttggggtaacagaggcacccaaaaacacgcagatggttataggttggcggttgattatgcagacgagtgtatggaatgtcatgctgaatggaggaggatgggcgcctattatggaggtagcaggtcgtcaggagtccctcggcccaatatgcgaggggtagggaggcatggagaagcatggtgcgaatggaattgttgagtgtgtggatgatgcgttcggctttgccattttggggtgatgtgtagggacaggaggagcggaggtgagtgccttgagcagcg

SEQ ID NO: 190022 - DNA, 1090 bp, Zea Mays
tgcgataaggtgaggaagagagagcacgggatgggttgagaaacaagatggagggagaaagtgggcagcctgctggatcttggcatctcgccgccgctcatttccgctccacctggtatgccccgcttccctctcactaaacagactccgctggattggattggatctttttttttccttcatgcgtgccgtgattgttagttagccgcttctcgtcttccttgatctgcgttttgcgcctggacgctccaaagatcaatcttttgctgctgcttcgtgattcggctttgctgggcatcggaatggttggtgttgacgaatgggtttggttggtggagcagtatgcgtggatcatgtgatctatatgctctcttttttctgtttgctgaatggcgcctgactcgcgagatttgcttccaaaacccgcttcttgccttctgctagcagatatgctcatatgcagaagcatcgcgcctcgatgttcccgaggctccgtttctggggaaacgaattttgggttctgttggtttcctgtttatttatttatttatatatgtaaaacaaacccttgattgcattgttccccgttatattgcttaccttgcttatcagtcagtttgacagaattctgattgctttttttacgtcacacgaaggaagcgttgcactatcacttcagtagcgcttactgtgcatgcacaacttttttttttctcgtcatacagttactgagggaagtgctatctttttcttggctcctgtttggtgcagtgtgggctagttatctactagtagtatcttcgggccagttcaagacttagccgctggtacgtactaactcgtgtcatagtcatagccatggtgtccttgtgtcctctccatcattgctgttgataccatactttattgatctttttcaagttatgattttgaggataagatattgcatctctgcacagttctaagcgctgaggaagtaaaatatcatttatcggctagagtagtctctgttgctatccggcaccaatggcgactttggtccgtcatgattcaaggcagtactcgtggtggattagccatatcagcccca

SEQ ID NO: 190023 - DNA, 282 bp, Zea Mays
gaatgtccaacacaacatcctggactaacttatttgctaagtgtaatactacaggttgactggtatgcaatttgaagattctaagtccaaatgagcttaaaataggccaagaaatgcaactttgtgcaaaggggtaaaactgtgaggtttaaaactttagatatgttacatatgcccattacaatgtttctatcactttggtttgatctctagttcagtttcttgagaaaaatgtgttttggacttagtttgagctaaatcagaaatattggtgaaagagca

SEQ ID NO: 190024 - DNA, 1025 bp, Zea Mays
ctctgtttcaacagaatcagctccgctaagtacatttttaagtgtcagtcccttctgtgcgcttttaccttcagtattgagccttgcatgttcttcgccagatgaaatcatggaagcacataaggatgcacttctaagactccttgaagttaaattgtctgactgcacattcagtgagcttaccttgtatctgagagtcatcttgttctggactcatcacctactgtcatcatatactattaaggattcaaattcagatgatcttgagcaagtatgtcatttgtgctttggtcttcttgatagagtatttgagcgtattcaagttttgactgctgacccttcacagtcaaattctgaatacccgtactatcccgctcaacatatccaagacattgttgattctgttcttcggcatcctgttattaccctgtctttgtcatgctctttatccaattgccaaaatttagcagatgggagtttggaacatctggaagaagctttggctatttttgcgacggaaaatctgcaccttatagaccgtttcgttctaaaccttttgggtaaattgtatgaccttttgctaatgtttggtagctatggtggtaactactctacagataatgggccatcccatgagtcactgtttgctgctccaaatcttctgctggagaacataatattgttgttcaaggagaagtttgagctctgcgtggacaaactaaattttgaattgcttttgccaaatttctacatggttcgcacactgtcaaagttcttttctcctttcaaactcctggagcttgcaaattggatgttctcaaaattggatggtcacaacttcagttcacctgcttttgtttctgctgttttgatgtgcctatacattattgatgtcaccatggaaatgctgtgcttttatctgcaaaaaactgatcagagatcacaatcctatctatttcggcacttggagattcacaattctgatatcaatgccattcagcaagcctatcacatcattcttcatt

SEQ ID NO: 190025 - DNA, 438 bp, Zea Mays
caggatttcggtggaagcatatcaccagcagcgtcatcggcattagccaagctgacgaaccggctcaacttcctgaaagaacggagggcgctgctggcaagcgagatgcagagcttggatttgggtcggcccccaacagtgaagtccccaacaccaaaaggccatgaaagcaagaatagttgatgttagtctgttcctgtcgtgctcttctgaatgctagatagccttatgattaaaaccagcagtgtagtttgtgtgcatcccgttctcatccatgtagtgctgtctgtacatgtttccacaaaattctgctgcttcaaacttgcagatacatatagatacagattgaacgtgtcagctgctagtaggctgctttgttgaacacactacacaccaagcactagctgttctcattgctgaatggatcgtggctcaaag

SEQ ID NO: 190026 - DNA, 467 bp, Zea Mays
atggactcacactgggggtgatcaaaccagatttcaacaacgcagccacttgcttctcaatctctgtcttatgatgaggagaatatttgtagggtcgagcattgaccgggatggacccagggagcaaaggaatatgatggtcaaacggtcgagatggcggcagttcagttggggtaacaaaaatgtcactgaattcccccaacaacacctgcaattctggatggacctcattgctgttctcctcaatcacctcctccaacaatgcaaacacccagatatcattccctcgcagccatttcgccacctgtatagtagaaacttccttcacaacctgctgctgagcagtattgcccaccaactgaacttccactccattgtccacaaagctaataaccttatcatcccaatcacactgcataggactatggcgacgcaaccaatcatagcccaaaatagcatcatatgcg

SEQ ID NO: 190027 - DNA, 741 bp, Zea Mays
gataaatctcatcgttcaagaagcatgtccactagcccagatcgtccacgtgttcgtggaaggtctccagccttcaatatgttaacttctgcctttgagaacacgagcaataccaggaacctttccacccctccccctgttgtgagaaagcctttctcaaaatctggatgtcctgaacactcaagggtgtcacccaaaaaatcagctatcagttccctcaccaggtcttttgaaggtcacatgaaaagtacaataccaaaatcagtaaaaggtatagtgaatataactctttaaatttcaattgtgacaaaacatggatagcaaatgtcgagttacttatttctcccatttctgaatctttttgtcaaactaagtgagccctgagctagagaaggcgacacaggaagaaggtgccacaagcggtgcaaacgaaaacaagcaagaagatgacgaagggcgtgtgatctacccatatgaacgtctgacaacgacagcagaagatcctgcccctgacatcgacgtgaccaaacgagaggtgatagacttatcttccaccttccgttcgcatgcgtttctcagatcaaatgatgatgccatttactgttatcaactaaatgcagacctacttatcgtcagccgagttcaaagacaaattcaacatgataagggcagagttctacaagcttcccaagtggaagcagagcaaattgaagtcttgtgtccaacttttttagcctgccc

SEQ ID NO: 190028 - DNA, 469 bp, Zea Mays
gtcatggagcttggcctaggccggtagttccagccgtacagctacctcattgatcatctctgagatgcggtatgctccgaagaagcgaggcatgaacttccccttcggcgcctgggacagagaagcaatcggccgattgcgcagccgcagcaggaccccgtcacccacggcatatgtgaccggtctgtgggacttgtcgtagtggcgcttttgcactgcttgagcttgttccaggcggtcgtggacctcggccaggaactcctcgcgctctgccatcgtcttggcgaccgcatccaccctagtgtcgccagcctcatatgatcggatggatggcgggtcacggccgtagaccacccagaacggagtgtcgcggagtgaagactggtaggcggagttgtaggtgtactcggcccacgacagccaacgaagccactcgcgtgggcgatctccggtgaagcagcgcaagtac

SEQ ID NO: 190029 - DNA, 486 bp, Zea Mays
ttggacctaaacttattcaagaggcagaataacaagtccgtataatttgggagaatttgagggtagctcagaccaggcaaaagagctacgctaataatagaagaggtccactggaatttaaggaaagaaatcatgtgtacctcaaggtgtcaccacttcgtggaatgaagagatttaaagtcaagggcaaattgttccctcgctatattggaccattctgagtttttaggcaagttggagagatggcctatcaactcgagctacctgataatctatctgatgtgcataatgtatttcacgtatctcaacttaagaagtgtctccgtgtccctgtggaacagctaccaatggaagagctcagtgtcagggcgatttgacttacacggagtatcctatcaagattttggatactttgactagagttacaagaaaaaaggtgataaagatctgcaaagtgcaatggagtcaccatggcgaagatgaagc

SEQ ID NO: 190030 - DNA, 623 bp, Zea Mays
gttgttcaaagaattggagatggacaggaagaattgtcctccatcgccatcgccaagatcgaccgagaagtctggaagagaattgagatctggggaggccaatgtcagcacaaataccaatagcaacctcatcgcaaaaggtgacaaggagaaaggagtcaatgtgcaagtcattctaagatgcaggtggagagggctcagtagttaaagcttaaaagttctgtctaattttgtttttgttatcacaatgtgtgatttgatacattcaggccgttgagtgatgaagaaacaaagtcgaatactcctgtggttatttcgtgcaatgaccgtcgccgggaagttgccgccactcaaattattgccaataagcagattgatcgcacatttgccttcgacaaggtattatatcactttgtcgagcaatttcttgactgtttcgttcatacttagaatttacctagtcttgtttacttaatctctgtgtgttttgacctagatttagttaactatttcattttgagtaggtttttggcccatcgtccaagcagaaagatttgtttgaacaatccatctcgccgatagtaaatgaggtccttgaaggttacaattgcactattttcgct

SEQ ID NO: 190031 - DNA, 735 bp, Zea Mays
catcaatttcattatccatgtatttcaccgggagcatagtgatggataagttaggagcacgatcattgtcagtagtagtgacactgatgcaataagcattgatggatccatttccctctgacaagccaaggaataaagagccatgtggggtggcgcgaccaacgaatggtagccccttggtgtcaattttgtgccactcgactgaattggtgtcaaatgcatatgtgccccaaagttgattgaatgataccagtatgtaggtgtcgaccaccacataagacgtgataagtacaactggcagcatggtataaacaaatggggtaatcttccaagggaagcaaggtggatgtggtagctcaatccaggagcatccctccaggtgggagcggtcgtcaacaatgacaactttggctttggaaagatcgagtacctcgaaccagggtgggaaatcggggtctgtgaaccagcagagagtcttgcacagagcataaaccttgtcccccattgttgttaggacagggcaccactttgtagaattgagagtcggcccgtgaatgaccttcttcgtcttggtgtcgaagatgacggtgtcacccggatcacccccgaccctaatgatccacgcgcggtgcactgaccgtagggacgtgaaggtcataccgccagcaacggtggtcagacgggtaactcggtgcaggctcttccgcttcacccgcgaaggaaaggaagtggcga

SEQ ID NO: 190032 - DNA, 1042 bp, Zea Mays
gcctacgctctggagttttagtgcagttttacaagttttcagtcaattttgatcaagctcaggggaagtaccaatttgggagtgctagctgctgctgcagcagcagctgcgggttccttggtggcagatgggttgctccaactctaaagtggacaatgaggagcctgtgaggcgctccaaggacaggaggcagctcatgaagcagctggtgcgccgccgccctgagcttgcagctgtgcacattgcgtacctgcacgccctccgtaacacaggagccactctccggcaatttgtggagctggagtctgcattgtcacagcagcctcccgtagaccttgtggtgccgccctcgcctactccacagcctcctcctcctcctcctcctgaactctcggtgacatcctcattgccaccctcgccatgccccccgccgcctgtcccttttagtccagtaacaaccataagaaagatggagaagagggatggtgagctcccaccaccaccaccacctctggttttgagtccgataagattaaggaagatggaggatgagttccatgggggtgattttactgatgatgacgacactgacagctgctcgactcctctaccaccacccctgccacccggcatagattgggaggacttggatccctacaatgtgtgccccttgagtttcccatctccatttgctgataggaatgataaagaagtggcctcgcatgtgaccatggacaatgatcctgaagtagacacagaattttatggagaggaggatgaaagcatgcttggcaataatgatgtcattgtggatagggtccatgtgaatccagccaagggtagggctctgggtgatggcaactcttcaacggtgagctgggtgacaaaggattcagactctatggcggtgccttggaggagtaagaagtcgcttgtagagattgttaaggagattgatgagtacttcttgaaagcagcagcaagtgggaatgacgttgtgatttttttggactctgctggtggacggcctgatgccttagag

SEQ ID NO: 190033 - DNA, 422 bp, Zea Mays
gttaaaaccccgagaacaaacttgggagtagcagcggccagccggaagcgagcggagaccgaggggagagggggtgaagaagcaacgagacgcagcgagcaagcgaaagcataccagagcaccaagcatagggacgcgcgcgcttctccagttctccctccctgccctgcaaggcggctgcaactgttccagctagcccctctcccagcctctgcgtcgtagacgtggtagtagcagccgcagcagcagaagcggcggcgagcatgctcttggcacccctccccggcgccgggcggatctgccggagggcggcggccggggcgcttggagcgcggcgctaaccgcgttcgaaggacctcgggatctgacgccgcgcctcccctaatcgatcgactccatcggtggcggcggcggccgaggcg

SEQ ID NO: 190034 - DNA, 779 bp, Zea Mays
cacgaagcaaactacttgttgaatccaattcttccattgctgaattcaaagattcacccttcaaaatattagactgatcagcctcttccaatctgacctcgagaagctgtgccttcttctgccattcatcagctaactgctttgacttggaaccaaaattcctagcatcatcaacatcactctcaagttcatcaatcatgcgctccaatcgaaccgccttttcttcagcagccttttttttctgaagctcaagctttaatgcaaagttctcttcttcaagattctgaatcctctctgcagtcttcttcctgttgccatccaccttggaatcaaccagccctttgaggcgtgtaacctctgcaatgagatgctcaacttcctgggccttcacctcagaagccctaacggcatcatctacctggctgagggcttcattcttggcatcgactgcatcggccagctcgtacctagccttctcaagctgctccactgtcgaccgcagcacagcgtcatcatcctcctgctggtcgtggatgcttgcctgcttcgactctccggcagggagtttgtctgcctcctgcgcctcaatagccctcctttgcacatcaagagcatcttgcagcttggcattggcctcatcagccaccttcttggcacgctccagctcagcaagaactctgcacttctccttctcgttctccagcaactgctctttggccttcacgagctcttcacggatctcggcaagctgcgcctgctgctcctgcggccgctttgcg

SEQ ID NO: 190035 - DNA, 1279 bp, Zea Mays
cttctccaaggggacaatactgaatgaacatttggcagaccatcatggtatattctcatctgttatatgatttgcgttgcatttaaacattgcatcgatagttttcccgtgtgggttcacacgcatattccttgttgctgttaaatactttaattgtttatattcatataacattactgctctgctgaccatggtctgttttttcaccactaggtcaagctgctcagttgaagaatgtgttgaaacctgggcacgagttcaaccaactcttagttctcggtgaagtcaactaacttcatttgttatcaatgcactttgaaaaaaaaacagaacaaccctttttctgttaataaacatttgacgcattggacatttttacacagttatgttgtaaaaattatagcaaaaaatgaatctaaagtcactacgtcatgaccagtacttttttttgaactgatggaggatcaagcatacactgtctgaagtgttgtatatctagagggagtaccatactaccacgtaacagtttatgaaaggatgtgcagaatttcacaatggcaagtaggaagttcgctgttttgcatgcacacttgtagcgtgtcatggtctgtacattacctcacgatacaatcagttgtttgcactgcttaatgatgatgcaccttttgttgttgtcagatggatatttgatcacattgctaatttttccaactgattttctaataccggtctgcagatactgaaggtcaaaatttagttctttcggcaaagcactcacttataaattgtgcaaatgacattccttcagagatatcacagatgcatcctggtgttgtagttcatgtaatctttctctagttatttttacttagcctaatgtgagcaactgagctgacatttaatttatcttagggttacatctgcaacattattgaagctggttgttttgtccgtttcctcggacatttgactggtttctctcccaaggacaaagtaagattttttcagctccatcattctttttgttgttttgaaaagaatgtctaatttttcttgtttcacaaaggcagttgataggtggatagaaaagctttctgatgcgttctatgttggccagtcagttcggagtcatatactcagcgtatgccataattgttggtatatatttgttgccatcctctattatctgtgttatttagaatcttctttttgttcctccctgttcaggtaaatgcagaaactgctagagtaaaactcgcacttcaacagtcaatgtgct

SEQ ID NO: 190036 - DNA, 272 bp, Zea Mays
cttgacagtatttcttcaacctttagaatgtactcagttctggcactgctcgccgtaccgttcgctcgggcgctgcgtggagccacacccatgcctgccatttcgcgtcatgctggaccatctgcctgctcgtggcctcgcactatgcagtggaacgccaccttcccgacgactcttccccttcttccccactcaagcaatgtgacggtttcctctctctccctccattaatagctccctccattaatagctgtcgccgtttcttctgggtc

SEQ ID NO: 190037 - DNA, 733 bp, Zea Mays
caaatagaaggatctttcttagaagggccaattccctcgagcctatctgaattgaaaaacctttctgatctgtatgtcagcaaaaatgtttgaaactattgttctcatgatttgacatatataatgatattcactcaccggacataagcccttacagctccaccataaaaaagatatgattaatttccactaattcctagtgtttccgtgtgaaacaggaggattagtgacctgagaggtagtggttcatctttccctgatttaagtggaatgacatacatgaacaaattgtaagttcgtaatttactgaatttcaagcttgccatatgctggctctcatatctcatatgatacaaaattactcaaatgtagggtactaaggaactgttccatcagtggaagcatacccccatacattggcacatggacatctcttaagcatctgtaataaatcacaatttatctaagtgctaaaatgtttttataattaacatattttgttataacattgtttattcagggatctcagctttaataaactgagtggagaaataccaccttcttttgctagcatgggagctgtagattacatgtaagtagtgacatttccataaaaatgaaataaacatgacatttcattgtgctcctttcttaaatgtgcatctaccaaaattgcctgcagatatctatctggaaattcactcaccgggaacatacctggatggttattaag

SEQ ID NO: 190038 - DNA, 1047 bp, Zea Mays
gttcttccgccaggtcatcgacctccgcgcccccgtgtccgcagttgcttggtgccgccgcgggagcggagaggtcgccgccgctacagacaattctatacacatattccagcctgcgcccgcctcttctccaggtctgcttctctggccaactcttcaaattctcatcgtcagttagcttagacggctgttgtggctcggttcagtgtttggagattggaacctgcaggttcgtttggatggctcctgagatggtctatcaccgagacgttcgccatcgttgctgtatcctggaccggctgcggcaatggcattgtggcagttggcgcaggtgtttccatgtgggcaagattggagtcctcctggcagctcgcttggaggtctacaccgcaggtgccgcaagcccttgtctccactacctgttccatgcaaggtcctgtcgcgacagtggcagctcttgctccagccgagggcagtgtgcctgttcttgtgtttctgaacgatgccaggagggggctggagcaagctgagcttgtgcatcctcagcctgtttgtatgatccagtggagatcctgttcgttatacccccatgatctgtctgagatcaggagagagatcctcatgacttgctgctttgatgggactgtccggctatggagtaaggatgaggtgtctaggtcgaagaagcagcgtggtttgctaatatcattcagtgtcattgcagtaatagaggtgaacaacactctgaatggagtcctcggagttgatattattgtgagatggtccatggaatctggcagcgttgtgtcaagggacgaacaaggtagattcaagttgttttcaggtgatttgagggagagccaggttggtaaatgtgagtggcttgtaagtcttggccccgggccttgcattagcttttgggctatccattgtttggatgatgtatttccgccaaggtacccacggattactttatggaaacagagcaaacttcagggctggggggattcctatgttaaatcaggtcctctaaaatctatggaacag

SEQ ID NO: 190039 - DNA, 4466 bp, Zea Mays
tgggcccagagaaagaggtgcatggatatccagtaggtgcaaggattaattttgtcacctggtaatttttctctatttcccattaagtattttttcgctatttcttttcattttttactttgctttccaccatttcaaaagtaatattctgtttctattgtggattgcataacgatattatgccctgaactgggtgaataggtcacaagacggccgtcatatatccttcagtattcgagtcgatgaggtgatcggttgtctttaagacagacagcagacagtttttatgtatttttttaataattgttaagatttttgattttttacaataggaagacagcaaaagtggaaagctgagagtgtggattgctgatgtggagtctggagaagcaaggccactttttaaatcgcctgaaatatacctaaatgctatttttgacaggtgaagatgaatctctatgcatggtatattttctagttattgcttgtaactaacattgtttctgccgttgttgcagctttgtatgggttaatgattgtacactgctagtctgcactattcctgcgacacgtggagatccaccacataagccatcagttccatctggcccgaaaattcaatctaatgagtcaaagaatgtagtccaagcgagaactttccaagatcttctgaaagatgaatatgatgcaaaactatttgattactatgcaacctcacagcttgtgttggcctctttggatggaacagtgaagccaattggccctccagctatatatacatctgttgatccatcaccggatgataaatacataatgctttcttctatccaccgcccatattcctacattgtaccttgtgggaggtttccaaagaaagttgagttgtggactgtagatggaaagtttattagggaactttgtgatttgcccctggctgaggacattccaattacgatgagcagtgtacgcaagggtaagcgctcaattaattggaggccagacaaaccttcgatgctgtactggtatgtagagcaccattctaagcctaacttgctaaaatttgcattggtactttttctgtttatttaaagatgaactcctcctgcaacatctactgcgcctcaagccctcaacataagcttacaaaccgataatagaaaaatatagttcactttagtagctgtgtggaaatagaaagacttaaagccatccaagttagttaaatctcaattttaatgctagaaatgtaataccgtacaggaacattgtaatgggactagaatgacaatcctccttttatgtttatttatggttatggtctcaacttggatgatttgaactaaaatattttagcgcccatccattcaaacgtatcctcatggtttaccttccaaattaaacattttttgaaacttaagcgccaaatttagcgacccagaaacaaaacatcaatgccaatgctatcgatttttctataaaagatcttttccttgtccaaaatatgggtaagtgcccatattagtatcggatatgtttatgtgcaaacaaaatatgtgttcgttaaaaattgatagaatctaccatctatgactttgagattgactatcttaaagaaaattggtttgatggaacagtttatgttcttttgttggttccacgaagcctgacctagtgaccttacatcaaagaatagtgccaggtgtcactaagcaaaaaagaatagtttcaatatagtaagttctatttctatagcagtataatttcaaacagtaacatctgcattctgcagtagtatagttgcattttcatagcccttgatgggacacttcttgattgaaacttgggcactcctcttcaggggtctgaactgccggttgaaagtgaaacataatggtagtttcatagtttgcctatcagcatatgagatgaaaatgtttgctttcttggtaaccataacttttcctttatcctttttacttagttctgactatatttgattagctccatatattaaccaatttcacataaaacggagttatgataaatatgacttgatgccaatgcatgtttttctttttgcaacattccaattgtaccactagtctctctgattccaaatttagaccgtttttagatttgtcctaagtcaacatatttagctttgaccaccaatagctaaaaatctaaatagatttacagcataagagcatctttaagtgtctttctaaatttcactctctaaattgtcatttggagagtcatttgcataaaagtcgctttctatatcttttcactctccaatagcttttctatatcttattgtactctagagctattctcgttttctaactttggctagcaagaaatcctgaataggagatggctatatttggataatcatttaaagaagctgttggaggatattttttttaccaaaatctctattcctagcaattaggaaggatatagactctcttggagttgcttgaaggtatgcctcaccaaacattctgggtctcttgaaaacagtggctgatgaatgtagtctttggtgcatgggtgcctctaatcttcaggagcttctcattaggtcgccctacccagacctgtaggctgtggttggtaggttgctacccccttggtcatgctttcatctagttccaggagagcttatttcttgtttctagctggtgtgtgtgttgtgtttctggctggggctgttttaccctcaccccttgacctctttttctctcttaatgaaaggacacacagctctcctgtattgtttgaggaaaaaaaggttgatgctactagattcatcatggcgatgcacagtagctcaagccatggttttgggtgtctgatataaaaggagcactgactgttcctgtcctaggagagtatctatttatttgggaattgattgatgatcgaaccctgcaactaggagtaatggaccagcactgttggatgcttacatattcaggaacatacggcagtaaatctgcatataatgtcatcctcatccggctgcctgccccgtttgcccccttcgcgatcaagctggagaatccatccaacaactccttgtgtcctgtgtctgtgcttggcaggttttgagtgaggtccttcagaagctggggctgatcctccttgtgcctctgaccatcaccaagtgtttctcacattggtggtatcggaacttgcctggggaaatcaggaaagggctaaactcagtcatcattctagtggcatgggaaatatggaaacaccaaaatgactgtttaatggggcaaggacaaatgtcaggacaaccttagaggcagttcctgatgagtgtgtcttctggtgctcagtcggtgtgaaagatcttcaagaaatttggtcaggacgcttaatgtggccatgtgatttttagtcctgggtcactggttgccttttgtgttttttggtgcagtttcttcctttgttcttgtgtgtgtttggatgtgtttatgtgtagtatgtgtttgggtgtgcctttttggtgggagagtttcttactttctttaccacccttgttctgttttcccctcatctcgtattaatgaaatgatacacatatctcctgcgtgttcgagaattcatgacaagtaatttcataatatacaagtatctctatcaggttataaacctatgcattttttatagcaaccttcttttatctcctagtggaagtaagtgggttgccttgtacaggattttgtttgccccctcctttgtctatttaatataaggatgctcagctctcttccatgttcgagggaaaaaagaattcgcaagtgaaagtttagtcttgtagaccgtgtcaaactgtcaatgtcctaactcttgaatgacttacattaagaattagaggagtgctattttgttttgttgtttttagtggtactaacatattttaaaaaacatcctttgaaatcaatataaaatcactaatcgtcggtccagtacaattaagcatactcatgttagaattgaattgacatttgttttttcttttttaatttgattagagatgctcaaagtattgatactgcctcgatgaagtgtgatatggactaacagttcattcgggtctttttaatcatcagatctcttatgcataaaccatgttattagggtatctgctgtatctttagatgctctatgatatttgtgaagaacatttacttgcgaattaagtataactttcacttatcaaagctgtaagtgtttccatgagctactcctttgttctagctcatctttactttattcttctgatcagggtggagacacaagatggtggagatgcaaaagtagaagtctcccctcgtgacatagtttacatggaaaatgctgagcctataaatggtgaacacccagagattctgcataaacttgaccttcgctatgcgtatgtccctcaaattatccattagcta

SEQ ID NO: 190040 - DNA, 351 bp, Zea Mays
gtcggtggtgaaccgacggacggaaaggagattgtgagtgatttgtggggctacgagaacgtcattgagatagaacggtccagggagcaccgagacacctactgaggtgactggaagggtggaaccgtttccaacgacgatcgaggtagggcgtgtggcgggatgtgggtgtgagcgagatagtatgcatgtggtgggagttgtgtgataggatgcaccggagtcgatgacccagtcaaatgatggtggggccaacaccatggtgttgtatgcggcggcgagggcggcagggtcccagcctccagcgaacgaggaccatggtgtcgtggtagacgaccctgtaggtgggag

SEQ ID NO: 190041 - DNA, 290 bp, Zea Mays
cttctaaagactgctttaggtgttcctccaggatctacaacaacattaactatagcccaagaccaaacatttcgtattgagtcagtgaagtgccttgcaaccataatcaagtcaatgggttcatggatggaccaacagctgagaattggtgatttttcaccaaaaatatctgaagcttctttaagttctttaagttcaatagataaccccaacatccttattggagaagatggtagtggaattgattatgaactgcaatctgactctggtagcccagatgtatctggtgc

SEQ ID NO: 190042 - DNA, 412 bp, Zea Mays
ctggaatccctgtcaaccgtgccttctgtcaggatctcacggatagaagaaaagagagacaaacacgaaatttatctggcttctgattgccaggttgctaagccacacaatcgccctgaatgctacactccaagtgtcggtgatgtaattctcttgtccgatgtgaagccgggccacatttctgatactactcgcaacggaaggccgtaccgagttgcctttgtcacagatgcggatggaggggatgaatacgacgactcaccaccggctaagtatggcatcgtagcgtcaggcaaaatcgatgccgccgatgacgaacgccaagatggtaaaagtacctcactttttgctgcttgtctgctcaacattgtgacatacatccggatatggcgttgccttgattatgaagcac

SEQ ID NO: 190043 - DNA, 278 bp, Zea Mays
agtcatagctttccatagacatagagcaacgcttgccatagacatagagcaacaacgcatagtcaccgagtagcagagcatgttagccaagcatcagtgttgaggcatagagcagtgaacagagcagagacgtcaggtagagacctagcaacgacaaactaatagtatgctcatgttatttgagacgatataggctcgataggatcagtttaagtagtcgttgttagctgatcgtgcatagaacctggcttacttcaacacctatttcagtagttagg

SEQ ID NO: 190044 - DNA, 461 bp, Zea Mays
gtttaggtatttagagccctgggctttgtgtaggtagagaaagccccaaccacccacacgaccggccaaccaggtgagttaagcgtagccaaacgagactactcaaacaatcgtcagaccatttacgatctcctgcacaaacgtttatgatggttacattcccgttttatgcaaactaacacaactcagcgcaacttatggtccacggctccacgcccacgtttccgccccagtccgcacaccatggcccaccagtcgatcaaccgagtctgcatcctggccagaccccaccgcatgccccaaacctaaccactcgcccgaacatctagcaaccctaattgatttcctcgtcgctctcgccgtcgtgtgctcccacaatcgccgtctccaagcgcccccgcccctgccacaccgccgtcttcgtgcgtggcgtctcggtcccccaacatcgtcgcacggta

SEQ ID NO: 190045 - DNA, 420 bp, Zea Mays
ccgacatctctctgcaggagcaccgggtgaactgcggtgcaggggatgtcgccgacctgcagaggctggagaaggagatttcagcacctgtacccgccccggcgctcgcggcgttcccgctcttttcctcgagaatttgcttctcccccctgtggaggcagatcctcttcgtcaccttccctcgggagctcatcgtctttgacctcagctacagcactgcgctttctgttactccattgcccagggggtttggcaagttctcggatgttatggccgatcctgatatcgacatgctctattgcacccatctcgacggcaagctgagcatctggaggcgcaaggagtgagtttgcagtcctactgtttatctgggtagtattggatttagttcaaaacataaatcagagattagtgaatgcc

SEQ ID NO: 190046 - DNA, 312 bp, Zea Mays
gtaaaggtgcataggagcaagagaaaaggtttcaatagcgtcataattttgggggcttggtgcttatgcctccttcgaaacaaggctgttttgatggagtgaatccttccttgagcaatgttaaaagtttgtttttagatgagttgagttgttgggatagggctggtactaatcatatagcgggtcttggccttactgctgcttttattagggtctaggccattcatgtggtttaaggtttccaaactggtcgggtctgcctagttttgttttctgtttgcccattgggcattgtactttggtctactttgg

SEQ ID NO: 190047 - DNA, 891 bp, Zea Mays
ggctggtagatatcccaaagctcttgcacggcgtgtaactgaactgcagctgaacatttatgccctttgtgccattttttctgtgtagactttacaagtaagctcggacagcctccattttatcagcagctgattgattgtatttgttggtcggcaagggagtcttgtcatctgttgcttggggtggtgacggcaatggaagggcacctcagaatgttggcttcatagcattgggggattctagtcgagctgctgaataataggggcgtttgaactccgatcttcgagctgcttcagtttccatttcctcttcctgcagagaagcaagcacgcaggcagtatcgaaatcgggagggcgctgaagaagaacagcagagcggatcagacccttaagtccgtcaatgaaacgagtggtgtaatataggggatctggggccgactcataagcgtggaggttatcaaccagtttagaaaattcagctatgtactctgctactaattgggtttgacgaatgtggaatagtttgtggatcataatggcgtgctcatcgcggccaaaacgatcgtcaaggagggcacaaaatccggaccaggagagatggatgagtttccgctcaatggattggaaccagcgagcagcgggaccttgtaagtacattttggcgaccttaacccaaatggtagagtctacggagtacatctcaaagtacgactcacaacgggatcgtcatagtttagggttctcgccattgaaatgagggaacgacattttgggaaggttgtcgcgagcatctagagctcccggatggggtgtaactgactcgcctcggaattgattgggtggggggtcaaaatttgcagtgaatcgagggagtggggtatcgtgcttac

SEQ ID NO: 190048 - DNA, 345 bp, Zea Mays
ccagagcaaagacctcctcgaagtcgactcctttctacacgtagcctttcgtcaccagcaagcaaagcaccatgcgaagaagccattgggccccataacccctgcaacaccgagcggaaaccaatatttccttctgttggttgacgattatagtcgatacatgtggattgctctccttccctcaaaggacagagcagcgactgcaactaagaggatacaggcagctgcagaaagaaagagtggtgaaaaactaggagctttgcacactgacagaggaggggaattcacagctggagaattcactgattattttgaagagcttggtgtgcaacggcagatcactgc

SEQ ID NO: 190049 - DNA, 294 bp, Zea Mays
cccagatttccgtctcgctgccggcgaacgcggtgctttactcgcctgacactaaggtgccgaggaccggggagctggccctgaggagggcgatccccgctaacccgaacatgaaggccatacaggtttgcctgctccttatgatttgcatgtaggtttgcttattcgattcttccgtctgggcgttgccttacattgctacatttggcaggaatcgctggaggatatttcgtacttgttgaggataccgcagaggaagccgtacggttccatggagggcgatgtgaagaagtc

SEQ ID NO: 190050 - DNA, 784 bp, Zea Mays
gcggcatcagcgtcgtccggcggcaagggcggcgctggtgcttccgccagggccaaaggccagacgtcgagagcgcagcaccagcagcagcagccggagacgcccgccgagccgtcgcctgccgtgactcccttggaactggaagcggaggagcctgtcctgttggagtccgacgctgcaggccagaatggacaggacgtcgcgacgtcgcaggaggctgccagcactgacatcacgactgtggcggtgaggtgtcaagaggagcaggtcggcgcagggcagccgaaggaaaaagcggaggcggagatgtcggatttgcaagaggagaggccgcagagcagcgaggtcgtggagacagaaacgggggcccatgagcgcacggacgatggctcaccggccgtcgttggagaagcagcagcaacacctgagggagaagatgagcttgcaaccagcgcggcagaagagaagatcgtcgaggagatccagcgagcagaggcgactgagaactcgaaggcgaacgcgaaccctgaggaaccagaccaagaaaccggcgtgatctccgaagaacccaaggagggaacgagcgtggtctctgaagaaccaaaaccaaaggaggcagctgatcctaccactgcgcagaagcgcgaggaggcgtccgacgagccaaaaacggctgccggatcgaacgcgtcagctccgacgacgccactgacagaagcggccaactacgacggcaacgacgacgtggaggcaacgcctaaacaggtgagcgcttcggagcccg

SEQ ID NO: 190051 - DNA, 485 bp, Zea Mays
aggacatctgattgtttctcgcttgggtggcctatgcgggatgatggtgactttttcaaatccgtgcatgattcaaggcctgtaacaacggtacaaatttgatattcgtatgtgttctgtcaatatttcttgacaacaaatttgattgggattgctttgtgacaaactttatttgtaggctggaagctcaccacaaaaggattccacgaaaagtacagggaagacaaatttcgttgagactagaacattttggcacatcttccgaagttttgaccgaatgtggactttctatattttggctctacaggtactatactgaaattgtatatggatgttcttttatcttgactacagtttgacacctgctaatattctagtatcttatttaacaggcaatgctgatttttgcttggaatgattattcagtgaccgaaatccttcggaaagaccttttgtattatctatctagtgtattcgtcactgca

SEQ ID NO: 190052 - DNA, 514 bp, Zea Mays
catattgctcataaccttctttctgttcgtcggtttaccaccgacaattcttgttctattgagtttgacccgtttggtttatctattaaggatctagccaacaaggcccttctcgcccgatgtgacagcttgggcccctctacacgctccgaccatcctccactggcacgtcctccctgcttgtcctggcctctatcacctcctccaccacttggcatcgttgcctcgaccatctaggacctgacgtcatgactaagttcaccaatagtccgacatttcttgtagtaggggacattttgagggtccgtgtcatgcttgtcagttaggctgttatacttgtctcactttaagtaccacttctagggctgagcaggcttttgatcttgttcattgtgatctttggacatctcctgtattcagtctttctggctataaatactaattggtgattttggatgatttctctcattttatttggacttttccgttgtggttagagttcggcacctttccc

SEQ ID NO: 190053 - DNA, 2225 bp, Zea Mays
aatcaatagtgcagggaacattaagcaacaatcgtgctggtatggctgtcttattagacacggtgaaaagttttgactacattgatcatgaggtacggtctcactttgaaaatatgaatgaattaaataacctttgcaattctctgatggtttctgaagtgttatttcaaatatcagctcttattgttactcagtgaacttcacaaatctgcttacacttttgagctacaaacctacatcattctgtgcccatttcacaaacccaccaggccaccattacttgggctacattctcacaatagtaaaacttcgtgatagttttcatttcatggtcagctgggcccacttgtaagcggcatgctcttggccagatgagcccatgtcaaatttgatgagctgtggctgatgtgggcccaattggtcatgaatggtcacaagtttgtagttttgtgagaagactgctcaagtattggcagttttgcacaaaatatggtgtgtctgactattaacccaagatattggtgaggttgtgaaaaatctgctttcactgtttttgtgaatcaggtgatctgtccagcactgaatgtcctcgtcaatcttgtatgcccgcctccttctatcagcaacaaaccattgtcaactgccaatcagcaacctgcagccgcgcaagcacttgcttcagaaagcagagataggaacttcgaaaaaagtatttcagataggaatctactagcaaatcagggtgaatatcgtgaaagatctggtgatggcaaccctgctgaaaggaacaataccttgcatcaaggaactcctaacacacctgttgtgacatctggagtagtcggtgatcgaagaataacattaggtgttggaggtggtggtcctggtcttgctgctcaattggagcaaggataccgtcaagctcgagaagttgtaagagccaataatggcataaaaattcttttacagcttctcggttctcggatggttacacatcctgtggctatagattctattcgagcgcttgcctgccgtgtcctgcttggcctggctagagatgatacaattgcacatatactgaccaagctccaggtattgcatactacagaacataacttatctcatatccagtgttacaaactacagtcatagtggtaacttataattattgttaactatgattccactgcaagctgagtactccctctgttttttatagggcctattaacatttgaaaaggtcatctttatcagtttttctaccacttttatatgtccttgtgcctttttaatatagcacaagatgattagttttgtcaaataattctctgatgcgcaccttgaagatatttatccactcattgtttcaggtggggaagaaattatcagaactgatccgtgataccagtgcccagacatctgcgggcgatagtggaagatggcaagctgagctgacccaagtggcaattgaactaattgcggtaagcactttcatattatgtgattataggtaataattttgaagattcaaccctctaaacaggccatgttggttagatgcgtcctatgttcacatgattctttggcaggtattgacaaattctggaaaagaaacaacattagcagcaactgatgctgctgctccagcattgaggcgcatcgagcgagctgggatagctgctgctactcctatctcctaccactcaaggtttaatttctgtatgattgttttattgcatcatcttgctgctttgagttcttttttttttcttattccttttttgggtctgtatagggaactgatgcagttgatacatgaacatcttcttgggtctggtttcactgccactgctgccatgctgcagaaggaggctggccttgcacctttaccattgatagcagcggtgcttcctgcccaccaagttgctgccctggaagcatcatctgttcagcaacagtggccctctggacgtgttcagggatttctctcagataaaataaatatgtcgacagatcaatctgcccatagatcagattctatcccgccttcatctaagaaaaaagcactgaccttctcatccagtttctcacgaagagctcagactccacattctgtttctggcagcagaacaagcaacatccttaaaagtcctgtacctattgcggctgatactagagatgcagaaatgttgaataagacaccactgtcgctgccacttaagagg

SEQ ID NO: 190054 - DNA, 771 bp, Zea Mays
gtcaacaaaggccaaaagtaccaatggacgaagaaagaaacgaaaagagacacttcctaagggtagtggacacaagtattatgatcttgatagtgcacacagttctctcaatgagaatgtcgagagttttgttacttcagaggatgttcagtgttccttggcaactgatttaaagctgaattttacatgcgaggctgcaaaggacaattcaactggtgggaatgattgccagaacagaagtgacttgttcagctgggaaaatacaacggaaaactctgcggacaagttgaaactttttgggggtacccattctaaaagtggagcagaagtaaacaaggataaatctgagtttgaccataaaaggtattcccgggattttcttttaacgtttgcacaaagttgcatcgaacttcctgcaggtttcatgattggattcgatatttctgaagcagtaatgagtgtacatgttggtgctccatttatagacaatactcaacttaattcaaaccatgcaaggataaaagatcgaggttcccgaggtagtcgtcatatgactggtaaatttgatgatgataagtggagaaaacagtttttttctactgtttctggacgtaacctgctttctgacaatttttatcaacctgccttttctaatcgggatgcagtacaacatgttgggaacggatctgtaagaagtttatcacaaagtcagccattaagtcaatatagtggcgaggtgctctccggagctatgaaagtagtatctcggcg

SEQ ID NO: 190055 - DNA, 452 bp, Zea Mays
ggcagatttacctttactgcgagcatccaattttatctctgtttcattatcagcattccgtttgggttcagatttccttccacctaagctagtaaaaaccagtgaatcctcaactgaaggacataatgacacctgatcttttttagcagcgggattttccaatagcacactcttaagaccattttcaggtgtctcgggattttgcatgtctggggaatttgatgctgaaactgacatagttgtagtttcaagcttagcctttgaatttccaattttttgtgaaccaactccagagccaccagaaggttgaatgttgctgcttcgtactaccagttcaacaatacgatacagcaattcagccaatgttggtgcagataacgcagctctagagtgcaagtcgtgagatagttttgctaagacagcaggaatttgctctggtacaaactgtaaag

SEQ ID NO: 190056 - DNA, 465 bp, Zea Mays
cttatggatagcacctcccttggtcttccatcaagctcagttgctctccaagctgctgagttttacacggatttgaacatgagaaggtccttccagtccaccatactgccattcaaacctgatgtggtcttatttcttggtgatcactttgatggaggcccttacatgcccgatgaagagtaaggcacggatactgatttccaattcatcttttaattggcacactaagttcacttatcaacattacatctaatactaagttgtcctgtgatggttggatttggaactattgtgtgtgcttcaaaggatgcaatttatccttagaacagttccatatcatctttattgtataaccgcctgtctgttttatctatatatttcctaccagaaaatagatgtcttcataacttcctacacacagttcactggcataactgcatacctagtatttatgtaacaaccttc

SEQ ID NO: 190057 - DNA, 784 bp, Zea Mays
acttgaagattgtttgaactagatagagttggatatgttgtctatgcacaagacatgcataacaccttatctcgattggtttcattcaatgcgacactgttgagtctggtgtgcaccatacgagagttactatgctaactctaagtagttggggaggctttggagtcattgaatgtatctggtgatgcactagatctcccatcgtacatgcatcattgcaagttaaagactttgactagggagtcagtgcactcatcgaacgtacctagtagtgcactgggctcatcactaaatcgatctatttgtagatggagaacccaagagactagcatggttcactggatgagtatggtattcactggatgtgtcatatattaatgactagtttggaaactagccattatagactcatcagatgtgtttggtgtgggaagaagtggtgcactgaacacactcgataccctcgattctcttgagtcgatgggtaatcgctagtcctttacctgagggctataaataccaatccatgtcatccatttgtttagtacaagaaaccctttgaagagaaagagagagcctttgtctagtgacgtgtttgagctttgataatcgcgagactagggacctcattagtgcatagagagtgacaagtgtgcatttatgattctcattaggtttgttcaggtcaagtgagattttgttcttattactcttcgagatcgacatcacctacacagtttggtggcgatcgagagtttggtgatcactcgatggagagtgtggg

SEQ ID NO: 190058 - DNA, 644 bp, Zea Mays
actattatttcatggaacatggaaaaatgtgtaagtaaagtagaatgcaggaattgtgtgtgtattgatagagaagagtgctgttacatatataggggaagagccagaggtaaaaggaaacctcctagacaaggaaacaacaggaccctaattgatccttaccatcctggactcttccccaaatctctctctatcctaacctgctatacaaggctggccgactgcttaaagaagccaggcatcacgcctatatacaaggcaatgaatattgttgtctaacatccccccacagtcgatacgttcgttgagcgaacgttgaggctggaccgaaaatcagtgaacaccgaagacgacagactcttagtgaagacgtcagcatactgtgaagttgtcggcacatggaggacacggacattgccaagagcaacatgttcccgaacgaagtgaatgtcgatctccacatgtttggtgcgttgatgctgaacggggttggaggacatgtagacaaaactgatgttgtcacaatataccaaggtcgtcttcggcagagaagcatgcaattcagtcaagagctatcgaagccaggtagctttagcaacggcattagcaacagcacggtattctgcttcagcactggagcgaga

SEQ ID NO: 190059 - DNA, 598 bp, Zea Mays
attcaactggtgttgtagggtgtgccatcatccacccttaatgacattacaaagatcctcttcaaggtattccaatagttgattgacctttaggcatcctcaacgacatacgacataccctagggattttcctatgtgatgttgaggtatggctcgatggtgcttttgatttactcagccaccaccataccctcaaccaccacactgcctgtcaccccaccccctgcctactttgtttccatccacctcatcaattttccaccatcaccatcactcctgaccaactttttggtgccactagccctagtgttcctgtaattccctacctcgacatagccagtaagctaagccttcctcgatttagcaagctcgatttacccttctatgatggatcagaggatcctctaaactagctcacccattgtgaacaattcttttgggggcaacatatactccaacctaatcgtgtatagcttgcatcgtgccatctacgagggcatggcccaaatgtggtactatggaggatgagggcatgccttctttggagcacttcatggagctttacatcttacgttttggcctgaccatccatacaaac

SEQ ID NO: 190060 - DNA, 400 bp, Zea Mays
ggaatttgcatgaatttttttgtcactgaactaatatatttaacctgattattccatgctcatgtacctgaaaattagaaagctgctctttgatcaaatcaccagttatggtagagatgataacagcattgttaagctcttgtagctttggaacgcaagctagagcacggttttgcccaacatccttctctgagaggaaaaagttgcttgacaagtcccatagctcaactttgccatcatcatgcaaggttacggacttgacacccgcaaggacaaggttttttgctgcagaaattaagtggccgtaagccaatcatagaaagagcagaagataaatcaaaatccttgtaaaactgaataatctgaatcctcataagcaatttataattcacaagttaaa

SEQ ID NO: 190061 - DNA, 352 bp, Zea Mays
ggtgagacgagcactcaggtggaccaagtcaccacactggtgatagtgtgccaggcactggagcaactcgatcttgggacagggaagagggttacaccagctgtagcatcaggaatccacactcaagcagtgagctttagctagaacttgagggcagagaggaggtttcactgaaccaagtttgtagtcactgaacatatacgcacagcaaacgggaggaaaccatcgagcttagctacaactagatgaagaagggtcccaggggtgccagcgcagcaggaagtcacaaacgtggctcccaagcagcagccctacacaggttcacatgcaaggtcccaagacacataatttg

SEQ ID NO: 190062 - DNA, 441 bp, Zea Mays
cagcacttgagtagttgaggaaccaagtaacccacaaattatatttctccagatttggccaaaacccaaagcctgcagcacctcaatcagaaaaggccatgaaaccgagtcaaaggcttttgtgatgtcgagcttaaaaaaaagacatgccttattttgctgatgtaaaaatcttgaagtttgctgcactaacataaaattgtcctgtataaatctgcctttgatgaaggcactctgatttggggagacaagctcattcagatgaccagcaagcctattggccaggatcttggttaccaattttgcaaagctgtgcacaagactaatcggtccagccccatcaaactttgggatcatagtaatatatgcagaattaactttatccaagttattgaagttcctacaccaaattgctgaaactgcattgagtacgtccacttt

SEQ ID NO: 190063 - DNA, 279 bp, Zea Mays
atgcaaatggccggggaagctccagattccgcgacgtttgtggccacgctctctgcctgtgcgcaggctggcgctttggacttgggacgtcaggtggacaagctcattgtttctgagaggatggagatgaatgtggttcttggtgctgcacttgtgaacatgtatgccaggtgtgggcttgtgaacaaggctcgtgagtggttcaatatgctccaggaacgcaatgtggttacgtggacctccatgattgcaggatatggcatgcacggacatggcggc

SEQ ID NO: 190064 - DNA, 392 bp, Zea Mays
tcagctcaggaggatactcttggagcttggcccggtatgtctcatttcctattgccttatctgatgatcataaagtttattgatgttccttttttaatcacaggcatttgtgaagatcgcacaagcagtttcgtcacggccggtgaggttcactagtcattatatttttatttcacctgttcatattgcgattgcaagcttggagtgccttagctttagatgtttgacatttgtcgccttctttgtttcatttgctgcaggatgttgttccacctgcataccttgatgagctctcactacttcaggaccgcatagcaccattttcaaacgatgttgcttttaatattatagagaaagagcttgggcttccactggatatggttttctctgag

SEQ ID NO: 190065 - DNA, 748 bp, Zea Mays
caggttttctgtaatgctattggttgtttagtggaggaagacagaagtttacctgctatagagttgatgttgccacttcttaaacgaggtattgcagtacaccattctggactacttccaataattaaggagctagtggaattgctctttcaagaaggtcttgtgaaagctctctttgctaccgagacagtatgatctctatcctgattatttcttaaacttgttttgatctcgtcacatgcagtgtaaggtagagttcagtttcttgaatggatttttttctttagtttttaaataggtaaagtaagagaactattgttgtacactttatgtaaatattgcatttcttactcttagtcgcaccattgatgagtaacagtcttgattttgatattgttctgcttcagtttgccatgggtcttaatatgcctgcgaaaacggttgttttcacgtctgtcaaaaaatgggatggcgatagtaaccgctatattggttctggagaatatatacaggtaaatctttcatatatgaaatgcaagtgaggcatgcattcagacatgtgagtttaggggactgatacaacccattcttacatgaactgtactcttagatgagtggaagagctggccggcgtggcaaggatgaacgtggtatctgtgttataatgatagatgagaaggtgaagttctatagttctatgtcccttttatctttgttttccaagtacaattcatttagcatgtcaagg

SEQ ID NO: 190066 - DNA, 324 bp, Zea Mays
cttagtaacaactagaccaacaacaggtaacacccttgcatgggctgtggcctgtgaacgtgaccagtggggtcgggccattgcaggtttgtgaaccaactcaattaagtacagacatccacatgccaggggtttctagtgttgttctgaccctacatgtattctttttctgcttttaggacatgttaatgtggcccctcgtcatttgacagctgaagctgaaacattactttcagctactctaatacacgaggttatgcatgttctagggtttgatcctcatgccttcacacattttcgtgatgaaaggaaaaggagacgtgg

SEQ ID NO: 190067 - DNA, 326 bp, Zea Mays
caatgatacagctgcctcccctgccatatccaccaccttgaccaactggtccgtggcgaggcatcctcacgctgaagaatggcatcgcagaagattaaccgagagagtcgccgatgaacacctgctacgtcatcgtcccaccttcaataagcgtcctagaaccgtcgcccggatacgccacacgtttgtggccaccttcgaagggtggaacctagccggatgatctgcaatcgcttgctggagtggatcgccgtcacaatccctcgcttaaccatgggaaaggggtcttcacttcatgattaaccggtaagttggccttgccaagt

SEQ ID NO: 190068 - DNA, 687 bp, Zea Mays
atttccggcctataagtttgattcatagttttgccaaattggtagctaagctcatggctactcggctggcccctttgcttccctcactggtttctgtgaaccagagtgcctttgtgagagggaggaggattcatgacaattttatgcttgtccaacaaattgtgaagttgctgcataagaagaaagaaccacatatccttcttaagttggacatctccaaggcttttgactctgtttcttggtcgttccttttggaggttttaaggaaattgggatttggtcagcgttggcgggatctcctctgtttattgctgtctacttcttccactcagattttagtcaatggagagcctggggacatcattattcatcgtcgcggtctcagacagggagatcctctttctccaatgctctttatccttgtcatggatactctgaactctttaatcaactatgccacttcgttgggtttgcttcaacctattgctgttcagcaggtcaggcatcatgtttccttctatgcggatgatgttgtggttttcttgaggcctcacattctggatctggtttctgtcagacgcattcttgacttatttggtcacgcctctggcctccggaccaacctggttaagagctcggtctcccctattcattgttccgacgatgagctggctctttctgtggaaa

SEQ ID NO: 190069 - DNA, 568 bp, Zea Mays
aaccaacaccctgccagcgaggacccttgtcgtcaagaatatccccccagggccgaggcaatggcacacgaggccggggtcggagacgggcacagccgccgcgcagattttactgcttgtttgcgaagactgcacacacccaacaagggattgcctagaaaccaaggccaccaaagacagaatgtctcgggcacaaccagctgacaatcaaagagttgtcgtgcacacatatcaccaccaccaaccatacaacaacgcccatatccagcacccacccaaccacgcatttcaacatcatcaaggagtacaagtccttccacccccacctccacctccgcatcacccaaacccacaccaccaaaatcacccaccagcgtcgaagcaggaagacttcaccgatcagccgtatcgcggagtcatccacatgatcaccggagggtctagcacagacttcgagtcgaagcggcaaaagagggatcattaccgaagcgtcaaccacgtcaccctcaccggcccagtcgtgcagacgaagtggtcacacgtgccactaaccttcgatgccagagat

SEQ ID NO: 190070 - DNA, 366 bp, Zea Mays
atggatcctaggggacacgagcgcggtagcgtttccgtgaggtgcacgcgacagtgagtcagcgaccacttaagttgcgcacgacggtgaggtgggagcggctgaggtggcgtgacggcggatctcgagggcacgtgagcaatgacggcgccctaaggcgtgcatgacgacgaggtgggagtggctgatgcgacggatctcgagatgcacgtgcttgagtgtcgacccctgagcgcgtacgactgcgatgccatccaaggtcggagcggcgatggcggacttccctaggcgcgagcgacgacgacagcctcccctaggcacgaagttgtggcgcatcccatgcgaggcggcggttccatagggcgg

SEQ ID NO: 190071 - DNA, 356 bp, Zea Mays
tgaataatgtcatgtctttggctttctactaatactactaagtaaccaacgtcattaaagtagtataacatgtaatgacgattaaactatctcctcatgtgtgttctctttggtgtgtgcttgcatgagaatattgtgaatgattgtaaaacctcgattaaatgaatatccctttctatctaagtctgtctaaatatatgagtcatagaaaacttatgtgtacttaactagtttaataataagttgccaatgaacgattaaagcgaacatgttaaattcttgtactcgtgatgttatgtttgtgttggctaaatataggaaatgttcatcgtctttccagtaatgttgacttgatg

SEQ ID NO: 190072 - DNA, 338 bp, Zea Mays
tagtgataaggcagaggtgctccggtccttttattcagatctgattggtacagggcagcaaagatccagaactgtcaaccttgacaccttagaaatgcagcacactgaccttcaggggctcgagcagccaatctcagaggaggaggcgtggaataccatcaagcagcttcctccggacaaagccccggggcctgatgggttcacatgccgtttctataaggtccgttggtcaatcatcaaaaaagacattatggctgctatcatggctatctggaacaaggacttccggaatttcagatacctcaacacagccttcattactcttttgcctaagaaag

SEQ ID NO: 190073 - DNA, 433 bp, Zea Mays
tcctagaggaccagtacaacaaagggcctccttacggtggtcaccaacatccatacatgtaaacatccatgtcgactaaccaaaaacaactactaccagcagcatccagaacaactagataagagcatgtaaatcaggaataggactggtcagcatggataacatccttgctccggccatttcccacatctctctctcctggtcggctgttttgagagcaacatcaatgttaggcctattcttgtcaaagacacatccattacggtgcttccacaaagtccatgccccaaggatcacaaaagaattcagaacttgtgcctctccatgcacatgtgtacagatcattctccaccaattcatgaaagcttctccaccaatctgtgggtccttactttggatgtccacttgagacaacaatttaaaccaaaattcc

SEQ ID NO: 190074 - DNA, 298 bp, Zea Mays
gagcgatcattttattttgcacaaccgtgataatctcgttgtttccttgtaacttccttcggtaatgaatttttacttcaactcttctgttggaacctcacttaccttatccttgattgttttctccacttagttactttgtgaatcttgccttaactctgtccacggattatgcttttcatcattatcacctttacccttgtcacctctatatcttacttgatgcttatgttatacctgtcctttaaaatgttctctcttccatctcaattttatagttgtattttacccattttcc

SEQ ID NO: 190075 - DNA, 458 bp, Zea Mays
ttcggcgctcgtgggaaaaagaggctgaatagggtgttcgatgttattgggtttgtttacctagattaccgcttccccgtccaaaagcaagggagaaaaaggaaagtcgttgcttcaacatcttctgatgcgccgaaggcgaagaaagtcaaggtattgacacgtagaccgaagcccattcggacgcccgatgagccagagttacttgaacaagcagaaactgcccccctagccatagagatggctcctgtgatgtcgattgaagctagtgcagacccggtcgaagagctgaaatcagagaaggcagtagagcagccgaaggtgctggcagcgacagcaactccgaggaagaggaggatggctagtgttttggatgctgttctggaatatgtgaagacgccacctcctacttctgccgaagcttctggcaagaaaattgaagatgccagagaagtgat

SEQ ID NO: 190076 - DNA, 355 bp, Zea Mays
taaccgagacgtattcgcatggcaacctacggatatgccgggagtcccgagagaactggccgagcacaaattgaaggtctatccccaagcaaggccgattcgacaaaaatcgcgtcgtttcacgcctgacaagagagaagatattcgcgtcgagttagctcgcttagtggcagcagggttcattagagaagtactacatcctgagtggctagcaaatcctgttcttgtactaaaaaagaataaagtggattggtgcatgtgcatcgactatactaatctcaacaaacactgtccgaaggatcccttcgggctccctagaatagatcaggtggttgattcgaccgctggatgttct

SEQ ID NO: 190077 - DNA, 371 bp, Zea Mays
atagaaagatggccgctaggttccaaaaattgcgtgaagaagggaagaactttgatcctttggttcttgaagattttgattgggacaatgagtgggttgatccattagctaattcatctgctattggggatgaccctcttttcacatgggagcatgttgatcatgccatcggtgcatctacacaacttcaaggccgctactttcctaggagagctcatggtactcaagtgccaattcttgaggatgctgaagatggtcttgatgtgggtgaagagaatgaagacgatgacaattttgtgcttgatgaccttgacatggatgatgaagaagaaacaaacaacagtggtggttgtggtgatgagcaagacaag

SEQ ID NO: 190078 - DNA, 1308 bp, Zea Mays
tgagaaagttttggaggtgcaccctgaaaattgtgaaagtttgaaggtaagacatatatctaatcaaacacttattctcagttcatctatttgcaacataacgttgtatttgtgaaatgatttttatgtttcttctaggctattggtcacatacatgcaaaatctggggaaactgaaaaagctatagaaaccttcaagaaagttacccgtattgacccaaaagatcatcaggtacttgcttccccctcccctcaaccattactttcatggcttcatgtattcgggtcaaaaaaagtgctgtaacatagtcccaaaatataattctgccactaatttgtttctaacatgtcaatacataaatagtacaactgctttccaggatgaatgtactgatgaaattttcaaatgctcaatctgaacataaattactccatatgaacatggcaaaaaatatatatttttgaacactgagttttggtccatctctggatctttgaatgctgatgatttggaacaatgaagatgctgatctaggatgaagttgattgaaaacttggaatgctagcgtcttacaatcagtttttttgttgtcgatttgttctgtatttggtccatgaaaggaacacactacatttgccctaatgtgtagttttgattggtatacagattttctattgttaccttaattattaatctataatgagaaacattctttatcttcatagtttctcgcacgtctgctatatttgttttagaaaaggataagacacccataccaggcttcataattgcaaaaaaggacatttgttgtttagctgttttttcttttgactaatttatgtgtcacagtactacatttttgggacttactactgtgtcatgtattatgaagttactggacgatagtttcagagtgattaaccaaaaaatgaataaaacaaagtgtggaagctgttcaatatcagattatgagtatgatgtctattcaaattacttcctgtttgtgtttagtcctagactcctagttgcattcttactctccgttttgaggccacacattaactttactgatccattatttcatgtttgcatataacctattttaatgagattattttgcaggcatttgtggagcttggtgaattgttggtagaatctgactgggctgctgctatggaatacttgaagacagtaagcttttcagtcagttctgtataaatttctatgattccccccatttttctatcgaaggacgcacgtgattcagcagaactaatcatgaaaagttagctttgagcgttgtgttgc

SEQ ID NO: 190079 - DNA, 725 bp, Zea Mays
gtcgtcgatctggatatctctcagcaccggcgtctcctttccgagccccggcgggagctctccgctgaggctgttgctccacagccacaagtataccaaggacggtagctgggctatgcttgccggtatctcgccgacgagattgttgtcgtgcaaaatgaggagccttagcttcgtcaagcttccgaagcttcctgggatggtcccagtcagcatgttctcggacaggtcaacctctaccaaacctgccgctcctatcgtcccgttgttgatgacgatgtcgccggagaggttgttggtgtacaggtacagattcgtcagcttctggaggttccatatcccggacggtatgtttccggtgagtccattcatggacaggtcgagccactccatctccgccagctccgcgacatagctcgggatctcgccggtgaggttgcacttggccagccagacggtcgttagcttggtcaagttcttgaacgactccggcagcgtgccggcactgaagggagtcctctcgagcttgagcgtccgaaggttaaccagctggccgagctccggcgggatggtgccggtgagctggcttccgccgagagcgaggtacgtgaggttggtgagcctggacaccgccgccggtatcgcgccggtgaagttgttgtggtccagggcgaggtaggtcaggttggcgccgagccggtcgatgtcggccgggaggtccccgg

SEQ ID NO: 190080 - DNA, 444 bp, Zea Mays
gattgagtcaggtcgcagttccatttcgactgacgaagagaagaatactgaccctcctgctcatcactatcagatcccatctagtatccagagagctctagaagatgttgctgaagcagttataagacatcaatctgcaaacaaaaaatacataaacagcggtgatgaaactaggtccagagaattcgttgatgccctacagctactgagctcaaacaaggaattgtttgtgatgcttatgcaagatccaagctctaggttgttagaatgtctccaaaacctttacatgtcactaggaagtaccaggttagactctgaagaatatgacgaaggaactgagttgcaaggtacgacagatagtctagagcagtcagcgacttctccaagtaaggtgaaaagaaggcataattctttcttgaaggaggatgggttggtcacgaggaa

SEQ ID NO: 190081 - DNA, 663 bp, Zea Mays
cacgtatatcttcacgcttgatatgggcaatttctgaacactttgatcttgaaggtctggatccccttttagctgatgacccagaggacccactgaatattgtcatatctaacatgcacaagatattattcaacaccgattcatctgctactacatcaaataggatacaagatgtgcaggctgttctaatttgcgctcagcggttgggagcaagaaatgcaagagcaggccaacttctcactaaagaactggaagagtttagggcaagtacttcagctgattctatgaccaagcatcaatcacgttatgtgttgcaagtaataaaatacgtaacaaaccatcctgacaacaggtgagtgcattttcatacttgggttaatcttgtcacttgtgtgccagtgttcacgtagatgtgtaaaaatggtctacctgaatgaaagttccatagagaaatgacaatgttaacttattgttgtttcaggtgggttggtgtaggtgatgctacaggggattatccatttagtcaccacaagcttaccgttcaattttcagaggcgtctgctgcccaagataggaaattggagggattagtccataaggccatccgggagctttggaggccgaatcccagtcaattaattctcctacaaacaaggggaattg

SEQ ID NO: 190082 - DNA, 334 bp, Zea Mays
tgctcttctcacttgctgtcacaagtttgctcaattgatcttgcacccaatgtcctcctaatgacctgggctttttacccttgtcctttcgaccaacagaaacatgacgctttcctttagcagttgtaggggaaacctcttcacattcttcatagtcttaatccttatcatcattggcctcatagtctccatccttgtcatcagtgttctcagtgggttcaccctccagaatttgtggtgtagtaccacttgacagagcccaatgatcatctcctgtgttcctaatatcttcatacatgatggctttttcttcctcatgcaacagaggcccatc

SEQ ID NO: 190083 - DNA, 338 bp, Zea Mays
tggaaagttgataagaaggattcaaatgcctctgtagtgaaatctaaggggaaaaggaaaccagccaaagtgttgtgttactttccattgattcctaggatccaaaggttattttcatctaccaaaacttcagatgacatgcgttggcatgacgaggggcgaacaaaggatggaaaactacgccacccaccagatggtgatgcttggaaagtctttgatcgtagatatcctgactttaaagaagatgctcgtaatgtacgccttggtctagctagtgatggatttaacccttttgggaacaagaatttaaagcacagtacatggccagtaatgcttgt

SEQ ID NO: 190084 - DNA, 281 bp, Zea Mays
ggcaatacaaagcaagaggatgactcacctgaagattggaaagaaatgagggcagacccagggcaggagaagctacgccatggcttgacgggggaagatcagcaggaacgatttgaagggcattatcaggggtgatctcagccccaccagcagatatcaagtttctcgcatctagatcgccgacctctaaggcgacttgttcgttcaaaattgaggaaacatgcaccatcgtcgccccgtcagaccgaggtggggacgacccgacgtggacgtccatggag

SEQ ID NO: 190085 - DNA, 291 bp, Zea Mays
gttgcaactgcacaggatcaaataatggagtactctgtgggagatgcatacttgcaggcaggcaggctgcttacttgcattgaatgggaggtgccaagaaatgattgcacttgcgcacaaaggaaacgagagattgatgagaagccgcacgagctagccaacaagcgctgagttggcgccggcgtgctcctcgcccaacacgaaaacgttgttgactgacttaatggctgagcacccgaccgacggcatctctagtgtgatagagataccggacacggccaacctggacta

SEQ ID NO: 190086 - DNA, 328 bp, Zea Mays
ccagaggtgcgtagcctgccagtacttatcaaaacagcagcatctaccagcacagcagctacagaccatacctgtgacttggccattcgtgtgctggggattggatatgattggacctttcaagaaagctcagggaagatacactcatgtactggttgctatcgataaattcactaaatggatagaattcaaacccattgcttctctaacttcagctaaggtcgtaaaactcatacaagacataatattcaggttcgggataccgaatagcatcataactgacctaggatccaacttcactagtttagagttcttcgatttctgcgag

SEQ ID NO: 190087 - DNA, 402 bp, Zea Mays
caaagcgtcaggaaggcaatgcaaggcgtcggcgagagacaaggagacgtccatcccgccaacccctgaagtcaatgcaactcaaacgtcatgttataggaaatagaatggaacatttaagttagacttggaactacaggacttcatttttatatttctaggtagggttaggactcagagtatggaagcagaagcagtgatatgtagctattggcaatcacactcagattatggaagtagtgatgtgtagctattggcaaccacactcaggttattgaagcagtggccaataggtatgggcaatcggcttaacctacagaacttggccaagatcatacagttatggaccacagcaagtggataattctaagacaagacaatgtgactggcagcagtcaatgt

SEQ ID NO: 190088 - DNA, 2142 bp, Zea Mays
tgtgtcgggattgtttggatctctttcaattcttccacaaaaggaacagcccaaaggtgacacctaagcatttaggaaacactgttcagctcatcattgtactgcagtatttggcttggtgctagtagtctacctcaggttttgaactgaatatgtatacaacatcagtgttgacagttctagtagacctctagacgtcatttccttggacaatatgaaacatatgttctggcatgaatgctactctgacttcacaaattccatagctgaaaatggaaccatcccattcctttcgttgttctttgttatctgagaacctgattgtttagctgtagaaaaacatgtacatgtttctcctcctttgacataatttgtacctgccatgtgtcgatttgaaatcctgcttgacttcaagtttgttagctgccatttattctgaatgctaaagaaaagaagagatccttttccagcataaaactgaaattcacttgcatgtatattactgaagaatatagtaactggatgacttttagtttataaatgcagatgcatgtttcttaactcacttggtttttatctcaggaactatacgtagacaaagcagcatgacggatgtcaaattaaggtgggagaataacaggcctcggtgtattcttgaaaaaaaataaaactagggtctcagtacagaaactacaatgcatttaccatttcttctatgcctttctttatgattttttccaggagctctgaaagtacaagcaacttgccaaagcttagaagaaatgcatctagttcctctgatatgagtagcatggcttcacaaggtccttcaactaatacaggtcataagatgttcttttgaaacacttgtagtggcactggcacatgattaagaattcatgtccctggattctcaattttcctgttcgctatttatgagcaaactgcaaggtcacaagctctaatcctggctagggcaatataataaaatatttgctccttgctcctaatccacatctgaggcatgggagagcctccacatgagggggttgacgtattaagtgaatttccaccttttcccgccatcttaagcttttgcgttgaactgatcagcgcatgcaactgaataactgtctggggtgtatactcaccctctagtgtttagctcctggtgtattgttgatgttgcttatgtgcttagcatgttaaatggttgtgtggctatatttatgacttgcaagttagattgtcttgatctagaaacatggttgtaacctgtaaagcaccagttgatgagaactagggttatttttgctcccttctgtgcacttcattgctttagtattagatgtctcaatattttaactgaagtgagtgcttatacttttacattatatttttccccggagataatactgtgcatgcaaatagttaaacataagcaaacaagaatatctgaagtgaataataggctggaggaaacatacaactcgttgcagctgttaccttcgtaattcttgctgcattgtcgatttgatttataaatcttttctgttctcttggtgatgttcgataaacaatgcagctcctcttagacgcacaagcagttggacttttgatgacaaaattttagtacaagcgttatacaaggttcttctttcagtatcaaagagctaccctattgtactctatataagagatgtcgagaagttccttcacaagtccccaaaaatgtatctcctgtttgaaaaactattaaacaaacttgatggaccggtgttagtccttggatcaaggattgtagatatggagagtgatgaggagttggactacagattgactgttctgttcccatataatatagaaatcaagccacctgaaaacgaaaaccaccttgtaagttggaaatcccaattagaagaagacatgaagatgattcagtttcaagataaccgaaatcatattatggaagtccttgcagaaaatgatcttgaatgtgacgatttaggctcgatttgcctatctgatactatgtgccttagtaagtatatcgaggagattgtggtgtctgcggtttcatatcacttgatgaataacaaagatccagattaccgaaatgggaaattagttctatccacaaag

SEQ ID NO: 190089 - DNA, 354 bp, Zea Mays
ctgatctagagcagccctttacagaaaaggaagtctgggatactatagccagtcttccgtctgataaagcacctgggcatgatggctatactgggagattctacaaaacttgttggcttatccttaaggcagatttgatggctgctctcactaccctacatcaaggtaatgcacaaaaattgtggctactgaacacagcttatcttactttgatccccaagaaaacaaatgccatgacagctggtgattacagacccatcagtctcattcacagctttgctaaacttaccacaaatctccttgccaatagactagcacctcttctcaacaagttggtggaagctaaccagagtg

SEQ ID NO: 190090 - DNA, 339 bp, Zea Mays
agccaacatagattgagctgttgggtcgtggttgtagctgttttggatgtccaacaaccattgtgggagggagataggaacaataggagcgacggggaggaagctgggaggggttctattagagtttttctcagtttttgcttaaccctgatacaaagacacccactaccacttatacaacacacaccttacacccactctggaccgtgaacccgagtattggcgtggcgttggcgtcgtggacgagtcagacgctgggcttcctcttgtgcaggctgagccatctcctcttcagctgtatgcggcacatctggcataggagcagagctcacatcctgg

SEQ ID NO: 190091 - DNA, 1932 bp, Zea Mays
ccccgccggcctcctcctcctcgccgtcgccgcgttccgcctccaaggcgcgtccgtcggctgcggcggatgggctcgcctccggggttgtcgcacttaacttcgaggatcctgtaggaaccggcgccgtggaggacgggtacgactacagcaagggagacttcgtggaacacgcatgccggtactgcgggatccacaaccctgcgtgcgtggcgaggtgcaacgtaccctcctgccgcaagtggttctgtaactcgcgggggaacacttcaggctcccacattgtcaaccacctggtttgtctacttaccttttgtcacgagactttgttatttcgagactagtgagctactaatatgttaacaattgcttaagaactgaacgagtgagagtcctgtctcacaattttggtgataattgcttagaaaccgaactgagtgagagctctgtctaagaaaattctatcgctttgcatcaattttagcctttttgggttgttgaaataagacatcatgctttactgggacttaatggctctgttagtaaactaatgttcagactctggtagcatgttttttattatatgtggcagtagctaaggaggcgatagttaccatctcatagattttgtattttttatggtatatgatagtggcgatgtatctagttactgtatgtagttataaccctggtggtcacgtcacatagatgtggctttagagtttagactttgaaagttttctggtggaaacaattgtagatgaaataactttgaagcgaataacatgttaaccatctcttgaattaggtttacataatccagtgtgcagtatacttgttgcatgtctgggagatgttacactgggatgctatgcttgctagatgtgtgcatttggtttttggttttgttgtgcagtattgaattttgattttttgctattggaatggttgctacattttgtaaatgtggttcctattttggtagctagtatcttaattgttcagcccccatttgcaaaggttccttggcaatattgtttaaatatagttaggaagctaactgcatttgcagtgaagaccatctcttttctcctatttggtagctagagtcagggtcttaattgtgaagtcccatttgcaaggtgtcaatgataccatcgtctaaatagtttgctagtaattcaattatatcttcagtgaagaccatttcaaatggtataagaataatggttgcaacaggactatatattttgttaaaaaaatgccccataaccattgaaagcctgttatgtgacacctctgtttgtacaacttattatattgccaccctgattccttattaagaggctctgtggtgttccataagcagctttgtatccttaaggccacccacaactgcaagcaaaccattgtcctttgacacacttttggtgttctggcattgatgcccaccactttgtgctatggcgcttgtccaagcaaaccaagtactggtacaaatgcatgaagaaaatggttaatacacaagctgaagcatgggtccgtttgcttattgtgcgagaatccacctatttttacatattttaaatgaaactaatgctctgtagtgtgtccatggtcataactatgcatgtatcatttgcaggttagggcaaagcataaggaagtatgccttcacaaggatagccctttaggagaaacaattctcgaatgctacaactgtggttgtcggaatgtatttcttcttgggtttatctcagcaaaggcggagaatgttgtcgttcttttatgcagagaaccatgtttaagtgttaatgcactgaaggatatgaattgggatctcagtcagtggtgccctcttatcgacgacaggtgttttttgtcgtggcttgtaaaggcaagtgtttcctcatgatgatttgttaggttgtt

SEQ ID NO: 190092 - DNA, 770 bp, Zea Mays
aagaagggggtgggcattgaacttgttgtcctggaggtctcttggctgctctttttaaagctttctttcctcctttgaatcatatgagtgtgaagcctaacatcactacacctttaaagtgggagtttcatcgtgcgttgggccaggccatggcactattaaatgggtcgtgccttgggcccgctaggcacaacccatttggccatctatagtcaatagtctagtactcctccctcatcatcgtacctgatctcgtgagtgtggaaaaagatgagagaaaacacttcatcttgtttgaccccacaccacacagtcacatacctcgccatccgcactcacctaatctatgtgtttggatcgtgtttgaataactatcccatttaagcaatgtctacctatatgatatatagaaaccgtagcgatgcactggcaactaactatgaattagtcatgcaggagctcattcagcaaatggcgaatgtgcagtacaccgagaacatgacagaggaacaggttgatgctatggcaggaagtgagactttgcggcagcaagcttcactgttcggagcaacaagaaactataaggttgaagggacattcatctatctcagcagcatatttggatcaaacaattgtcttaccaaaaaatgtaattcttacgcaggtgttgagtaagtccacaaacaggctaagggattcgttgcttccaaaagatgagcccaaacttgcagttcctatgttactgcttattgcccagcatcgatccaagt

SEQ ID NO: 190093 - DNA, 285 bp, Zea Mays
gtgttattattggtagttcaaaactcagcaagcagtttgataaacaaaacaactcagcaatgtgacacgacactatatatctatgagagaacagaacctcaacatcaacgccgccgttggatagaataaaattacaaacctcaaccgccacatcagcatctatgtaagctagctagagtttgttatatacacagggaaggtgaggaggaggagggtcaggtgccagcagcagctcaaatccatccgactactagtataaatgaagaatctcaagtcttccctctc

SEQ ID NO: 190094 - DNA, 626 bp, Zea Mays
gcgagagcttaggatctgtagatacttatgtgtatctttctcctcagctacggcagttcctacacagggagccaccttcattggactctgaaactgctcttctttcatgtcttaagcctccactaccaaaatcaatgttctacgtacctttagaagatgctcaggacattggaaacattttactgaagagcagtggcaagaaagaacagatattacatggtggaagatactctggcatggcacaaagtggatctttgggcaaccttgaagatattcgtcgactgaaaggcactaatatttccagcagcgtgtccttggatgtcaaagactccttttcttttggcaaatcactatattctggttttgctctacatgcatctgctgcaaatagctccttttatgatggcttatctaaaggaataccatcatattctttttgtattgataaccggggtttaggagaaacacacatggtccctgattcatcagtgtataaagcttcgataaggctaccttggttggaaccgaatcgtcctggcatgcagactagagatgatcatttcagtagcaagcggcgagatttaagcatcaatgactctttgaagagcaattcttctttgcaaggg

SEQ ID NO: 190095 - DNA, 453 bp, Zea Mays
ccgtgactggatcagggatgacatcaacggagctgacaatcttcagcacaacactgttctcgcgtaaacagtagacgtgtatgaacagtatccgcagttgaacagtttgggccgactggcttgttttggattatggatggtaagagatgggatcctagatctggattggattaggggtagaaaattgggtaggatgatgtagtttattgattgggtagatgggatagcagatagatttgtgactcgccctcccttggaggctctaagctgcacttctttgatctattttttgcttgcctaaatctaggactccttagctgcctttatagatcatgcgcctaacaaactccctaacaaatcttatctaaataacgaatcttatcttatctctaaactctatcttaatcttatctctaactaactctatcctaactaatcctaatagatctgctc

SEQ ID NO: 190096 - DNA, 862 bp, Zea Mays
gcattgtggggcaccacctggggacggtctgggtcatagagagatgcaacatgtccacgagttgtagagagatgagctggacagtgcaagaaggtgcgctagagcgacagacgagcgtgaggacgaacacccccgtcctgaagcaggagcggagggaactagatgtgtgttgccactagagctagagttgacgagagcagtggtggtgtcggtgcgaagcgaggctctttgtgaccttgaggataaggtcattgcaaaccttgtggaaggacagaaagggcacgaaacgggtgatccaggtccgtaggttgttgtagcgctcgttgaggcctcacataaggttgaggcctgagggcgagagtacgactatacgagtggagacaggctcttcgagatcatggagagagtctgccacgtcattcatctgatgatagtactcgatgatagagcggtcgccctgcacgaaggtggcgttgaggtgcagagcatgggccttagttgccgaggaactattcctctcgatggcaacctaggcctagcgcacaatgccaccacactcatggacgacatcctagagctctaccgtaacgggcctcaggatcttggacaggactatactatccatccgtcgcaaggagggtatgtcgtatcggtgaggacatggtcaccgagggcgaaacgttgcaagggaggaggacgaggtcgcgccaacagatgtagaaggttgggtcgaggaggacaggaactagctagggaccagatgttctatatacccgtcgcttgggcatggaggatggctacgaccacaactttgtatgctaccggtggatcaaccacaggtagtgcaggggtggttcgagag

SEQ ID NO: 190097 - DNA, 506 bp, Zea Mays
accgtgattcgttttagcttcccgtcgatcaccggagtagtcgccacgacggttgccacgagttcacttgcaccagtaacctttcccctctccggccgccaccgcgccatcatcaattcaagcgccactgcccctggaatctataaattgagcccaccgttagctccgcaacctcatcacgcaccacaccgtctagtatcgctcccaatcttgcaaccgtgagctccaatttcaagttttccccaattctgttctgaaacaccacagggtcgagctcaccgtggccagtcctccacaggtttaatcataccatccttgttcttgttttagcatctctgtgtgctggtgatgctcaccaactcacccaattaagctaagatcctatgaatcaccgggaacgtgtagattgttagttcatccgcgcgctcaccgtggccagagacattggtgtagttgtttatgaaattaacttggggaaaaccttcactcggccctgaatttggttt

SEQ ID NO: 190098 - DNA, 379 bp, Zea Mays
caacttctgaagaaccacagtccagacatgttgggcacaaacacacgagacaaggaagtgttggttggattcttcagcttgatcacaaagggagcagacagccgcgtgaggaagaccactcttggcatgacgatcagcagtctagcactctagcatcgatttttcactgcaagtcaaatgaaaaatttgcaccataggaccacccaagttttccaaacccttttccacgagcgaacccttcctaaagataaggtattatatgcagatttcctgctgcattgctcagattttgtgagcttccagcgctactgatccgctactcctggttgcaagatcaaaccatcgaccagcttcatgctttactaggtgcttttggcac

SEQ ID NO: 190099 - DNA, 510 bp, Zea Mays
tggcactgagggtccacccgtcactgatccgactcactatcggggtctggccggtgctctacaatatatcactttcactcgccctgacatttcatatggtgttcagtaagtttgtcttcacatgcatgatcctagagaaccacattacacgttgattaaacgtattcttcgctacctgcatgggacattggatcatggccttcatcttcgtcccacggatgtctgcacattggttgcctactctgatgctgattgggtcggttgtcctgacacccgtcggtcgacctctgggtttgctgtttttcttggtgatcgtctctcggtcatccaagcgtcaacccactatatcccgttccagtgctgaagcagagtatcgtgcggtggcaaatacagttgctcagaccacctggctccgacagctccttcaggaaatgcatatttccctaaagcgcgccactgttgtcttctgtgataatgttagtgcagtctacctctcctcgaacccagtga

SEQ ID NO: 190100 - DNA, 649 bp, Zea Mays
tgcttatacatgcttgtcaatgtgagaaatgaagtggcaaagcgagttacagctggcctcacaagatcttgacctatcttatctctcattagatcatgaaccctcccatgcttgtagacaaatctgcatattttctttgccatgttgatgcaagtgttgaatttcttgatctttccaatgtccgcgaacaagaaatccaagcatctcattagatcatgatccctcccatgcttgtagacaaatctgcatattttctttaccatgttgatgcaagtgttgatttattgatctttccaatgtccgccaacaagaaatccaagcaatgggcagcataagatgtccaaaacaaatgtgggatcctctccattagaagcctcctgctgccttgaacttggctccattgtcagtgacaatctgcaccacatattccttctcaaccttatcaatttgcttccccaacaagtcagccaaaatatgtgcatttgctacctcacttgaagcatcaacagaccctaggaagaatgtccctgctggactattagcaaggaaattgatgagatggtggtggcttgtgtcagtccactcatcggacatctgcaatatactcatatgcaagcataatatcttaggatggagaaccaaagaatag

SEQ ID NO: 190101 - DNA, 369 bp, Zea Mays
ggctcggtaattggggtacacgataaatccacgcaacatgcgcaacagacacaattgtggctcgcgacagacagacattgcctacagggcatgcaaaaaatacgcggctcgacaatgatggtctgactcaactggagtggtccgattaagcgagagtgcgacatagcaatcacatgacgcaaccaagttcgaacgacacaaatattgcgtcgtgttgccaaggcgcagtcaatattcagctaatgccataactcagccgataataacatagtttgatcagtgtgtctgagtaccaactatacaatttaatcgctccatgtgagtccgaaggctcaacacataacaaatatttagagcgatatgaaaaaa

SEQ ID NO: 190102 - DNA, 571 bp, Zea Mays
ggaaaggggagaatcaccacacacccaatgtgggtggggagcctttcatatatagagccaatcaggcatacatggaaggtacataagtagaaggctatcacctatacaaggaagctattcctgggtgctatacatagcaactagcctgtctacaggatcactctaattgatcctgatttacatatcctaatacccgcccgcagtcgcagcgggagactcacggacgcacagactggtcctgaaatcagtgaagagctggacgggtagacccttggtcatcatatccgcgaactggtaggcggagggaacatgaagaactcgaaactgccctagggcgaccttctcacggacgaagtggatgtcaatctcgatgtgcttcgtgcgacgatgatggactgggttggcggtcatatagacaacactcacattgtcgcagttgactaccgtggcaagcggaatcgagatgtgcagctcctggagcagctgacacagccagcagcactcagccacaatgtgagccacagcgcgatactcagccttggcgctggagcgagacaccgtcgtctggcgc

SEQ ID NO: 190103 - DNA, 441 bp, Zea Mays
gccgaatctccagacgggatcgcgccccccatctgacgccaccggcgccggagcccacggcgaccgcgcgcctctgcctccgatctaaaaggtgcgccttcttaccgagattcggcgagcttcagtagcaaggaacgagggacatcggggcagtggttagattggcttgcctgggagggatcggagccggacctgcattttgcgtggtaagtgggaaccgtctccgttgtccgtgtgaatgcgcgcgggatcgcggtgatctgcgcttcgcactcgagctttgcggtgaaattgtagtgggtttttagtattgctgaagtctagctctggagcacgaacatcaggttatctagattccttcgtctgggtgtttatttgagccagcatctagctattccctcgagatcgcctgatattagcccgacaaaacttatgcgtggg

SEQ ID NO: 190104 - DNA, 363 bp, Zea Mays
ccagtcacccagctcaagactgattgaaggtatgtgttttcctcctcaatcctagccttttcatgtatgtaggactcaagagcatactacaaatcctcacaaaatgcacactgcacaattgcaaatgcactcagtgagctagccttctcaagcgaggatattctagcgttcttctccgctagttcagtatgcatgccaggacgagtcttacacacccctaacaagctagacctagatcgtagcacatcacgctcatctcgtagggtggcgtacttggtgtacaatgtggtgatgtttgatatgtgtagggcgtacccatcacactcagtctcattggacaccatgatagaggctctagcagac

SEQ ID NO: 190105 - DNA, 616 bp, Zea Mays
cccagctctagtcgacggcgaggctgaggatggagtcatcgacggagccgaagatccagctgcgaacgcagcagtccgcttgatcccagatcgggtcttgcgggcgtgggggagcagagtcgttgatgtggtggcgaaggaggaacttgccgcacatcgatttgaagaaggatgcccatcgggagtagttggaggctttcatctccagcttggtcggtacatgagattgaaccgaaaccgtggcatacgagggcaccatgagctgctggatggcgccaaggttggcgctggcgcctaaggtctgctcagacatggaggagaggaggggtgccggcggcgtgagaggaagcagagagcagcggaaggaaggccgggatcgaattgatcctggtcctctgataccatgtagagagttggtttaggggaaagcaccgcacactcaatcaggtgtgtgacttctcatatatatagccaagtggcttggtgtacaaggatacaatctcctaaactaggaaggctgtcacctatacaaggtaaggctaaactaagaaggttgtcatctaaacagggtaagacagccggctgtagatatatgcctaataaaaatgcaaaggag

SEQ ID NO: 190106 - DNA, 762 bp, Zea Mays
agtcaacaggagcggtgagtgtctcgtcctgcacaaagacgtccaagtgcatggtttcgcctgtgcaagtgccagacaatggggtcatcttattgtcgccgtcaaagtcgagggggtcgacatcgctgatgtcgaggaggtaaatgccctactggtgcttgtcttcaggtgcgtccgtgagaactcaaggcaattgaagcaaagaccttcatgaggtgaatcatctcgtcgggcgtcaatctagtcatgtgtctgccagtaggtggacgggttgtagccggatagctaggggcaactggcgtggcgggaagtcttggaggggatggtgtagcgcgggccaatgaacgatgtgtggatggtgctggtgcccgagccgccacagtattgcgacgggtgtaggtgtgagctagggtcgttgcctcctctagggtggcgggtgtgtcaagcttgatgacggtcttcaatggtttgcccaggcctacgatgaagatggagatatgttgcaacttggagaggtcgtcgtagtgggtgaggtgttagtagaacgcattgatgtactcgtcgagggacccctgaaggcggaggtgtgcgttggcgagctccatgaagcgtgtccaatacggggtgccctggttcctctcggttcctctcccaccaataataacactgctaagtggtgccctccatttagaagaaggcaagccagaccttctccatgtccagcgtacgtgctgctcggaagaactgctcatagcggtggag

SEQ ID NO: 190107 - DNA, 345 bp, Zea Mays
atgatttcaagtcgagcgacttgctagtcgacacacctgggcgactaggcgactaatcgcgattaggacgacgactaggtcgactaatcgtggctaaggcagcagcagattgaagaggggattcaagagggggggacagatcaagagaaaggtgcagaggggattcaagaggggggacagatcaaaagaaaggtgcagtgattgaagttaccgtcggttgatgtactcatcttggtgctaatggctgctgggccgccgccgctgcagactgctgttgggccgccgccgtcgaggacggtgagctgctgacgccgaggaggaaggtgcagggctgccgccaccgag

SEQ ID NO: 190108 - DNA, 496 bp, Zea Mays
gggggcgaagcgagctagctgtgtgggccacgccaggccgcaccggcgagggagtttggtgcgagctccttggccgccatgatgtttgcgtagtgtcgaggaagaaggaggcgaagaagagggagaaggagatgatttgtcacctacacatgaagaacagccgagcaggcacgcaaggaagaggaagacgatgcgagaaagacgatggggctgctcatccgacgacgcgaggaagacgacgaggcggccccttagaccacggagttataatgcatagagaggaaaacgcgtgggctgctcctgtgtgagaaggaagagggaaggggttcatggtaggggcgtacgattgtatagaaaggagagggtatgtatagaaaggagagggcgcgagaggtggttgtcaatttcatggcgactcttgtcctggccgagcgagagagacagctgcgcggtgagttgcacgagacagggttagacagagttagatgggtggtag

SEQ ID NO: 190109 - DNA, 397 bp, Zea Mays
gtcgttgatgccacaacgaagaggtggtagcatggagagaagatgccgtgctcctgagtgggtagagtgggccggagctatcacaccgaaggatcatgcgtcgagtgggaagatccttcacagagcagccaagagggtcaaattccacagaacaattgttgtcagtggtgaattggcgagtaaaaattaaatctttaatgagagaaggtgaaacaaggacattgttaagaagaaaattatgagaaagttgagtggtgccagtggaagtgacaggaagaaggttgtcattgccaacaacaatgttagagggtagatgatgtgaagaaaagaggcgggaaagtataccagcgtcggaagtcatgtgactggaggcacctgtgtcgaagaaccactcttg

SEQ ID NO: 190110 - DNA, 280 bp, Zea Mays
ggctactttagcaacaaggtcaatgtgcgcctccttggggatgaaacaaccccaagtccaaggaaagacgaagttgtcgtctataagagctttttcaaggtaggactttggcttcctatgtacaagatgattgggaaggtattgtagcggtatgaggtgtatatgcatcagttaacaccaaatgcaatagttcgccttggtgtttttatttgggccatgcaaagcaaggagttcgcaccgatgttgatgcattctagatagttcatgatttacattaaca

SEQ ID NO: 190111 - DNA, 329 bp, Zea Mays
ctaaccactaacccacaactataatgcaattttctgcaggtacactaactaaaaccctaggaaagtgcgactagtgatcaatgacggagtaagtaggattgccaccgccatagaacgtgatagccactatgtgttggcaagaattgtgaggacgaataggacgagcatgcatcatgacatacaactttaagttaaaccccctatgtagtagcttagtacatgtttcatccatcccattcatgctacctatctttgcttttctatactaccttttcctattcgtgaagccttgaaactcagttcatttggtggacctgtagtttataagg

SEQ ID NO: 190112 - DNA, 824 bp, Zea Mays
tgcaattggagttcttcacatcataacacttatgccacagccacatgtccgcaaatcaatagtgcaggggacattaagcaacaatcgtgctggcatggctgtcttattagacacggtgaaaagtctcgactatattgatcatgaggtacagcttcactttgaaaatatgaatatgaattaaataacctttgcaattccctgatgatttctaaagagttattttaaacattgtctcttattatcaatcagtgaacttcacaattctgcttattttttgagctataaacctatgtcattctgtgctcatttcacaaacccacctgtgtttggggtacattctcacaaaagtacaatttgtgagcgttctcctttcatggtcagctgggcccacatgcaagcggcatgctattggcagctgagcccgcatcagattcgatgaactgtgactgttgtgggcctgattggtcatgaatggtcataattttgtagttttgtgagaagactactcaagtaatggtaggtttgcacaaaatttggtaggcctgtgactattaacccaagatattggtaaggttgtgaaaaatctactttcactgtttttgtgaatcaggtgatctgtccagcactgaatgtcctcgtcaatcttgtatgcccacctccttctatcagcaacaaaccattgtcaagttccaatcagcaacctgcagctgcacaagcgcttgcttcagaaagcagagaaaagaactttgaaaaaactatttcagataggaatctacttacaaacctgggtgaatctcgtgaaagatctggtgatggcaaccctg

SEQ ID NO: 190113 - DNA, 354 bp, Zea Mays
ctcgtacctaagtgtatatatgttgttaaatatgtgtcatttctttagctttgaatatgagtgacgatcgaagaagggcgatgtacgatggattcgacagtgccactcatgggcactctgatgcatgggtgagagttgcagatgaattcgtggcactcgcatttgctggtgatgctcgtttagcgaggtgcctgcgtataaaatgtcggaacttggttcggttgaaaaaagtggagctctcgtatcatgttttcaaacatggttttatgccgaactatctgatatggcatgagcatggagaggtggaccatactattgagtcggatggggacctggatgtagaccgaatggaag

SEQ ID NO: 190114 - DNA, 288 bp, Zea Mays
cagaagaagcgaatttacaaagatctactccttgcctacaagactctgggcgtcgtattcggtggtcttgtcacctcccctctctacgtctacccttccatgaacctgacaaacccgaccgaagaggactatctgggaatctacagcatcatgttctggaccctgacactgatcggcgtcgtcaagtacatctgcatcgccctcaacgccgacgaccacggcgaaggtgatggacacacggccatcccaaaccaaaatcgataaaagccagccatttctaactgcgac

SEQ ID NO: 190115 - DNA, 448 bp, Zea Mays
ctcggatcgtcgcgccgtgtgccactttgtcgccgtgagccgcaacaaactcgaccgcaacaattgtgagcttcgaaacaaactccgaaccccaccccatgatcccctctggccggattccgcccgacgctataaagcacgaggattatgactccccaaccagccgaagccgtgtatagcttggtgacgtaggcgcatggatggggggtgcggggagatgtgattgccgctgccgccattgatctgtccatatgcgatcctccagcctcgacaggtggtactggggcagcgaggggtcccaccacacatatatgtggcctcgtcgtgctcgattgagggttggagcgcttctaatttcttgccggaattggtgcttcaccatggaaccgcatgcagccgtgggccgaactttctgcgccgccatcatcggtgagaacctatcctccga

SEQ ID NO: 190116 - DNA, 1143 bp, Zea Mays
tgcgggagagagagagagatgggccagagcaaggcggagttcttgaagcagttcggtggggactacggttacccggacgcgcctaggggcatcgacgagctgcgggccgccgagttcaagcgcctggaaggtgtgatttcgcgatctcctaaattcattccgcgaccttcttttattaggaagtttgagctttgttgatgtggctaagaggagttatgtcaattttgacgacgtgactgagaatgtatttcgttaagaggataattttaagcttaacatgtatagaagtttgcagcttgctactttgctagtttctaaagatgtgtttgttttgaggagcagggatggtttacctggaccatgctggtgcgacactgtactcagaggcacagatgacggatgttgctagagaccttatgtctaatgtctatgggaatcctcgtatccttaaatttgggaggtctgttcacaagagattgttctttcgttgatatgcatttccttttaaaatttattgtggttgtgttctttgacatgccttaagatagccagaacgattcaagcatggctacaatcgatgctgttacttctgtgcggcatcaggtactgcatattataaaaaaatggacctatcatttcttatgtttgtattttccattatggaacttcttttttctttttgaaaatcagctagcactgcagcagttcgtttaagaaagccaatgctagtgattggcatccgttactgatattatgctaacaagtcacaacaactatttacatgtctatttcagcatatgttctaaactagaaatactcaattacatataattgaagttgaaaaggagtatggatatagttttcatgcttcactctgatcaaaagaactgtaaaatggtgctaacgttgtacacaattgtatgcacatgagagaagttgcaaccagccttttcttgcttatgatgcaaactttatcctcacaggtcctaaaatacttcaatgcatctccaagggactacaaatgtatatttacatcaggggcaacagcagccctaaaacttgttggtgaatgttttccatggagtagagacagttgctatatgtacacaatggaaaatcataatagtgttcttgggataagag

SEQ ID NO: 190117 - DNA, 369 bp, Zea Mays
atgaatttcactattattagactgagaggaaggtgcatagcaacattacctgtttgtctctgccagtagatttaccaaactctccaactgcttctgctggattcacaagtccaggtaccaatgtagaaacaaaaccaagttagttcctccctaactttgtgctgctgcttcttcacacgtcttcatgcgagcgcacggttgtgagccagtaaccagttaatggtgtttttagtagcattaatgcgtggttaatggggcaaatgaacgaatgtcgggacattaagaagactgaggtaattgaaagcaaattgatgttgtttaactgctccttggtcactgtgtcgatggcttatacgatggagatttagg

SEQ ID NO: 190118 - DNA, 439 bp, Zea Mays
actctctctcctttggccttttgacaaatttgacactgtttgacaaaatcttccacatcggtcttcatgcccttccaaacaaacaatttcttcaatcgatgataagtggcgtgcacccccgaatgaccacccatggcactgtcatgcaatgctgccaccaacttcgtccggagagctgaattgtggccaacccaaattaaattgcccttcctgatgactccctgagaaagagaatatccatactcatccgggctgtggacacacaaccgagtcagcagtgactgcgcatcagaatcagtcacataagaattggtaacttcttgaatccagcgaggttgaacttcactgactgctgtcaacgccatcacacagcccacccgagaaagagcatcagcgactttgttctccttgcccggcttgtagaccactttaaactgca

SEQ ID NO: 190119 - DNA, 307 bp, Zea Mays
atccaacaagacctagagcaagtatcaataaagcaatacaccgtactcaaacaacaaggcatttcatcaaatgtttacttacatacgcataagaacataggtaaagctaattccaagtaacaagtatcatgatcacatctacttgaataacccactccccaaacaaaaacccaagcaatggtatgagaaggcctagagatccacaaatccataatgccaccttctgcttacaatctgtttgaaaaagataacacgtagataacatggacatgataaagtcaaaatgacaaaagacaaatgaatcata

SEQ ID NO: 190120 - DNA, 448 bp, Zea Mays
tcactctttatttttgtttggtttatggaatgaaatgagttgatcaagctggcttcgacaagtggcaacctcgtgctatacaagtaatcatgttttttgtcagtgagttcgtttcttttgtcacctacggtgcatctggctataagaagataagatttggtaaagacgtttgttctgagttatccaacctagagaccgagcataacgaccttacatatagggattgtataaagtcaagctatcaaggctagctaccatgctgcatccagtggagaactagagattaacacgtattttatggatgcatgtttacatccttaaaacattaatatataggattagaataaaactgcagagttgtttgagggatatggccatatcatacatgaactgattgtcaatcgtgcgatccgtacagaggaaaatgtaacctattttagcctttttg

SEQ ID NO: 190121 - DNA, 858 bp, Zea Mays
tgcgcaccgatgtggagatggagatgccagagacacttcaacgggcaatgcatttggcccgagtgtatgaaagacgtctgctgctatctgccagctccagcaccacctcatatcaggcaccagcagcgccatccaaatccccaacaactgcagcagcacaaccaacatcatcggcctccagcaggcctcgcttccggcgtctatctcctgaggagattgctgctaagcgagccaatggtgaatgttaccattgcaaagagaaatattctcttgatcacaagtgtactgctcgctgcgtgttcctgctagaactggaggaagatgacaccaccacagaaactggctcaccagaagacttgggtatttcactgcaggctatgaccagaataggagtcgctgacaccctcagacttccggtcagcatcaatggcatcacactcactgcattggttgattctggttccacccacacttttctttgtgacgctgcagtatcgcgcctaggcttacaagtggttcctcaacccggtctcttagtaaaagtggccaatggtgagcgcatatccagcaggggcagggtcactaccacgctcaccatcggcactgaggatttccccacaacatgctactccttaccattggacgacttcgatctagttctgggggttgagtggttgcggtctttaggacccgtcatatgtaattttgacaaccacactatggcattttggcgccaaggacggctgatccgcttgacaggcatgggggacccgattctctgcagcacagccattgacaaaagccgagaatgcatggaggaacttttacaatcatttgctgctttgtttgaagaaccac

SEQ ID NO: 190122 - DNA, 598 bp, Zea Mays
cgctgacaaaacggacccacctgtcatcccttcgttctgcccgtcaaccaacgacgcgagatccgcggcgagctcccttccctgatttccgacgccagttggccacgtctccgacttcgccggtcctggaagataaaggctgaccacgcccgcaagccatcactcgtactcaagccgatagaaccctgacgcgagtgattttacgcgtgcggcggaggtgagaagtccgccgccgcgactgccctcgccaacgcagtggctgcacctccacgcaggaatctgggaacctgcttggcgtggtgaagcttcggcccgcactggattgggcgaaccttaccccggcggtgagcaattcctcgccgtggtactcctccgccgcggcagccgcagtatcacgtggtccgtcttcgccatagctccagcccctcggtatgaccttcgaccacctttaccgcatttgtaggatcgtgatgcacctgtccgtggtgaggatcgtgagttatggagtcggattgcctctctccggcgtgaggacgccgtgaagtcaggcggtggcgccgtcgctagctgaggattgggggaaaacaccctggtcgtc

SEQ ID NO: 190123 - DNA, 279 bp, Zea Mays
gtaaactatgttgaacctttgctaagttctccaatagtaagcgatgctgcattttgtacaatgttgaggctagcacgttgcacagcccctcctctttgcaattgggcgctcgacattgctgctgcgattcgtgtgatatctgttggtgattttgaaatggttttggatcttacacctgtgatcatggaagatgatagtaagaagccatcatctggcatctttgaacaaatagtaaatgggctgactattgcgtgcaaagcgggtcctcttccagcagat

SEQ ID NO: 190124 - DNA, 911 bp, Zea Mays
gaaacatgcaacagcaagggaatccttgcttcttaagacaaagcagaatcttgactgcactacaaaagcgctaactgaagcacgagggagaaaccgagacttattgacaagttttgaggattcagctaaaaaaatcaatatgcttgaggattcacttaacaggttaggtttcatttgttacaagcatttgtgatttgctctttgcttgaggatttgtttcttctttactcatagactagaagaatgcacagcagagaaagactctttgttggcagtagaaagaaaacaaaacaaaacgaccaaagaagaactggccaatgcccagaaaacaatcgatgaattagtacatgagtcacagcagtcccaggaaataagaaatcaattggaagataccatcaagaggtctgatgctttttcttcagatgatgtgtccgaacttctttcttgatatcatcattacactgtgatagtgacttttcagtgcggttttgaaaggtttaaagcagaatcgactgccagagacacaatattattatcagagaaacaggcacatgagacgaccaagaaagttctaactgaaattcagtcgagaaatgaagagttaatcaagaaaattcaggattgtgataaaaatattcttgagcttcagctaactgtggagaggtccataatcgtcccttattgtctacctagcaacctctaggatattaattctgtcagaatgatacctattttaatttttgaatcaactccatatctatgtcatgagtacaggcttcaggaaaacacatctactacagaggctttactgttgagagaacgagaacaaaacaatgcaaccatgaaggcacaagctgaaactcaagaaataaatttgcagttactgaacaagcttgaggacgttgagacaa

SEQ ID NO: 190125 - DNA, 4498 bp, Zea Mays
gcttgtttctcctccatattgtcgtatgaattatgcgatcacgaaagggaggggatactgggtagcaattggtgtggagaggaaaggttcaagttgattttaaccaaggcagcacgacggcagcgacgacgacatacaacaacacgacggtaggggtgatgatggcagcgccatcgggtggtggatgcagtggctgtcttgactgcctgcatgatattgtgcatgcactatcgatgggatcatgcctgacagtagagcagcggcctgccatggctacgggaggtgcgcacaaagggagagatgtaaaagagaggaaggaaaaggtggagggtaggataataggaaatggagtgggtaatttggcttgcatgttcacgcgacaggggaagaagggtaccaaccaggatgccatggttgtttgggaggtatgttcccatcgaccttgattatatttctttacattgctaaagggttcacctcttttacactctgttctttttaaatttctaatgtttattatcattcagatcgtctatctataagaatcaataagaaatacatgcatataataaggcatattgaactagaaaagaaagactaaaaatcaaattttgctgagctatccacccttttaatatctaaggtgacattatatattgaaacaattcagtttttgtacgtgatgtatcttggtggaaacaatcaatgacgtagagtattggccaccgatcttcattattcctaaaactgtgcatagcctcttgttcctcctctacccttggatgcacccctaacctattcttgtccattcagcatgctaccaccctcccttcttttggcctccctcaactatcaccttttgatgtgtttttcttcctccttgcacatccatagatcaaatagttaattttggatttctcattgcgttctcatggaatatttctttcatttttcttattttctaaaaatataatataatgcaccaatcaaaattataaaaaggacaattcaaaggatggtttagcgatggagcaagcaacatctccatcagggatggaggcagcagtagggcgggcgctcgagccccctcctgttcctgagaccatggagtcccactgaagtctccactaaaatttaaaatgtacacaatataatataaaaggggcttctatattgtagtgatttagtttaggctctcctaaactttctcttggctccgtctttgatctccatacagtttcaattaaaattagaggtttggatattacaaacaatatattgatttataaaaaaacatcttgtgatttgaccacctcaaaatagtatcactgcttattattaatgtagtaaacgaagattgtgctttgggagatgtatgcaataaaaatatttaaatatcgattcattattgactgcagtgagttgtatataaacatttgaagtcaaaacaactatgtttctttgttgatctacaaatatggtatatataaattagagcatgtttggcatggctctggctcttttaattatgctccggctctggcttctcttcaagagcaccttatctataggagctagtgttttttaacaaaatcgtttgataaaacagctcctcttgacacaagagaagggcaatatggagagtgggggaggagccgctaggagctagttttttttgctctggcttctctctataaaaacgactctggctcctcagtgctctttgttgagagctatttttagaccatttggaagggctcctacaggaactggagccggtttggaagccctctcaaacacgcccttagttgtcaaagttgtattttgtagattctgtgatgtccaaaacaaacttcctctgaccagatcaagtacattttgcctaagttttgacaatgaaactgttgagatttaaatagcagaacgtgacacgagaaaactgcggagagagtggcagaggggccctttctccctcaagccatcacaatgcgcaattgggtctaggagcaaggttttggtgtcgtgcacaaaaattccaccgtgcagcgcgttatccttcggtagtgtgtggtggtgatacaagtttgacgagttttgtgggtttgtttgttcctgccatttgcctgtctgcattggctaaaaaccttggcaagcataggttagatccaacaatggcgaccctttaggcaccactctcttcttggaagcattgccaaatttcccttgaaatatggggaaactctgccttcattgttaggtgcgctagggctacctgtgcgtaggtagctgatgcccgaagatgtggatcaagtagatgagagatgatgaggatggttggttccattggttgtatgttcttgtcatgtttgtgttggttgcttccggttggtcagtcaagatgttgtttggaggcttttcgatggttttcttcagtgatctttttgtttctaaggtctttgaacctatttaaccttataaacttagtcaattatcttctagctacgatgaatagtagatctgccccatttctgaagtttcatataaaaacataatggatatatgttctaggttcaacaattctatatagggggcattagtctagattttagaatcattataacgctgtatcccaaaagacaagtagaaccacatgctaaacacaataagaacatgtctcaaattattgaccaatcctaaacaataaagaccattcatgggatacaaaagtctgcatagctactgcattcgaattgtgggaatcatgcattaataggtacattgaataatcggtttgatgcaagtgtgtctagtgcgagagtaagtcatgtaaaagggtttttgtttagacatcccaaaagaaagttcattcttttaagccaatttatgcttcaaataacacccacaattgtcaatagattcacactaatagtttatcacatcgattcaggtgaatgggattttcccccatatttctaggtggtgtaaattgtaacacaatatgagcagtgtgtcgaataaacataacataatggtagtcaagaaagagacattgaatggattaattctaggtacaaaagcatcaatgtttactttcattataattcattagcactagattatgttccctttcattacaaatttggcttattttcacttccattttgacatgctcaaataaatgttgtgtcaaaacgtatttcataagaaaattaataaaacatatttaatgatgtagatgttgatgcatttttctaaaaattgggtcaaatttagcaagactcgtcctatctttagtagtgtaagaatatattaatcttcataggtatcttaaataaaaaatatgtgtagagttctagatcttgtcgaatactacaacatagttatagagcatttgtccatccatggttgtttgactatttttttttaaaatagcatttaaagttttgcatacttgaaacatataaatgggtctctagaccatctaaaaaaatagttgccaccttgcacaatttcaagataaagtttgtcttcatcctttttatttataaaaattataaattccatgctgcacctatttctaaggtggtccatattaccgtacctaaggtaattttaaatgcttgtttttctaggggtgcttggtaaaccaacccttggaatcactttccgttgagggtttgtctcaatatccatttatatgagcagctgaaattaaaactgcgtctaaaacaagtgcacctctaaaaactacttcgtgtaatactccattcttgtttttctaccacattaggtttgttctaagtaaaacattactatctttgaccttcattttgaaaaatacttaacgttatggattttatatattgaaaatactttttatagtcactcttaaaacctaaatcttatattataaatatatatatatatatatgtatatatttaaattaagtcacttttaagacgtaaatcttatattacaaacctatatatatgtatatatttaaattaatatctaataatataaacatttgactgaggataaacctaacatgatatgtaaataaaaacggagggagaagtgataaaaggatgacatataagcttgaaatctaataaaaatagagattgaaaattttccattaaggcagactccatctttctttgacaatggcgccctttaaactaataagtacatttgtctcttttctatcttgtatatttgtattctatttatatatgaccataacttgcattgtgttcagaattttaatggaaggtcagacacgattttttgtggagtttttgatggccacggtccgcatggccatattgtagcaaggaaagttagagatactctcccttcgaagctgcgtgctctgatatatgatgactttggggagagccccatttgcaattcagatggctcaattctagaagaaactttatctccgtacgctgatgaagaagacaagtctccagtgtctgtagaaaaaggaga

SEQ ID NO: 190126 - DNA, 436 bp, Zea Mays
cagaaggccgcggcgtgcgcacgcatcccaccaaaccggatcgccggatttcctttcgcgcaatacaacggtgcaagaatctccgggcggacgccggaagccgctagcttttgtgcaaaagctagtcggggtcaggtacgacgacgacgacgacgagtgagtggcgaacatctctagtgggctgcgaggctagtgtgtggccgtgtgggtggcctccaggtaggcgtagtgtgtcatcgaacaattggcgtttctgaatgtcttctgtgttcttctcctcgctgtggactgtggttgcatcatcgccgccgtagtgccggtctctgcgagactgcgtggaatggaatccgtcgccgtctggccaggcgatcaactgaatcgatctgttccctgacggcagagagaatttcggagtgcgccccatttgtgctcggcc

SEQ ID NO: 190127 - DNA, 496 bp, Zea Mays
aaacatcgcctccagaaggcgaaacagacaagtataaacggcagaagagggaatgccaggatttctctcccagaaggttctgtacatttgtcctaggaattgttatacattcaggggtacatactacagagcatcatatgatggttgtgctttgtgatgtcgaattgatcaggtaccagcttgatgtctatgaggttgctacgaggcacaacacaattgcgatgcttgacacgggagctgggaagacaatgattgctgtcatgctcatcaagcattttgggaagatcaacaaagcaaacaatgatcgaaagctcatcatattccttgcaccaactgttcaactcgtcacacaggtggtttctaccaaaagctgatgattctaactgaaatgaaacaagtttgtgctgatattttctgtaacagcaatgcgaggttattaagagctacactgattttgaggtggagcattatcatggtgcaaagggtgttgatcaat

SEQ ID NO: 190128 - DNA, 519 bp, Zea Mays
gttttgtaggcgtacacccacaactgttatggttcgtgagtcacatgttgaaaggatggggagtatacaagatgttccatatgaaattctgaatgttctagaattcaacaggtgagtttatttggtgtctttgtaagtgtaaatttaatgagatgaaatcatcgttttgttctttatattttactgtactaacagtacaagaaagcgacaatcggtggtttgccggttcacaaatggaagactagttctctattgcaaggtaatacaaggaagacgaccttggtttgacttctgttttgttcgttgcactaacctgacataatcttttgtgtaaatagggtgctgataatgttgtatatgaacgattggctgatggaaatcatgatatgaaaaagatcagtagagagcatctagagcaatttggttctgctggcttacgtacactttgtcttgcctatcgggatcttagtagggagcaatacgaaagctggaacgagaagtttgtacaagcaaagtcat

SEQ ID NO: 190129 - DNA, 876 bp, Zea Mays
cacaatctcttctagatctatcattcagacctctaacattccaaattagaaaaattgactgatacatgactaacaatatagaagaaaacgaccaaacagcgtcaggctgagacctggatctctaccggcacttcccagccgaacaaagcagccatagcctccacatgtgatctggagaggccgttctcgaataatttgacatatctagcagcattttccaaggagatttcctcatggtcaccacaataccccaaatgcctgcacaccttggcaactgaaacgtttccgaggtcaagaggaagcttagccacccttctactcctcctgggcatgaaatcctttggcagtgtcttcttttttctcaaattgcacctaggtggcgagagcagcccgttaatcggtttgatgataatttgtttgaaggcctccaggggcaaagactcaaccggctcctccagaatagatggatctgacccaaccttcgatcttcgagaatagacattgagacaacagcgatcaggacgccatctctgatcaaacaagtcctaaataggaggaacaagaacagggctgctgctggccgaagcaatagcaaacaagggtacaacatccatcggtccatggggctcaaccggagcaacctcctcaacagggacaacaacgtcctggaagagcattgcttctggagacacggtgaccgtctgtagcataccatcaaggacaaggcctgagctgatgagggcaacacctgtgctgtccatgacaataacaaggctgctgctggttgaattaatagtatacaagggtgcatctccctccagttcaaggggctcaacaggaccaacctcctcaataggaacaacaacgtcctggggg

SEQ ID NO: 190130 - DNA, 364 bp, Zea Mays
ctagcagtaaaactatagagccgattagacaaaaggagaaaaaagaaacaaaagaaaatttgggaaaaatgaatccaatgattttagtcgaactagatatttagccgaagcagcaagctcgaagatactgtattcaaatttgtagacaaagctgactagaccacaaataaatagatctggcagtgtcaagcctgttccacatcttacaaatgtgtagggaggatgggaatcacgttgcaaatcataacgcgtgtaagcttttccaggagacaacatgaacaacgggagaaagaaaagggggagacgatggagcttggagacggaaaagacgggcaacaaaaaccacagagccgaccaaacaaaa

SEQ ID NO: 190131 - DNA, 783 bp, Zea Mays
ccaaaccgcatatgggtgaactcaacgaagcgggaccaagtgaggacgccgctcgtgtcccgctctagagcgtagaaccattctgctgccacaccgtccaaatggagtgatgcctgccacaccttctcatcgggtggagtcctcatacccctgaagtaagtctcacatttattgatccacgacagggggtcagactcaccatcgtagtggggaaaagagacattgggtcttcgatagccaccatcgtcgacgcggtcacgatgagcagatcctgtgctatgcatgaccccgacaggcgctgcagtacgtgggccggtttctgaagattccgacagctgctcgtcgattgggcgcttctccaaaagcgtgacccgctgtccatgcaggtcgaggcgtgagttgatggtggagagctgcgccaatatctgatccaacttggctgagtcggaggaggtcttcgcaggatcgtgatcgacgtcggacatgttggtcgatgcgtcggaggaatctgataccaaattgatatgtcgtgggcgcctaggactgcgcagtggtgatcgcagcaaggcttgggactggggaagggatctcagtggatatggggatcgaccagaggtggagctgattctgtcagctggcgcaaggtgcgccaggatgaccaaggaagctccaccggtcaggtaaaactttctttgatgagccctaatacaaactacaacagctccctttatagacttaggtgccactttaatctcaaccacctctaacaactgggagctaatc

SEQ ID NO: 190132 - DNA, 488 bp, Zea Mays
ccagtcccaagccttgctgcgatcaccactgcacaggcctaggcgcccacgacatatcaatttggtatcagattcctctgacgcatcgaccaacatatccgcgttgatcacgatcctgcgaagacctcctccgactcagccaagttggatcagatattggcgcagctctccaccatcaactcacgcctcgacctgcatggacagcggatcacgcttttggagaagcgcccaatcgaccaacagctgccggaatcttcagaaaccagcccacgtaccgcagcgcctgtcggggtcatgcatagcacaagatctgcttctcatgaccgcatcgacgatggtggctatcgaagacccaatgtctcctttccccactacgatggtgagtccgaccccctgccgtggatcaataaatgtgagacttacttcaggggcatgaggactccagagaaggtgtggcagacatcactccatttggacggtgtggcgac

SEQ ID NO: 190133 - DNA, 667 bp, Zea Mays
caggaacagaaacaagaacacctcctaggaataccttgaataggcgtgacaaagcattgcctgagcgcaaggcagcagcaaaactacagactttctcgagtttccagatgcctatggaaacagcatctaacaagcctgggtccaccctgaaggacaaggcagcagcaaaagctgccgcattggcagccgctcgtgaccttgaacgaactgctaagattggttcaagaaggggccttagtgctgtagcaatggcaacatcaggacaaaggaggagttcgggtgacatcgaacgagcaaagaggtggaatacgtcagaagctatgagtgctgcttgggtggagtgtctgcaatcagatgattccaaatcagttgtgggaagggatttttcagccctttcatacaaatatgtcgcagtacttgtttcttgtttggccttagcacgaaacttacaacgagctgaggtaaatccacttggaacacttaatttttgttatttatatatttttatgcctcataagattaggaaaatacagatggagaggcaaacactagttgatgtgttaattcggcatcgcgcctcaactgggcttcgagcatggcggcatcttcttcattgcctaacagagatgggtagactatatggaccttttgaacatctgtgcactcc

SEQ ID NO: 190134 - DNA, 400 bp, Zea Mays
tctataagatttgagagcggccatccttccatcctcatccttggtactgaatgtccctagagtttggtgttcctcattcagtcccgtggccttgccaccagacaaaggagatggaggtaagggcataagtcctggcctaggtgaaacttgggcagatactccaggatcccacattctgtcctccatttgtcccgtgttcaacatcacctccgcttgtaacatggtcagtgagttgtgttggtcactactaacgcgggtattcagagccaaccacaacttaatccaactcatctccttagtcctggacttcatcaactgaagccagtagagggctgatccttccaagtgcatgacggcaaaccggatccacatttcacccgaaatagtaaataactcaaag

SEQ ID NO: 190135 - DNA, 297 bp, Zea Mays
caaatggtgaccgacccaatgaagtatggaagcaggaattgtaccaatattcctccaccgacaaccatgaagaccatttggacgggcaggcctgcacaaaacaacgtaagaatgtctccaggcattgattaactctttctgtttgaccatccgtttgcggatggtaggaagagctcataagcaattgtgtgtccgacaacctgaacaattccctccatagtgtactggtaaagactcgatcacggtcagacactatggactctggcatgccatgtagtcgatacactgcatccataa

SEQ ID NO: 190136 - DNA, 317 bp, Zea Mays
catctcgatatagacatcttgttggcagcttagtttaccttactgtcaccaggccagatattgctcatgcggtacacatcttgagtcagtttgtctctgctcctacatcagttcattatgggcacttacttcgtgtgcttagatatttacgggggacaaaacacaatgtttattttatgactcaaattccccacttcagcttcatgcttactctgatgctacctgggccagtgatcctatagatcgtcgctccatcactggttactgtattcttcttggatcatctcctgttgcttggaaatccaagaagcaagctg

SEQ ID NO: 190137 - DNA, 557 bp, Zea Mays
gcatatctggatagctggatgaacttgtcgcggtactcgctgactgacatgcttccctacttcagcgacaaaaactctttcttcttaatcttcatcaatccagctggtatatgatggtttctgaactacgttgtgaactccgcccatgtgatagtatcagcaacatcgtgggcagcactgtatgaatcccaccaatcagcagcaggacctgtcagacgaccagaagcatatataaccttctcccggttagagcattgtgtaataatcaacatcttctccatagatttcagccaatcatcagcgtctagtggatcaagataactagcaaatgtcggtggcttatggctcatgaacttccggtgcttgtcccgaggtggaactagtggtggtggaggaggaggcagtggtgcttgctactgttgtgcccttctctcctggcgtatctcctctcgctcctagcgcaattcccgacgtatctcttctcgttcttggcgcatctcttggtgttcctgttgcatctgagcatgcatatctgccatagtgtttgccatttgttg

SEQ ID NO: 190138 - DNA, 476 bp, Zea Mays
ttactttctcttgaagtaactggtgatgcaattgaaggaacaactatgtttgccagtaaaaggtattggggaggagaagaaggggacacaatgttccgctggatactggtaggctgttgttattaagtactacttttcctttgtgcgtgcctgtgtggtgacgactaggaagcactaataaccagactataccttgatcacttaggcaattatgtccttcatttaagttcttgtggttgactgttcataggcaattacattatccatataaattcttgctgggtttcaactcttaggttactttggactgaaagatttgttgctgtagacaaattctgatggaaccgagaaagaaattgaaggagcaacaagttcatcatacaccttgaaatgcaatgacattggcttctacatatctgtcttgtgcaagcctgttagaaatgatggagttgatggttctttagtgtcgactgaag

SEQ ID NO: 190139 - DNA, 615 bp, Zea Mays
caaggatgttgaggtacaaaggttcgggaaggaccgtgtcacctactgaggtgacagtcagagtcgacctattactgacaatgatgaagggaaggtggggctatgaggatggggtaaagagacaactctagggttaagagtggtgttgaacgatgcaccggagtcagcaacccagtcggtgggagggggagagggcagcgaagtcatggggtacgggaagagagtcaagggaggcacccctagagagccacctggagggggtctgggctaggagtgacgagcatgctgatggcgagcatgggtggaggagacgataaggcctccatcgccatggagacaagcgcgacattgggtaatactaatggtccagtagcgtggtggccctcctgagggtggagctcgacgcagtcacggagaacagggttcatgacctgatcaaacgccatgaaagtgccctggagaagatggccgtcgtgaagggtgatgcgcacacagtagggtgggtcatgaactgtgatggagcgaaggaggggcgtcaagggagaggtgtaaggtgccgcgccagagtagggggagctggtggtggatagtgcggctgcgttgcgcacgctgtgt

SEQ ID NO: 190140 - DNA, 760 bp, Zea Mays
tcgacatcgagtccggcgttctgcgcctctacgacctgcagcgcaaactgctggcgaaggtgcatcgatcacctagccggctgtacttcctcgacatgaacatcgctgccccggtgtgtctcaccgcgcgggttggcgacgtggcgtggcgctggcatgagcgctacggtcacctcaacttccagtcgctgcgcaagctcggacgtgcggacatggtgcgaggactgccggcgattgaccacgtcgaccaagtctgcgaggactgcgttctagcaaaacaaaagaggacgtcgttctcgcaggctgccaagttccgggctcagggggagctcgaactcgtacacggtgacctctgtggcccgatctcgccacctacgccggccgggaacgcctacttcctgctgttggtcgacgacatgagccgttacatgtggctcacgctgttgcgttcaaaggcagatgcaccagcagcgatcatggcgttccaggcgcgtgtcgagcgtgaaaccggcaagaagctgaaggtacttcgtaccgacaatggtggtgagttcacatctgtgcagtttggcaaatactgtgcaggagaaggcatccaacgacactactcagcgccgtactcgccgcaacaaaatggcgttgtagagcgccgaaaccagatgatagtgaacacggcgaggagtatcctgcgtgcgcggagcatgccggggtacttttggggagaagcggtgcacaccgctgtcttcctcctcaaccgggc

SEQ ID NO: 190141 - DNA, 576 bp, Zea Mays
cgcagaccaactttatagtcactgcacaagagacccccatccaacctctaggaacgataccaactcttcgaaaaatacacccgatctgaagagctccaccacaggaaggtcaaggcgcaacgaaagacaaaagagactccacagtccagcagaacatggaccaggggtccacaacaagaccaccctcaccaagagcgtggccaacagctccatgtccataatatcgctaaccaatagcaaccaggcgaagcccccctcggcgccaggactaccctccacaacaaggtcacactggcggcgcaacaagaggcagaggccctcaatagcaaaggaagttttactgtgtctttcacggcgaggatgcagggcacccaaccagagattgcccagaagccaaggaaacaaaagaccgcatggctagagccatcctatcaaacaaccagagagccatcattcacaccccccaccttcattaacgaaacgaacacccataccacccccaacaccagcagaatttcaaccatgcttttccccagcaaccgcacctgcagcaccaagaaagattagcactgccac

SEQ ID NO: 190142 - DNA, 306 bp, Zea Mays
gctcaactgagtcacgagtttacaaggaagaagcagcaactttctttcaacaaaacaaaacctggggttcagggtgaggactacagtagcgtttataggtggacaagtgatttgggggtggaaaccctaaagggggcgcgcccctgaatgggctctaaaggaacacagcctacaacccaggttggatggctcgacttctcctggactattctgatttgctcgctttgaatctgacagtgaggactagctcatttgaaagtagacttcctgatctttccaacatgtccttaatcaccttctttggat

SEQ ID NO: 190143 - DNA, 308 bp, Zea Mays
tgccaccccacatcgagtacacacgtatcaacaaataggaacaggctaaaacctcgcgcacgctcccacaacgaaacccgaacaggttccagaaagaacagcatactcaacacaggaaagaattgcgcaggatgaaaagatagtgaattacatggctgatggtgggcgtcggatgtactcgcgtgcgtccgcttggtaaactcgtgtgtggcctccctttggccttttaattgtgctcggatcagatccgtggatttttggaatcacttaaagatgcttcaaaaatccaagagcagatatgcttaaga

SEQ ID NO: 190144 - DNA, 560 bp, Zea Mays
gtttattctataaaaacataaggttccccatgtaaaaatgccaggtcgaaggggtatcagcggaccagggccgttggattagaaatcacgcgtccagattaatccggacccgggttatgtatactgctatgctaacaaccgttggatcccagatccgtggtccacggcgcacgatacgcacgccaatttacagccctcgatccaaagatctatggtcccagagggaaccgatcaaatcggtaggctaagccccaatccggtttgtctattcacagatctacggtccgatgaccatcttcatcccacggacagaccccgacgacgccgtgcatccacggtggcgcgatggacattcacggcggcgacagcggaatacaggacttctacaccaacccgatgcccttcatcaattaactcgcgcctcgcaaaattgatgctcccctaagctcaatcccccaaccaattttggccgacctcgagtgcacgactcggtacacggcacgccgcggcggcaccatggccggatagcggacccaggggcatagctacaccattttaca

SEQ ID NO: 190145 - DNA, 553 bp, Zea Mays
gaaagggcaaaagagaaaaagcgcaacttctggaaaagttgatgcttcggttgctctaagcgaggctgcgccaaagaggaaaagggtaaaggttctcacccaccgaccacgcttcatcgaaccggcctcagtgcccgaatttggtggtgagacctcttctgttactgaagccaaagaaccttctcttactcagaagaatgaagagctggctatattgccgaaggccgataatatcaaagaaatagagatcgcgaaaacgaagatagtggaagttacatgccctccggcaacaatgacagtgctgaaggcgccgaaagacctcatagcgactccgaagaggaagaggatggttaatgtactagatgtgttagagatgataaagtcttcaagctctactccgaaaaaattgccgaaactccaaaagcgcaaattgagacgacggcctctgaagccgatggtacaaagcaccaagctaaaactaaagctgggccctcagagtccgccacagtgaaatccttgggaaccatataaaaagaagcaaaagcatcagaac

SEQ ID NO: 190146 - DNA, 376 bp, Zea Mays
cttgggcatggaggccgaaagaggagagaaatcgaagggagggagagagagccgccgacgtagatccacgggtgcaccatcgtcatggccgaggcttcaccaagtctcgtaggtcatgatcgcgactttgtctggacggattacgttccggttagcccagaattgctcgccggagtcaatcctctaccgcggtaccccgcaccgctatgagcagttgtactacttcgcgaacttccggtaagattggctcccatgcgtttgccgtgttctgtgcgccgtgtgcgtcctcgtatcagggttctcgtgggtcggtttggggagtttgtgtcctcacgtcaatggcgtcgccgttcccggggcgcgccaccgtccgcag

SEQ ID NO: 190147 - DNA, 341 bp, Zea Mays
gtttgcggcacacagttggtctatttaaagaaatgaaacagtacctctttgtattccggtcgtacaacaaacagtcgccagccttcaagagtcgtttggattccaagaaattgcatgcttctgtcaccctttggcgtaacacaacaccaacacctcaaacaactattccgtggacaagacaacgtacacacgcattgggcacacccattgagtgcacagattagattttctagaaaacacaatatatgaaatatcaacgacagtcctacaatatgacaaactcaagatcgatagaagtttactggtcaaacctgagtcaaccagacctatatcagttgaat

SEQ ID NO: 190148 - DNA, 521 bp, Zea Mays
gctatatccactagagaagctatgatccgctcctctagaggtctgtcagaacctggaactttgttcaagaatttaatggccatcttgagggatgtagttatatgttatgatggaactgtgagaaacatttgtagcaattctatcattcaacttaagtatggggaagatgatgaaactgattcttcaagtgttgtacctcctggtgaacctgtgggtgtcttagccgccacagctatctcgaaccctgcatacaaggctgtcttggattcctcccaaagtaacaatgcttcatgggagtcaatgaaggtagtaatgttataaatatttcttgtcatttaatttagaggccttgttgttactgcttaataagtttgttttattattatcacaggaaattcttcagacaagaacttcctataaaaatgatgtgaaagatcggaaagtggtcctattcctgaatgattgctcttgcgcaaaaaaattctgcaaggaaagggctgcacttgcagtacaaagttgtc

SEQ ID NO: 190149 - DNA, 410 bp, Zea Mays
gcaaggagatatggtagctagcgctgtaaaaggaaaagagataatctgttactatctttacctccttaattatctcctggccgttgtctaggtgctacacctcccctatatgtaagccacggctggggcttttccagtcatcaatccatcaacacgcagcacgcctgtgacgacgtttctctccttccaagcgcctctgaatctctcacatggtaatcagagcttagggttccatggcaacgagttcaagcaccatcaccaatccattcttcggcttccaagtgaccgagaagctatccaagaacaatcatgcgtcatggagagcgcaggtcctcgccgcgatccgcggtgctggctacgaggggcatctcaatggcaagaccaaggctcccgatgctgaaatcgtcgag

SEQ ID NO: 190150 - DNA, 1247 bp, Zea Mays
gtgaatacaacatcgagaaattcattaggctttatgttgaatcattaattgactacaggtgattttgcttatctgatgtaattatatttgcatatttctctctggcattgtatgaacgtttataactcttaaaatgcgaacagtattgtcgatggtacctgccacacacacctgattgaaactattgagagtctgccaatgaagaatttcattgaaagtgtcgtgtgcaaaattcttggaaactgtatcaaggtatctcgggccacaggaatcccagatattaatcacacaggtaactgtaacagctgcttcaattccattttaaactaatcaagtaatttctttttttttgtgcatacatgtattttaagcatatcatggtgttctgtactgtatgtactatgtagtatttgatatatattgtttcatctatttttcagaattatgggctaagaaaatttttaaggcaattgaaagaaaatatcccctggagctacgtgatgctattcataaatttcttgaggtgcaaaatgacacactttccacttatgtaacttgtcagttcttattgctgttgtttgacacttctttctccctgttctcagaactctgaaactaattcaccgggaggggattctttggctgaggtttttgggatattgtttgatgaaaacaagaatttgccaactgaaatatctgactcaaacatttggttcagtctcgatcatccaaaggtacaatatgatatgggacttgctgtagaattttactttccatggaaactctgaattttatcctgtcttaaactcttaatgcctctagaatgatttcttgccctagttcaaatcatattttaggttgtgagtaattcgccacagttagccttttcctaaattagtttgttttgttatcttttctagtctttgatgtgttagatgtatatgttgtgtagcatattttccttattgtataagggcctttatgcattgtgcaatgtatgtactgtgggcttgggccgttactgtgaatacaagcaccattctaacatgatgaattttatatatgataaaggctacggttcgtcaatctgctctctcaaaagttgctacatctggcatcttcaataacagaactctaaatcctcaggtaacaacttttgctctttgcaaatgttcacttctatatgcgcactgttgtattgaagctttcctcagatgatgatcaactgacttctgcttctgaaagag

SEQ ID NO: 190151 - DNA, 370 bp, Zea Mays
gtccattgtgacctttgaacatctctgataccaagcatctccagttactagtactatctggtcatcttgaatgacttctctcactacatgtggacctttcccctccgtcgtaagtcgaacaccttcactaccctctcatttcttcgcttgggtgtttactcaattcggctgcattatctagggtgttcagtgtgacaataggcgagagttcgataactccacgtctcgtgccttccttccctcgtgtggcgtatagctacagatgtcgtgtccttacacctcccctaagaacggcaaggccaagtgcatgattcacaccatcaccaacctcatttgcaccctattgtttaaggcctctcttcctgctagt

SEQ ID NO: 190152 - DNA, 390 bp, Zea Mays
gtgcctagcaggttggcggtgctagcagctgggaccggtggagctaggcgagcggctttctagcaggtgagcaaggatgagatcctctttctagcaggaggggggctacgagaggggtgagcagcagtggcgagcaggtcagggtctcagggaggaaggacacgagcagggggacgaagatcaacagatcgtggcagctaactcggaggagaagaacgcgagtagggggatggtggctgtcgcggtggtgggtgtgcccgcgagtggggtggctgtctcggggggaggggaaggcaagggcatgcagggcgcgagctcggtggcaagaatggtggcgctcgaaggcatgaatggcggggcttccctcaagcacggagatctcacactcac

SEQ ID NO: 190153 - DNA, 330 bp, Zea Mays
tgcctcccgaagcaaaagcctgcctagtccatctcttaatatgcaacctcaatggagggacaaagagcgacggtcctccactaaacactcgcccagccagctcctccgaagggaagaggacaataaaggaacctggcgcagcacgacgtaggcggagcgcatcggcatcaaggccaaaccttgaggcgagcgcctctctaacctccgtggcgcaaccagttccttcctgcccaacaacgctgacgatcagggcatggcgaagctccaactcagcacggtcgatcattctggaccgcccaataaacctcacaggacgaggaccatcctgag

SEQ ID NO: 190154 - DNA, 518 bp, Zea Mays
ggagagaggagggggagatgggaaaaataacagtgcaaaggggaagaataggacctcatgcaacgtttattagttgttgtaggaggaagaagtggggagggggagagagcgtgatctgggtctaagcactcgggcgacaacatctggatcggagtcgacggttacgagaggaagaagtggtgaggggaggccggtggttggcgaggcgtgtgcgcgcgaatggggaccgtgtcgtgcggaggatgcagaatgtggtggttgttgtttcaaaagccgcaatgcgtagaggggagacaggggcatagagggatggtcaacacaattgacttaataggtagtagagatttggtgtagatggggagcagaactcaagctggactaaaaacattctacccaaacacgtcatctcttgagaaaaatctctatagagtttttggggatattgttaaaaaactggaatatctccttcactactctaaaaacaactaaaatgaatctaaatatggcacacaagtatt

SEQ ID NO: 190155 - DNA, 286 bp, Zea Mays
cgccgtcgtacagccgagccgccgccgagtcgagccggcaaagcgaagggaaggagagcggggtgaagaggagaggactccatggcgacagcctcaggtgagtagagcatcacgtaaccctaacctagttttccgtgggttcgattcgatcctaccaaaaccgcgtgaaccgatccgttgcgctcggcggttatctccctatccggtctgtttctccccgattcgacgtgaattagggtttgttcggggtgctgtatctcgtgttttgcctaatttggggatcggg

SEQ ID NO: 190156 - DNA, 514 bp, Zea Mays
ttacaagggaagtctccaatatggagaaagctagtgagctgagtaaatggtcgatgattctgatggggtacccctaggccttatatacttgaccgtggggattacatgtgtgtatgatgacgatgtgtacctaagtaatagtgaaccgactaaacttatcttcttatagtccatccgacttatccttagtctgttccatcattcaaggttgtcccacgcgggaaggtcggatcggtgctgtggatatcgcttaagtccaacgagccgcatgggcctgagtctgctccttccctgcgtcggcccattccactagtaattctcccctggcccacaaagggatggtcttgcgagacagtaggtccaaagcctttcgcgagacctttctgccttctagtggacccggtggatatctgtccccacacaatacacccaaaagtccttaaatgacacacttgaggtttcttgccatgctaggattcataaatggttattccgtggacactctttataggag

SEQ ID NO: 190157 - DNA, 1427 bp, Zea Mays
catgttagaacagcaagtacaagagattgcaaatcttcaggaggccaacaaagaactcaaagcagcaaagactgatctacataatgaggttatgttacttcaacaggagaaaattgtagcactgactcagttacaagaatatgaggctcaaatcaagaatcttcgaattgacttggaacagcagtgcaaccaaatttcagttatgcagcaagcaaatgaagaaacacaggataaaaattctagcttgcacaagcaactggaagaaactaggattcatctgcaagaggagatcattgcattacaaggagagaaggaagaggccatcagtagcttacagcagtcaaatgattcactcaagaccctagaagtccagttagagcagcaaagagaacaaatttctgttctgcagcttgctcatgaagacttgcaaaatagcaattccaacctagagatgcaattggaagaggcgaaggttagtcaccatgctgaaattctagcattacaagatgaaaagaacaagattatttcagagttgcagcagtcagatggttgtatcaagaaccttagatttgagttggagcaaggaaaagagcaaacctcaatcttgcttcatgctaatgaagatatgaagaataacatttctgtcttggacaagcaattggaagaggtcaggagcagtttgcatgctgaaattgcagaagtacgtgcagagaaggagacagctctatcagagttacatatgtctcagacttccatcaggaacttagagagtgtggtagaaaagcaaactgagaacattttaactctagaaaaagctaatgataagttaaacaataaaatatgtatcttgacagagcaagtagaacaagccaaggctgagctgcataaggaggtagcggcaatacaagaagagaaggatacagcactaacacaattaagacagtcagagttttcaatacaagatcttgagaatgaggtgacacgactgaaagacgaactttcaattcagctggaaaaaaattccaccttggacaagcaatttgaagaattcaagagcaagctgcatgctgaaattttagacctacgcgcagagaaggacacatctctattggagttacagacatctcaggattctgtaaggaatcttgagattctggttgaaaagcaaactgagaacatttcaactctgcaccaagctaatgatgagttacagaagaacatctacactttgactgagcaatcacaacaagccaaggaggagatgcaggatgagttgaaggcaatacaagaagagaaggatacagtgctaacacaactgaagcagtcagagacttcagtacaaaatctagaggatgaggtgacacgactgaaagaggaactttccgtccagctagaaaacaattccaccttggacaagcagtttgcag

SEQ ID NO: 190158 - DNA, 440 bp, Zea Mays
tgcaatagtgccacagtcacgaagatgatacccccgagtaaaaacaacatgagagtcatcattgttagtacaagtatcagcaacaggattatcattagggctagccgtggtagtagagcgaggacgacgaatgtaagtctgagtgataggtggtttggaagagtaagactgaggtggtgtggaagtgggaggtggtgtgatggaaataagaacatctggggtagaaacagtagatgatggtggtactgatgaagtttcaaaaatgggaggaaggctcatgaaggaggtagactctgtggaataaaaagaagaatgagtggaagagttgtaaaagaagggtcggttttcattaaagctcacatctcgagatatacacatgcgacaagaagatggatcataacaccgataacctttatgttcagggctgtatccaagaaaaa

SEQ ID NO: 190159 - DNA, 878 bp, Zea Mays
gtgtgtgagtcgttgacgaaaccccaagtccatgtgggaggttttgacttgatccaaccaagaacgcgcatttcagccgtaaaatactcgtaccggtttccaggtccggtcgcgtcttgctctcttccgtccctcatttgccttcccgtccctgctattcgcgtgtgggcctttgcttacccattcttgcttccgctgtctttgctgcgtgtaaatctgatccagtacttgtgtgtccgcgtcactggggattctttactttaagttggatttggcaatgtcaatggaaggagcgatatctgatctgaattggtgacatttcttgctgctgctttggtcctggggtgggcggattggagagcgaccactgtcttgccggttgcttttggggtagctactgttcttgtgaatttctgatgcggagtttcgctcaggatagggaaaggagtgatctatagatttctaggcttctgtagggaaagaagtgatctttgatagatttctacgcttctgttggcgattcctcttcatctcaacttggggatttctgccgaggagactttcctgactggtttgggttcagctgaggagcagagatgaggttgtctgttcgtgtgatcgaggcccgcaacctgcgggccatggactccaacggcttcagcgacccgtacgtgaagctgcagctcgggaagcagcgattcaagaccaaggtgatcaagatgaacctcaacccgacttgggatcaggagttcagcttccttgtcggtgatatcaaagatgtgctcaagcttgatgtctatgacgaggacatcctccagatggatgacttcctgggccatttgagggtgccattagaggatgtgctgtctgccgatgac

SEQ ID NO: 190160 - DNA, 491 bp, Zea Mays
tcggcaagctcgacgacaggagcaccccgggggtgttcattggctacgcggagggctcgaaggcctaccgcatccttgacccaggaaaacacagcgtgtgcgcacggcgcgacgtagtgttcgacgaagggcgaggatgggcgtgggacaaggcggtggacgacggcacgactctgacgtacgacgacttcaccatcgagtacgtccactttgagggagctgggggagtaggcaattcttctccgagcaggtctaccccagcccccaagtctccaccgactccagcgccacgctctccagctccggctacaacgagctcttcaccaccacgcactccagccacgactccggctacaccgagctcttcgccaccacgtactccagcaccgacggtaccctctccgggaacgtcctctccgacaccagctcgtgtcgagcacgacccagtggagctcgtgaccccgctctcccgcgacgaggagcgcgtcgac

SEQ ID NO: 190161 - DNA, 409 bp, Zea Mays
cagatacatcaatgctcttgaagctttaggtggatcagcttcacttgcagagggtcttcctacaaatacaagtctatgggatgatgcccttgatgcccttatcattggcataaatcaagtttgcttttcaggttggaaaccaaatgagtgttctgcaatagtgaatgagcttctttcttggaagcagaaaggtctatctgaatttgaaggtacaacttctccttttatatatgtcatgcatgaatatgtatccctacttgtgtgctcattgtggtgaggagtacccttcaactactgttgtcatgtacataggcaatgaggatggaaagtatatttgggcactgagactcaaagccactcttgatagaacaggaagactaacagaagaatactctgaagcacttctttc

SEQ ID NO: 190162 - DNA, 432 bp, Zea Mays
ctcgccgcccgacccgatcctagcggctgcgcgctactcgcgcagctgcgcttctcctaccagtgtcatctcctcccacaccggctccatggcgtcacccccgccatccctgagctttacctcgcccgccgctctcgtgactgtgcgtgtcctcctccatgacggtccgctcatccggggcacgttcgtgtccttcgattcagtctggaaccctattcttcgggattgcgtcgaggtccaccctcaagccggccgtcacgtccctggtccgcttgtcttcccacgtgctgtgatcgcctccctagcggttgagcccgtgtcatctccctcccttcctagtgcctccctcggggcaccttctttggccctctccgctcacaccgtaccttcgccaccaccacctccccgaaccaccaccgattgggtggttga

SEQ ID NO: 190163 - DNA, 422 bp, Zea Mays
cctttcggtttgacgcattcattcccacactgcttcttattcgtctagcacaaccacgtcgtcaacgttgttgttttatccccagatactttgtcttttcagacaatcgtgtgctatgtcggcaccttctaccccgttgttctgcagaccactaccatcatcgagatctctgctagtccctcagatgttgatacatggttggggctttctaccttgtacgtctggtattggcaacaccaatgcatgcttttgtctttgatgtgttgatgggttttgcgaacccaagccacaccttggtttaggcagcttggctacatcgacttcggcattgaccctcctgttcctacctcgtctgccttgatcgcatcatcgcctttcgtctacaacggttttgactacgtggacctcgacatcacctcctt

SEQ ID NO: 190164 - DNA, 296 bp, Zea Mays
gttcatatgctggcagcttttgatgatgaggggctactggcctactgaagaaagctatggcgccctcaccttgatgtaagacagccccaaacccaactccagaagcatcactatcaacaataaagtgacgagtgaagtctggcatctgcacaaatggtgttgtgatgagggtttgtttgagcaatgtaaaagcctcggctgcttccggtgtccaatggaaagactcccttttcaataaggcggtgagaggtgctgctattgttccatatccagcaataaacttctgataatatccg

SEQ ID NO: 190165 - DNA, 457 bp, Zea Mays
gcatattggattggaggagccagaaaacttgaaaacccagagaattactttgaacttatatttatgtcctgatttatggaatcccatttctaagagatgccatcatcgataccaccaccgccacaaaattttctcccactgccatcaccaggggttgggcagagcactcgtattaaccttggggaaatcaagctaaaactagttaagaggattggtctagagcgagcaaagaggtactttgagcacctgcagaggtttttgtctttgaagctgagcaagagtctatttgacaagttctgcctcacaatacttggtgatgataacattcagcttcataaccacctcgtttgctcaattctccacaatgcttgccaagcaagtgggccatcgacagtcagtacacctaaatcaattggagttgccaagaattcaaatcatgtcttaagtcctacagtcc

SEQ ID NO: 190166 - DNA, 528 bp, Zea Mays
tgaaagcaatcaaattgagccttgggtatgtgcactagcagaaggagactactgcgatcttagtgttgaagaacgccttaacgcactggttgctcttgttggtgttgccactgaagggaactctattcgtggtgtacttgaggtatatattatgatcctgctaaactactcttctatcttgtcattcctaattgggaaacaactgatcaagagtcttgcaggaacgtttggaattagcaaatgccttaaagaagcaaatgtgggcagaagtgcaacttgacaagaggcgtttcaaggaagaatttgctagcagagtacaatataactctggcatgagttttaagcctgatatatatcaagaaaacaacatgacagagattacttcaactcgagcctgtgatgcttacaaagaaaacgatggacatgttgggacaatcaacaattgtgagatgcttgatcagcatagtcagggtaatgctggtggtataacttatgatagaaatgtcgtaggccaggaaatccatgcaa

SEQ ID NO: 190167 - DNA, 394 bp, Zea Mays
aagcactgactggactgtttgaatgacttacctatgttctgtataattactttcgccatctaccattcatgaagtcatggtaccttgtttgataatacactgctttatgggcgatgagcagcatttatggatattgttattcacctggtaccttgtttcataatacactgctttatgggtaatgggcagttgttatggatattgttattcacctgttgaatggtttttttgggttctttaggtgggttagaataattgttttaaaagcatatttcctgctgttatgttgttaagacgtcaattctaattttggttatctagtatcggaattttcatcggttgattatggtgtctgactaatagatcacgactcttgtcacaccttatatcttat

SEQ ID NO: 190168 - DNA, 732 bp, Zea Mays
atttatctttgcatgtgttgcagtgaaggaggaatgggtggagggacgagcaagatggcaacgttctattgaaacaaactgcctcgattattaggctatcattactaaacaaactacctttatcgtcaacctactaacttccatattcttcacattcagctttgcaaaatttacttgactggattttttagcttaacatataactcagggagacatgcgattttgggacgatcaaactgttggtaagtaaatacttgttggcctgttgctcttcttttagctatagctgaccataatttttcttggttgaggaaactgtagttagtgatagctcaatattttgtgtgtagaaacctgtataaagtattggacatgtatttcatagtttttgtaacttataaggctatgtaagtcacagattaactcttcaaagaattatacaacaaagaaattagcgctcagaaatgggatctttgcatttttagtcttgctcattttttattattcatgtatgactcatggttttctagagaaaaatattggaccgttacaataatgctaatatggtgttaatctaggattgctcattttgagtattcttgtacgactcatggttttctagagaaaagatcttggactgtagcactacctccacttgtgagatctggacttctgtagttatatgccatagcaacactgaaagtgacaatgtttgaatggtatagttctttt

SEQ ID NO: 190169 - DNA, 473 bp, Zea Mays
catggacggacgatgatgaagcttggaccttggtccctgcgtctggggaagaagcctgcgcatgtggctgctgccatgtcctatcccccatgcatgcaatcacttgctaccagtgtggaggcagcttaataacttctctctcgaacctctctcaagtgtcggactgatgaagcatgcaggaaagatatatgatacaaaagatcagcttcaattctccctatctgatgcgctgctgttcttctctaatcccccctcagctgcttttgctatggcttcttcttcctggatggctatggcttcttccgaccgcgaactagcaaaagtaggacttgcaacctgattgaggtggagtgcttgtacaagaaatataagggagtggttacgaaccatggaaaaagctaggcacaataattagacttttcaataactaatataaaaaataaaggtggaatacgatgtgtccttggatcggg

SEQ ID NO: 190170 - DNA, 1529 bp, Zea Mays
gccgcagctttaccgtctgccacgcaaatgatttgtttctctcttctccccatcttttttctaggtgtgatttagttgtggtggcgaatggacggaaggagaagatagcctctggtctgctgaacccattcgtcgcccatctcaaggttgcacaagaacaaattgccaagggaggctattctatcacacttgagcctgacccagagattgatgcaccctggtttaccaggggcacgttggataggttggtttgcgtcccattgttaggggttgtcatttgcaaatttgttctttgacaatatacgtggtgatttgaatccctctctttcgcaggtttgttcgatttgtcagtacaccagaggtcctggagcgggtcacaaccatagagtctgagatattgcagatcgaggatggcattgccgtccagggcagtgacagtcttgggttgagatctgtaagcagacatctatgcctgataacttttgactaacatactaatatcagaaagatgagatgttcatatttgtgctttgttaggtggaatactataatgggaaattggtggactgcatggaaggtgaaatgctgacgagcatttctttatttcaccacgagtcatagaacaaacagcatatgtgccatctgtggagtctttgttttatcacctaagtaatgagcaatgtttatttgttaccaaaaaagaactttccgtatcttcatggaccatgatacttggcaaattgctatgcaatatttactttagcatttaatcattataaagtttggtgtaaatgtaaaatcaggcaatgctgttggatcttttacaggcagatagtttgttttcaacatactgggctgcacaaggaaatcccaatgtatatgcatggagtgacctttcctagttatatggattcttaaattaattgttttagttttagctttagctagctcattggaagttatgcattctgagatggagctagctatcacgtcgtgcattttaggaagagatcactctcatagtctcatctactttaaaaaagctacatttttcttgaaggatgaatctgaggtgcaacttgttttggcgacagttcttgtattcttctgccctgttgctgaatgtccctgacccatctacttacaggtagtaaggcaagttacaatcctgatgcagatagggcacttgttccatacaaggtgaatttgtacagataaacctgcctcttctttctgcaaaagagtaatggtatatgtgcttatcatgttctgagattccatattcttggcaggctggtacacaaccaattccaccattgcagaatcatgatgctacacaggaggagaattcaaagtacctatgtctaaagcagcatgttttgttttctgtaatgtagtacttaacgatgccatggatgacaattggcagtaaaactggtctacatggataccaccgtgatttaactagaacttattttcattatggagtaacatatgctccatttcatgaagatatgcatagatttctg

SEQ ID NO: 190171 - DNA, 428 bp, Zea Mays
tggtggccgagagatggcccacgaaattataaagaagagtgaaaaagatacacacgatgctaaagaagcagcaaagaaagttgaaaaaactgcagaacttgaaaggcagataggtattgtctaattgcttttgactttatgttttattcttgtgacttcgagcttattcacgttttgtattgcagtcgaattatctcctccgccggagccctttgagtcacaaacgaaccccaaagcaaaaagtgaagatgaaattattaagatggccgaagctattatggacaaagttgtaactcaactactacacgaagctgcggaagtagttctaaaataagactagctattgttgtaaaagcattcagagtactgatgtaatatttgctgaacaaagtgtgtaatattctacagttttgaaagtaatatatata

SEQ ID NO: 190172 - DNA, 467 bp, Zea Mays
agtcagtctaccctactaacgtactcccactatcccacacattataattcagtcactcaattccaatcactattacagaagcaaatgcatatgcatgggaactcatatgtgatgatggttgatattttgaaacatgttgcagttcatggttctgtcagtcctgaaaggagtaggaagcatcttatttcatgcagaagatgtgaagtctctgttttttgatcttctggaccgtcgtgatcagtaccagaatcgacataattgcaagcagatcctatccacccatgaaatgcataccttgtgcttgcttttggaggtaaacacatcatgatttgtatatatgtccgcggatgatattatatgtcaagtcaagtagaatagccattatgcatatttactgccggtgtgtatttttataggttttattctcaacgccagatcatgtgaatattggttttaacatgtttgaa

SEQ ID NO: 190173 - DNA, 378 bp, Zea Mays
aacgaatgacaacataattttgcaactcaggcaagaacttgaggcaacaaaaaagttgcatgaggcagagactcagcaattagagaccaaagctgccaaagtaaataaggagtttgaacagaggataaaagaaatagaactcatgttagaagattctacaaagaggagaagagaacttgaggaatctactgaatctagaatccaattttggaagcagaaggaaatagtggtaaacaaatttgtgggtttgcaagtaaagaatgctcaggtattggtcaacccactctgtcccctggccttttttttatctctacggtgaatatttgtgaactcaagtgtatagtgctctttttcttcaggaattgaggctctcttctg

SEQ ID NO: 190174 - DNA, 407 bp, Zea Mays
accccgaaacagacagacacacatacacacacaaacacacacacacacacaccgaacccacctagccagaaagaacaactggaacaggggcagggacagagcgtttgtcagctgacaaacaccccaactaaaacagagaaaaaaactaaaccacccgtctttgagctaagaggtaagaaaaacccttagccccagccaaagaccacaagaaagcttcctccctggccaaccgaacgacccccatcaaatttggatgggagccattgaagacaacaccatttctatgtttccacaacatccacgcgcctaaagcaaccaaggagtcaaagccctttttactcattccacccaaccgagcactattgaagcaccaccaatgatcaaaatcatctatatcctgtcctgga

SEQ ID NO: 190175 - DNA, 636 bp, Zea Mays
atgatgcctggtaatacctgaatcggccactgcattttattatcctgttgttattaaatttggctattagataatgccagcgttttttattatcctgaatcggccactgcattttttagtccttagctattagagaatgatgtctgaaaattcactcgtatagataaggaacgttgtctagcaacaagagagatcatgtcacaaaaaatcctcaagctaaaacaagaacatgttacactatattttattatcctgttgttattaaatttggctcggggcttcggtaatacctgaatcggccactgcatagagtagtaaacctaaaaaaaatcagactcttattgttatataatttccatggtttcttcctctatgaataggagagaaaaattgatcctagattgcagtctactaagatgcatgcaatgcgttatctccttatacagttactgttacaagttcttctccatccagatcagtattgggaggctgcacttgatgtgactatatgttggaagaaatcctttcttgtcattgctcgaggtgataactccagtgactatattgtcgaccttcacttctcgctacaacaaagatgcggtccttcttaccatccttttactatctgatttccct

SEQ ID NO: 190176 - DNA, 391 bp, Zea Mays
tcttttcggaactcctccacgatatgaccaccttcgagtttttggatgtacgtgttatgtactattatcacctcgtgaacgtactaaattgactgctcaatctgttgagtgtgtttttcttggatacaaccctgaacataaaggctatcggtgttatgattcatcttctcgtcgcatgcgcatttctcgagatgtgagcttcaatgaaaatcgtcccttcttttacaactcttccactcattcttctttttattccacagagtctacctccttcatgagctttcctcccatctttgaaacttcatcagtatcaccacctactgtttctaccctagatgtccttattcccatcacaccaccttccacttccacaccatctcagtcttactct

SEQ ID NO: 190177 - DNA, 511 bp, Zea Mays
caagtcacttggtgtggaagttccccagttcactgcacctccactcgcagctattgaggaatatccaactcacgataccatagaccaagctaagttaaataagctagcttctggtacccattctagagatgataaaaatatgaatacttgctctgattatgctactccaagggcttctacatacagtctaagaaaggacacaagtcctgctccttccattcaaatgaaagagaatgcaggactatctaaaaatgtgcaaatcactagacagggagcatcatcatctttgtcaacagaaattgctgatggatctagtagagatgtggctgaaaaaggtcctgtccatgcatataacttcccagggggatttgattgttttcttgatcaatggtccacagctagtaattttttctttgatgttcattttatcaagagatcgatgaaaccatctttgaacctttttgaagtttttgggttggctgtctgttgggaaaaatctcccatatactac

SEQ ID NO: 190178 - DNA, 1247 bp, Zea Mays
tggggagtaaacttaccagctcatacagttgttataaaggttagtgctttcctttttgctctaccttttttttaaaagatgtgtataattgatggggcatctagccaatactggataattgaaagaactaaaagcttgcagtttattgtaacttatcacttaacctaatatctttaggatgtaattaacacctgtctatctgtgaggatcctatgctgtttagttcgatatagcaactactctttgtagtttggcattaatacaaacacatcttggtattcagtgttgtttagttctaactagttaccacttgctttgaagatagtctgggatcaacattggcatgtaatactatttatctggatgggcatactaaaagcctcaagttttgtgtaatacttttagtttatctttctggtttgataagacggatgagcatcacaagccttgcatgttttcaattgtctatacctcttttatgcactgcacattgctgatactcacatttcccaacaacagggcacacagctatatgatcctaaagctggtgggtggcgagacttggggatgcttgatgtgatgcaggtgtctatctaaacctgtcatatatctgtgctattttttttccttttgaagtaaaaatactgttctattatgttcatttcttcagtcaaccactcttatgtttctgatgtttatgcattcatattctattttgtgctagatctttggacgtgctggaaggccacagtttgataaaagtggcgaaggaattattatcacaacacatgacaaattggcttattacttgaggttattgacaagtcagcttccaatagagagccaggttagcataccaggatgctatgctaacataataatggaacttgttcagctatggggtaaataattaagatcataatccagggggttatcctaacattaggttgttgtataatggagcaatttttatatgaccaatagttttatgttattttactattgtagtattgtagcccttgttatgacaggtcttgaaaaaacggtctgttatatattcttttgacccacaatttaatatgtcgttaactatatataatcttgcagttccttggatctctgaaagataatttaaatgctgaagttgctttgggcactgtaacaaatgtcagggaggcttgtacctggcttggctatacatacttatttataaggatgaagactaatcctctggtgtatgggataac

SEQ ID NO: 190179 - DNA, 436 bp, Zea Mays
gaaacttccaagtaggaaatgctatattgggatatggtggtttggacaaagtagtatttgttttcaagtttctgtggtgcttgtatctgaacttagtatggtaggtagactccttgtgtttcagtgggtatttccgcaagaagtttttcttaaaactttgaacatagaaaatgcacttaccaccttagcgcatggacggttagacattgtggaagacttcatgctatttcgtagtgggacaagaatttccacgaggaggtaatcagtgtgccaaccagaattgacttagtcatgcacaattttaggagtaattggatgattaacatgattaatatttgctattagtatttgatagaaagactgtcaatatattgatctgcttcgtgcgttgatgctaaactaggttggtggagagatagaccgcactcacatcctc

SEQ ID NO: 190180 - DNA, 409 bp, Zea Mays
gggagggagagggagaagagggtgaggacggagaggatccgtgcggagggtcaactctagtctccatgtaaaaaaaggacagtggactagtggaggcaggggtgcgctgccagactagaggcaaggggaggaggaggactgagaagcgatgctgtactgctgtggacggcgaagaccccggccgccggatccacgaatcgcgtcgcgccgatggggatccggccgcgggaggaagcgctgcgcgtagactcacccggaacaaaggatcggagggtagcttgccggggaggaacggtattcgccggaggaggtggagagggtcgcgggcgtctggggcggcgcagtgcaggctgggaatgaaggagacgggaggcgtccccgtgtgttgttgatccttgatcggcgggcg

SEQ ID NO: 190181 - DNA, 982 bp, Zea Mays
ctaggacatcttctagcgatgctcctcttgttgcctttgggtcatctgatggtgtcatcagggtcctttcgatgttgacatggaaggttaaatataccctaccctacacccttttcttcattactggtgtgctgcaagtttaaactgagtcatttgatccttgcagcttgtgcgtaggtatacgggtggacataaaggagcaatagcttgcttaatgacgtacatgtctgcagctggtgaggtaaacttttgcataaatatgtcttgtctttgactctggttgcttcattgtggtagttacaattatgttccttttgttgtgttcatatgttgtaattttctattctcatgtttcatttcttaacaatcaattgttgttaattcttctgattttcatttcttcagatattactgtcatatcttccaattaacaatgcattctcttcaggtacatttagtttctggtggcagcgatggcctgctgatattatggagtgctgatcatatccatgactcacgtgagcttgtgcctaaaattagtatgaaggtactggcatactgactttgattcactgattatttatgtatcaagaaaaaataaaatggtacaaaatgtttgtaaataacttgtaaaaacattacttagcatgcaggttgcttaataatgtttttttgggtgttttctgaaggcccatgatggaggtgttgttgcagttgaactttctagggtgatggggagtgctccgcagctcattacaataggggctgataaaactttagccatatgggatactgttactttcaaggtatttattattaaatatttccatgaagttttattatttattatttcaaatagaccttaaagtatcacattttctgtttgctgctcaggaaataagacgcattaaaccagtgcctaaacttgcttgtcatagtgttgcatcgtggtgtcatccccgtgcaccaaaccttgatattc

SEQ ID NO: 190182 - DNA, 422 bp, Zea Mays
ctcgttccaaatgatgtgaagctagaagggagcaagaattacttgagttggtctaggagagtccgagtgctcttaggaggtaaaggagtggagcactatctggaagagggttgtgttgaacctgttgataggctcagccctgaatggagagtttggtataccaccaactcagttattgtggcatggttgttagcatccatgtcttcgtctgtaagtaagatggttgaagccatgcgcactgctacacaaatttggaagaccttgagcaatatgtattcaagaaaagggaatgtgatgatgatgatggagatccaaagtaaggcagatgcggtgaaacagactgggagaccagtggaacaatatgctagtgaacttcagtacttgtggggagaactagatcactacgctcctctgcaaatgat

SEQ ID NO: 190183 - DNA, 396 bp, Zea Mays
tgcttgtggtgcccacggctggcgcggttggtggaccgcagggaaggaatttctcgccgtcgtacacactctgccgcggacccgccattctccgtggccagcgtcttcggccaatcccagtctctggtaaggccttcgatcggattctatatcttcctagcgtcgtgtagagtcgttcagatgagggtcttaggtcttcgcgtgctagataattgcccacagcaatggcaccgccgtcgggtcctgttcgccgtcggtgagagagacagagttgagaagacgtgcgctgaccgttgatccggttttggacgacgaagattagttggttgtgtaacgcttcggccaaataaatctgggccagagatcagctagtgtgcgggcgagaacagatcgggc

SEQ ID NO: 190184 - DNA, 413 bp, Zea Mays
agtcactcggcgttacctctaaaactccgacgtcgtcttcaagtcactcggcgttacctctaaaactctgacgtcgtcctcagtcgctcggcagttacctctaaaactccgacgtcgtgttcagtcgctcggcagttacctctaaaactccgacatcgtgttcagtcgctcggcagttacctctaacacgccgacgtcgtctttagtcgctcggcagttatctctaaaactccgacgtcgtcttcaagtcactcggcagctacctctaaaagcgtcgatatgatgtccgagttatttacttactattccaagagaatcaacttcaaaaacaaggtgggcggaggaatgattcaagaactctaagttatgctgcgaacataacggatagagaacatcatgggcaatgaatatca

SEQ ID NO: 190185 - DNA, 294 bp, Zea Mays
taccaaccaagacgctcgatttctcgactccgcactctgcccttcttggtagtgcgccgtcctacgatcatctccgcgtttttggttgtaagtgttaccccaatctctcgaccactgctccccacaaacttgcaccccgttctgctctttgcattttcatcggctactctgctcaccataagggataccgatgtcttgaccctaccaccaatagaatcatcatctctcgtcatgttatcttcgacgagtccaccttccctttcgccgagcagccctcaccgcccgcagctgcgg

SEQ ID NO: 190186 - DNA, 275 bp, Zea Mays
gaaaaaaggaagctggtggaatcatcagataaaggtgcaccacctaagtgttgttgaagtttactaatacctttctgttgttttgtttctaaagattcacatttctttaggagaaattgttggaaaagaccaatcacgtcgaatgagaagcagtgtaggggttgatcatgataacctgcgagcatcaaagaaaatgaagaaagaatccaatggccctgtgatgaagcatcaaccctctgagtttgaaataagcaaaagtagtcctgccagtgaga

SEQ ID NO: 190187 - DNA, 277 bp, Zea Mays
gcaatgtacaagaactgacgctgcttcttctgaaatttgtgcagcaatccatgaagcaccaaccagaatattctggatatggtttagccattcccccagtgttgaagaaaatgatgtcatgctatttagattgcctccaccccaggttgatccacggttcctctgccaaagaaaaataattaaaaacatcagccttctgtttctgcttcatacttgacgagcttgagacagatgttacatgacaggttcagaattatccattggtatggcatgtaaa

SEQ ID NO: 190188 - DNA, 300 bp, Zea Mays
gattcgtttggctctgtgtctaagtgttttgagtctgatgattctgggagttcggttgcgtggacgggggagtcttcagatgaggacttggattattttgtggcgttggatgtggctgcagcggagccttcgccgcgcgcggagggttccgaggaactcccgggcgcgagtactgggtataggcggtggagggcggtggcgaagcggagagtgagtgaattgtcgtgaagtggtaaaagttatcgtagcgaggtggagagaggtcgtcttcgcgtggatgggactggtaagcgagaattg

SEQ ID NO: 190189 - DNA, 419 bp, Zea Mays
agaagatatgccagggcattgaaaattcagcgactgctgttggaaagactcttttacgcaaggtatataacttcattactagtaatgttagaacatttttgctccactgtcttgattctaatatctataacaattcacagctactgaattcgatcaaattactacgctcaattcttgagaattctggtcaatccgcagatacagttcagatggttcttgaagaaggcactgactcactgtctgaaattgctcgctctgttgttatgacagctcatcttatgccatccctagccaatgtgtcagtaaatgatgaatctccttttctcttctctaatatgtggaaggttattgttgattcagaagagcctcttgactgccaagagggtgaatttgcaaagaggctagtttgggagttgcct

SEQ ID NO: 190190 - DNA, 519 bp, Zea Mays
atggatcatggcgtttctgtattgattatcgggcgctgaatgccattaccgtcaaagatgcttatccaattccaatggttgatgagcttcttgatgaactgcacggtgctcggtatttcaccaagctggatttgcgctcaggatatcatcaagttcgcatgcgtccgggtgatgtggagaaaacggctttcagaacgcatgacggcctctacgaatttctcgtcatgcccttcggcctctgcaatgccccagcaacatttcaggctctaatgaatgacattctacgaccatttttgcgtcgtttcgtcttggttttctttgacgatatcctgatctacagcagctccatcactgagcacttgcgtcacctccgtacagtgctcactgttcttcatcaacaccaactatttgttaagaagtccaaatgtgattttggtgttccatccatctcctacctcgggcatattatttcggccgatggagtggcgatggatcctgagaaggtccgcgccgtgactg

SEQ ID NO: 190191 - DNA, 282 bp, Zea Mays
gaagtatccatctctgctcggcctatccacttgatcagaacttcccacaccccccgattcagccttgcacggaggactttttctggtgtagggatgactctgccgttgaggagctcagacaacggtataacttgggttggagcctcccctatgaatttcttgagtagagaaacgtggaacacatcatgtattctggccctgggaggaagctgcaacttgtaggagacagtgcccaccctcgatagcacttgatatggcccaaagaactttgggccaagtttg

SEQ ID NO: 190192 - DNA, 400 bp, Zea Mays
tagcccccgagacacctaccttctttagcaaccagctcgccgcagacgcgcctgggggtctcgtttgggagctaaaacccaagtcccggaaccaatcacaaggacggctactgccgacagagccttctttgcctaaataccactcggcaggtcctagaacccgaagcagtcgacaaagatcaaacttttgcaggtttggagtggttccgcgatccaagaaaaggtttggagcagttccgcgatccaagaaccgggagcaagaaacaagcggagggttctactggtgggatcgaggaggattggaaatttggaactgggagggaggagtcgggtcgggtgggcttcgggcaacaccaatgttggaaggcgtcaaactttggaagtcaccactcaccagtgt

SEQ ID NO: 190193 - DNA, 421 bp, Zea Mays
cttgtagatgaagctgtaggtgcaagtgaagctctttgaggtcgtaattttccaaggaaagctcgtgggaacagtagcaatcgttccaggaactgcacaccagatgttgatgatgatattttagatttcattgaggaacaagatgaagaacagctggatgatgaggaagaagatccacatgatgatgcagatgtgatagatcgtggggatgcaactgatgagcccactgacgagggagaaaatgcagcagctgctgatatctttgatagcttagatgattatgagtgactcggtgatgggcatggccattgagagagaggaactgggtgatgtactgctgtttaggggttgttatttgactagtgtgtgctgtagttttatgtggattatgtgtgctggtatggactgggtgatgaacagc

SEQ ID NO: 190194 - DNA, 1247 bp, Zea Mays
ccaggcaaccaaacagtgtcctccctttgcttcctttgtgcctctccaaagaaaaccctttcttatcttatcaatggcatctaaggcccattgggggatgtcaattgccattgctaaataaactgtcatgcctgtgagaacatgttgcacctgaattctccttcctgctctagacattaagtcagctttccaattagggagttgatctgcaattctttcaacaaagggctggaactgctgccgagaaagtttatgcaaggaaaggggtagccccaaatatttgcaggggaaggttgccatctcacaaggcagcaaactctgaacatccatcaaattctcctcggagcattgaataggatatgcatttgatttctgcacattatttatgagaccagaagcatctccaaaaagttgcagaatgtctagagtgatagaagtgtcttctgtacgcagactggaattttgccaggaactccctccacagcaggactaacttgctataataaggcaacagcacatacttcatttcccttatgccacctctgaacttgatcacaagagactttaagtatttcagttggaggttcaaacaccaaacgttgcaccacagctccctcatgtttgaattcaacccactccttatcacatgcacacaacattggactgaacttttccaaccattccatcccaatcaccatatcataagcagtcactggtaaaacaaatgcctctgccacaaatgttctcccacaacaccaccattccaactgaatagctttcttgaaacagtgaatgatctgtccatttgcaaccttgactgccactggatcaatgttttgaacttcacagttcaccctcgaggaagccatttcactgataaaagtgttggagctaccagaatcaactagttgcaggatcacctggtcctttatcaaagctttaagtctaatacaccttgagttgtcagtgccacacactacattcagagacaagagtcatatcatcatcagggttatacccacttgtctctaggtaatccagcatttcctctgaaagtaagggtccaccatcctccactgtaatgcaattcaattggggctgtacagggtctttacatctgcgccctggcatatatttctccccacatctgtaacatagtccattgactcttctgtactccttaagctgtttagccttccacacctctccctaagattctgaattttccttgccaacaacagagggta

SEQ ID NO: 190195 - DNA, 341 bp, Zea Mays
ggagggtgacagtggtggcaattggagggacgatgaactaggtggctgaggtggactatggcagtgggttggtgttggtcaacaaagaaggggagggagaggcgatgtattcataccagggcttcatgtcagctgaggtcgtcgtcatccacgatggcgtgctggagcatgactggtggtgaggatggtggtggcacctgaccatagcatgagaaggggaagtgcttgtggtctgtgatgcggatgcgaggagataatgtttggagtcagatggtcgactaggggccttgcatcatagttacctcctttaaattttgagacactgatgcatgatactttcg

SEQ ID NO: 190196 - DNA, 924 bp, Zea Mays
agcaaagcagtatccatatctggtaaaactacgcagcagcaatcacagaaggaggctaaaaatgtaacatcagcatgctgggtttgtgccaagggaagcaaaattgctatcggatacgataatggcgatttatacatttgggccattcctgaggttacaagtacacaaaattcctcatctatgggtggccagaatctacctattcagaggcttaacctaggatacaagctagacaagttgccaatagtctctttgcaatggatccctagcgatggaaaggcaggccgtttgtatatcaatggtttcaatgatcatggacacctatttcaggtggaaacactgacctttaccaaaataactatttaactgttgctcaaataatagtttgtagactgtccacttccataaatttcaaatgccatgttatatccgtccttgtacctttttcttatcatgcggagttctgttctaatagcaatgtgccttatcatctgtatgattctggttcataatatcaattcggaattaatggttttatggttggctgatctgcaaattcaaatatcaccaatgacaaggtagactggccaaaaagtgtttctatttcccagaaatatttgaaagttgcccctttctgtacgttgttggagcctgtattttcttcctagtttgttgacttatatggatgatgtatcttgattgtttatgttcagtaagaactgcatcgttgttcaaccttccacttggtgtttatgaataggttctgattctgaatgaagagagtgagtcgcgaattgtaaagatggttttgcctatcgctgaatcttgccaaggaatggaacttgttacagggcttagtgacccaaataagcacagacaaagtgcccttgcactcttgttgaaatctggtcacatctgtttata

SEQ ID NO: 190197 - DNA, 516 bp, Zea Mays
agccttcgtcattgccaacgctcagaagtattcatggctcacctcagctcatcaagcttgtccctgtttgttgcagcaacctgacaaaacacaacatttctctgccctccctctccctttggttgcagctattccggcgtgtggctcataacccggtgtggctcgctggtcaggagcggctacgatatcgagcacgaggctctctgtatagcggtcctcatcgccaacggggtactcttccgctgtgtagccttcttctgcatggtcaccttccagaagaactgagagaggtcggtcaaggaaaacacacccgtgattccgtgaactttctatgcccacgtagcagctctgtttttgttaatttcagtgcaataggattgtagattagagcccctcttggtaaggtatgtcagtatgtgtagatgaggacagattcttgaatagcaggcaactatcagggatgccctaaattacagaggcggtttcttgcctaacaccaatgtaaatttgatatgc

SEQ ID NO: 190198 - DNA, 612 bp, Zea Mays
gccgtggggaggatgtttggcgcgtcattggtgacagaggcaggggcatgtaagatgcgggtggggcgcggcaggatggacagtacccgtcaccgacggagatgcctgggaggatggagcacctccattgttgcgatgtccacaaatcagaccctttaaatggagggcggccgcggtagtcttgccatagcgagcgaagcgggggtgcacggagggattggggacagggtgcgtaggcagggcgtgaaggcgagaatggagcagcgcggggcgacttagctggcatctcggcggggatgatgggagcgggggcacggtgagtcagggtggacgccctccttggagccttataggatagtagagatgtagtgtaacaaagaaaggtgcaatatttttgcacaaacacgtcaatctgcagatagcttcagacaggtggcactgtgcaccaataacactctgtttgacgcgaatatgttatcatacctagcagcaacaaatcaaaggtcaaccatgatatccctaagttggcataatttgaacataagaacataaagtcttacggtttgcgccttgatccctcaccgccacatgagcttcagattctgatgggct

SEQ ID NO: 190199 - DNA, 308 bp, Zea Mays
tagccgaagcggcagtcttcctcttcttcttttgcccttgtagaggataatggtaatcggggtatatgaagccaatcgcatcaaagaccatgttcagtcttttcttcccccggcctccgaaggctgcggacaaagcattatcttcagccttggaataagctccaagtagctcatcagtggtagcttcaatacacttcagccagtcgtcgtttggctcatcgaacttttccctaaacatgaaggtatactttagttggactagaccaccatcactagaatcggtggtggtctccttcggcatatcccag

SEQ ID NO: 190200 - DNA, 320 bp, Zea Mays
ggtaccctcgagtgtctcgtaggcactaatggactggtcgctgacgtcacctgacacctctgaagcggccttgttcaagacgcatgctgcttgaggctgagtttgcggtaacactggagtgccatcgtgctccgatgccaatgcagttggctgagaagcgttggggccatggaggctccgcctatgctggatggtggtggccatgataggggagacgaagggcttgatgtctctctccgcgtccatgtagtccgtcgacagttcctcgaggcggttgatgttaagtgacaagcggtgggaacgattagtgaggacgtgca

SEQ ID NO: 190201 - DNA, 392 bp, Zea Mays
aaaagctatagttgcagaagaagaaaaatcaggcaattaatccagtaaaaaaagggttgacaacatttaatattcttgtatatttaggcaaaccattctaaacagccctccaagcagtggaccagcaagatctagtcgtttgtttccataatgatctcggtcatcctcagctcttcgactaagagcgcacatcagtaggcggtgaataatatacctgcaaaataaagggtagatcaaccttgctactttcaacagaactttaatttttgcagatgccagctacaagtccacaaggcttgacaaggagaacatacccaaaatagtatgccttcttagtttcacagaattccccaacaccaacatgaggcaacatttccttctgaagtatttcc

SEQ ID NO: 190202 - DNA, 1442 bp, Zea Mays
ggacaattgggtgccacagagtcgtgaacctgaggaggtgaaggtgagcaccgaggggttggaagttagaattggtgggcggagagatgagaatgtgtcactggatgatgggcgattgtcacaagctgcatggattcgtcaatacatggaacaacaagaggaggtatagatgagtgaacaagtatttttcacatgaattgagtcatctcttagtactctttgaaaaactgttggattttgttagtcttatgttttttttgtccgcttgcttagtctccaattgtatcgttctgtttcatacttctctcaggttgttctgaacttccagtggatactaagagcttctacatcatgaacctgtgcaacttacagttttagaagacaaataactgattttgttgtctaatctaagtagcacaatgttttgttctatttgaaaaaaagaacacaaaatggttacacaaattggtaactattgttcactgggaactatgtttcacaacaattcaagtctcttcttatttttattgcttatggtttatctttttgtttcaaaacgttaactatcctcactgcagttttagattttgacatggtctccaatgtgtagtttttttgtagaacgaggtaataccctgcttataaagataacatatgagtttttccaagttccaagccagggacaccagcgagcgataactctaatatgtagctttgactattacttgtaataactccatgccagtaaacattaagtaatagaatgtaagtccttgagatgacacatctactaatgttattttcttgtggtcaatctaaataatcttttttttacacatgaatgggaaatttatgaaaacatgacacctttcaccaatgtatctgaggttgcatgtacccaacatccgaatatcctatgcatacaatttcacaacctctatcaagtctttctgttaactgttattccttttcatttcttttaatatcatatttcttggtacattttttcttttggatatcactgatgttaggaagaggatgcaaattccaatgattcctctacatgggaggatcactgcttacaaagttttgaagttgtcgaagcaaagccaagtaggcggaagagcaagggtaactttgcttattgttttattggcattcatattgtaactatgacatatgttgtctactagtttttagttacatggccctgtggccctgacaactttttggaagtttacatagttgagatagtttaccgcgaactatcttatgattccctcccgcacttaacagctgcaaaaaagaattccaagcatggaaacttgaaggaacagataagctatcctaccaattctgtatcttcaaattctgaaactgcaaatgttgagggtgttcagaatgatttagaggcaagtgaggaaagatctgagagtctaggc

SEQ ID NO: 190203 - DNA, 768 bp, Zea Mays
cttttagtatcaatgctaatggagttatgtgtgtgctcatgaacagcacaacaggaaatgatcaggcttttgtcagggtaaatgtgagaagtggaacaaaaagttcacggcatgaagttgtatttcagcttgattgctggtccagcccatacaggtactgctcggttgttcttgtctatacagtctacttaaaaactgaacatttaattcagtaaaatcaaaactattctcagggtggagaatcgctccatgttcttgcctatacggtttcggcagtttggtggtgatgatcattcatggcgtaatctgcttccgaattcatcagcttccttctttttggaggacctgagcagaaggcatctattggaagttttggttgatggaactgaccctatgaactccatgacatatgacatcaatgtcgtaatggatcatcagccccttactaattcagatgcccttaagaaggccttacgtgtcactgtcttgaaggaggggaaattgaatgttattcaaattattgattggctgccagataatagaaatcgaggacagataactgaaaggatgttatcaccaatctttcagccatcagaggtcgactatgggcagtcatctcctgatctggatagtgaatttcatgttactttggaactaacggagcttggcatttctgtaattgaccatatgcctgaggaagttctttacctctcagtgcagcaactgttacttgcatactcatctggaattggctctggagtaaatcgg

SEQ ID NO: 190204 - DNA, 310 bp, Zea Mays
ccgccctggctaggtgcgatgaacagatgattgaacttttgctccacaactggtgctgggttgggtggtgtgtgtgcgtgtgatggtggcagtgggcggggagcgattccgtgatcggggcgcgccacggcgccgtctgctgcgtttccttgtccgatgcgcggagttggttactgaggggtacgcgtcggccgcgggttcctggtggttaattgagcaagttgctagtgatggcacgagtagattgccgacgtggatctgcgtgttgccgttaatgactccgtgctgatccatttgctacttatgctct

SEQ ID NO: 190205 - DNA, 321 bp, Zea Mays
ggcctccctgtgctgctcggcgctcgccgctgccactccgtatctggctatctgccctgctcagcgctcatgctcgccactctagtgctccagcttgttgtccctttgctgctcacactcgccactgcctccctttgctgccactgtccctgctctcatccttctccccttccctgctgatctgctcacaatctcctctaattttggttatgatgatgaagcaacaaacaatagtgctggctatggtgatgagcaagacaaatacaagaatgatggtggtatagatgatttggatgatggttattgagatatgatagaggg

SEQ ID NO: 190206 - DNA, 326 bp, Zea Mays
cccagattacctctttcttttcctgctgctcagaaattactctgttatcgaccatcagttttccaatgaagtttttctttttcctgtgtctggcgtggtgatgaaaataggcagtgttggcatcgccttctttcagccagtgcagtccacttcttactcgggcaacagttctttccaaggaggctaaagccaaagagtggtgcttaagggagcgacgtagccattcctcagagggagacaaattcctttcgtcacgagcgatttccagcctgtgaaggatctcatttgccaacagaatttgctgcttaatgttgcccacttttttc

SEQ ID NO: 190207 - DNA, 1082 bp, Zea Mays
cagcttaatgaaagcttagatcagtggccacatctaaatgatctggtacagtgctacaaggctgattttgtgaaggatgactgcaaatatggacgctatgagagtgttgcaccaccatctttccaaaatcaaattttcgagggacctgatacagacatagaaacaggtaatccatcttccttgctgccaaatggctgtattaatttcacatgtatcttggaaaagttttatattcttgctctgtgtcacagaattgcagctttgcaacgcaagacatttcaagcctgaagatcctaccgaagatgatatgccaagcacctcagggaggcaaatgtatgaaaccgaatcatctgcttcatcttcaaaagtggtaagggcatcgtctctggacttctgtactggatagatttgtcctttgcttcccatgttttcttttgtgctggcctatagtctgcaattaatcttagtgcttttataatgggctactcacattggataagaactatgtcatgcttgattctttatgtattttttgtcagtaatccttcgcgtccaatcacttttagtaccttttccaccgctttctgatttcctttgcttcctgtgcaaacgatttctgtcaatggagctataatactggttgaagaccggtaaaatcattttaagcctttcgaaataacataccatgtgtttttattctttaaagctctcatgtgacaatttttcctccaagttattgcaatcagtatcaattctcatcttgatgttgaacattaacagtatctttatcatctgtgtttttctcagcactgtagtctgtcaccactgccagcatatgagcctgcatttgattgggagaatgagaggtctttgatatttggccaaagggtgccagaaagtataccagcaataagcaacaggttgcttcagcccacagactaaaccaatgcatccatcatttctctctccccaccccttcttctggtgatcaatgcttattaattaatcccgttttaaattgttttgcactgtttatagtggcttgaagataactgtcaaggtactatctttgtcattccaag

SEQ ID NO: 190208 - DNA, 2137 bp, Zea Mays
gccgcgccctggatgagcgccgccgtccccggcacgtacgtgcttcccctcccgacccctgtggaaactctcgcgctttggggatctgtgagtaaattgctgcgagcttcgtcatcgtcgctcggctgacatactgttgcgtgctccgggataatggtgcagcgtgctggggacgctgctcaagaacaagctgatccccgaccccttctacgggctgaacaaccaggccatcatcgacatcgccgacgccgggagggagtactacaccttttggttcttcaccacgttccagtgtgccctggtacgcagaactgcaccagttctccggatatttgttagtcatgttttcctgtaacgaagaatgcattatcaatccttactgtctcctccggttaaaaagggattgcctaacctttttgctgtaggcagtttttgattcagcatagttgtactgcattgttactgcgccaatgaatgtggctgctccctcaggcctcagcaggcagcaagcactttaagctgtcttctgctgaactgaactgtacaaactgatacacttctcttgttgtgtttcccatagtttattttcccttttggcagaataatatgtttatagcaagtataatttgggactaaaggtgaactttatgctggggtggagagagaagggaagtgggctgttgaagcacattaatcaagaaatcttgtgagagaagaaagtgggccatgtattaatgatgaagtatattcttactgatctactatatggatgggctgatagatgggctatatatttacataaagccagcagtggactgtattattaacttttttaagagtagagacgactatcacattatgtgtgtaggtagggtagagtactctagtgacctagcagtacaatataaaatatgtctttagcttacttcaactcaaatcaaatccgtgcaacctaaggacacatgttcagttgacaaacttttcattcacttctgcttggacggaagccttttggaagtgacgttgcagttgcagccatggtagcatagctgtttacttttttccttgatctcttcagttaatgctaaataatgagactgctcttaattgttgtaaaacatgatttcttgactttaaggactgacattttgtacatttccgcacatgtacttgttatggtgctaaacgacttaacatatcaatatcttcttggtacgtccatctttagtcaggaaatcagcatgcgactttaaacttccggggaataaactactcagctgaaatgtatttaaatgggcacaaggaggtactaccaaaaggaatgttccgaaggcacaacattgatattactgatatcctccatcctgatggtaacaatctgcttgctgtccttgttcatcctcctgatcaccctggcaaaattcctcctcaggggggccagggtggtgatcatgaggttagtctcatatccttcaggttggttttatgtagatttatcctttcgcatatgatttgcaatcgtggataatggagtgtcccatcctattgtattgtgcagatttggattgtcttttgcttctttttttagcaaagctcaaacaagacttgtgttgcttagttgccaatgtgttttccctcggatggtactacacttcaggagatacatagtatcaccttacttgaattgtaatatatacttttatctgagatgctacctgcatcaaatgtgctgaaagcataggtaaaacacacaatggcttgcacatactctgttttggaggccacattccgttgtttgtattctgatgagcagtagcagatccacaggaaattaatacatatttagccaataaaataagaagttggtcctattagaagaggcccagctgctatgtcaattttggatctgcccttgctgggcagtttgggacatgctttactatttgaagtacattttgggaagtatatattgcagtttaaagtgcaactgctaattgcaatatttatttggtctcgtaactactatttaaaaaggaatattgttagttaaagggactactgatgcacaactacaaatgtcaatgtggtcatttcagattggaaaagatgttgctacacaatatgttgaaggatggga

SEQ ID NO: 190209 - DNA, 1169 bp, Zea Mays
gtcgaggaaggacgcggagtattgcatggaaaatgccttcagtacatatttggtatttatttagaaattcacatcttggtttcctggcacatgcaaataattatttcctttatattgcttattacttaatcttttggatattgttctgtggtcttgtgctgttaccccatgcttcttatacagaacaataaggagcccaaaacccattttgcatggaacatctttttcgtgtttatcagttcttaacttcttattgaatgctcaattcaagtcttatttaagcaacaatcataacaaacagctacaattctgggccacatcgccacatattcatttcattctagtttcttgttacaacctctgggccatgttgccacatattcatttgggaagggaaagggatgacattttagactggctacaagttctgggccacattgccacatattcatttcattctagtttctggtttctttcggaaacgtgtcctgagtcaagaaaagtcagaatgtacagggtccaccctgatttaaaactaccctcttcaatatcaaatggtttattatgcacattctgatactagctgtacaaatctgaatatcctgaggtatggtgcgtttagaagaatgcacaaataagtgaaatatgtgcccatgacaagatactacacttatgatatgtagatagtagactctttagttttcttgattgaacttcttgtagccttctttcattcaaagtgtaattcaccttttcatatatgcagagaattggatcttctggccagagaaatgctactagatgtggcctttggtgggctgaaatgcttaaaacaagaggacagtatagggaagcatctaatgtgtatttccgtgtttctaatgaggtagatttcctgtttgtcgtggaaaatttttagctgattagatgtattattgattgattgagcatctctgctactcaggaaccttctttgcattctgctgtactgcttgagcaagccgcttgttgctatctattatgcaatccacccatgcttcggaaatacggatttcacctaatcttagctgggaatagctacttcgtgtctgatcaggttcataataattcttttactgttcttgtaatccctttcaaagttcattgaatcattgaatcttttctaaatc

SEQ ID NO: 190210 - DNA, 1490 bp, Zea Mays
actcaactgagaactttaagagagcatgcaagatcctgactgcagactctgagccggtattcctatgagaattcttttgcccacttactagtaatggtaaatagccgaagttatttttcttgtattgcatgtttgcaggttcacatatgggatttctctgggcgaacaacatacatagttatgactgaactgaaccggtcgccccatgactcaaaatctgcagatcaggaggtatcttcttctccatcaagtcttccatctcatctcatactcttacagttttgctgggattgtattgttctggtagctacttttgtcttttttgttgcataaaatgccaatgatgattttttatgcttcactttagttctgcttaccaccgactgcagaatgtctagtttgtcaaggttcttatcttcttttctgatgtaggtgcatttaatctgtactaagttagcacatctatgattcatattgtcaaaaaaaatctcattttttcgaattgaactcttttcctttgaattatttggctcgtatactgagcatggatgaacaccaagtcgcttcaacttctctcataatcctagagctttctccatgtccttataaaattccatgaacaaaggatgcatgttctaaagtccaaggaaaggtccaccataccttaaagaaaaggtgcattcaactcattatgtatttcctttgaggtatctgtgtccagttaattgacttcatgttctcattgcatatttcttattccacattcttgaaagctgtatatttcttcttttggcttgctaatagtttctttagaagttgtaaattatgtaagaaaatatattgttatatgattccagttcaaactaggaaggttggatgactagtgcattgtttatatttgttgaaaccgtataatattctcttatttggagctttgatgttagttgtcaatgtcaaccacatactttaattgagggggccagggctacatattacttggtttctgctattttattgggagtgaattggtcagtgattactgattagccatatatttcccccctctttttatattagattatctagcttgcactttctttgaacttagcttttgaacagttcgttcttgtgattgtatgttctcatatatgttgcttactttttggtagtatatcttgtttacactttacttcgcattttcagatgcctctacaaatacacatttatgatctgtcggaacctatggttaatggttctgatgggaaaagggatgagttagcattaacattgggtggctcaagttctagcaatggtggtagtatgaacatggatctggattcatcaagtggaagctctaagcaagttggatccggtttaacaggattagacaatttgggaaacacatgtttcatgaacagtgcagtccagtgcttggctcatacttcaaagctggttgactatttccttggtgatttccacaaagaagtaaa

SEQ ID NO: 190211 - DNA, 770 bp, Zea Mays
gaactcatgcagtggttgctttgagatctggaacaccactgttggaatcacaacacaggcagaatctgcagattgcttcacgcccttaactttgcatttcttctcattgtcagcatcaacaggacccaagccactctggcgatgagctttgaggtaaacacaagaaggatcatccattgggattttgcagtcctcagactgcgcgacgccccagaccctgacaactccatcttcccctccagtagcaagaaactgcccatccggactaaacttcatagccaggatggcaccatcatggcccttaatcacttggccttgataaactgctgacagttctttcgaccgcttcctgtagctgcggaccttgaccctttcataccttccacccctgttttgctcactctctgaggagctggtgctagcctcatcgcctccatgatcgaggataccagacctcaagcccagcctccgaagccatccgtttctcctcctctcgaccgccttgggaacaccagagagcttaccactgcggctcatgagcctctggatgaaggacaacgaactgaaactcctgctcaccttgctgctagcatcatcccggctggatccactgacagaattgtcatccgagacaccatcctctaagctcttcgtctcctccgtggaccaactcgacatggagcagtcgttctcatccgactgcgaccacgatctcccaaattccggcacagcctcttcctccttgtcgacatcgcccacggtggccacgg

SEQ ID NO: 190212 - DNA, 393 bp, Zea Mays
atccaaggaagacgcccgcgccttctattggtgtcgtgcgtcggtgtggagggcgaattgctcgccgccgtgtcaactgcgggcgattttccgcttcgtgccgtggtaggcttctccgccgtggccgtctgccgtaaggtaccttctacatgatcgcctcgtcctcaatttcgttttgcgcatgaagtcaaccgcatccagtagccggaacggtggaattcgggtggccggcgaagagctccgccgagcggaggtgtctctgcgcgcgccgccgggggggagctggctgctggcgtaggattgatgacggaccgatggtcgttggatgggaaaggagcgcccgagattagatcgtgtgaaccgttgattcctaacccttggatcataatcgga

SEQ ID NO: 190213 - DNA, 539 bp, Zea Mays
aattcaatcatagaaacaccttttatttttggttttcctgatttagtcacagtcgcatcagttagatcatttgtttcatttttaacctcaagggcagtttcacttgtctctttgttaactgacaagttttcttgcttgatatgagagtccatctcactgggaacaccaggaatcacattatgccttgatgtagtcacattttcatcaatgtcataacttatttttatgggcttttgaggagcccgaatgtcagcctttgcatctacctctcgtttcagatatgttgtcctattattgtgctcaagctgctcaggctgtgcttcctgcaatagaaagcctgggtttacatgatgattggagactacagagatatcattttctgggccactgagtgatggaagatgcatctttaaacgttttggaacagatggttgatcctcgaacgcttcagctgacattggatcaacatccattctatcaccttctatcccgttcatgattctctgaggcacattttgttgagcaagttttctagactc

SEQ ID NO: 190214 - DNA, 465 bp, Zea Mays
aacaaacttaggtatagcaagcaagtctttagatgtgaaggtaggtcataataactaactgatagtatccttctcatattcttcacattagtactgccatttagaccagaacccatggattggtacacatgtgaccaatagttatgtgtatttatttcctttccagttttatcggctagcatacttgccatggtaatgatagctaatggtacaccaccacatttctgtaagattttaccagccacttcagctaaattatgtggaggacatttgtcttcactgccaaaaattctttggcagaataactttgttgagtcactgagagaaagaggttccatttgataaacacttccagcttgttttgcaacatcaatattacgagttgtgataattattatacttccacattcattgtgcatcaaagaacattggattgtttcccacacagaagtattccatatgtca

SEQ ID NO: 190215 - DNA, 891 bp, Zea Mays
cagatattctcattggctgtcctactatcgagcatgttcatatataatcaggtgtgagctatggtttgtactttccaacccttttgttggagatttgtcttgagttcatcctaataatgttggaactgtttcatgtttgcacttacattaattgataacatatggccattataacaataacactagcatcgtcaaaagaagctcaaatacacataagaaaaggagatgggctttgtgtatttggttatctacaattctacatcgaacagcttttatgtccttccaactatgtttcaccttccaactatctttcaccagcatgtaggtggacggctaatatattcaaacaattgtcttgttcaacaaaatatgctgtcaatcagatgtctcatttctatattgtttaggctagatgggcttgatctgtgatgatatcaatggcctgactaatgcatgcaagaaggaaaataattggtcattgtgatcattgctaggaggaaagttaggatatatatcttctttaatttaaaacaatggtggcttatattagccaaggtggcagaatatgaaccactttatgtagccgatctaatggctaggaatggtatccatacttgtatttatatttgaaatatatgatagtgcgactatgtgagcacatggatatgacataaaaacttccatgttgcaatgtgattaatctgtttcattcaacatgttcaagggaataagaaatatttctttttctcttgcagatgggtggtatagatgaggcagcccttgatcgcctttcacttgttactgaaatgaccaagcatatccgtgtgagggcaaatggtgggaggtctactgcatctgaacttgcgcagttttcacctattttcatctggc

SEQ ID NO: 190216 - DNA, 376 bp, Zea Mays
ccgcgccgcgccgttcagagagggagaggaggggacgcgaggaggaagaagaagcaggcaaacagcagcagaaggcagaagccccgtcccatccccggcagccccctccatccaagtgatttcaagtagccaccgagaagcggagaaggtgaccgcacctcacgcaatttgcccctgcccgtcgattccatcgcctcccgccgtcccttccctcctctagggttgtcttgtgggtgcccgtgcttcccaccctaggggcaggtccagggccgggccttctcttcgccccgcctccgctgctcttttctttgctgctagggttaggttagggttcgacgctgtggggaggggcatcctcctccctcgccgccgccgc

SEQ ID NO: 190217 - DNA, 276 bp, Zea Mays
cacgcggcggccgcctcctccaccacgccgatggcgacccctcactcacccagacccagctgaacaactccctccaccaagcacacgcaagcaggagaaggagcaggagcaggagcaggagccgagggcggcgacagagaatagaggtagaggaaggcgatcgacgaggagctcggtctcacctgctagcggcggcgaccatggaccggatgctgctcgaccagctggccggcgaggccctgcgggaggtgctgcacgcggtgcagggcaccctgt

SEQ ID NO: 190218 - DNA, 300 bp, Zea Mays
ctgaggtttgattgcccctcttctcttttcctacatagtataaccgtgttcttttgcacttgtaaatgtttttctgtcagactattctgttccactgacttggttgacatggacctgaatggttttctgaactttgacccatttcatttgtgcttgtgctcctttttgtcatgacgtcttacacacggtgttggaacaaaagggtcttgtcgatcttgcatgtagaatgttcaatgaggtggatcacgggcagtggttggcataattttcctctccggaagtttggccatttcccaggcc

SEQ ID NO: 190219 - DNA, 286 bp, Zea Mays
ggccttggccgttcgtgccagtttgatgtgcaggcgcaagagtggttgctggacagagggtaacgtcttattccaggccgaatataccgcttctttgaatccgtcaatgcgtgtccagaagttctcgaagcggaaggaactgtttgttttgcgcattatctctccttgcaagagcagaggggtgtggtccgacatgagggagggtagggagtggatgtagcaggttgggaagagaagctcccaatcgggcgtgcagaagaatctgtcaattcttgtcatggttggt

SEQ ID NO: 190220 - DNA, 327 bp, Zea Mays
gtcaaacagcctgtaggccaccctagccagacattaagcctggccaagaacgatcatctgcagctccagacaatgcaccaaggcaaagagtcctggccgttaatcacgctctggcccacaggtcaaattctcatcaaccaggtttaagtacttgccttcttattaatcaaagatgcaacagtacgatcctatagaacagatcctgttcaagtaaggtcgtgctgtgagttaccaaagctaaatttttaagctggcttctacgcatgtgagcaaccgagatggcactaaccggtgggactggccaacatactgcgtcctgggtcggcc

SEQ ID NO: 190221 - DNA, 683 bp, Zea Mays
gaaagaaattgagggcagggaactgctcaaggcccatttggaaaagaaggcagctgctgaggctgcagtggattcatccttagcatcctcatccaactccttagaaaagactccccaggttctgaaggggccagatcaatcctcggtaattgttggtgatgcaaaaattaatgcaccacttccaaaggctgtacctgtagccataagtgacgacaacaatggagttattccagcaacggcaacatacaccataaacaccaaacctgtgcttgtcagtcccactccaagtaaacttgagccagttttgtgtgaagaacatgtatcaagttcaatccagcaaacaaataaagctatcctgatgccttcaagatcaccactagttgataatgaggctaatccaactcccccaaaatcacccgtgccacaggctgatacagttgctaaagctactccagctccacccaaatcaccaatgctacagattgatacaattgctaaagctacagcagctcctacaaaatcttctacttcacagcttgataaagttgctaacatccaagctgcccccaaatcacctgcaccccagcctgatgaagttgcctcacatcataactcagtatcgggacagattctgtccacatctatctccaagcctcgagaagatacggtttctaagagggctg

SEQ ID NO: 190222 - DNA, 855 bp, Zea Mays
caggaccatataatggaggaaagagtggagtgtgaagtaagagaaggaagtggagtatcctatgaagaggcatgtgagctcggtggtggtagagtgaaagcctctggagttgcagtggatgttagtggtccagtgctaaacaaggaggcctgcaacacagaggaggcaagtacattttcaggatctagatctttgcagcactgtttggcacagctcctcctagttctgactcctgctacagtaggcccctagttcattttgggggtctagctcctgctgcagtgccatttccaggaggagacggagctggcatagaacttgccaaagggggcctaactatgattcattgtgatgaacttgttctacagttgcaggcaagggaggataagaagcgtcatggagttgggcatgtgaatgagaagagggttttggaagaaactagtatgattgatactggtgaattgaaatctgattcgactgttatggagattagcatggctgggttaagacaaggaacactcaaccaatgtgcttcaagttcggagaaggtgagaacaatttccgtttcaatgtatttttttttccgtttgaccaatagctgatgcatctcagtcacaggaagaagcagtgcaggagaagcatgatcagggattggtagatgaaaacacaaacagaggttcagctgacaatgatgcacttgaatgtggtggagtgaatcctgatgtggccataacaatgtttcatgaaactattcttacaacagaagctgtcaatatagctgggtctaaaatttcgtctgagaaccagcaaaaggaagcaccctttgaagtacactctataacagaagtcgaaggt

SEQ ID NO: 190223 - DNA, 480 bp, Zea Mays
ggattataggaaacctggtatcacaaaaggtcattagctagcccaataacgtcttcatcaactagttgtactcgaataccctctcgtgtgattacaatgccctcaatatcatagaaacgtcatttgaggtttaaaaggcaatctattgttttgaattctttatattccaactttttagcaaatgtatggtggaaaaaaattgccttacaaccttaacctatgtatggacagttcactcacgcaatttggctaaattttccatggtctttattttattttattttgagaaatgatgtggcataatgatgtgcggtgttttacttgagtggacataaacaccatctaggtatgccttgaatagagaggattataggaaacctggtatcacaaaaggtcattatctagcccaacaatgtcttcatccactagttgtactctaataccctctcgtccgaatacaatgcccttgatatcagggaa

SEQ ID NO: 190224 - DNA, 3058 bp, Zea Mays
cctcaccacagccatctacgaggaccaggtcggcctcgcggactggtacgtcaactcgctcgcctagatccgatctgcccttagcttaaggccagcgcgacgtatcgggacttcgagctcctagttgagatcactattagggttgtgttgtgaggagctgtgtgcggtgttactacagatttgttaggtttcaccgaatcagggtgtggttttacgagcgtacaactgaattctgcagtagtagcggtgggtgttgtgcattagtcctgtcgtgctggtagaaaagttcttttagctatttagcgactatgcagtgattgcatcctagttcgaaattctctgtttttttagctatttagcgagtatacagatggatgggcatgtgcttcatcattgaaataaagcgcagtctgcaggagctagagttagtttgtgttttatggatgaggtctaaggttatgttttgtaccatggatattagtgaactgcattccatgttcgatgtggagtcccttttggcaagtatggcttctgattagtccagtctgagtatcgcaacatggttcacctatgtatgcatgcagtgcaagtagtcaattcttggttcatgtattgcataagataattaagattaaattaggacttaaactttacctttagttaatgtattacttttgtatattttcttctaaatatatttagtgtatcggatttaagtttcttactttagagataaaatttcttaataattatcacgatggaagaatgcatttctcttttttcgtaaatgccttcctctcagttcatggtctcccttgttcttccttgaatcctcgaactccttaaaacctctagtatttaggctgtgccagcttgtacctcgttgtacagtagttatcctgttattatccacctgaagtctgagaatacatcacaacatgtcattatctgatttgctgaattgcttcagtctccatgattccccctctcttaataaggtttgtggctgccttgacatctactcttcaattgctcacaagctgtgctaacccattaagaagcctatctttgtttcatgatgtgtcctgccgtgttgtgttagttctatgtatgagaaaatcaatctttggtaaactgctgtggagttcgctattttgatatggaatcaggcaatctgttattgctagctgctgcacctcttaacatcaattgagttgtacctacctacatgcagtcatttggagtaatccaacagcaccattttaatatgttgatgttcttcacaggcatcagaagtacattggcaaagtaaagcaagcagtttaccacagccagaagagtggaaggagacgagttgtggtcttgacagaggaaaatgtgatctcgtctcttgatctacgttctggagatatatgtgagctttcatatttacagattagcaaatcgagagtgcagtttcttacattttactcacttttttgtccttaatatctctgtattttatgtggtgcagtctggcgacatgtcattgacaagaatgaccccttggatcagcttggtctatcacttggaaaatgtgagtcgaatctttgtttcctgttggagatgcccttgagaaaattgctctattaatgctgtctgtttatttcattctattatgtttcttccactcctgatgggattccttcttagcttggcatccagtcttgctagctttaacctccaaataacttgtttttcttcatttgaaactatatttttttgtacccatttcttacctgtaagtaaggccaatgattcgactatttgagaaccaggtccctgccttgattttttcttactatgtttgtgccagcctttgactctttgagtctggactggtcactggtgaaggggggctttatcaacccttgcctttagtggtccaactcatgagaagttgtatttgagtacacatgttttcaggattatttctttcagattaatgagatatagtttttttatcttgtgagctcttttactctcatattgtttagtcatctccctttgttacttcaacctgttgggattaatctcacatctgttaggactggtctacttaaactgctaaacatttcaagttttcaacattattaaataactagcattgtagaacattcaaagtttttctgggtaacatcctgaaaatccatttcatgtttagccacatgttagcgtgctttcaagactcaattaaaaaaaactggttttcagctatagaaaaatgcatttcttaaggtaaaaggattagtctttgggtgcatatgaaatatattttgattagactttggtaagcatttcagtgttggatcctggactatgatatcacagagctgactgattactgccagtttgtcctgaaattaatttgaaactttcatactacagaatgaaatgagatatcactagtatatgcatgcaacaatgttagttgcatattgatagggaacatgaagtggcaaatttgtggtcttgctatcaattacccaaatgagatatgtgagagacacttgcaagtttgatctgtacaggatatcactctagtatgcatggttattagtagcttacgaagcaatatctacaatttggaccttagtggttcaagattattctattcctttcttttttggtatatgagaataaaatttatttatggtaaatatatattataaacatgattgatgaaaactaaaactctattcttccactattggatactggctgattacgtaactgttggtatgaacaaccaatatgtcatcatatacacgtgattctgttataactaacaacactgattatgaaaggggttatgatttttaagatttgcttatttcggtgacacctttttgttgattttttctgcatatgttaatgacaatctattttttggcatgtcctcagatgttctaactctttcttcggggggaactatattaagggcatggaatcttccagatggactgatgatctgggaaactaaccttcgaacttccacagcatcgaactcacagttgca

SEQ ID NO: 190225 - DNA, 276 bp, Zea Mays
cgcatgctccctattcgtccgcgcgcgcgacggataaactgctcatgcctttgtccctatgtctgcgcgactccattctcctccctccctctcacctcgcgatgccgcccacagcaaccgtgtctgcgtcccatggctacctagcgcgctcgcccgatgcactcctactgctgtgcagccacaccgtcacgttgacgtcgacaccgacgagcccttcttccccgacgagcccttcgtctctggtgagtttcctcccttctctgttctccgtttccg

SEQ ID NO: 190226 - DNA, 711 bp, Zea Mays
caaggacaatgaacgactcaatgctgaaaatgattccttgatgaagagcagggaaggagctaatagtcaggttgccgctttaaggaagtctttggaagctgcacacaaggatataaaagacaaggaaaaaatggtaatattctcttagaatcatccagatgatcaacaatttttctgaatcattctaaccttcatttgttcaaagattcaagacttgaggcagtcactggatgtccagaggaaggagctgaatgactgcagagctgaaatcacagccctgaagatgtacatcgaagggactcaatcaatcaaacaattgtttgttggaactagtgatggtgtaaagtcgcattcctttgctaattctgtgggagcatcatcattgaataatgaagatgaagattcaaaaggatctgaagccataacaaataagctagcatcagcagtaaatattactgatgatacgcagaaagatcgccaagttctagaaagtagcgctgaaggttcctcagtttcagaaactccagtgtctttcacagctgttgagaatgacagctatggtacatcaaaagaagataaatctgtgtcaaatatctcatcgaataatgtatgttttcagagtaatctgcatggagcttccatgactggtaaaagccaggggagttcagatggcatatccatgtatttatctattgagaaactagagagccc

SEQ ID NO: 190227 - DNA, 555 bp, Zea Mays
tgataatcaagtatgttatattggaggtcttgatctgtgctttggtcgctacgatagtcctgagcacaaagtcgctgattctcctccagagatgtggccaggaaaggactactacaatcccaggtattttgttgttatcttctacccattcagatgtatggggcaaagtccctaaatgtcacttcatctctgtaaatagggaatctgaacccaattcctgggaggacaccatgaaagatgagctggaccgtgataaatatccccgcatgccttggcatgatgttcagtgtgctctctatggcccaccttgccgtgatgtagcgaggcattttgttcagcgctggaattatgcaaaggttgcttatatccttgtggtctgcttatcatagaaagcggtaaactaattgtttttttttctttcagaggaacaaagctctaaatgagcaagcaattcccttactgatgcctcattaccacatggtaattccacactacaagggtagaagcaaagaaacaaatgatgaggctgagggtaaacaatacaatgataaggat

SEQ ID NO: 190228 - DNA, 652 bp, Zea Mays
tgtctcttgattctcaaaacgtcagacggttgtctgccgctccagtgccgagacagagtactgtgacatcgtccatgccattgccaagtgttgcttggttacgacaactgctacaggaacttcacacctctgtttcttcagcgaccattgtgtattgtgatcatgtgagtattgtatatatgacagccaatccaatgcatcattgtcacatgaagcatattgagattgacatacactttgtctgcgaggtcgccttgggccaagttcaggtgttccacgtgttgtcctctcaccagttcgctgacatcatgaccaaggagttgcttgtttagttatttactaatttcgatctagtctctactctctacgttcgtgattctccggctgcgactgtatgcgggtgggttgtataggactatatctaggcacatcttttagatttgcattagccttgtaggcttgtactccaagccatattgacttgccttgtactccaagccatattggccctatatatatggtcaacccccccacacacacctaagggtgtgtgcgtttcccatctatctttctacagcccccttaatactacttccattttttaactacacatcgggaatatatagagatgacacattctgcttaccgttcg

SEQ ID NO: 190229 - DNA, 431 bp, Zea Mays
ggcctagatatttccccttcatcatctgcagaagacaacctagatgagactgctggggctctggtgcctgaagttttgcctgatgaatctccacgtgccatacttgaggttaaattttaccctgttcgtgatattgtggtgaagccttgtacaattgatttgaagtgttaatgcattgtgctttttgaacagataatgaccagccattatattcctggaggacacttgctctcacccctcaaggaaaatgttctagaattgaaacaaaagcctaaagtgatggtaaaacaagaagcacctgaatttcaagtcaaagtagaattgcatggagactggggctgtacaacctctgctactctggataacaaagataagtgtaccaaggaaatcaagtctgatgaaaagaaagacaagatccccattttcaggag

SEQ ID NO: 190230 - DNA, 460 bp, Zea Mays
ctaattaccaagttaacaagtctgcatttatcaagcccgactcacattacccaccccggcatatagccaagtggattatgtgaccttcagaccttcacagcacaccaacaggatgtttgagagagacggaacacaagcaagcccaatgtgtatcttcagttcttcactgtgtcgagctaaatggatattggatagctcaatctgctcgacagggcgagcagtcaatagcggaatgcgttcacgagaaattacctgcccgttaaatgattgagacactgaagtgagtaaggtaaaagatctaggaaccaagacggcccaatgcgttgtacgtaccacacacaaaacgcaacatggaaacacacgacccctttccataatgaagcaaacatacagaagatcaaaagaaacaggacagaaggctcaaatatattcctgtgaagccgttcggatgtcaactcgc

SEQ ID NO: 190231 - DNA, 627 bp, Zea Mays
cacaatctgtacagacattccagcaagccactcaggaaggtcgtgaccaccgtgatagagatgatcaacagttggtttatcaacaagctgaagctatatcccggactgttgagattaccaattctttgtctgaaaatgtagtactagctggtgtttgccgtacaatcccacttaccaaaccaaaagatatcactatactgggaaactcagtggatctgaatcactgcatagaaacttgtcatggcagtaactgtttgaactccacgagtttggcaagcttatctagtaagatgccatgtcaaaaattccaaggtgtgaactctcatctgaatggcaacaatgtttcaagtcttgatgttcagtatcttggagaacaaaaccatatgatatcacaagcatcatttaatcctgttagtttggcacccaagggagtatcaggtgatatgagcccattgtcagagccttccagttgttgtttatatgataggagcagtatcacgttccacgagaaggctgatgctaattaccacttgggaaaagttagttctgagattcttagatctggtaacgtggtgagaagcataagctcttcaacaggatcaaataaaccagcacaagccatcgatt

SEQ ID NO: 190232 - DNA, 677 bp, Zea Mays
gagaacgaccatgcagatttccagttgacaccacatgatccccattctgtggttggagaagctaatttgccgcagcataatgtcccaagggacagcgatctgagtcctcttggcttactttggtctgagctggaagggcatccaaaacaacctctctcatcaaatgtacttggtgtaaatgaacgtagaaactccaagcctacaacacccaaggacattctacctgtaaacatgagacaagggccacttagcaggatgaatgaagtttctagtgtgcgtgatgagtggcctgcaaactttggacggctggacaatatgaatggccctaacatttctggcagaatccctcaggttgaagctgagcatcatttgaattttgatgggcacctcctgcttcagcagatcagacgggagcaacagcaacatcaacagcgacaggagcaattgatggcccgtagtaatttagagttttctggtgcatttcccgggcaggtgtttgattctttgcaccaacaccgacagcctatgaatcaacagcttcctgatgtagagcatcttttgagagtccagtttgaacttgagcaacagcagcaacaccaactccaacaagagcagcaccaacggcagctacagcagcaacgacaagcccagtttttgcaacgacagcaacagcagca

SEQ ID NO: 190233 - DNA, 397 bp, Zea Mays
gcggcggccgggcgaccaagacttcgctacgccccggaaatgaggcccgtgtcacccttcgccacgctcctgaagccgagccctcgttcaccctttatttagccaggccggtcgaaggatagctggcgcgaaggcttcgaggatatcggtgaaggctacatgtcgatcagccagatatcggtccaccgggcgacgcgcccagaggcccacatgtcagcgtagcgtgcgagtgagtagtctagtacgatgttgtaattactccgttacaagaaatatcccctggatatagttggtggtcgggggtagtgtcgtactttggaccacctacccccgggcctataaatacccccgtcccgtagcgggatgggacacgcataacgagaagctacaattccca

SEQ ID NO: 190234 - DNA, 390 bp, Zea Mays
gtatacctgagttgcgtctttgcaacagaatccttgcgtctttgtgcacaaatcttggtacttgtcaggcatggttggtcttccaaagtttggaggccttagggtttgctccagatgctacgacttttggaattttcatttttcacagctgtagagaaatgaaactaaaatctgcacttgtatatttatcagagtgctttgctaggcatgttaaacctggagtgtgtgcctataatgctattttaggtggtgttttcagggaggggctatatagacatgcaaagtatatatttgaagacatgattgaaagagaagtaacacccaatctttcaacatataagataattcttgcagggtattgcaggtataggcggtttgatgatattgaac

SEQ ID NO: 190235 - DNA, 589 bp, Zea Mays
cctttgagtttccatctctgattgctgacactctactttatctttgagattgatgatgagagatctggagtcatgcaactgcagctcgcttgactccttttcatttgtcacgtaagtcagttgtgtttcaagtccagatatccgttctgacaactcgatgttttcctgttccagctccgatacatgcaactctagttcagctttgcagctctctagctcaactaagttcctctcaagaagtttattggttgaaacatgggaatctatactgctggaaagcacaaggatatctttccgcacttcatccagacatttagatgtgatgctgctttctttaagcgacgcggacaggcgttcctcaagctgactcttctctgcctgaaactcagaaataaaattctgcatctcaaccttggaacgacgaaggtcatcattttcctgtagctgcagttcaaacctagccttaagtgtatctgtctcaggttcagtatcctctagatctgctattctagcttggtacttccatgtcgcaccagattcacaaacttccagttcattagaatgtaaaccatttatctttcttctcagc

SEQ ID NO: 190236 - DNA, 430 bp, Zea Mays
taggcacctaagctataaaggtggccttagattgtactaggggatcatcaaaagaagttgtacctgtgggtgcggctgcttgatcaccctgccagaccttccgccatcaggtgacctaagtccccaaccgccacacaggataccctattccctgcgctcttccacccaatccaccttgatatcccacccttcgtggtgcactcctccccgtcctgcgcatcgcagccgggttcacaacaatttggtatcagattccaaagctgcagcgacatctatgtccgacagcgacgaagatcttgggaagatgactgactccgaaaagctggaccgtattctgggacagttggccacaatgaacaaccgcctggacgcccacgctcaacggctcgccctcctggaacaagaacctgttcaaccgacaggatcgccg

SEQ ID NO: 190237 - DNA, 455 bp, Zea Mays
aactattatatctacctagcctacgtgcgaacgatgtctctgctgacactgacagggatgtgcagcagcaaccgggtagcatggaggcgtacaatagaatggtggcgctgtaccagaagatgaaccaaacgcagcagagcgcgcccagcaacccgtccaagcagtgagcatgacgtacgtacagctgctttcttgtacattgtttgttcagttttgtttagatttttttggctcattttatcgcatttgttcagattctttcctctcaattgatgaggcctggaactgtgtaacagaggtgtgaaacccgtcgacgcggtacctgtagcatcatgtatttgttttggttcttgaccactctatccttgtatataaggagaccagacgttgcgcaaccgttgagcggagaccaactccagcagactctctctccgtatccgtatttaggacggcca

SEQ ID NO: 190238 - DNA, 511 bp, Zea Mays
taaaaaccttgctctagagtctagccattgttctttgcaaggatgccagccccaaagagtgttgtttcaacctccagcacaaccattcctcctgagatgttaaagctcaagtctctggccatttctagtctatgaaggatcccttttgccattgacaattgtcttgagatgtgcccaacttttttctggctccaggattgcaactgctgtgatagtctactcaacttatctgcaaaacgttggagagggcatgtagcttcatccgactgagaccatgaacttgccacctcatctatgaagccatcgagcaccaaaggacagtgatccgagatcaaagaagcagtgctttgcaataaacagtccagaaagatgtcctcccattcactggtatacaagaccctgtccagccgaaccaaggtcggggaagaccgtttattcgaccatgtaaagcgcctccctaacatcagtaattccataagctgaagctcattaataagcctccgaaaccgac

SEQ ID NO: 190239 - DNA, 441 bp, Zea Mays
tgtgaaatgtccattggatttaagcatcttgtattcttgtgatctcatatacatggatcgtgggtggtatcaggcattgtcaaccattgatacgttacatggtcctttactttctgcgaccatatttctgtttagcagccaagtgaaatcttcctggttaatttgttttatttggtgctgtagtttgtagttcattcttaagttctaacattgcgtaaaccacggagagatgtatccttagctagaggtagtgttataaagtttgtaacctatagtggcagacctgacataggtgttggaggacagcccagaccctaactgtctttgtcgtctccgacaagagattttggccgttacacgatgcctgctgtaaagtagaatgccattgcagttgttgcatcagaaagcagccatttaacgccaccgtaaagttagtgactg

SEQ ID NO: 190240 - DNA, 311 bp, Zea Mays
gaaaataatcagtacacttatccaaccaaatcttgggctgagagccatcaaacttaggaaaactaagtttgggtaaagtatgactgttcaatgtggttctcatggtcggcaagtcctatcgtgggtggactggatacctggtcgaggagggcgaggtggagactattctaacaagctagaatcagaagactgactaataccatcctctgacagctgctcggccatctgttggagactaagctgagccacgactcttccagtttctgcaatctacttgcccatcaactgttgaccagtggttacctgtgtaa

SEQ ID NO: 190241 - DNA, 737 bp, Zea Mays
cagatgggcaatgtgcaaaatgacaattttgaatcctcacaagagtcatctaagatggacaatgctattgagccaccctactttataccaggaaaaaatccagacatcgcatacaagtccaataaatggaataatacagtagcaaccaggtcaaaacctggtaatgatttgaacgaggcacttacacactttgttagagatgaactatcaagtgcccttaaaattgaagttggtcgcaaaatagggataacagatactaagcaacttgaaaggagtcttgcaaatgatgtagaacagattgctgctgaagtttctaaaactgttgtccttgactgtgagttgtattcagccatacatgtgcaaagaagtccaacaactatcaagtttggttcaacacatggaaaaaatgttgttgaagctgtgtcgactgcagttcagcaatctcagcatctgaggaatattcttcctgtcggtgtcatagttggtgtaactttggcatgtttgagaaattacttccatgttggtgtctctaagcatggtgaccatatgatagccactatgaagtcagatatttttggtgaggaagttattgttcaggacagcagcaaagagaatgttcaggatagtggaaaagcaaatacaaacgataataatattgaaaaaaccagtggggagaaccagcaggatatgacgaagtcacagggtcaagatatgatggtcggggctgtgacggctgc

SEQ ID NO: 190242 - DNA, 311 bp, Zea Mays
ggaggagaaagatggattgttagcactgtgcggtgatcatgatccttcagtttccccagtaatatccgttgcaatggggggtggagcggtatagcttttttcttcagacaatggaacaccgagtagttgtaggacatcagacagtttttgtttcctgtgtctggaaattagcatcagtaccaaatggaaatttgtactgagtggttttagtctggaatgaagtctctaactgagttcatttgattccttttctcttgggacatatttagcttgttgatgcactccttggtgaggttgatgctgccgtccat

SEQ ID NO: 190243 - DNA, 347 bp, Zea Mays
gtattgggctggcgacagatggtttcacgcctttcagtatgaccgcagtgtcttactcatgttggcctgtctttgccataccgtacaaccttccacttgaagattgcatgaaagatgagtttatgttcttaactctcatcatacctaggaaggatcatcccggcgtaaacctcaatgttatgcttgagccattgattgaggagttgaaagagctttgggaaggagtggaggcgtatgacagcttcatgaagcaaaaattcaaacttcgggcaacatatttgtggtccatacatgattatctagcgtatgggatctttgctgggtggagagtcagtggaaggctaggc

SEQ ID NO: 190244 - DNA, 293 bp, Zea Mays
tcaccatgggatgtatgctacgatcccgcagaggaggccgtgtatattgcaatggctgggcaacaccagatctggaagcacaatttacatgatggagtaaccaaagttattagcggtgatggctatgagaggaatctgaatggctcaaggtaacagattctggcattatctgtcaggaaagttctaaatgtgttgttttaattggtcttacagcgcagtaatgtttatgaagatggttaatgacggtttctatctgatgagtggctaacgatatttttggcgatatttccttg

SEQ ID NO: 190245 - DNA, 628 bp, Zea Mays
gggtcatgtcgggaggagctcaagaggattaagcgtgctgtacaacttgcagtctttgctgcttatcacctttctcttgaaacatcattctttgcagatgaaggtgcaacacttcctaaattgccctcgagacatgtggtagttgatccagatacaaggaattgtacaaatagcaattcagctgcattgaccaatgttggtatgcctcatggacgtaaatcagaacatgacaaactctcacagactgctatggtcaacattatgtttgaaaatacccctgtgtcacctagttcattgccatcgaatggagaaggccacatgtttgtgggtgcatgtcagcataaagaaactgaatattctgttgatcataagaactcttgtgaacattgtgtatcccgtgcaactggttcatgcaacgggtatgaaacatctttatgttcatcagataatgattcaatgacacagaatcaaaatttgcagaactctgcaaagcttacatcaaatgctcaccaatatgagtttccagcaaaggaatgtcaacaagtagaccactgggatagacaaccacatgatgatcaatcagtagatcagcgggacctgaataaattttctggtgaatactttcctg

SEQ ID NO: 190246 - DNA, 420 bp, Zea Mays
ttcttttcttatgtttttccctcagctcgcgtcgattgttggctagctagctagaatacggttccctgcttcgaatccccatcataatacaggcctctgaatatgactttgatcggttgactgataggggtcactccaagagcagatgaacctgtctttcctgccccccattatccatagtgtttcccttgcaaatttttgagggtgcgtgcgtcatgagaggccattgcagttgaacaaatccatttgaagttcacacatcgaaccccagagatgagcagctaacttactccaacaggaatcaaagcaacaagagcccaatcattattctcatttctatatttataaaaattatttgaagcatggtatggtatgcatgccgcgcgcgagagcagctgatgaggaattgaaaaaaaaata

SEQ ID NO: 190247 - DNA, 435 bp, Zea Mays
cacagtcaccgacgcgctgtctcgccgtgacagcgaggagttggcgatgcacgcaatctccacgcccacgttcaacttctacgatgccctccggcgtgagatcgagactacgccggagctcgcggcgttgcgccaggcgatcctcgacggccaccacgatgacacatggcgcatccaagatggactgatcctgcaccacgggaagctccatgtctcgccatcttccaacctgatcccggtgatcctggagctggctcacacgtcgggtcatgaaggcatccagaagactctgcaccgactccggaacgacttcagcgtcgaccgtgatcgccacctcgtccacgactacgttcgcacatgcactgtttgccagcgcaacaagaccgaggcgcttcatccggcgggtctgcttcagcctctccccgtcccgtcgcg

SEQ ID NO: 190248 - DNA, 551 bp, Zea Mays
attcattaaggactgaaaggtggagggtgcgttcgtcaacccaaagggcatgacgaggaactcgaatttcccgtggtgtgtgcggaaggctgtcttgctgatgtttcccaaactcatgcgaacttgatgatatccgctgcggaggtcaagcttggtgaagaacctcgcaccgcggagtccatccaacagctcgtctactactggaatgggaaaggagtcctttaccgtcttgctgttgcgctcgcggtagtcaatgcagaacctccacgacccatctgctttccgtaccaggaggaccggggaggaatacgcagatgaacactcccggatgatgccttgctgcagcatagcctcgcattgcttcttgatctcatccttcagcagctgcgggtaacgatacggtttcaccgcaattggtgttgtaccctagaggagtgtgatgcgatgatcatggcgccgaggaggtgggaggctgcgcggttcctcaaatatgtcggtgaaggagtcgagtagtgttgcaaggagatccctagtgatggccagcacagaga

SEQ ID NO: 190249 - DNA, 355 bp, Zea Mays
gttgggattgggccaagcgtactcgttcgttatgatttgatcgggatcattgatatgtagatgagtggtcaggattagaccgtcgcccttctgtgtgtctgaacgccgtggatcgttgatttgtggatctagggctcagaatcgaagcaggatacccttcgcgtaatcgaatccaagccaattgtttgcaattgaacggttgcgggttgatctcggtcatattaaatctaatccgttgatgggggatctgagggtatgcgtagcgtaccgattcagtgtggtggctgatctaatctgggtcgtccagtgaggatccgatggccagatttctcccgtaccccttcggtctcgcgac

SEQ ID NO: 190250 - DNA, 417 bp, Zea Mays
gcgtaatatatttccctccaatattatttctttggtaggggaaattaattaaatgcgtactaaaaaggtagaaaaatagtggaagaaaatatgtgacgctcgggctatggtcggtcgagttgtccacttgtccgtagtgtgactgtgatgttggcgttggaggcttggaggcggtgcaaacagcgagagggaagacgacgacgatgtcaccgacgtatagtttgtgtgagacgtcgtgtggtagatatctagggttttacataatgtctaccgtcgtattttccactatattatactgcaggtgataggtttttgaattaccttatatcaagagatagctgcatatatatacgatgtaataatgatgtatgcaagtgtgtgacttaattttccatatatacatacagaaacttgtgt

SEQ ID NO: 190251 - DNA, 3963 bp, Zea Mays
gttttttcctgaattttcacgcgaatatgcccctaagaccctgtccacttgcccttgccttctcttgcacagctccccgcctggcgcctgccgcctgttgaccggacgcgtgcgtccgtagcgtggcgcacgtacggagtactcgcagcgaccccacccgaaacgagccaaaaagaaccacaccgcacaagtgccaagtgccaacaccgccggaaaccacctcgtgctggcccatcccgacatcccgtcccgtgctcccctcccctcctctcgaccacctcctcgtcgtcttcctcgccccctccgccacctccgccccggcctctccgctcccacccccgcggaaaccctaactccctcttggcacaggaggcctatgacggagattcgccgcgcgcaaggagggagtggattcgcgactgcgcagccgctgccgtcgtcctagggcgcgtcgagcactgccaccccattgacgggcccatccccacgacatccgccatgttcgagggccacgtatgatctcttacccttcctccatgttttcccattccttcagcacctttgatcgtgaccatttttgatgcgcgatatggaggaaggccgcgtgattgcctagtggaccgatgtgttggtttagtcgtggcgttgttctgtccgggttaccaaatctctgtgcagatcatgttcgtatttggggatagtttggagggttagaattcggtgcgttgatgattgacccttggtcgtttgcgttatgatcttcccttgaggaagaattgcatgttgatttatggaggagcctctaaacgggcaagttgtggacttttggtgcttatgtatacgtttgttcacaattttatagttcgactgaattccaactattgaggaatctgtttactttggttgagcaaaatgccttatttcatttggcctacgatcatttaagtagctcatgacacattgtctgtgatggttgcatatggtgatctggcagcaatgtgaaagttcatagctgcggcatttctttctttttaaattgaaatctcctagcccctgttacctcccgacaatatgcacttgttgccctttaaatttggatattcttctttcgtgattgcatcttattctcaccagtgaatgcagttttgagcatccacactattatggtgagagctatgttttgtgccatcctactgcactgcttgggatttcattgtgtcttttcttttgcgtcattatgtaagaaacaatcatgctggtaaatagtggagtcgtgagtaattcatgaggttttacagcaactttgctcattcatggcaatagacacgtaccacttaaatggtgaatcatgttatgcactctttcgctatctataatttcatatcgaatttctattttttgttttcctttttttgactctttcatcattcatcatttgtgttaagttctgagccatgacatagttgtaacttttttctacaggtgctgtatctgctacgcaaatatttgggtgaatatgttgaagggctttctgttgaagctctcagaataagtgtatggaaaggtatatttctttcataataatgttcttttctattgcttaaccttcatctcctgcaatccgattccaattatttcatgttgttatatatgctttctattctgctgttgtttgaccaagcacactctttccttatttagacaaaaaaatatcaaatctcaactttattgtattgtttatttgatactaccctgaagttagatgaagtgaacaagttgtaacttctttgttgtatgaagtgggaatgtgggataggtgttataaagcttgccgattacgtgcatacagagaaacagtcttattcaggaactcgaggattgcctcccacattttactcatgtacatcccttgcttggctctaagttgagtcatataatggattactgctctcctgcgctttcgaaaaaaaaataatggattactggattctcaggcctgatttggccatgcagtgtctctgtcactcttgcatgtatgctcatggatcctgtttctagagatgaaatacccaatggtgttctatctccatcttgcttttttaaccgtaattttgagaaatcaccaaaatgttttccctctaacagtaattgtagagcttagtaagatttacaactttgtagctttaaagttttttgatttgaaattatttagagtgccaaaaattatttttaaatccttgatttcaaaattcaaaatttagaattttgaaacgaccatggatgatgatatggtctatgcaaaagttgcagttatcaatgatgtataacttcgtagtcgataatttttttatctgtaatcatttcatttagagtcctaaatatttgttttgttttcttagatttggaaattcaatttttagaaattttaaatggcttcagtttagccatagaatagtatagatcgtgtcaacatctgaagctgtttaaaaattctaaattttgaaatctaagaaaagaaaacgaagatttagaatcaatttaagaaaacaaaaatgtatatttagaattccaaatgacttaaggtaaaaaatttatgaactgcaaaattatactaccacttttgtatggaccacatctaaggctgtttgaaaattctaaattttgatttccaaaatctgaaaattttaaaagattttttgcattataaataatttcaaataaaaacttgtcaactaagaagttgtacatctcattgagctctagcatttttgatatataattccatctttattcgacttcattcaaaagttatgaatctttttagataataacaattaagggttgcttgcgcgttcgagaaaaaaaagggttgtggtataatagtcatgcacataacggtcaactatattttctcactctcatccacttcttaaaattatcattttagcagtcaaagtgtcgaagagtcaattgctatggttgaagagcgtcctctagcaaagacaacattgagtaatgttcataagcgaacactaacattgaacgatatcgtatatcaaatttagcctaatatttaccacttgaaagtttcagcagtaacagtactgctcatgtagattttacattttgtaatttgtgtactaaattacctggccttcagcttcaaaaaatattacctggctttcattttcttctgttaaggtgacgttgttctaaaagacttaaaacttaaggctgaagccctgaattctctcgggtttccagtgacagtgaaagctgggtttgttggcaccataacattaaaggtacatttcttattgcaccatatatgattgtttctgttttcagttttgtggttgcattcttacatcacaatatctaacattgtgtaaacagttgcttactaaagctgttatcatgtagcttgtttctgagtgagttgtattttgaaagggtagtttacttctttcagcatggcaatatattatcatgaggaatactactatcatattattcgttacatgtatgcacaagatccatctggataagaatcacttaaatatgcattcctctaatacgcataccgccgccagcagtcaccatttatcttattttatcccattgtgagcagttcagcacttcttgttgcctgttggcctttgttgtctagttttgtttgtggatttgaaatgctaatatttgatgctctgataggtcccatggaagtgccttggtaaagaaccagttattgtcctcattgatcgtctatttgttcttgctcatcctgctcctgatggacagactctcaaggtatttatttattaatagtattttagatcgaagtgggaacaatgtttctatgaatgacactatttcttctggtttctgattatatttttgtatctcaccgttcttttcaatttcaggaagaagatagacaaaaactttttgaagccaagcttc

SEQ ID NO: 190252 - DNA, 354 bp, Zea Mays
tgttcgggtcacttcgctagaggaggttccccaatttattgttttttcggaggccgagggttttgctggggattcctggacggtgcaatgtgaaattatccagcagcttatgcttggcggtcaggctcaggatgaggaccccatccctccgccacctgaggatggtcatcagctccccctggccttcttcgggctgggccaacctttgcccccggctgggcttgacctaaactttcctccggggcctgagggtggagtgttgccggctcagcaggatgacttggggcatggagagtgggatcagtggattgtgaatgagcagcccattcagcaagaccctcaaccccccttgcc

SEQ ID NO: 190253 - DNA, 454 bp, Zea Mays
aaattgggctggagcctggaggtcaccacacctatttgcaacgtgttccaagcgtgtcactactggtatcaccaaagctctcgtgagggcatagatagttgaactacgtttagaagatgatctacagaatagcttaatgacttttgacatggatagtatagctaccatgtgatgatgtgaatggggttttcttcacgttagagatgtccgacacgtttgtgatctttgcattcttcaactcatgcattcatgtccaaatgctacctcgtatgtcgttgtcactgccagcataggctacgacctgtcaccttaattaggtctctctagttctgtcagggacaggcaaaccttctcccaggacccttaatcgctagttgagacaaattaatttatttccacgtcaatcttctccagttcccaaggaaatttgagtctctctatggaatgcgtgatc

SEQ ID NO: 190254 - DNA, 979 bp, Zea Mays
taccgtaatctaccaagaacagttaatccttcagtttctcatgttcagcaccaaaaaagttatacaccacaaggcaatgctaaggtctctgaacagcttgaaagaaataactcagacggattgatgcaaagtgcaagggataagagagtgccaaatggtctctttgtcaatgacagaaatgggcagaacaggtccagatttgcaaggacccgatcaagtcctgaactcacagactcgtctactgaaggatttcgtggtaggcggactaatgcagttggtatggaaaaatcttttggtgttgattacagcagaagaaacatcttgattccagaagtgtctagcaaccacagcactaagtcttcacaagatgaatcagtgtcttccatgaatggttcatctcaccctagtgcattggcagcttctgactcaaatagcgtttcaagcagctttcgtgatgataatggttttgtgatgaatgaagaactcccttctgtttctgaatcatcggatatgcaccacgatgaacaagttctggctaatttaatggaatccatgaagttgcatggattcaacggacagattcaattgccaatgcaaataccttctcatttgtctgtagcgcatccccctttactggctccaacaacttattcacaaaagcatttggctggggttccaccagctaacttaattgggacaccatggttgcccaatatgcagttcctgcatggatttgttccacctatggcccattacatacacaatccaaattttgcaccaaacatcgaggatggtactgagactgaaaaacctaatacatcagatgtgaatcatgatgctggcaaaacttggcaagagtatggtgttgggttttctagacattttgatcctgaagcaagagatcctcacttctatggtattgatggcaaggagcattcctctttgcctaatggtgtaccaggtgctcccttggaaaggc

SEQ ID NO: 190255 - DNA, 407 bp, Zea Mays
gccaacactgtcaaggatctcaaacatatactgacgctgagagagacctgagcctgtgtgctggacttgcatacccagaaaatgatgatgagtgccttaatccttcatggagaactcttgctaatgagcagcaatgatgcgtccgagtaagtccgagtaactcgtagagggaggctgtcagcacaatgtcgttgacacaaagtagaagataggcagtatctactccatgatggtagacgaaaaggacgtgtttaacttggcttcaacaaaaatgaactgtagaaggtgggaggcgaacttgctgtatcatgcatggggtgcctgtttcagtccattgagagaatgtttgaggcaacacaagtaatcaggatgactggagtcctcaaatccagaaggtttaacacaat

SEQ ID NO: 190256 - DNA, 274 bp, Zea Mays
tgcttcggcttcaactatctcattttgcttttggatcatgacttggcacatccttgttgtttgtcccttatcctcccacagaataagcagaacaatctcctaggttgagtgttgaaccttcctctgaagcttcttcctcctctgcctcttggagttggtggcctgtaagaggtttgctgcattcctgaagattgtgagctttgttggatgccttaagtgtggtttgccctgtcatcatttgtgctgggattgtggattgttctaacttgtctgg

SEQ ID NO: 190257 - DNA, 1097 bp, Zea Mays
gggacagaagctgcaaagaacaaagctgcatacacaagagaagggaggagacaactttttgctcttcttcagggagctaggggatcaactggtaaccttccttttccttgagttattttcatgtttactttaatggggccctcagggaaatgtgaaccttggttcgtacaggacaaaacaatacatcatatcatgctacttatgcaacactgatctaatgtcaatccttggtttacttgccacaccatacttatggtatatttgggtaaaaaatagatgtttcaagcagtctgtgaatcctaagtacatcttggtttactctggtgctacagctgctgttttaaaggagaaactattagccttgggatcatctggaatattagcagagcatcaacttcaggcacaactacaagagcagcacttgaaggggtaaaattcagtgctacctacatagatcataaaaactttttatttgtctgaattcagtgttttgggggttcaataatgattctatgtagctataattttttattggtttcatgtcatattgattgttgtattgatttcacctgttttcttattgtcagccagagccagctgactatttcagatgttgcaaggaaggcattccttcacagtgtatgtgacaattctcttgacagtggcttcatagtactttttgccagttttctttagtagctcaacctgaactgttactgcttccacacatttattgtacctgtctaggttacaaaatgatgtaagacctatttctgtttcctgtagtctcagtgctgcagaaaacaaataaattaggaatgcttgacaatgaggccttccaaagaatcttgtgcatactttagtgctgccatcctgccatgtcacccgtgttgccacattcaagcacaggctttcctaatgtggtttgcactgagtcgagtccttatccattggttgattctactagcttagtcaacaattgtgtttgtagaccatttctattttcttatatatatattatctgtgcagcatttcatggaagggcatgctcaaagcggtccaatccctcgcctacctcttgttacaatttcagattc

SEQ ID NO: 190258 - DNA, 437 bp, Zea Mays
caaaattgcatgcaagaattgaggagctagagcatatggaacaagaacataagaagatgcaaagacaacttgatgcatacaaagagatgagggacaacatgttaagagatgctcactgcctaaaagatgaaacttcaaagaaggaaagcaccctgcaggtgaaattgagggaggcattaagtgctcttgatgaagcaaactgtgcccttgctgacaggaagcgtgagctgagccagttagaaatcagtctccatcaccaaaaggaagcgattgagcatttggaaaaactgaaagttgatatggaagctgaagccaagagctatatgtgtgacaaccgtatcctgaagagagatctggatactgctcttactgccaaagtggaagctgaggagttgcttaggcaagaaaaaatgcagttaacatgtgctcttgatgag

SEQ ID NO: 190259 - DNA, 377 bp, Zea Mays
cgccgatggccagagtttgaggagaaggttcgcgggtgatggccgacaaaggaataggaggtctggtgatgcaaggaataaatcatttgaaaggaatcaggggcctcagagggacttggcgaaggatgagaatcagaaggatgttacaggctttgtggataaaagagcaactggtcatgtaaaaagtagcaatcgcaggcaaggggaggttgaagactatgcacagagaagaataattcgtggtggtacaagaggaaatggagacaatgggcagttctcatcacctgtgaaggctaaagatactaggggtagtatgtctgttcataggttggtgacgaacaaacagactcagtcagttgcagggaacgatttacaag

SEQ ID NO: 190260 - DNA, 1533 bp, Zea Mays
actcttattgaactgattactcgacattttcctggtaaatccacttggtattatgtttatcgtctttggtcaaaagtaggcaaagtccagtttgtcattgtattgcacaaataagttcatcagctgatagtctccttttgtcccctttctgcccatatgctatagcttgctatctgatattagtttcctgtattgggaagcacagcggtgttataaattattggtccaaaaaaatatttcgttcatttgtcaaatggttatggtggtccctgttggctgtaggcacctacagtgaaagtgaaactggaatggcccatccacccactactactgtttgtctgcatatggatttatgttctgcctgctactttggatctgagagtcaggaaacagtgatgattgatgaactggtgcctcatctaggcatatgaacttcgtatgagctgggccattcaaaaccagatgattgtgaatatttgatgcttacacttacacccttacattttttcatttctcgtgcaaaacgttagtggttttcattttttagcagttggccaagaaatctgttcacatgatttcacttgaagttaacatttattctcggtgttggtgctttcgttggatctccattgatttgagacattgaacatggagtttatttcctcaaagaagaacatgaaactgttcccgtagtgtttaactgattatacttgttcgacaaatatgtccagacatgagctaatcatctgaaattccagtgatttaggagtaattgatttcaggcttccagcacattattctatcatatatggacatatttgattgcacagataggttcactgacaaacatgtacaaatcttaactattcaaccggttagtctgaattcagaaacaaggaaggatgctagttttacccctgatctggccatagccaacttcagaatatttcacaattcgttcttcgatcattgaatttaaattgtaccttgcgctcttgcagggaattttagcatgtattgaatcttttgttaataggatagcgttgtgcaacttgatggtaccttttgctaacgttctatgaacacgtacatctgcatgcattcaaaaccaggttatattttttcttgttttgtactgtcctgagtcatgacatgactcatgaccaagtgtacatccatccaccaaatagtattttaagtttccattttggcaggtttccgggaccattcactctacaaggggcaccaggttttcctgtacaagagagcccagatctttgttgctgatttgtggggcgccttcaagggacaaaactatggcgagttccacgatatcaattccatcaccatatttgctgactacattgttccagcggtcctgagggagcttggagtacttaaatatggctcgaatctatcttgctccatcgactcgaacagtgagatagtgcctggaagcgaggaggaagtggagatacgcgcgtgctccatctatgcagtggagaagatgagggacctgatcagtaagaagtt

SEQ ID NO: 190261 - DNA, 489 bp, Zea Mays
taacttctgctgaagccctgaaagggcgtaaacccttatttgttgaagattcattaacattatgttatggtgggcgtccagtacaggcgccgcaacaaggctggtagtcctaattagggggctgaaccggcttaggctaagtgggctgttagcaagggcccttttagcagtagaataaagaggctaaaggccttttaggttaatctgtaataggaggttatttataccttaattgcaataaaatgagaacaggctgtgatcaacatattgttgatcagccgccgccctgccctaatttctcctcccctgctgtcttctcccaggccgtgagaaccacggcctcctctcatcgccaaccgctcaaggagcggccacctaccacacacaactacaacctaaggagaagagggcataccacattaactaatggctatattccgaacatctcaagtacttcatccaccttatgtcccaattgaatcatatctg

SEQ ID NO: 190262 - DNA, 449 bp, Zea Mays
tgaaataaaacaccacatattaatatgccacattgtttctcaataaaacaaagaccatggaaaatttagccaaattgagtgagagaactgtccaaacataggttaaagttgtaaggcaccttttttccaccatacagttgctaaaaagttggaatataaagaattctaatcaatagatcaccttttaaaccacaaatgatgtttccatgatattgagggcattgtattcacatgagagggtattagagtacaactagtggatgaagacattgttgggctagctactgaccttttgtgataccaggtttcctataatcctctctattcaaggcatacctaggtggtgtttatgtccactcaagtaaaacaccgcacatcattatgccacatcgtttctcaaaataaaataaaataaagaccatgggaaatttagaaaaattgcgtgagag

SEQ ID NO: 190263 - DNA, 276 bp, Zea Mays
gatagggagtgggtaagaatcacacgatgcagttacctccacctttctctcttctccttttgcgggcatattcttcacctccgcctgcctagatccttctttctttggcccggcttagcttccagtctcaccaacagttctgacctcggagcatctatcaatcggcccactccactctctggtaaggcaaccagccacgccacggcaccctttttgttcgagaatctgcttgcccgcgtcgccgtcgtggctttgttcctcctcgcgactgattcg

SEQ ID NO: 190264 - DNA, 396 bp, Zea Mays
atttgaccctaagtggtccagcctttagggccaggtcttggagggctgaagccccactaccccagccatgcaccacatttgctcttcagtaaccactgaaaacactacactttgaacaccagactagggaattaaaaccttttgtcttctctttgggcaaagttctagctgctcagcaccaccaggaattaaagtaactatcaacattgggaagtctcacaacagcaattagtctatgaactatgaagcacaatactccagacctccctggcaaaaacacaagaaactagaacatggctgatattttccatatgttgatcacaaagagggtaagcatcatggtgtggaagccctcttttgtccaagtgatcagagatccaacagcggttattgatg

SEQ ID NO: 190265 - DNA, 623 bp, Zea Mays
ctcctcgtcagtagccttctatggaatcataggcgatgtaggagcagtaggacaagcaggaattcgtgccattaaaatgcaccagacatcgtagaactggaacaccactagacgaaaaggtcaaagacggggccataacaacagtcgacggtgagagtggagcagcgacggccgacgaaaaggggtcacaagctgcaatttttttactgaaacctaataaaaactgttagaacgaaatccgcaaaaccggatctgaccaaatccggatcgggaagaagggctgctggtgcaggcagaatacaacaacacacgagcagcgggcgccatcgaaaaatgcacgtgccactgtagcaggtgtataaggatgaccgagggcaataaaagtgtgcatatttagagaatcgatcaacaactgttaatatgccggatttgccatggacttttggaagaccctcgatgaagtttattgaaatatctatccatatttgaagtggcacatccaagggttgaagaagacctgctgggtgcaatgcttcggttttgttctgacagattgaacaggaacaaacccaatcctttactagtgccctatccttgtgaacaaagaagtctgctctcaagcg

SEQ ID NO: 190266 - DNA, 431 bp, Zea Mays
agaaaatcacaaacttcattttcagcttatctttctggcattgggaagaatcaggtggatgaagttgctcttgtaaggaaagtacttgatttcagttttcataatgtcaagggattgctgcaactgattcgtcattcgttggagtctatcaaccatgaaagtggtaaatgatctaccaagtataggtatcttggaaaagagattaatgatgggaaggttgctttggcaactgtgctatacattggtacctcctccaatctggatgtagaagtaaacaagtttagagagtaatcagttgtgaatggaaagggttcacattgccttctcttggttgcatggaagtattatatgtgggtgatacaaatttcaccagcggcaaactgctaaaacgggtttctttaccaagtcatattgctacttttgttgcccgg

SEQ ID NO: 190267 - DNA, 297 bp, Zea Mays
acggcccagatgtgcggataacggttcgcacggttcgtggaactagagccgtcaatctgagatctagtggccagctcgccccacaccctcagcacaccgctgacccgtgggtcctgcgtgtcagtgcctcaacccaccctgagtccacctgtcaggtgctcgcgtccacgctcctgcccgccagatctaatcctggtcgttgaccgtggatctgacggacgaggaaccacgataccccttcgcatggtctttttgttaaagaaaccatcgactttctaagattcaacatgttgtccc

SEQ ID NO: 190268 - DNA, 340 bp, Zea Mays
aggatgcgccggtggagaaaggtcagagtgtgtagaggaaccccgagctatcacactgggcgagggggtcctggtggtcagatccttcatagagaaaccaaaagggtcaaactcaatggaacaagaattgtcggtggtgaaacgaggatcagaaagaagatcgaggagggatgggaggaatggggggtgaggagcgggataacgtgcccgcggtggaggtggtgtggtaggacgcaccggaatcgaccacccagtcggagggaggtggtgtcatcgccatggtgctgaaagtggaggcgagggaggttggatcccatcctcaagccagcggggttcaagg

SEQ ID NO: 190269 - DNA, 451 bp, Zea Mays
actccgtcgtgtatgggtgcgccagcaggatgaagtggcagtacttgctgaaacggtcgacgacagtgagaatgaccttcttgccttgcacgcggggcagagcttcgatgaagtctatgccgatgtccgaccacaccccctctgggatcggcaggggctataggagactagccggtcgcaggtgatctgaattgtatgtttggcacgtgtcgcacgccctgacgaattcctgcacaacacgacgtatgttgtgaaaaatgaaagtcgcgccgtagtcgatgcagggtgcggtggatgccttcgtggccgtcgtcgtgtacagcggccacgatctcccgtagtagtggggaagtggctgggatatagagacgcccctccatggcgaccatcccctcgacgatggaccacggtgctgcgcgcgtgcctgcgtggatctcctcgtagatggctg

SEQ ID NO: 190270 - DNA, 417 bp, Zea Mays
catgagatcaaaatagattgttgagcttttagagacatgagagaaccaaggacaacagcgaaatccattaatccacatggatatgccatttaaagataaggttggcaaaaacaacgtcatgatgcctagagaaagagcatcggaaagactagaaatgagagattagattgatcgacatccgatacttgagatgggttatagcggataaccagataatagggcagaatcataggggatcccgagattcggatgataaagccaacatgattcacaagaaagaggattaccatatctaggcaaaaggagaggtaggcaaacatgatcagctaggatgactaacagaaatgctatgacattttaggagcaaggatttatggaaagaaacatggccttgatagggtttgcgcaactagacac

SEQ ID NO: 190271 - DNA, 300 bp, Zea Mays
tatttatcttctgtatgaacaacagccttctacggaagatgtacaaggtatcatatttacaaacttacactgttttacatgcaggctaagcaaaactgctgcacaaaaaggaaacagaatttgactggacgtctgaatatcttcccttcagtctgagctccagaccagagtgcaaaaagaaacattgaaccaatggaaaaaatgaataaaagaacaatcagtaactacagtgcatgtctgaagattctcatgggcgtgggcatcttcctccaggattgttgggatcaaatgtgcagccag

SEQ ID NO: 190272 - DNA, 451 bp, Zea Mays
gctgtagaggacacacccaacactccaatctcaggggatggtggtgggggtggaggtcaccacggcgagatggatcaatggattagggggaacggagatctgaggagaaaaccaaaacactgccgagtaggaatacctgcgagaggaaatgcacaggggtcagcaagatctcgatgacggaggatgaagaagaagaacagaggatccacgtaagcaccggagtctgggtcgaagcacaccgacggcgacagtgcacggctatgccatcggcaacaactggcgaaagaaagaaatgaagaacaacccgagtcaacaacgggagaaggtgctaatggatttgaagtcaagctactaacgagaaatctcacgcgaaacggaggcagaggcacgaaggggaaccaaaagttgttaatggcgatcagcaaaagctgttgccatatctttaaagagc

SEQ ID NO: 190273 - DNA, 413 bp, Zea Mays
cggagagaggcgaggaaggaagaaatcgacgaggggattggattggactgcgactgttgttgattctctcttgcacgcggcggtcctcctccagagtccagacccaatcccaaatccctaatcctacagagggatcccaaatccggcgtccagtccagtccaacctgtagtagatatccccgccggcttggccgtccgtccttgccccaattccgattgaccggagaggagttggatcagggagcattggaatggccgccgccgcataggatggagctggattcctccggccgctgctcggttgctcccgtgaatgctgtgatcgtcgcgattggaggtggaggcgaaggttctcttcagtaagagcttcaagagctgtgatctagctgattgggtatggaggagagtggcgg

SEQ ID NO: 190274 - DNA, 313 bp, Zea Mays
gtaggggctatagaggggaagggtgcgccactagtgaggagagatgcagcgacatcagcatgctgggcaggtgttcatggcggcgtggtgtccgcttgcagcgtagagcatgtgggtgggccgcggtgagggaggaggcacgtcgggggtgccatcgtgggtcaataaaacagtaaaggagggaacatagatggtcgcgttggccacgtagcggcaaggagatggtgatgtgagcagcagatgacaaggttgcaggggagggcgtgttggtcacgtctgttgtaagggagtgggctgcatgggggcatggaat

SEQ ID NO: 190275 - DNA, 369 bp, Zea Mays
cacaactacaaggtgacctagatgacacgattgtagcgcccggtcaaaagatctccgtcatcaggatggcaagatgatcgacgacgtcaacctggattacatcagatgggtcgcgctcgagcaggtccttagcttcctcatgacatccatgactcaagaagtcatgggccagcttgccatctactaaacaccctatgaggtgtggtcaaaattgcagaagacctacgtgttgcagttaagagcctgaaccgtgaacacatggattaccctgacaactacaagaaaaggtaatgtgacaatggctgaatacaaagccatgatgaaatctcttgcagatgagatgacatccacaaagaagactgttcatga

SEQ ID NO: 190276 - DNA, 543 bp, Zea Mays
tgttgggaaggctgctatagatggacaaagcatcagttctggtgatcatgttaacaatgctatggtggttctccgaaagctttttaagaatgcttctgtaccagatccagttgcatctgttgtgacaaattggggacttgatccctttagtagaggtgcttactcttatgttgcagttggagcatcagggcgagattatgatattcttggaaggccagttgacaattgcttattctttgcgggtgaagcaacatgcaaagagcatccagatactgttggtggtgccattttgagtggtttgcgagaagctgttcgcatcgttgacttactgaacactggcagtgactatattgccgaggtagaaacgctacagacataccaaatgcagacagacagtgaaagaaatgaagtcaaggacatgtcaaatagacttgaagcatgtgaactttcgactgctctaagtaagaactcatctgatgcaatgtatccaattgttagcaaggaatctttgctgcaagaaatgttcttcagtgcaaagacaac

SEQ ID NO: 190277 - DNA, 505 bp, Zea Mays
ctcgccgccaccgctctgtatctggctatctgccctgctcagcgctcatgctcaccactccagtgctccagctcgttgtccctttgctgccactgtccctgctctcatccttctccccttccctgctgatctgctcacaatctcctctaattttggttatgatgatgaagcaacaaacaatagtgctggctatggtgatgagcaagacaaagacaagaatgatggtggtatagatgatttggatgatgattattgagatatgatagagggagattgagtaacacttgtgtgcttacagttgtggacattcattccactttagttgcttttgtgctatgtttgtgcctttgtggttgtggacattgcattccactttagtcgcttttgtgctatgcttgtgattgtggactattacacattttattccgcttttttcgtggttgtcacttgctagttgctattagttgaacacttgaacttgtgttattgtggatttgtggtagtg

SEQ ID NO: 190278 - DNA, 691 bp, Zea Mays
gtttaattagaatattataatgtcttaattatgttattgtctttttagtctttgtaaaatgaagctgtgaaacgaaacgtcgatttattaaaaaagttgaaagtcttaaaattgagtttcaacatgtaagggacgaccgtgacagtttactgtcttatattggaacatgcaaaaaaaatggctgaaaaatatgtcattgaattagactgcgccataaaaaatgtctctaccattaaggtatgactatatgtttagataagtgatcgttatctagataaattaaactggctaacacgttttcaatgacatcgaaaacatgttggtattagagaaagatcataagaacattggaaactaagcttacaactgtgaaaatattaaatgtatgtacatacctatttttttattagtcattacatgtaatgaactaatgatgatctgttatatctcaataaatataagtttatctgtatgtttcttaacatatgatgtgttcacattgtgtaaaaattttttacataaatgtttaatatcttcaaccttattttacctgcacagatgtctaatatgacgtcatcagaaatcataactgagtataaggacatgaaaaattgctggctatttttcagtcgtgccttgaagaatctgaacagacaattttgcatcgagagaatttacgcaaaaagttgca

SEQ ID NO: 190279 - DNA, 522 bp, Zea Mays
atcacttggcagaaatttcatttggtcttcaagagttacctgaatcacatggacaaaacaataaggtttcttatggtgaaacagtctttcggcaccataatcattcaaatgaacatgttgacaataactctacggccactgagctttttagtacaaattatccagataatttcattagaccaaataaaacctggggtaggtctgaagaaggtccttccttcaatgatgcttcaagtgtatgtagatacacaaattttacgggccatgccgatttgacagttccagaaagagcatcaatctctaataatcaaagtgttagcaacattaatggttttttgggagtgtctatgtttagtgatcagccaggaagtaaccatgttatcagacctactgtctttggaacaaataatacggtggaaggaagagatgtcaacctcaattcatgtgtaaatacaatatcttttcctattgctaatgcaaataatgaaacatcagctggcctgaatgaagctaatcggttat

SEQ ID NO: 190280 - DNA, 691 bp, Zea Mays
ggacttttgttttcatgtacgtgtccacggggacaaacatgcaaagaccgcgagaacaaagtggtggaagcttagaggggaagcggtacaaacgtttaaggatagtatgctaggcaaggggccttgggaaggagaagatgcagacgacatgtggttaaagatggcaacatgtgttcggaaggtggcttcagaagtgtttggtgtgagtagaggcaaacaggaagcgaaagacacctggtggtggaacgacgaggtgcaaagggttattaaggaaaatgagtgtttcaagtgcctccaccttgacaagagtgcaaccaacatcgagggctataaaatagcaaagagggttgcaagtgagctgtgagtgtagcaaatggacagacgtatgatgacctttatcaggtgctagacacgaaggagggagagaaggacatgtttaggatggctaggacccaggagaggaagacaatggacatcaaccaaatcaaatgcatcaaggatgagacaaatcaacttctggtgaaggataatgagatcaaggacatatggcgagagtatttcgacaagttgtttaatggggagaatgaaggttctatccttgagttggacgactcatttgatgatagcaactgacactgtgtgaggagaattcaggaggtggagatcgtgaatgctttgaagaggataaagg

SEQ ID NO: 190281 - DNA, 524 bp, Zea Mays
gttttatttaattcctggactgggccattattattagaaagtgcaggggctcggcataaattttcccaagactcatcctacagctgcatggacggcgggttgttttaacacaagtccagggtctcttacacaaagatacaaggtcgaaggggtatggggacactacgaccatccgatcggaaatcggccgccaggattagaccgtgattcacacagttgggcacgtcaagctcaccatgggattcaaatcgaatggttccggttttatggagccctatctaattttgcccctccgattagatctcaacggtcgagacccacccaagggaacgggtacaccctttaatcccgtgcgttgctggtagatcggatggtgcacggtgtctagacgaaggggggtatggtcacatcaaatccggaccgcccatctaaatccaacagcctagaggccaccatctttcctctacccttttcctctaatccacaccatccatcgcgagatccacggccacgcacacatcttc

SEQ ID NO: 190282 - DNA, 300 bp, Zea Mays
gtcatcgccacctaggacttgtcgaatgtacggtcgcgtagcattgctagaaacgtactgcgtactcatttcgaaccccacccccgtaaagtttgttcaaactcgcggtcagatgagccgatctgaatctgatgttgttgctattgcacgttggcccggcccggacgtactggtactgggcagagcaaccccatttgctagaggccagagctgctggacattgcaacggacaatgatgccgcagcacgtagcatgtacacgtctgctccagtcccagtgacagcacaagctcatcatcgc

SEQ ID NO: 190283 - DNA, 558 bp, Zea Mays
ggtggttagtggcctatggggtgatcgaattcgttgcctcctaggctcccttccaagccaaagcttaccatgtcgcacgcatacggagacaacagtgacatgtgggtcggggctctcagattcgatctttccccttcttctgcagagcttcatggtgcggcggtgtaccttgtgctgctctttgtggttgcgacattgtgatctgcgaccatgacttgatttgactgtgcgactgtgtgttgggagagggtgcttggtgaaagccttgatgtgaggccgacaatggcgatgccctttgggcgccattttccaccttggaggcatgtgtcatgcatgcaccttccattctcatcgtggatcttttgggtgaaaacctatgactgtgttgtctgcatcgtgttcctccttgatggtgttgtcttgaagttcccttgccatggcgatggtggcacacaaatggctacctaccccctcggtgttgcgtgtagttgtcgttgccgcttgtggtcctaccacgtcatctatctagctatggagctcttcgttgttttcgtgcac

SEQ ID NO: 190284 - DNA, 472 bp, Zea Mays
cttgacaaagcactagaagatgctcctaagtaccaaaaaagagcggaagttgcagaagttgagaaaaataaagttgtcatggaattgtgtaacactaggagagccattgaagggttgaagctaaatttggagaagacacaaaatgaggcaatacaagcacaacaagattcagagcttgctgatgtacggttcaaagagattcaacagggaattgccttcagagagagtgccgcagcaagagcagagattgagcttgcaagatatcgctatgctagtgccatggcagaactacatttagtaaaggatgagattgaacaacttcagaaggagtatcaatccttaaacactatgaggtacaatgctgaaacaaaagcatgtgaatctaatgttgcatctcagaagattgaggaaactgtggatgaccttaccctcgaaattattagattaaaagaggagctcacctcttcacaag

SEQ ID NO: 190285 - DNA, 766 bp, Zea Mays
ctcccttgttaagatgcctctcctgaagccagataggtaggatttttttgcattgttttgttctgtttttttaattcaacgatgagctgtgcttatgcagttacaggaaaaaattatggttattttccaagaaaatgacccccttcagtattgtgcaagaaaaataaaatcacgctgatgttactagtactgtttgctcctgatttcagagcgccattgcctgatgcggtgaaagccatcttagatgaggggattagcttgttcaagatgcatcggagcaggcatggaaggtatgaaactgaaatgcatattaatattaaaaccccctttttagcacgttgtgaacagtaaacaacactctggttgtatagggtcgaatgcctttgttcaatagcagattaacattcctcaaaaacaagcagactagcagtataacccttattttatacatagtattacttcatatttatgtcgtcgagggaatacttttgtccaatcttcaatcacacttgtatagagaagaatgttctccaaatccccttttctgtagaaacagttaaccacacttgtagcagtattacttcatctgatgatgttgacataactagtggttttcacatgtctatatacattgcctgatgttttgcaaaacgatgtcaaatcagagcagagccatcaaaaggttcatacgctaaagaatgggcacaatgggaacaaaggttgcgtgcgaccttgtttgggaatgctgatcatcttaactcaattc

SEQ ID NO: 190286 - DNA, 1292 bp, Zea Mays
agtggatcacaaaccaaatttgatatagcagatgagggtcttttacatttaagaccgaagatcatttgtcacatatgaattgtcatgtacactgagatatctttaggattaaatgtcgaaaaacaaattgctagtactcatccacgcccagcctttgaaccactgtgttgcttatgcaccccaggcatgcacgaaaagagtgatggtctctttgactttgagccaaacagaaaagctctaaggggaacaccacctttcgttgacagggtccggaagttttgttgagttcggtggcttcttgcaatagataccttgagattctctctaagcttcaagatcacccttccaagctccacttgaaggcctcttacatggtccagcccagcttctagctccttagcgactttgttattctcttgtttcatattaagcacctctccttgaaattttgcagcttgaaaagggttgaagtgaacttcatcacatttatctagagttgtaatctttgatatgtcttcttgtatgctgcatagtgatgaaaatctgttctctagctctcctttcaatcgcacgttcctttcaatccaaacttgaagatctgtatttaggtccctcaatttcttttctagtactgctgattctagctttgctacctgataactaccagcaaagccataaatgccctcatcttcctgttcatcagtcattctgtgcatctcagttttcaacatgtcaaaagagatttggaaattccgtatttgatgatataatgtgctaaacctcaaccagaagttcaagttctcccccaacaccctgtcaatttctactctaaatttctcctctgcaaccgaagaagctagcggttcatcaacttgccattgcttaatgtattcctctatctcagcaatttctttgtcttctgtagtaggactggtgcttatcttggatgtttgttctgacttagcaatctctttgtcttctgtagtagtaatggcgcttatcttggatgtttcttctgacttctctaaactctcaataatagaggcactcatctttttctgcaaagaacttagcatgtgcctaagcgagtggatctcctcatcttttcttgcattgacactcttaagttccttcagttctgacattgcctcaagatggtaatcttgatttctcttctcaatttccgaaagcttttgctctgtatttttgtagctctgaagtacagatgcgtaatcttctaatataatcttaccctcaccttcggattcttttggaactagctgtttctgggc

SEQ ID NO: 190287 - DNA, 440 bp, Zea Mays
gttgccgtgagcacaaactgaacaatagtggctcgcccagccctcgtcattaggtcggccttccaaccaggtaagaggtcggccagccgatcagtgagaggctgaagttgagccttggacaacttcttaagggagagtggtaaacccagatatttgataggaaactcatcaatcttacaggggaaaacatccatgacttcttgcacaaccagttgagagcaccgaataggggccaccgaacttttatgcacattagttttcagccctgtagcgtctccaaataagtccaaaatcctagttaccatgtccagttcagcagcaacaggttatgtatcacgttggcagtggagttctgattatgtattgttttttctgtttgcttccttttcactagttttgcctgatcatttgtgacatttcatgataaaatactgctgttt

SEQ ID NO: 190288 - DNA, 526 bp, Zea Mays
cctcaggctctgctggccgaaccccctggtcagtggaccagacagtggggtgttcccccggcctcctatgggccacctcccggctacgtcggcccacccgctcccactccgatctgggatcagcagaccctggctgccaacttccaaattgttgctcttcaacaacctgttcagcatgagtggcacttcgacactggtgccaccagccacatgacctctgacgccggtatcatctctcaaacccatccttctcgtcatattccttcacatactgttgtcgataatggtcatctcatttctgtcacttccactggcaccactcaccttccacataatatatcccttaataatgtcgttgtctcaccatccctcattaaggatttgatttttgtttgtcaattcaccatcgataacaattgttctgttgaatttgactcgcttggttgctctgtgaaggatcttcctactcggcgcgagatcctcagatgtgatagctctaggcccctatacccccttcggctaccgg

SEQ ID NO: 190289 - DNA, 300 bp, Zea Mays
tgtcctgcttatatttctacccctgatgcaatggaaactggaatctacatctggacatggctagtatcggctgcgccttctttaggtcctcttgtgcttgcggaacttgttgatgcatggctgtggaccatagatacaaagcgtggattgtttgcatcagatatgaattactgtggcccagatgcaaaattgaggccgcatcttatcgctggtgagcctgaggcaccaccagaaaaggacccagtagaagcaataatagcccatagactctggcttggcttcttcattgatcggtttgag

SEQ ID NO: 190290 - DNA, 971 bp, Zea Mays
atattttgcaccttatatttccttgctaaataaaatgtgatagtcatttgtccgaaatactgaataaaggactccagatagcatgactcttctgtcacaatcaccattatgtatatgcgaacacttcagggacatttcatgtgtaaagagaaattgtgattgtattttcaagatgtgaacagattagctgagatttctctacaatatgaggaaaattcaatatgaaataacgaatagctagagatatgtttttttctggacctgtcacttgaattgccacaacaaactggaatagtttaaacaaccagcaaaaccaaatttgttaagagacttgacctgcaactaaacatataggctagaatctaaaacaatgcatgtagtattaagaaggaagaacctaattgttaggtgcacatcaaactaatgtggactcatcatcttacactaatatcaaccaaaaaacacaaagagaaggtcagctattccgagcaaaaccatgggatgacaattataacaaaatcttaaagctatgaatggttctcagatatagaatacaaacctaaattgtcctttcacacaagccacaaaccaaatattttccccatgtatacgtacacaacgttgcaggctcactacccattggtatatttttatactgatataagtacttgctattctctcttgcttttccttttttttcattcactgatggaagtctgaaccaaaatctacatgcattggtggaatggaaatgtgacctccactttcgtaagtccgagcgggcttacaatagaccgctaatcagctcatgtcatgacaatttgttagaggttacttaaccgcactttggtccagcctaatatatatacaagcaaaacacaagaagtgggcttttgcaagataagagtagggggtggatgaatgcaagcagctagttgtcaggcaccaactttctatactcttgatagaaa

SEQ ID NO: 190291 - DNA, 420 bp, Zea Mays
acagtggccacgggctttctatcgcgactccactggcgtctagtagtttatacctgcagagtagaggtggaactaggattccgcttgaaggcggatgtaatacttttgctttttgtaaggtacttttgagtactatttatcaagcagtattagcacttatctgtgtaccacttgtccctgttgtgtgtggtgtaactgattcttctttggtacctggcccccctgggatgtaggctcgatttgtcgaggctgcagaccagcatacctaagaaagagtttggcggtggcccccaggaggtagcctcgactgggacctgggcctgcacacagcttcggctagagagcattagtagtacacccacagttcccatcatctgacactagccatcctttgatacatgctcgagacctgcagggtca

SEQ ID NO: 190292 - DNA, 427 bp, Zea Mays
tgaagaaaaatgttctgttagtaggtggttcatgacctgtcaagattaagtggacctactggacatgcgggggaggggtgtcgcgggatcgaggatgaaccctagcaagacgacagcaggcagcggggtgggtaaggatggacgcgagatgcaccgtaccttacgaagatgcagacgcgatggttgggacgacgtgaaaccttgacgacggagcaagggcggcggcgtcactgcggcaaccatacggatagaggaaaagggtgaaggaaacgcgacaatgcgaggagaagacggtggggatggcaatgggaggagggatccgtacctgcgtacaccggcggcgatgcgttaggtgcggaccggcggcgctccgttcggttcgcggcggcggcagaggagcgttgcagggaaccctagcctaactgcg

SEQ ID NO: 190293 - DNA, 742 bp, Zea Mays
cttaagcagcaaggaaacataagcagaattcagcagctgaagtttgaagacatgtcctttataaattgcattcaaggctgcaagaatgtcactgccaataatgccccaacaagttttgtagaacctcccggtgaagccatcagggccgggagccttgtccataggtagatcttttactgatgcccatacctcttcagcagtgaaaggagcatctaaatgagataagtcctgctggaataatgggtggaagtctgccaagttgaaggagtaatttctcagatcaccagaacttcgcagatgttcataaaaatcatccactacttcttgtttctcctcttgagtaacatagattctgtcttccacctgtagcttagcaataaaatttttcttctttctaaaccgagtgtgctgatggaaaaaatttgtatttgcatctccttcctgtaaaaacagcaccctagaatgcaaacgggcaatggtgtgttccaaagaagtcaagcccaaacaatgcatcttgagttttcttcgcaaccaatcctccccctgtgatagagaacgagaatccctaacaatctccaatcggtgtagcacttcttttgccatagaaagttgtagcttgacattcccaaccttgcgatggctccatttctgcagtcccctactaagcctcttcagtttgagaaacaggatctcaaccaggcaagaagaagacactgggtcttcccagttttgctgaactgat

SEQ ID NO: 190294 - DNA, 478 bp, Zea Mays
ccaccacataggccataaatcagactgttgtatgtccagtcatctggattacacccattttgttccatcagtgctttaatccccaatgcatccttcatccttcctgacttacaatacccatcaatcattgcattataagtccaaacacttggtaccacccctctcaaaggcatttcatcaagcaaccccctggcatcatgaatcctgccctccttacaaagaccttttatcaagagtgtatacgtgtgcagattcagggagcacccatcgtgtaccatcatgaacacaagcacaagtgcctcccttacacaccgtgcttcacagagcccctgaatcaaaatggtgtaggagtactcgttcctcctgcaacccatcagcggcatcatcatgagtagccagcaagcctttctcaagtcacttgttcggcagtaccccagcaacagtgcattacatgtgtatgtatccatctgcatcccag

SEQ ID NO: 190295 - DNA, 308 bp, Zea Mays
cataataaacaggtatcactcaatctccaataagtaacgtactctgctatagtttatttatgttgtgagcttattgattactcctaaatgggaagtattagtgacatcattagatcactaaaatggatatataatcagcttagctttctctccccaactgaacaaaattgggacatagctgaggagaggtgcatttacgcctgagaaccaaacagatcactaaaatctaagggaagaatactataagtaaacaaagagactcaaacatcagtatgtacaccaatgctcttgctaataaggtctgtagt

SEQ ID NO: 190296 - DNA, 291 bp, Zea Mays
atggagatgcagagttaggatcacgaagaaaattcaactcgggaagggagtcgatggtgcactgggagggagtcgaaaaggggaaatccgtcttgacgaagatgacgcgacgggagatcaagagaggatgagtggtgaggtcaaggcataggtaccatttgtgattaggggagtaactgaggaagacgtagctggcggagtgaggggcaagcttgtggggagcggtggcagaaaggttggggtagcctttctagacttgaccatctgctatttcatttgttttggcccacc

SEQ ID NO: 190297 - DNA, 371 bp, Zea Mays
actttgtatcgtgcttggatgaatgttgctttaacttgtacatgcaaaagaggcatatagaattttcaataatgtcatgtgctccaattcgtcttgggattggatgtttgcacatacatatgatgtgatcaccttacgacttggagatatattcaaggatcatgtcatatgtttgagacccttccgaaagagagacaggacgaaacaaagctttgtttcatgtccctaacatgtatgaagaggtgaaaattcaaaacttcagggtccaattataaatactgaaattaagcaattttgcttatcccttctctccgaaggagccaaaggagagaagggtgttaacatcatgaaacatgaatgaatcacttcag

SEQ ID NO: 190298 - DNA, 343 bp, Zea Mays
gtggacttctcctgtgttgagtatttctacttgtcactattatctggttattttggatgattacacccacttctgttggacctttcccatggttcacaaatctgaggttcctagccatattatccatttttgcacctacacccgcacacaattcaccccctgtcaaaaatgtccaaacagacaatggaatagagtttgtcaacaagactctagtgtccttgtcatctcagggcactcacttgcgactatcatgtccatacacctctcctcaaaacaggaaagttgaacgtgccctttgcaccctcaacaatgtgactcgcacgctgctccactctcacatggc

SEQ ID NO: 190299 - DNA, 272 bp, Zea Mays
ggcaggggagctgtatgtaggagtcttcagattttgtagctactagtactacatgagatcaggtggtactccagtactggtatgagtatgtatatgacgtgatgtgttgtgctgcagggtgcaggctgcagatacaccccacacccacagtccacagaacacagatggcagctggatgcatgtatcgaggttgcaaaaggctcttgggagtagctggcagtggcctagcaagctacctatctgatggcagagcccgctgacactatcttctg

SEQ ID NO: 190300 - DNA, 427 bp, Zea Mays
ctcgggcggccgggatttgggtcggggatgcctttcggccagggtgaatctggggcgttggatcacaaacgagtggttccgatcgcattgcgcctaatgcctggtcaggtgtagggactacttaatcttagcggccgaatcttgatccgacggccagttatgcataccgctccagggaaggcctaaatctaatctggcgcgcaggatacgtatcgggcggctgtaaacactacgtaccccttcaccatggcagaataacataagagcccctggaacctttataaatcaacccgccacccttgcgtcagtggcctgagtcatgggaaaactttggtttagccccctgcacttctctatatttgaggtccagtccagagaacaggaaaactagggaaattaaattagaaatagatttttagtattaaat

SEQ ID NO: 190301 - DNA, 433 bp, Zea Mays
ctgcccccgcctcctccgccctcgcgacgcaacatcactgcaaacactctagcagtgctagaagccatggctgcacacaatgtgaggactctcatctactccagcacatgtgcgacctatggagagcctgacaagatgccctcgctgaaggaactccccaggtcagcagttcagttatgatttctgaaaccattagttcctttctaaaatcaagttgaacgcctctctagctagcattaacaaaaaaatgaggttgaagtttacaaacttcacttctggttcaggaacacggctttcttcaacacttcgtaagtggattatttcctatccagaatttgtcataaccattactaggcagaaatcatcatttggtttcataatttgctaactgtagtaaatgattaattaaacaagcaaggagtgtacaattttc

SEQ ID NO: 190302 - DNA, 303 bp, Zea Mays
tagatgggttcaatccctatggaatgaccgctgccccatacacatgttggcccgtgttcattatccccatcagtcccccggtgtatgctttcaaacacataacatatccatgtcgttgataattcctggacacccgaggaataaaatgggcgtgtacatggagtctttgattgatgaattagtctgtgcttgggaggaagtggtatggacatatgaccaagctatgaagacaaacttcaaaatgcatgcttggtaccagtactccatgcatgacttaccagcatatgggctattctgcgcctg

SEQ ID NO: 190303 - DNA, 588 bp, Zea Mays
agttgaagctcacgaaagacgaattaggaaggagcttgagaaacaagattttttgaatagaaaggtattactggttctatataattgtagatgccttccccttcctcttcaaattcgtttacaatgtgatgtctgtgcagagagaggagcaaaggcacaaggaaatggagagacttgagcgtgagagaagaaaagaagaggagagattactgcgtgagaggcagagagaagaagagaggttccaaagagagcaaagacgtgaaaatgagcgcatggagaagtttttgcagaagcaatctagacgagtttgtttctgggttcctagaatgttaattgtaaatgtagtgtagtaaataccttatttatgctgcctacacttgtgcaggaagagaaacaaagacaaaaggagcaactccgaaaagagaaagaggcagcaaggcaaaaggctgccaatgaaagggctgctgcacgtagaattgcacgggactatatggaactggtggaagatgagcgtttggaattaatggaattagctgcacaaaacaaagggttgccctcaatgctgtatcttgacagcgacacattaca

SEQ ID NO: 190304 - DNA, 403 bp, Zea Mays
gagatgtatttccatatagtataaaatctgaaaaatctttacatcaatgatcacactaggactatttgtctaactactacttaatctgttctttagttcttcccactcctgttccatacggctcatacgactgtttgtagatttattttcttctcgtagctctctattttcttcttgcattgctcttttctcatcctcagactgtttcaacttttctatcaattcagcattactaatgcatggacttctaaggtgtcttgctttcacgccaccaccatatccaacaatgtgatcctgtctctttgaagggaagcacttatccataagttctgcattagaaagagaaggatctaatgatatttgttcctcaagttgtgcctacattcaaagataccttaatttc

SEQ ID NO: 190305 - DNA, 662 bp, Zea Mays
gtgtgaggacactggacacaacatctgcagttgtatgctgtgggagagaaagaacgtatgagatgtggagttatcaaactcccacccgtcatcacacacactcagaatgatgcgatcgaaccgagtcgacagccacacaaagaagtgagatagattggtgaaggtgtcactgtcagacttatagcagaggggaaaggctcataggtagtgagagaagtcgtcaaggatgattagatagtacttataaccgaagatgctagggattgaggatgtccaaaggtcatagtggacgaggtcgaagggggagtggtgcgagacattgaagaagggaagggtaagcgagtgtgatggccaagctgacaggcatggcaaagcaatgcatcagtgtcgtgggggctggtgatggccgaggtgcctaggagtctagagaggatgttgtgactagggtggccaagacgacggtgccaagtggaggtggaggcagtagcaccgagagcgtagggtgtgggaacacatgataagggagatggggcatgaaagcaaataggatatatggtgcgggagatgtcgcattgggcgaccacaacacgagtggtaagatcccgtatggtgagcccacaaggatcgaactccatataacaatggttgtcagtggtgaagcg

SEQ ID NO: 190306 - DNA, 295 bp, Zea Mays
ctgagaagcaaaactcatcattttctgtacgtcatcaggaggcatactagcaatcatgtcagatgccatcttaagcatatcaggagacatttctggcatattgggtcccagatttggaccagcggagctagtgctattcaatgaagaagcaacttcgaacattttctgaagctcctctggtttcattgagccaatcatatcagtggcagttttgacaagttcaggcgacattccttcaattccgaagtttgataagccttcaggatcgctcttggacacataattttgggatgac

SEQ ID NO: 190307 - DNA, 872 bp, Zea Mays
cttgccaaaaagtattctattctagtatggtctatacttctctcaatctattagacctgatctcactcttgtgcttgcgacatctttgtagatgccccctgaccataaccttcttgtctttttgggattcttttgtctttcgtcattaaattgctaccatatggcaaactctagttctttggtattgacatgcttgtatccctttaatactcttgtttcgaatacttgcctataaatttctactacctacatagacatttcagtttatatgtccatgatcttcctgtcttttgagaccctttcctcttctgttgttaagtcgctatctttcggcaatttcttgtcccttggtattggtatgctcatctccttgaaatctctcatactctcatcttttttatgcttagctttatatccaaaggtctgtttaagatatttcattctacatgatcttgaccactcttgtttcttaatgacccattagcagtcattttattttgcacattcttggagatctcgttaattccttgtcacttcctttggtaatgaatttttactccaactcttttgttggaaccctacctatcttacccttgattgttttccccacttcgccacttcgtgagtcatgtctcaactctatcctttgttatgcttttcgttattatcactgtcacctttgacatctctatatcttacattgaggtttatcttatacttgccctttaaagtctcctctctcccatctcaatctgagagttgtatgttttacctatttttctttgggacgaatcatcttctttgtcacttgcgagtttttaacttcgtcctttgcctacttttgtttgttattatcattacctttctcatcc

SEQ ID NO: 190308 - DNA, 602 bp, Zea Mays
ctgtgaaagcagtactggaacagttaaaagctgttgcaaagggtgatctcaaaacacctgatactgggaagcggaagtttggaaatatcatgtttgctgctgttcgattaaccccgcctgatatattgggccttctccgtaaggtaagaagtgtatatgctcagctgcgctgagaaaacattgttctgtatgttgctgtgaaggactcatggtaggttgtcattgcagtgacgatgttgcaatctgacacttgtcctatgctgcgttactataacaggtggcagagaaggacacggctgtcgacagttttgtgaacaagataagactggaggacaacctaacgaaggttcacgtcacccttgcccacaaacgaggccatggtgtgtctgctgtcgcaagctatggcatctaccagcaccaggaagtccccgtgtcattcaacgcattgtactacactgacaagatggccgctctcgaggcacagctgggagcagtaaacgatgagccgatcaattccaggaacgagtggccacatgccactctgtggacggctccaggcgtcactccaaaggaggcaaacatgctgccgcagctggcttcag

SEQ ID NO: 190309 - DNA, 297 bp, Zea Mays
ttaagtgatgctcttgctgtgtctgatcgttgtttgcgcaatggagcatctgataatttgcttcagttgctcatcgaacagaaggaagaaaaaggtccaggcacaggacaaattcatccatatggatctcacagtcttgggaatgatacttctcagtactgcttgaggctgagagacaaaaaagttgcagctcagctcgctctaaagtacttgcacagctgggaccttgatgctgcaaccaatgttctaactatgtgcatgtgccacttacctgagaatgatcctatgcgcagtgag

SEQ ID NO: 190310 - DNA, 293 bp, Zea Mays
tagagatgggacaactagaacattgcgaagcgaaaaggatgaagtgctgccaggcaatgtggaggtgccagagcaagacacaggaaggtgatgaccgttgccaacagtgatggatggcacagaggagggttgacgggagagaagtataccatccgtgttgtgcatgtgggaggtggcgccagagtccatgacccagccggagttctggagcgccatttggttcagggcggcgatgaggccggcctgatcccacaccggggaaggaggtggcggtgcggcgaagtgggcctatg

SEQ ID NO: 190311 - DNA, 382 bp, Zea Mays
gtcgttctaaaaaaatatatactccctccgttccaagttataggtcactttagcattgtcctaagttaaacttccctaatttgaagtttattgatactacaccaatatctacaacaaatcatttgagcttttagatgttaatatattttttctaaaaacttagtcgaagttaagaattttgtgacaaagctaaagtgaactataatttggataaagagagtaaaagggaacggaaaatcatagggtttagactttgaagattaacgtgaaactaaccacttgttcaagattacactggatgcgaaatttgtattcaaatgtataaagagcgtgtgatgatcgaagtttatggatggagctgatgtactagtttacccttttt

SEQ ID NO: 190312 - DNA, 318 bp, Zea Mays
cccctttcaatcttttgacaaggtccatagtgatctcatcctcgagatcacaatgggggcaaagggccattctgacactgctactgccatgtatactccaagtgggtagaggccgcatcaaccacatgctccctatgcagcttcgccttcgcatcctcctactctggcgctgccagggctcctcgtactcccgccggtttcggcagtggccaccacagacgttggggcagccatggtggaggcactagcaggggtggtgtaccctgactgcatctatacaatccatcaaatggtcacatcgccatgtggcctgggccg

SEQ ID NO: 190313 - DNA, 318 bp, Zea Mays
atggtgccggcttcatccctcttcagtttgaacactcacttaagggtgatcgcacgatgaccatgagggagatcagcgagctcctaggtgcggtttgtctcaaccgcatccatctccgactgcatcatagcacgccaagcagcgtgtttctcggcctccgcgaaagaccgaggctcgccatcgtcgcatgcaagatgcaactctctcgccagaatgcgagacgtcggacccggcatcgacgggtcgatgagaaggtcctccgcctttcgacaccgcaacggctcaccatcgtagcacgcgtcgacgcgctcctcgtcg

SEQ ID NO: 190314 - DNA, 377 bp, Zea Mays
gagaggtggcgcgctaggtacaaggcagggaaggagaaggacatgccaccggtgtcagctactgtgtgagcacgagagaacgaagacagaggcattgaggcatagagcagatgcaaacttagctagcagagatggatggagactggggagaagagatggaggtatggtacttgcagggcgtcgttgtgcttgggatggaggagtggagaggcgctgaatcccttcgccgatggcgcgcctccgttgccctcgtgttgacgtatgatgtgtgtgctgtgtatgcagggtgcccgcgactgcgtgtgctgtgggaaagagacgatgtcgacagggtttagaaagtttactcagtgatgtagccatcgtgggctgaccgg

SEQ ID NO: 190315 - DNA, 1503 bp, Zea Mays
ctatgtcttccccaactcaacaaaagtgtgaaaatcaagaagaaacaaaaaacactatcagtgttaaccagactgacaccgcatacaaatatcctacaaccaagcccaagatcagtgttcaaattccagcttcctatactcccaacatggcaccaccccaatttatgcttccagtaccagggagatcaatgcctgtggcatttcaacagaaacaacctcaagtgcccattgaattcaggggcccaggttttcaaatgcactctattggctctgtatctagttccttgcccgtgaagatggctgtccctctgggtaatgcacctcacatacaaccgatgtttgttcatggtgctcagcctcatgcattccatcagcaatcctttattcaccatggacaaggctttggatgtgctcctccatctaattgttaccttcctcagtttggcaacatgagaaatgtgcaagaattatctcagcagtatcctagaagcggtgatgaacataagagaactatcaagataacacatccagagacacacgaagaactgatgctagatagacatgggcattcctttataaatgttcctgcttctgggcagatgcctttaaacaatataaaccagctacctcactctgttcaaacattttctccacttcagaaagtgtattatcctagaccaggaacgtacaattcagcacatgtctatcttcccaactccactgatgtccctcttgcaagtaggcaattttcctccaaaattcaaccttcgatgcatggttttgattccactaatagcaaccagccatttacttccatcagacctcctatgccgatatctcggcttgatgctacttccgggccattaacaaatttgcatactgcttccgaaatctcaaatttcaaagggatgtttccatcaagcctacctgctccagttcatgttgagctaaagccgcctattacactccctgctgaaatgaatagtgaatctaccatatcaaatcaacaaaattattgcaaaattgggctagaaatgtcccttgaacctgtaaatttagtttatgaaggaaataacaaagattctgttgcaacttgtgacataagttgtaatttaatacctcaaccagtttcaaccccgcagacacagactcggccaacttcagttgatcatgccacaccagttgtagaccctcaaactatcttaaccagtagcctgcctctggaatctactacatgttgtaaatcttcagttaaagcaaaacctattgaggtggaacaatcattagtggttccaacaactttatcatcccatacaaaactcgagtcatcgcatgcaactactagtgtcattttgactgcaacttcattagtttccaagattgatgggacgccaccgactaacaggaactatagatattatggcaatagcattttggggaaacctccgttaatttatgcacaagaaatattgccatcaaagtttgtggggtctaatacatcac

SEQ ID NO: 190316 - DNA, 431 bp, Zea Mays
atcagaaggtaattgtcaaccatacctcttttcttggctcttccattctgaaattgattgctaaggatgatgtgctgatgctgagagctcagcttcttattaatcaataaagttactgttgcctgtatacttgtctaaaagtatgcatccaaaatgcacattttattgtcgtgaaatcatctatatttgtttttcttgatttctcattttcaggaaggtcggtcatactcaatcctccgtgatgtgtttattgcccatgtgccggtgagataaatgttttttttacttattgcagccaaaattgaaattaatgtcttagctcatacacttgcaaatctctatgttaggttaaaaatgggaacctacgaccaaagtgtatatacactgccttaatgttaaggcgcatgatggacgcaatcgtaaattctgac

SEQ ID NO: 190317 - DNA, 386 bp, Zea Mays
ctcgcaataggcacaacaaattacatagcgcaatagcaaatgaacaaacaagcgacgggctcaaaggcaccatcgcacagcacaatagtacacactatacaacttttaccccacaaacatggacatcacagttctattgcgaagagggggagggcagcgttttcacagaatatcgcaacagaatagcgaaggaaacaaattgtcacataggctcctcctttgaaataagacatgcctctcgaaaattgaacaacatcaacctcaactcttccccctcaaactggtcctgcaggtccccttctccgatgcaccacccagacgtcgatgaaagtagctcgcgctgagtaccccgatccggtcgtggaccacttcgaagacgggtcctc

SEQ ID NO: 190318 - DNA, 845 bp, Zea Mays
ccaattcttggtcaaaaatgcgtatgtgctatctttcggtattattgaaaataatcgttaatgactatttttgacaaaaatgaggttgtgtggcctttgattaatgaccagagactcgtacacctaccatagatcacattcttgtatttctagtgttgaccatttgtcggttaaaaatccatatgtgttagcatttagtattattgaaaatgatcgttcatgttattttcaacaaaaatagctgttgtgtggctattgattatcgactaaaggctcatacacatcacctcaaatattttccttgccataaatcacattctgttggacaccatttttatgtggtaccaagtcccccaaccttaaacacacttaaatcctaatagataatctactacttttctataaaaggtatgacttaatactccaaggattaaacaccagagtactccaaagttgagctaaacacacaaaataagtcttctgaattggtgctaagtttgaacttccagactatgaaaccttgaatctttagaccactgttactgccagtttcatatggatttagggttaagtgatttaataaagtttgtgcacctgatgcaactctataattttgttacatcgaccattttcaaactatctacagatcaaaagttataaaggcctgaagagagctcgctgataagaaatttcagaattccaaacccaggtcaagacttagttttgagtttttttctattttttcctatgaaacttggaaatctctacacatgaaagttgcttggtttgaaaatccatataactttgatattttgacttttggcaaaatattatcagatcacaaa

SEQ ID NO: 190319 - DNA, 276 bp, Zea Mays
gtgttcggcatcttcttccatatagggcttcaaaaggtgccatctttaggctggattgataactgttgttataagcaaactctgccaaagagaggtacttatcccagttcttgccgcaatcgatcatacaagcccttaacatatcttcaagaatttgatttaccctttcggtctgaccatcagtctgtgggtggtaagctgaactccttattagcttggttcccaaagactcttgcaattgttcccaaaatctggcaacgaattgggctcctcgtc

SEQ ID NO: 190320 - DNA, 422 bp, Zea Mays
tggcaatgttgctatctccttgcattcagtcttgttgtatgcttcccatcattgacttatgtggaatcctacagttgcttcaaagaaacactttgatcttgaagataagttggcatgctcccaggcggagttccgtcaagtgtttgtatttctcgatggtgcccatgaagcaaacaggtcattgcaatggaaattcaacatggaggaaaagaatcatgagatatttggagcacttcaactttcttactccttgttgttagtccgctatttggagcgctttgatacgcgggatgaagtgtgaaggctagaggtggaggttggtcggcagaaggaagaatatcgaaatcttatccacttatcgagacaacttggaagaattgtataaagatgttgttgttgatcaaactgccatatgaaatagc

SEQ ID NO: 190321 - DNA, 342 bp, Zea Mays
aagacccacacatctagattttgtttgctgattgaacaagtccctctacgggttgaaggctcctcgtgcatggttcagtcggtttgccacatacttgctctccattggggttgttgaagccaagtcagacacttcactttttgtcttccatcgtggttctgacactgcctatttgctgctatatgtcgacgacatcatcctcgccgcttcatcgtctgcactcctacgccggactatctcggccctgcagcaggagtttgccatgaaggatctcggtgttctgcatcacttccttggtatgcatgttcaaccctcaagagatggtcttctctctcagaagta

SEQ ID NO: 190322 - DNA, 574 bp, Zea Mays
cctacacgtcccctcagaatggtagggccgagcgcatgattcgcacagcgaacgatgtcacgcgctccctgctctttcaggcttcccttcctcctcactactgggctgaggccctcaccactgctacctaccttctcaaccgtcttccaaccaaggcggttgcccaccccactccatacttcgctctttttggcatccacccctcctatgatcatcttcgtgtctttgggtgcgcttgctaccctaatctcgcttccactgcccctcataaattattgccccgctcccctcgctgtgtcttcctcggctactccctagaccataaggggcaccggtgtcttgacctctcttcccacagagtccccatctcccgtcatgtcgtcttcgacgagtcggatttccccttttcctcctcttcttccactacctctctcaccgacctcgacgtgtccctcggtctcgaccccgtgtcccccactgtcgtaccacccttccctgcaggtccgtccacaatgccgacccacgcgacccctcctacgacgctcccctccgcacagccttgtgcggcctcgac

SEQ ID NO: 190323 - DNA, 422 bp, Zea Mays
ctggggaacaacattctccccaaccaggcctgcagcagctccgacggcggcaatgcctggagagctcgctgcgatcagaactccggtaacccatctactggttcatatgaccagtttgaatgacctaacttgccggtccatacatgccggatcacaagtaggcgtctcgtgaggggatggcaggtgcagaatgtttgtagatgtgtcgccagatttacgtccgggagagcgaatcgctcgatggattggtagtgtttttgttcatatgtgtaggttttctcacatggaaggaatgtagtatagaggatgggagatgaagattaccgtaggtgaaagatgatgttgtaccatgaggggggaaaacatgcttgtagtagtaaagactgctgcttcagtccacgtatctaaaaagttcttctctg

SEQ ID NO: 190324 - DNA, 308 bp, Zea Mays
ctccgcccatcgcctcatcgcgacctccctccccacgcctccattaccgtggagctttcaaccagcccgagtgctccagaaatctcgcaacccgtccgctcgccatgaacccacccgtaatcacgggcgctccaaccgcgaccgccatcctcgcccgcgaacgctccaaccgcgacctcccgaaatccacgccatgctccgttcatgccgcgtctgctctaatcgtgtccgtgcatgccatgatcgccattctcgccccccactgtctacgcattttgtgctcacccaacagccttatcgcgccctcc

SEQ ID NO: 190325 - DNA, 431 bp, Zea Mays
cttatttatagtttagttttttttgtttctaatcagtttaagagtaagaagttttgtgttaattagaaggtaattaggaaagcatgggtatctataggtatagccattttattatgtaggataaaagatgggtggttaagacaagaatagcccggggtaagaaagtttacggtgagagagaactccttgttggatgttaatgcatctgaagatcgagtttgacttctctccttccttgacgaggttgatcttttcttctccggtcttggtatcattgagtcggggtcagtgtatatcatcagagttggggcaataaggttaagataggtgtggatgagatagactacatgatgtaggtcaaaatcttgtttaatgtcaggtgagggtagatagattatgcaatacctcaagattctatggttgggttagct

SEQ ID NO: 190326 - DNA, 341 bp, Zea Mays
ctccaggcagctggcgccttttggttgtgcagacttcactcttgaggcttgagtgagggtgcatatgctggtcaaattactccgtggtagcaaacaattatattaattgcctcctaatatcattgttttttgtgaatcatgctggctgatcgaacttggtagcatggatgcaacattttactggtgtttgctaaccttattactcttaattaaattgatggatctcgagcggtaatctaaatttactttttttaccagtttgaattggattaattgtgtggtttctgcatatagatcgaccaatctggaactgaataatttgatattcatctctctgctcc

SEQ ID NO: 190327 - DNA, 489 bp, Zea Mays
atttatttattgtggcagcatgtggatgagccaactgctttctactgtttaagacatgtctgtacctatcactctgcatgtgtttccatgcatttcagttgggatttggtccagccaatgtgctatcttcgaacattctacatacccattcttgtggtagccacattaataaattgataatttgtgcgttttgaggtatctgatcttttatcacaacagagcaatgcttcacacacaactttggtgctgatcaaaatgcatattcaccacaatctacagactctgatattgttcttgatgattaagtagtttgggaatctgcaacattttccaaaccatcattgttggagctgatatttttccttttcatttctcgtagcctggcttagaaaacggaaaattgtaattattgactgcttgttggcaggatactgctagatcagatgcaatttgggcaataccggatcatttttagaaagtgttcggaga

SEQ ID NO: 190328 - DNA, 318 bp, Zea Mays
cttaattctatcaacaatgagcacagtgacttctacatttataactatacaaatataacatacctttcctaaggacttaataaatgatgaattttctgtcatagcccttctttctttagctatagttcttccccttattccacataagcaaccctctattgccattttaaagaaattgtactgcaccacctatacttatctgatatttcaaatccccatgaatacttttgattttggcagttctcattcatacttctaatttaatgcaaatcatctcatgcacctcaagtttcagcaatttagcactgttagtgccca

SEQ ID NO: 190329 - DNA, 413 bp, Zea Mays
tgaaacatttgatattgataacttcttggatcaattgggaccacggtacaaggattggtctggtcgtggccctatccctgttgatgccgacttgcttcctggtgtagtacatggctacaaaccaccatttagagtacttccctacaagattaaaagcactcttagagataaggaaatgacaactctgcgtagacttgcaaggcaaactgctcctcatttcgctctaggtattggagtttgtatctagattgcatgctttgattaattactactcaatcttcaattcatttcaacccgttgtcaatgtacttgtcggtggacagggagaaacagagaacaccaaggcttagctgctgctatggttaaattatgggagaaaagtgctattgcaaagattgccatcaagagaggga

SEQ ID NO: 190330 - DNA, 612 bp, Zea Mays
atgattttgtctatgggaccagtcgttactgttgaattcgttggtcatctgcattgaagaatggccaacatattttttatttcgatcaagtgcaggtgtggatgcatgcgctccataactcttccacaatgacattttcttctcctttctggccctctttctagatattacaagacagaaatcattgtcaccagttgtgtcactgcacaagtgggcagcctggtctccaccatatgtaccaacactttttggcgaacaaatgccactatcatagtcaaacttctctatccagttctcatcaaatccactgctagagctgcaaaactctgttgcctcacaaggatcagatccacgttcatttctgaatataaacagggacttggtatcatggttacagttcgctttactgccagcatagcaagtttcttgagatggacctgttggtgcagaattttgagtgttgtccaaatactgtaagttactgctaggacattgtccacacaatgcagggcacgaagttgttgatttggacagttccatctcatcacagtaggacgcactcgaaactgaaccacctgagcagcaatggtactcatcatcatcactctcagg

SEQ ID NO: 190331 - DNA, 643 bp, Zea Mays
gctgtcttggattgtgcatatgatagggagtctaaagtaaggtaccatgttgcaataaccttggagttactatttctgggaaggctcatcaaccccatgaatttctatgttgttgctcaggttctgctagacaagcttagtgatccagatagtaatgtaaaggatgcattcttaaggttattttcaatcaccttgcctatcacaacatatgcgtttggcttgtttgcagatgaacataattatcgtaattcctcagatattgttaacatgtccaaccattgcatgaactggaggcatgtgcttgctgtgaagcaacagcctaggaaactccactggcagcagcttgtttctgttttgagttacctttctctcagattgaagttacctctttcgtcttgggtgcaacggctggtctttagttaccgtgggaagaaagatacgcgttatggtcaaattgatatgtttggagatgctgatgggaatgaactccccaaaggccctggtgtggacagaaatactattgatataatatactcagtaaataatcatgctgctgtttggtggggaatccatgaagctgcccggcactgcattaaccttcggcttcgaactcatctaggtggtcccactcagacatttgcag

SEQ ID NO: 190332 - DNA, 1654 bp, Zea Mays
gagctcgcgggcggcggcgtccgcgccaaggaggcggaggtgtgcccgcccgagtacgacaactacgtgccctgctactacaacatcacggacgccgtcgacgtctcggatctgggggccggcgtcgtcataagctacgaccgccagtgcacgcgcgacggcagggtcacttgcctcgtcgcgccgccgcggagctaccgggttcccgtgcgatggcccagcggcaagggcttcatctggaaggacaacgtgcggatcagcgggcaggagttctcgtccggaagcctgttcaagaggtgcgcgaacaaaacttgctccgtcgctaaaattccaggtggtgggtttggtgtactggttgtgaatttggtggttgctcattgataacaggatgatggtggaggaggaccagatctcgttcccgtcggacgcgcacatggccgacggtgtggaggattatgcccatcaaatcgctgagatgattgggttgcggaatgaattcaatttcaatgaggctggggtgagttattgccatatgttcagtttaacctatgctattactagtaattacctatttgacttccaaatctagtgaaggcatacccagaagccagaactagctgaagtatgcaactgaaccaatgatatttctgtcaacgaggtgtcattcacccattcttttggcacaaaacctaattattaaaagagtcactcgctcttggtagtgctctttgtcaacacaacaccctacgaatttgctggcttctgccaaaattttctgtccactttgttttttttttcttttcaggattcaggacacctgtactttatagtggttccataagtaacccttgtgatttccgttgagcattttctttgggttcgatgttttttaaagtatttaaaatttctacttcattattttcgataaattcatggcacagttttaagcacataattgttttttttaaaaaataagtagcaggagctctgctattcatataagatcggagaagggtttcaaaaacataggtaggttaagcacataattgttgatcagttattttggggcaaatattctatttatttgggaaacagtatttcatttcattcataagttgtttccctgtctgatttatcgtttaaaatgacccttcacatcatgatttgttattcagcaacacttgtctgtcgtggtctttccacttggcggtactttagaaatcttgcatgttgagtgggctggctggaaagtgccggtctatttctacttaatttgacttgggaaactctgcatgcccaatgtgctggaaagtgtatatcagagcttactactgtgcctgcaaaagtatgttggcaggaccttaggatctccactacgatatattattaaagcacagttgtttttaaagatcatcatacaaaatacatctggacatactatgtagatcactttatgctctgattggctgaagtaagactttgggtaattgttatgtttacaggaactcttatttctgatggtgtttcttgctatgccattttcaggttaggacagtccttgacatagaatgtggatttggtacctttggggcgcatctttttgagagagatctcttgaccatgtgcattgctaactatgaagcatcaggtagcc

SEQ ID NO: 190333 - DNA, 496 bp, Zea Mays
atcgcgttcccctcaatgttgaggctgccgagacgggacagactcccgatgctctccggtatctcgccggagagctggttccgcgacaggtccacgctctcgaggctcgccgcgtcgccgatcgacggcggtaccgcgccgctgaactggttcccagcaaggaggaggttggtcatcgcggcggcgttcccaattccgtcgccgatgctgccgctgaactggttcccggcaaggtcgagcacgttgacgttggggagagcccacagcccctcgggcacctcgccggagaggctgttgttgctgacacggaacctcaccagcgtcttgcagctggcgtacgtctccgggatcccgccggagaagttgttctcgagcatgagcagcttcagcatggtgccctgcttgcacatgtccggcgggatgggccccgagagcaagttggtggacacgtcgatgaagttgaaccgcgcccagctgccgaggctccgcggcagct

SEQ ID NO: 190334 - DNA, 369 bp, Zea Mays
gggacttgtggcactctaaatcgtgaacacatacatgtcgctctcttgtatacggactgttggaatcgactcgaatcgcgtaagcatgtccatcacgctgggcttttgtcgaacacgaggtgcagccacgacatcgatagcgagtgaggtggacaacaaggtcagagctgcgcagatccggggctgctgttcggaagaaaaaggggctactgttcggaagaaaaagtgcacaggcgacggcgagcagctggggcgcggctgcacgtgcgagcagggagaacggtggcgacttgggcgagtgtagaggcgtgcaagagagctcagcgcgtaggaagttgacgcgcgcagccgggaggaacgaggagcaag

SEQ ID NO: 190335 - DNA, 656 bp, Zea Mays
attgagaacaatgtcatccacataaagcagcaagtaagccatgtcagtccagtggtgatagataaacagcgaagcatccgacttggcttcgacaaacctagagtgagtgagtagcaaagcagctataccaagcacgaggcgtctgcttcaaaccatagagagacttattgagacaacagacagcacgaggctgagtgggatcaacaaaacctgtgggttgagagcagtagaccgtctcagtgagagtgccatgtaagaaggcattcttgacgtcaagttgatgaactgaccagtgctgagagagtgcgaaggacaaaatagtgtggattgttgccggtttaaccactgggctgaaggtctcatcataatccacgcccgggcgctaggtaaaaccacggaggacccaacaagcctcgtatctgtcgagagaaccatcagcattgaatttatgaccgaaaatccacttgccggtgacgatgttggtgttaggggggcaaggaacgagatcccaggtgttgttggagagtagagtgtcatactcttcttgcattgcgtggcgccaatcgggatcggcaagggcgctatgataggtcttcgggacaggcgagggagtcgtggcactgaacgtagcaggcacccgaaaatcggccttgccg

SEQ ID NO: 190336 - DNA, 497 bp, Zea Mays
actgatggcgttgtagctcatcgaggacggcccgtagatggcggaggtgatcggcccacgtgctgctgtaaattaggatgtcatcaaagaataccaggacgaaccttcggaggaatggccggagcacgtcattcatcagtgcctggaacgtggcgggggcgttgcagagcccgaacgccatcacgaggaactcgtacaagccatcgtgtgtgcggaacgcggtcttgtgcacgtcttctggccgcatccggacctggtgatagcccgaccgtagatccagtttggtgaagaatttggcgccgtggagctcgtcgagaagctcctccacgaccgggatggggaacgcgtctttgatggtgagggcgttcagggcccggtagtcgacgcagaagcgccacgagccatcgggcttcttgaccaggagcacgggcgatgagaatggggagtcgctgcgtcgcacgatcccctggtcaatcatggcgttgcactgccgctcc

SEQ ID NO: 190337 - DNA, 695 bp, Zea Mays
caatcgtcgtgccttggcaactaacgagtggttaagggttcgcgagtgtgaaggcgtctatgcaattggcgactgtgctacagtgagtcaaagaaaaataatggtatgtgcagagcctctaatccctatttacagatgaagcctactgttcttgctttccaacctgacagcttatgctgatattctgtaaatcgtgaatgcatacatcaataggttttgttgctggataacttcatatgtacgagatctaccattctgtagctcatatgtttttttttccaacatcaaacccctctgacttatctgtttcttgattccaggacgatatttcaacagtattcaagatggcagacaaggacaattccggcaccttaacactaaaagagatcaatggtgttttagatgatatatgtataagatacccgcaagtagagctgtatatgaaaagcatgcacatgcttgacattgcggatttaataaaaggcgcagttggcgattctcacaaggagtccatggtggttgacatagaggagttcaagaaggctctgcgccacgttgactcccaggtgaaaaacgctccagcgacggcccaggtcgccgcacagcaagggcagtacctcgcccagtgtttcaacaagatggagaaatgcagagaggagcccgaaggccctctgcgcatggcaggggggtccggc

SEQ ID NO: 190338 - DNA, 978 bp, Zea Mays
ttcctgatatcttgcgtaggtgtgttagccgtgatgaggctgcattagcagtagcacaaaaggtaattgatctatttgattaggaatatacacatttctcagttgtttgtcctttgtaacttactgttttgactcttaatgataagcttgttttggtgcattatgtcctaggttttcaagagtttgtacgataacacatcaaataccacttatgtctcctggcttctagcaaccttagttgcaatacgagatgtctgcaagcttgttgtcaaagagttaacaagttgggtatgtttcattgttatattcaaccttagtattccatgttatcttctttattgtggtatagttgttaacattaatttttctcacgttgagacaagctgagttacttaattatgttttgattttgtgtcgttccatttccattttatatttttatactgtgcacacattctatggctgatgttgaaatttgatagttcataggtttctttttattagagtgaagctttttttgggtcttcgacacttcaaattttgtttgagtattgcttctttatgtttgtatgtttaattgtgtgatcagcacatcaacaatataaaacactagcaccaaatattaacctttgagctatgatttggtgcgagtgcgaggtctaaatatggaactcatactctagtctgtacctttttgtttcaattatagactatagtaccgtttcattttcctttttgatgaagttgattagcttgatgttgccctaatttggtttgattcttttgtttcttagttcatcatgagggatttggaagcgaactaagttcctttatttgttaattgttatccttttttcaggtaatatattcagatgaagagaagaagtttaacattgatatcatttttggccttattcgttcggagttgctgaatattggggagtacaatgttcatttggcaaagttaattgatggggg

SEQ ID NO: 190339 - DNA, 2940 bp, Zea Mays
ccacgggactcgaagggagcgcccgatctgctccgccggcgaggtgagcttctggaggggtatgtggctgttctgcgttcgcgttccgctctcctgcgtgccgaaatgtgggtcgtgttgtggagagcctcgcgggtaatttcacctgaggagctcgctcctgtttttcctttttttccttctctctctctctgggtctttggattcgtccgggaggcgtttttgggtgggcgaatcgcttttttttttggtccgcctgggggtctattttgggatcggtttcccaacactccgcagaggcgcgtgagaacaggggaggcgtcaggtaaggtttagagacgtgcgaagacttttgggtttccgatcgaatgcagctccgccgtgctgttgtctaggcatttcttcttcttctgatgaatcgctcttctagttgcgtgaaagagtgtcgccatgtctatgttgtttggatttggagtactgatggtgcatgtggctgccgcttttgacgtttgaagagtttagtcttaatagaacatgggcactgtgtactatttacaatgatttttgtgtaagtttagcttgggacaggagccttggttgtgccatgcttgtcacagtttatttttgagcttaattttgaatccgggacatttatgcaagctgcattacccaagatgatagagggtctgtggcatgcctcgtcaggacagcttctgataataaaatgaataatcctgcaccattgcccacaatcacaacaaaatcatgatgtttctggtttgcttccaagtagtatgttacggaaaaccactactataaatatgtgacttcctgttttattatttactcattaatttgttcgaaattaatgcagattgcactagtcctttgattatgaacaagatcttcacatattttatcagatttaagtgtatagttagtagagtattcacgtatcttttaaatgctaatatcatgcgcgtttggtttgatgtgatatcatttttcattgtaccaaataaaatttggaaaaataagatgttttttattcaactcgcgtttggcatcttttttttatatgtaataatttatgaaattgacacattattttctgtacaaatcacataattaatctgctattattggaataaaggaaatgactgaattggctttgacaactcataaatgtcctggatagttgtgatataattaaggctagcctttataggtgaatgtgataaatgggttacattcaaaactcaagttacatccacaccaagaaaaaaaaatctgaagaacaactggagaagccatcctttacttcattcccttgcaactctggcgagtgaggcagcagaaggtcaggcaatgcctcactttggttgggttatttaggttcttcagtttcacttttgaggaaacaaattccagttctcccgtatttttggttggattgatttgctcactcgggtttcaagttgagtaatcatgttagttttctctttgatatatagacctaaattttgtggagaaaatatgctttattttgatattaactaaatcatgtcacaccagtcagttagcttgccagcaagctaaacaaaacttgaggaccgctgatattatttagagtctcttgcattgatgtttcaaattgtaacgagtgcactgactcactgtacttcttttccataatataaactgtgaccttttgaatattatgtgactgtattgtgtcttcattacttttacaggtgaagtcagctgatatgatgtacctcatttggataacaatttgactggcaccagattttacagaaatatgcaggaggggctagggcaaaggatgcatgtacctcatggtatcaatctgtgtatcgcaacttcttccatgccctttcaggcgcaatctttcattgagcccagtaccggacaagtgaaccctcctgtaacatctgaaaacttatctgctaactcacaagctgttaatgatgctggagcagttgaaggtactgacatgaacgaaaaatcggttcaaaaacctaagaggaaaaaacataggccaaaggtcattaaagaaggacaatcagcaaagctgcagaagcctaaaactcccaagcctcccaaggaaaatgggaatcagcctactggaaaaagaaagtatgtcaggaggaagggactaagtgcaccagctgaacaaattccactatgtgctgatacacacactagagctaaaccaggagtagtccaaagatgtttggactttgatgtggaggaccagcatggacatttggatctggtaccgcaaacccaggaaacagagatacagactggtcctgcggacacacaaccatcaatatctggagttgaaagaagtaatgttcaaatatcataccattggggtggtacaagcagttctattagttcagttgacccaatagctggtatacacggattacaggcagactgcaattctaaaagagtcagttttgatctgaacaattctatagtaagtcagctgccaaccaattattctagtccaatggacagctctgaacaatttttcaattttgatttaagagaagaagttcgaacaaaccagttattgcctcatctaaccagctcggtagatcacacacgacacccctcggtcaattttgaccaatacataagcacatctcaagattgtccagaaaaatcacccagacattatcagatggtcagtagttatagaattctagaaaatatgacaacagcttctcagtataccgaaagggtgtctatggggggcaatttcaaccctgaagcttgtatgggcgaagatgcaataatcaaacaaatggcccaaagctatagacctctagaaagtccatttgtacctcccaatcataatgaaagggatatgatgaacggaaatctgaacgagtttcctgtgaagaa

SEQ ID NO: 190340 - DNA, 603 bp, Zea Mays
cttcgagttcttcgctgacttcaagcaccgttgtcgcgctacagtggcattgtcgaggaccttctacctatgtgttgtggctctcccgtcgcgacaacttatggatcctcgatgcgtcgccacgcctacctcttcgctttcttccagcacaaccttgttgccagcgtcgccatctcatcctcaactacgctctgacaaccgtgagttgttacggcactcccgccataccgcaccacaaccatcgtggaggtcttctctgctcgtcccttcagacgctgacacttggttggggctttttacctagtatgtgcggtactggcaacaccgacacgtgcattcgtctacgacgcgtttctaggcgtggcaaaactggagcacgtcttgtccacgatggtttgacaacatcgtcctcgacatcggctacttcctcgactgtgtcgccgtcttcgtctatggcgccctccttctgcgccatcgtcaccttggcgcctcctagcgcgtcgcaggccttcccgcgtgttgcgcctatgcccgcgaattgtgaggcttgtcttcttcagcgtcctcgacagctacatcgaccacagctacccgacgcacgac

SEQ ID NO: 190341 - DNA, 344 bp, Zea Mays
agaggccctcaaaatgtcccctactacatgaagaatctaagctgctggtaagcttggtcatgacgtcaggtcctgggtggccgagacgacgatgccaaatggtggaggtggtggtggagaccaggactgaaggtggagacgcgccggtggaggaaggccggagcgtgtagaggggccagcgctgtcacatcaggcgagaggggtcctagtcgccagatccttcacagaaaaatcaaaaaggtcaaactcaatggaacaagaattgtcggtggtgaaccgacggacagaaaggagattatgggtgatgtgagggtctacgagaacatcattgagatagaacggcc

SEQ ID NO: 190342 - DNA, 396 bp, Zea Mays
cccatcataggttggttcatccatgccgaccaagggaactgacgagtgacttttttaacctcaccctcaaagctgtagatattcaaagatggcagattatgttggtttcagaggtcgatggtagacacatttggtgcttctaaccctctggacagtactctgcgaggtcaacttacgagggtttcttccagggtgggatcctctttgactcttgggagcgcatttggaagtcctgggcacctggtaattgtcgcttcttcatgtggttggttgcccatgacagatgttggactgccaactggcacctgcttgctcgaagagggttgcaacatcatcctagattcctagattttttttttgtgactaggagtttgagtccattgatcatctgctcgt

SEQ ID NO: 190343 - DNA, 441 bp, Zea Mays
cggcactttgagggggcccaagatctccagattcttttgtagtgatcaaaagtagcagatcctaaaaacaggccattataagctgctttcgctgtgtatttaccatctgcagcaaggctgaaaacatgtttatcccttatgtttggctgtaactcaatccctgaaagagattcccaaaggtttagataatcaaccaagactcttactgtaagagcccccttaatatctgaaatccatttcctgtttacaagtgcttctttcaccgcccttttgttagcaattcttcttggaattgacttgtgcaggctaggggcaatatcagcgatttgagtgccatgcagccatctatcattccagaacaaggtgtttgaaccatccccaaccatagaaacaagagccatagagaaaaaagccctagctttgtttgggacctgtatggga

SEQ ID NO: 190344 - DNA, 533 bp, Zea Mays
aaacaataattatttacttgcccatgtcagatatcaaataaaccaacaaccgttctgttttgtgcacttctatcagattagtttcattatttgaatgataattttgtgtaccaattttatagatcagggatctcggctgcgctcagaagttgttcaacggaatgccgatattcagatcctctagctcaaactagcggagctcgcaatttatgtttacggcttaaagtttgtaggcgaagttagttacatagcatttggcaggacatgtatggttcaaatcatgaatctatatctgttgtttttaacataatggtaggagctcaattaagaagtgagcaaagagagttaccatttgttccgtccatacagttttagtgaattagaataataattaatttacatcgtgtaggcgtccacatcatttctacatcgtgtcttgtctgtgcctgtgtgcctgtatgtagctgagcaatgagctggggctggagcccaggtagatcaggttctggttccataactgccagacacatgcc

SEQ ID NO: 190345 - DNA, 308 bp, Zea Mays
ggctgtgcccatgactccaggccaacatgtaattatatcgccgtgggtaacgaggtgagcgccggcgacgccgcggagatgctgctcgcctgctccgtatcatcctggctgctggccgagtgaggaggcacgggcgtgcatagaacaaagccacacttcgaatgtcgacgtgcgccgccctgacacagagcgcaaggagtccatcctcgctcccgtgtacgccatctatcttgtggtctgatggcacatcgcgggtactagagtccaccatgcgacaaccgtcgatgttttcttcatcgtgaacaaag

SEQ ID NO: 190346 - DNA, 647 bp, Zea Mays
ccaatccgcatcacattctcgtctgccccgcggagggatggatccgatcctaagcttcatgctattacttcgggcggtgatggttctggtcatgtgcagcagggatcccctcctttttgaagacccccccccattcgagtaggagaaggggagaacatggtcattcgggacgtctctcagttcatgaacgtttgggcccaagagatgagaacatgcagcagcggaacattagctcggaggtggcagtttcagatttaagaactttggaatctgatggggggaccttgtctcctaggctgttagagatgactgatgacagggttcttgtttcaccggtgaaggcgaagcagctgaaagtttactttcgtcaaagattcaagaatgtcctgaacctggaggaagctggagctcccaattctgtcactgtgcttcctccatcccccacagacgtggcagctgctgacacggctccatctgagtatcctgtttcagatgttgacgctgtgttggcaactccgtctggaacgttaccttcctccctgtcagatgtggcagcagcacacgcggctccgtcggaggctagtgccttagacgttgatgctgagttggctgctccatctgaggaggacattccagcaacaacacat

SEQ ID NO: 190347 - DNA, 486 bp, Zea Mays
gtaccaaccacttcccagtttgccgacatcttcaccaaaggcttgtatagcaggctaggatagagagagatttggggaggaatccgggatgaggaccaattagggtcctgttgtttcttagtttaggaggtttccttttgcctcacactccttccctttatatgtaacagcaccccctctctatcaatacaagatacaattcctacattctagtttactcacactactaatatcaactttcctaacagcatagatgtccatacatttccaccacttttaaatcaattaatgtgcatcgcatttagcaatattagttgcctacggaaagagaacaacatggttttaaagtcgtccgactaatcgcgactagtcgcggttagtcggccttatcgcctggtagagcacgattagcatggacgactcgattagggcgactaggttacgactaatcgtcctagtcggcgactaatcacgattagtcggccg

SEQ ID NO: 190348 - DNA, 2606 bp, Zea Mays
ttagggtttcgccgcccgcacgctcgacctgctgaagaatcgcccccctgttgaagaggtctgcgcctcgccctataaggctccggggaagaggagatagacatcagtggaccccggcgcgcggctgatggcggagcaggagcggagggacgcggaggctgggggcgatgccgcgggcgcagcggtggcgtctcacaccagcagcatgcaggtgaggtctccgcaccctacttctcggctgtcctgtacgattttgggagctttatgatgcgtagatccgctcgctgctatttgattggctaaacctgcgtccgttgcgtgccttcattttagtttgttagtgcgtagtaggttctggaagggagctgtcggaattttgcatggaggcggtggggaatttctgtgggccaaccgtgccttagatccgagttagctgccgttggagctggtaaattattgttctgagagggattgggtgtgcttatttcttggtgaactgtagtaatgagcgagatatcataagacttggtttttttgttcatgaggaatatgtgggtatgtttttttttgttttttgtgctatccccatgctgctgtaccagcacctgcatgtttgggaagtagtgaggcctgctttactgtggagttagcctgtgtcacttggtttctcactctgtcagtgaacttattggtgatagtctcgatgtgaacagttcagcacaatgagattgacaatttaaacaaagacgaatgtgccctgagcatgatgtaatcactacccatatgccatatcatttcgtaaacgtggggcatacttgattgaattatattgatacaatatatcagctactaccattttgattatttctatgccggcagtagtatccttctatcttgaaaactgtagagccttcccatctcatctgaaatttctatacaatcaaaagttccagcttaggtggatgtgatctacattgataaacttaacatctaggaagtaggaacagaagttgttttgatttaaatttattgcatcatttgattatatgtaccggtgggattttgttcctctgaagccaaatatcccaacttcattgaatgtctcacttcattgtagaaaaacaatcgacttttggtagtttgacctaaaagaaagataataaaaggcacccatgatactccctttcagtggttgttgcgtatgtcagaaaggtcaaaacagcttgtgatacctgccagctgatctatggtcatatttgtatccgtagttaactagttatactacccaatccaagtatcggtcacttcagtattaaacaaacactgatagccatgatttgttagacattgttgcaatggactagagcacgtgatgaatgtttcacttgcacagaatttttattgtggataagaggcccttgcagcagcatgtcattaggtctaggtgcagcagaggtaccaaggatagcaaagtatgacagtagctgggcataatgtgggagagcctagagtgcagatctaaccacgtcaaaagtcctacaagtcttaacgttcatatgattagaccgaaattttgtttttaggaatttgcaaattttgattagttcttactgtgttagtcattggtccaacgtccaatgaatgtttaatttgtgttaactactagcctttctagggtatctatatcgaggaggtccacacgcataatataatgatgaagcattcttctattttctgtctctcgagctctctagttctctctaccaagctatatctgtctgtctcattacaatccttaaccccattcagccatgtatattactaacgatggttacaattctaactgttccagcgtgtcaaagtataccgtttggctgatggtgggaagtgggacgatcaaggaacaggtcatgtttctattgattacattgaggtatgaagaatttctttgctaatatgggtggtatttataatttcttattcatgggtctaagctaattctcatactttctcctgattttctttgatagtgcccaaatatttgtttgcctcttgatctactttagttttgctaccctagtaccttgttgcaacatgcttcatttgaccctcattctgtttctacaaataatgaaattgtcaactattcatttttttcactgtcaagggaacagtgtcccaatgtaaaactaaagaaaaccttgtcgaagtagacatcattttcatatttcatactgtaatggtgattcatggaacagtgtcccaatgtaaaactaaagcaatagtccactaaaaatgaaaataagcacaaattacttgatgatgattcatggatcaatatatcggtgtaaaagtaaagaaatggtccagtacaaatggaaacaagcagaaattacttgtagtctatgcctctatggcaccatgatattctgtcattgtattatgatttctaatctgtgtgcttactttttggaccttatatgatttattatttcgttggtttcagggttcgaaagaactcggtttgactgttttagatgaagatgacaatgagacgctacttatgcacaacatcacatctgatgatatttacagaaaacaagaag

SEQ ID NO: 190349 - DNA, 461 bp, Zea Mays
tgatgtctcggggcgggcttatgggcgacacagctctagtgcttgtgagatcaagctagtggcagctctgtgcttttagtcctttgatcttgtagagttaggtcagccacaacaaatgaagaggtgggctgtgtgggccagtaaatggtagcctatctcgcccttctttctggtttttcttctatatcccttcttaatcttgcattattgaatatataattacagttaaggctctaatctgtatcctcttctaatatactaaggaagatgcagaaatgtactttttaatattccttacatgtatatagtaggtttaagaaaggaagataacagtaatatttgttagatgaatctctgtacctatttttgtatagtacactgcatcagacactgcacctgagttggacacttacacctgcacctgtgatccgccaacactgacaacttgactagactatacc

SEQ ID NO: 190350 - DNA, 387 bp, Zea Mays
catgcattgtcccgcacctagctagctattagctagtcgctgaattcatggagagtaggcatgtgctgctagctgcttgtcctcctactgcaccactcgtcattacatgctgccgctgtgtccgatcgatccatccgtccgtgtagccgtcgtatacatgtactccctcccctcctcgattatctgtcaacgcattcgtgtacgcatcatgcatgaacccgtactagctagatcgagtacgtacgcatcatatcgtacaaagcaacaacacgcgcgcgcgctggccgccgaaagaagcggagggaacgatcgacgtcttccgccggacacatgtgctgcatgcatccacatcagccggccggggaagaatgaagcagcctccgacga

SEQ ID NO: 190351 - DNA, 382 bp, Zea Mays
tccgagatagagccaaacaatcagttgtggatgcaacaatctgtctgctgccacaagggatcagtgggacgggcaggagcagagccatcgatgtgtgctagcaaatcgaatttgccgcacatggtgctaaagaacgatgattggttgaagttggaattcgttaggttgagggtcataggaatgtgtgtacgggtgaggaagacgggcccatagttcttgctagagcctccattcgttgcgggcgcgccgagcaggggagaggtcgcaaccgtggtcgaagaatgggtagaggtgattcacgtggctggaaggagttgcaaggtatgaagtatatgaatatgcagggggcgttgagattgtgttccgggaaaagcagaacatg

SEQ ID NO: 190352 - DNA, 458 bp, Zea Mays
aaaaagttcaaagaaagatcggcacaatgaataaaggtagcacctgttcagcaatgctagccgcttctgcatatgcatcttgaatgttttcggccagcctatgaaggaatatgttagatattcctcctgctgcaacaatcaagggtccagtggcaagagttagaagtgctatttgccaacaattcagaaggccaacaatgagaccaacaacaaatgtagccatattatgtatgtagttcccaacctacaaagaaactaagttgttagaagaccctaaaagtgatgagtttcactctgcagatcataattccggagaaatagatggttacttcactctttaggcttactttctcgcttatagctgactgaatgagcaatacatcactgagcacttgactaacaatatctccgttgttaccatatgtatcaaaaaaactcatgtcttgatttagcaaaac

SEQ ID NO: 190353 - DNA, 542 bp, Zea Mays
agtatactggataatttgtatacttctccttcagcatctaaccaacaattatgtttattcaatagagcagaacaattcacaattaattctcaataactttcaatgattcatcatgtaccaaattttttacactatccctacatacagaactattttggctggaaccagtgcaagagcgtggagttttggtttgctctaatgcattgagttcacaaagctaaccagaatcgcaatcaaaggaagtggtgccataaacagcaggggccaagaatggttgatatattcagatctaaatgacgatgatgacagcagcggcgctgtaagacagacatcgccatctaattacgtcctagctacttagacacaggtgaaaaacaattctagttgctcacctagctaggtgcttctagcagtactatgtggagctagataggacgatgctgccacagactaaaccactgggtatacagattctaccttgagataagccaaagtatccacgagtaattccagtagtacatttatgtagtacttacattaat

SEQ ID NO: 190354 - DNA, 387 bp, Zea Mays
gtcctgtgctacaagagtaatgattgactgtgatcaacagaaatcacctgtaggatactactcaggtttgaaggcctgtgatgaacctcctaaacaagttgctaacaagacactcatactatttgaggatgtggatactgtctttgatgaggatcgtgggtttatttcaactattcttaagatggcagagactacaaaatggccaatcatactaactagcaacagtgagcaatttattctttcctttaggctcttacagataaccttaataatttcagtcaatgtagtactagtacactaaaactcttgttattttcccccaatatctgtaatttgtgtagagaaggatccgtctttgccgaatctcttggatcaacttgttttgga

SEQ ID NO: 190355 - DNA, 469 bp, Zea Mays
ccatggaaaactcgcaagtcatccggcatgatcctgtagctgtaacctcaaatggcctgtggtctgtggaagtgtggagtggcaccttcagatgcagcctgtagtttagggatgaaaaaggcggatgcagtatggccaggatcaactgctaagcgaaaagattatatccagccgtagccttatcatagggaagataaactgcttaagctcggctgtaactggagcaggttaatcatggttgacggtacggtggtctcagatgatcctcaagttaagtatttgttggggacgagcagagtgcttcagtgcttgggtttgtctacgaaccatggaacaacccacttgtatctttagcgtcacagcacaatcacaagcgctgttgtggcccttcgagggcaacaggaggtaaaaaagtactttatgaaggtaggaatatttggtagcatctcctctctttttttgacaaaag

SEQ ID NO: 190356 - DNA, 499 bp, Zea Mays
ggaggctgccacctccggtgctcgcaaacgcattggcgtcatttcttctggaagctactccggagagcttgggattttctctaaccagacaagcgagatggactccgacctgctgtctgagtctcagtcggggcacaagtcactggcctcgcgctcgcagcatggccgtgggcgtcatcgtagcctgacacagaagttcgcaccaaagacgttcaaagacgttgttggccagagcttggtggtgcaggcgctgtccaacgccatcctgaggaggaagattgggttggtgtatgtattctatggtccgcacggcacgggcaagacttcgtgcgcccgtgtctttgccaaggcgctcaattgcctctcctctgagcaccccaggccctgtgactcatgcacgtcgtgcattgctcacaatctcggcaagagcaggagcctgatggagattgggccggttggcaacatcgacatggagggcattgtggacgtcctcgataat

SEQ ID NO: 190357 - DNA, 345 bp, Zea Mays
cgctgacggaggcgaagcagcgcccaatcgcccacttggtaggacacttgtcgatggcgacggtcgtagtggcgcttatgcacctgctgcgcctgttccaggcggaagtggacgtcagcgaggaaggcagaacgctcctccatggttggtgcggcagaggtaggcgatggtggcggtgggggtggtggtgggcggctgcaaatgtagaggactgcatggagcgggtgggagaggatcgtcgagacctcgataccaggttgtcaagggcacggtgatcccgagtagctggccctcgactgtggagctcgtagtcggtggccgattcctccagggcggaggttatgc

SEQ ID NO: 190358 - DNA, 404 bp, Zea Mays
caaccagttccagggacaggtccccaacgccatcgtcttcggctgtgtgagcgtcgtggctatggatctctccggcaatgcactcgacgggggcttgccggacctgtcgccactccgctctctagcccgtctcaatctgtcgggcaacaggctccgcggctccatcatcggggcgttccaggagcagttgagggtgatagacctcagcaacaacggcttctctgggctgaatttcagcagtgggtatgccggctcggcgttggtgtacctcgacttgtcaggaaacgagcttacaggagaattcaccattgccggccggttccagaacctgaggcatgtgaatcttgcacacaaccagttgtccaatgctaatttgctggtgtccatgggtgggatatctgggc

SEQ ID NO: 190359 - DNA, 299 bp, Zea Mays
cttgtctctatcggacgggttttgggatcgcaatttgtgggggattattctgttacctgctgacagtgattttggctgattctattctacggttaccgcgtgacatttctctcatatcatatagcttaaccacaggctctgaaaattctggatctctgttctcatcaatatctctaattctagtttgtagctcttagcaaatcctggacgtagaattgggccatgcatatcaagtaggcttcttccatttatgccattcgtcagaaatcgtatacaagtttccatggcacttttggtgg

SEQ ID NO: 190360 - DNA, 551 bp, Zea Mays
tgaacgtgtttgtgcgctttcctcagacacacttgacagtgttgttgaattagcacttctacttcttgagtgcccacaagatttagctagaaaaaatgtggccatctttttcgctgctgcttttgtgttcaaagctgttctggatctatttgatgcccggaatgggatgcaaaagcttctcgatatcctttgtggatgcgcgtctggaaggtctggtagtaattctggaggagcaggatcctccaatgtaaatcaagggaatgatcggtcgcctgctgaagttttgactgcatcagagaagcaagttgcataccatacatgtgttgctctacggcaatactttagagctcatctccttcagcttgttgattccattcggccaagcaaaagtatccgtagtattgcccggaacacttctagtgcaagagctggctgcaaaccttttgacatcagcaatgaagctatggatgccatcttttgtcagatccaacgggacagaaagttaggccttgctcttgtgagagcttgctggcttgcgttggataaatttg

SEQ ID NO: 190361 - DNA, 376 bp, Zea Mays
caggtgcacagctcccgctcggtgttcgaaagcctgcggagcccaaacgtcgtctgcttcacttcgatgatatctgcgtgcgcgcgacacggagatggcgcaaaaggagtggagctgctcagggagatggtttgtagggggctcaaacctgatgacgtcaccttcctgtgcgcgatcactggatgtgatcaggcaggactgattgaggaaggcaggctggtgtttgagtttatgagagcgacccgcgagctgggccctgacgagaggcacttggcctgcatggttaaccttctcggccgagacgggtttgtggaggaggcgatgaaggtgatgatggagcagcactcgccgctgcggcactacaccaaggcgtgga

SEQ ID NO: 190362 - DNA, 328 bp, Zea Mays
ccggaccccttccacatagaatatccctatatgcagatgatgtggttatgttcttacaaccaagggactaagggagcatggtatctaggttgtgctcaacattttaaagctatttgggaagtatcaggattgaaaatcaatgtctagaaaagtagggcctgtttggtttactcgtggccagacttgcctggcccaggcagcattcccaggcgctcgggccaggatatgttgcctggcaggcaactgcctgggagagcacgaaccaaacgagcccgtagtgtgtatcccattcgatgtgaagatgagatggcagtcctacagcagcagc

SEQ ID NO: 190363 - DNA, 480 bp, Zea Mays
gggaggtgttgtcgctggtggagtgccatggaacttcttgagaacgcccacgtggaacacgtcgtggatgtgggcacgggcgggcagctctaggcggacatcgacggtgttgacgatctccgtcacccggtatggcccgtagtactggggctttagtttgtcggcgacatcggtggccagcgacgatggggaacggtggcggagttggagcaacacccattcacccacctgatagatgatgtcgcggtgcgtcttatcatagtgcttcttctgtaccgcctgagtctgctccaggcgatgtcgaacgttagccaggaactcctctcgttcttccatcgtgcgtgcaacagctgccacacgtgtttcctccggctcataggaggaaggagggtcacgaccgtagacgaccctgaatggcgtgtcgcggagggagctctggtatgcggtgttgaagacgtactccgctcacggaagccactg

SEQ ID NO: 190364 - DNA, 286 bp, Zea Mays
gattttctcatgcctcttcctcaatcatgtcgagcttggtggatgttgagattaccggaatcccggtgcatgcttggtgccgctcaacagctgaattcatattgggggattcttgtttcattgaggaagttcatccagacactctgttgcagaaaactcttccatcctttgtagcaagggcttggtgcttccaaccgaaacaattgcaccgtgacatgattctgcatattctggagccaggcccacaaaactctgaacgaagatgcttagcctataacataagcgt

SEQ ID NO: 190365 - DNA, 417 bp, Zea Mays
tgggattcggttgctcgtcggaagaggatttctcggaatgttgtctttattgagattcgtcctttctatcctagtccgtctacatgtctgatctttggttgatcctctgtcttccctttcctgtctatgaacgactctgctacagcattgtgtctgtctcccacctaccactattgtgccttctcctcaatgtgccctcgtctgttgcgcctcctcctatgcccctctatgacttattcatagacttttgttctgattcctgactacattgtcaaacctcctgcgacaaaggtctatacacgaagacgtccttttgactactccatcggcttcctctggtgtgtcctcttctcttgatgtttcagcctctctgttgattcatcttcttcggctaggccatattcttctggtgatagc

SEQ ID NO: 190366 - DNA, 531 bp, Zea Mays
aaaaaactgaacaaacaaaagtaatttagatcgcgtgcgtgtgcagcaacggcggcgctcacttctccgattaaccttgccgcgtcccgacgccacgtcaacaaatacgcgggcgcgattcaaatcccgactgacgcctgcctgcctggcatggtttggcctgccctgccctgccaccaattcccctccctgcattcgtacaataataatgagcgtattttagtccatcccgttgatttggtcgagtatttattggctgccacatttttccacccacgccgtgtatggaactccacggatccgtatctcaacttggccaccctccaacaggcgccgtgttcgttacacggctagtcctctgcaacgaacaccattagtcctctgcaatgaacaccattattccatggaaacttgcctcacgaaaaatctctctatacacttgcattatccatagactgagcacacgacgcgcgctgcgcgctacttcacatcccactactcctccaggttattgcatcatgcgtaataact

SEQ ID NO: 190367 - DNA, 704 bp, Zea Mays
ctctgctgggctcggatggatgaatgatgatagtcactaattggggtagattgattgctctcaagagatctgctgctggggcttgcagaagaatgtgatggagatgagaatagtacagacctgctagtattggatggagatgctccatggcttctagcgagctcatgcttttgttgctgagaccagttagcaagaagaccccactcaagaactccaacattcagcgccttgtcttgaagatgctcagaagtttctttacgctgtaaatatgaaggaacatttgacatatgtttgacaagttcatcaacagtagttgcctttcgaccaggccatggttttgagcccttcatgcatgcagccctttccccaccccaagactctcgttgtcttcggaacttatcattcttcacaactctaactttatcttcaaattttccatctacatttccattgactggtgtgaccatgtcctttggcacgcgtacaatttggtcatgctgtgaatttcccttcttttgcccatctcgacctgatatgatcttcacattcctttcgctgctaacctgaacttttgttggcatctttatgatgggtgaacatatgaagcagaagtttcaggtataacttggcgtatggtcagaacacaattatcacttgattcagtttggtatgttgtggttcaaacagagactgagaaaaccaca

SEQ ID NO: 190368 - DNA, 273 bp, Zea Mays
tagcagccaaggacgaaccaagcagctagcagaccagttacgtgaccattcacctcagggaaacgaaacggtggacacgaacattccccaggaacctggacgacggcacgcaattcagagccaggaaagcgctactagtattattcaggacagaaaggggacgggagaatatatagcatgggccatgggggaaacaggtcgccgtcgttccacgaatctgacggcgaaaggaggtgagggcggcgagcagccatcgtcagcaagtgataatca

SEQ ID NO: 190369 - DNA, 329 bp, Zea Mays
acgtgtagacgccatctccgtacggtgcgtatgaatgaatactgtccctgtactaatgtccggcggttctctgtcatactactagaaactagggccattgattgacagctaattaacaaccaagtgacatgtccacgctgattcagatctcacatcaagaagcagggctaacacactcgtgttcgacattattacgatggtaaatgcaacgaggaatgtaacatattgttcgtcgagaagtaggttaagtccgacaacaacgttgactttgttcttcgtcttctagactcctacaaaaaaaactcacagaaaagagacacatgatgaat

SEQ ID NO: 190370 - DNA, 306 bp, Zea Mays
cgccgagccacctcgccctcctctcgtgctctatcaatggcacaggcgcgcatccgatgacagtcctgtttggggccctatgcgcggcagctctcgcctctgattagccgtcttgcctcgtcctcctctcgctccaccaccgcgggctcgacacctccatcaacgacagtggctatctcggacaagtggggaggaggcttcatggtggtgacaatctcgggtgaggcgactcgttgttggagcccgggcatcacgagggacaatgcaggcgtacagggggtggcgggcgtgggcctcgcggtcgtc

SEQ ID NO: 190371 - DNA, 357 bp, Zea Mays
ttaataaatgcagacatgtgcacacagcatcaaagtttggcccattcaatttatatgattattagtcacccctacaagaggaggctaaggtgaaaaggcagaaattgtatactgatgccataatatgatgtttgctgacaaatatgcaggaataagctatgcaaagccaacagccaacagggtattcacaaatagtagggggaattattgtttgacagcaacctcccccagaaaatcatcatcaaaactcaagtccctatattctgcatcctaaattgccttattcaccacaaaacaccaattaacaattccagcagaaatatggatacgagaaacaattccagcattggtttcaaa

SEQ ID NO: 190372 - DNA, 533 bp, Zea Mays
aggaaaagtccacagataacgcgagaagtcatcaagaataagtaaataatacttatagccataaatgctaattacaggggatgtccatacatcacagtgtatcagataaaaaatgcctgctgctccagaagaggagatggggaatgggagcctaacatggcgacctaactgacaagcatgacagaggtgctcaaaagatcccctacaaccggaaacagaggtgttgctggagagtttggacatcacatcacgaccggggtgaccgagacgacgatgccaagtcatagaagaggcggcgacagcaagaacacgcggggcagaggtcggtgtagcggaagcaggcaagcgaagtgtgtagagtggcccggggctgtcacaccgagctagaagggtcctggtggcaagatccttcacagaaagaccaaacaggtcaaactccatggaacaagagttgtcagtagtaaactaacggacggaaagaagattttgaataatgtggggagcaacaagaacgttggataaacggaaaggac

SEQ ID NO: 190373 - DNA, 318 bp, Zea Mays
tcgtggcttacttcagtcgcgttctggcccctcaccacgccaggttgcccgcatatgaaagggagttgatcgtcttattcaaagtcgttcgcaattggaggccatacttgtgagaaaggtcattcacagtccgcactgatcatcgcagcttgaagtacatattggatcaacgcatgaccactattccacagcacacttgggtcacgaagctatttggttatgatttggatgtggtgtaccgcgcaaggaagcaaaatgcagcagcggatgccttatctcgtcgggatgaggaggccttaagtattcatgccctatcga

SEQ ID NO: 190374 - DNA, 875 bp, Zea Mays
cgtccctgctagattcccgcggatctcgcgggcttgctggtggtgaaacgatggctaggtgagtacaagccgcgcgtgatctcctagtggttggtgcgagcggtggacggccaagatgatgccgtcgggcccgccgaacccgatggggcccggtcagccagtgagcggtgcggcagcgtcgctactacggacgagctccagcttgctcagtggcggtggccagcctgggatggctggaggtggtggtggcggcatgctttcttcacagtcgcccttctcctcgcttgtctccccgctcacacagtttggcggcaatggtcttcttggaggcgcctcgaatgtctcctccctgctgaaccggacgacgttcaggaatggtggccctatgccaggtccggggtcgatgcagggtggtgggatgcagatgagtacactccagcagagagctgggttggatggtgccagcgatttcattagcacgggagggtcagaccctctctcattcccgtcttcctcacaggttaatttggtcaatcagatgggatcagataatctgcaagtgacttcacagcagcaacagcagatggatgcagtgcaggatatgcagcagcagcagcagctaccaatgtcttacagccagcaacagttgccggcacaacactcgcagcagctccagcagccacaggctacagtgaagttggagaatggaggaagcatggttagcatcaaatcagagcagcagatgggacagcctgaacagaatggtcctgcccagatgatgcgaagtgctggttgtgtgaaacttgagccacagcagttgcaagcccagatgatgaggagtttaagttcagtcaagatggagcaacagagttcag

SEQ ID NO: 190375 - DNA, 545 bp, Zea Mays
atggtattgttgatagatcggatgatgtgtttaggcttgccattttcgagtcgtagtgtaggggcaaggcatgctgagttgagtgctatgcgtaaggaagaaggtgtgggcattgtagttctatcaagcttcctgccattgtcacactagatggccttaacaaaggcgctgaactaagtggagacataaggaaagaaatatagagagtagggaacatgtacaacttgagtcgcggtggaaaaattcaaagaaaatatgagcaattagcacaaataacgaaattatatttgtaactggaagacacctacaacagatgtccacaagtcacaatgtacatatgagatgttgacacactaaaagaaagatgaacaacacgactgagttgacacgcgtgacatatagctttcatatctttattacaagactggatggcagaatcatgaacaagtttggttagctcctcatgacctggatatccaagacaagtccagagtgaggatgaggtgctgctgctcttgatggcctggtgaagagtaaggattgca

SEQ ID NO: 190376 - DNA, 486 bp, Zea Mays
acccaatggtgcagtgaagggaattagagatgacatgcatttctgcatcattacatcttataggaatagccaagctcttttgcatgttgactttcagccccgaagcttcaccaaagcagtctaaaatgactttaatgcaactcaaatcttcttcctcaggtttaatgaaaagaaccacatcatcaacataaatggagattctattattgacattgttgcaactcaaaggatgcagaagacccatatgttcagccttatcaaacagactgcaaaggacatcaattactaagataaaaagcatgggcgagaggggatcaccctggcgtaacccccctacaatgcttaatagaatctctcggatatccattaagaagcacttgagtcgaagaagaatcaagcaggttagcaatcagattgcaccatccagtcctaaaacccgagtgcacaataatttccaacaagaaggcccaggaaactgaatcaaaa

SEQ ID NO: 190377 - DNA, 503 bp, Zea Mays
tacaggatgaggagtgtttggagcaagaaaagtcccgtcagtctcctattcagagctttgcacttaggcttcttgagtataacattaatgcatctgaatttctgccattagccgaagcaccatcaactcctgacaggctaaatgattttggcattttgaaagtacctgatcaactttcagaagtaatctctctgaacactctgtttctttgtttatatcattttgcttatttcttcatttcatcaaagtgctagtaaatagacttgatacagcaactgttcctagctcagttggtgggagacttgggttacatctctcagacttgtgtctcctttggctcaaatttgggtgcctattcgtacaatgccatctaccctaggttgatcaagttctttttattttttaataaaaagtaaaacttgatatgatctcacaggaggtgaaaaaaatggtaatgacccccccccccctaatttcaggcaaatctcttttatggcgtagca

SEQ ID NO: 190378 - DNA, 521 bp, Zea Mays
acgaaagcagctgaaggttcctagttcaatgttggtttcggagatgaatgacagtgctgtcgaagctgcgcctatagaagaggatcatgctcaagacatgtctgaaggtgaggacggtgagtttgcagaagagatttctgaagacgaggatggtgagtttgcagcctctgatttgaatgatgaagatggtgatgaaatggatgacacccaaagacaaccgtctcacatgcatgttcatgcatctgaatctatcgaggaacctgtccatagacagtcccagctcagcaatgctgaagagggaatggaaactggcattgcacacgtggatgcatatatggtagagccattggcagagaacaatgttttctctgaaacaaggtatgaaatggaggctccacaaaatggagctgaaactgctgttgttgatctttacagagatgcagaagagcaaccattgacagagaataatgattgctccgaagcagagaatgagatgaacaagagtgagtttgaaactggtg

SEQ ID NO: 190379 - DNA, 420 bp, Zea Mays
gggtggagtatttcaggaaaaaggctgagaagttctgccggccgacgaggggcgccgcgccttttctcgtgtgcacctcctgttcccatctcctgcagctgccgcaggggaagttcgcaggccggaagaaggatcaggtccagtgcggttcttgttcagagatcattgctttggagcctaagcaagtgaaagttcatccggtgatcacgccaccgtctttcccagtatcaaaaggtgtcagaagtaaaggttccagtcaccgggacaccaagagttccgggtggtatcaacatcaggatgatgacaacttcaatttctataagccgcaagcacagaagaaggattttgctgacaatatgtcaccgtcttctaccgccagttatggtagaacagacagtgagcatgggtcaaacaggagcg

SEQ ID NO: 190380 - DNA, 504 bp, Zea Mays
tttccttctaacgacaccaggagagaaatttcctcctgtgcgcgtgaaacaattttcctcctcgccacgagatcatctccaactcaatggaagacctaaaagttacggcttcatagtcccatcccaccacgaggggcacggtggtcggtgggttgagggttctcagctggctggagactggagcatatgttttctttcaagtccaggtagtggtattagtttccctacttttccttattcatgcatcaagttctgggatcatgtttgtgagcattagatccctgctgattcgttccgttcttgtatcgattcctgtcgccaatccataagctgcgtttctgttgacgtcaggcagagtcagggtttcatgggggaatcagacgtgaaggaacagcagccgaacaggctgcaggaggagctgaggaaggagaaagagaaggcacgcgccctagacgagatacaagacctgcaaggcgaactggaggcagcaagagattcagagaa

SEQ ID NO: 190381 - DNA, 406 bp, Zea Mays
ggcccctgcactttgaatcgcttatgtcattgttagcaatcacataatatttttcttttctcttagatttaatttgtataatcatataatcattcatatattggtacaacaggatttggttcagcttctcactttgttttttaaatgagaagaagcagacaacaaattatagtgaaggctcctctcatcccctgtcgcatggtggatcacccccatggaaccagcctagccaaagacaggtatgtgcatgatgtcattcttggtagcctatcatcatctttggctcagagtgcttctatagttaaatggatgtagtgcaagttttatttttattttctgttccagttgttttctatgctacttccttggtattagttcatcgtgcataagtcatctgcagcaaatg

SEQ ID NO: 190382 - DNA, 738 bp, Zea Mays
attttatgtacatcagcaaatatacttgtcgatattatgtacgaagtatgctgcaaattgcaaccggtggccattgggactttgagaagaaagctattacgaactacacgaggacagtttgcgaatacaaaattccaacaattttcctagcttaagagtcagtttggataccaagggctaatcagtttcgtgcttcataattttgttagaaacacgactcaagtttcgtcacataccctgtaaagctagtggcgctcctgcttctttacacagaccaatcattcctctgattcttcccaactagaagtctggatgtgcaacgctgtgcaagtttacaaatgcagtgtcaagtgcggcgcatgggaactgaatctgcagcgaatgtgcaagaaatacacggcatcatatttcacagttcacaccgagcaacatttaatttctttttcctgttaacttacactaccgctgtctgtattttcattgaattactgtcaagaacaaactgcaactctagcagtttgagatgtgaaaccacccgatctgtaaacatgttgacagaaacctagaacccaaaaccatgtttttaaaaaccaattaaatcaatatttactctgctcatttatgtgccattttatctggcgtctgcttggtggttgggccttcaatagtgatattttggccatagggacggtccctcctgcatgacagaatgctttccttagcttgacagttagtcgg

SEQ ID NO: 190383 - DNA, 442 bp, Zea Mays
agggaaataaccgaagtgctttctgttcttatctttctgttgatttttggtttggttgcttgtttttttagttgcaggggcctcctgttgctgttgctgctgcagctgagagtgtagttggtgtggtggtgaggaagggctgtctgaagcgtctgggaggtagtgctagcggtggcacttccggggcttccaagaaggtgagttttgcattggatgaaacgccagaggtgaagggacgaagacgaaggtcccaggtgattttgccactcgttgttgccaagacaagggggaggcgcaagggtaggaaggcacctagttctgcagcagtgagtggaagcggtcggcggcggaaacacgatggtggtggtggttctgctcgtggaagcgttaccagagaggttggtgcagatgccccagtgacacggtctaggatgaaagtggc

SEQ ID NO: 190384 - DNA, 312 bp, Zea Mays
gccagcgactcaagatcaaggctgctgccctacgggacgtcggcgaaaccatcgaagacgcccgactcgtcctcagcctcctccgcggcctcaacccgcgcttcagcgggcactgccgacgacatcgcaaattctgctgtcctgccatccttctccagggcccgcgagatgctctcccttaaagagttgcgtctcgccaatgacgagaagatcaccgtagcatctgccatggtggctgcctctggctccacctgcacctccacgggatgccgctcctcctgcgatgctcccaccggtgctcctcccaagggc

SEQ ID NO: 190385 - DNA, 435 bp, Zea Mays
gatcaaagttccacatccgaattatccatcaactcgtgttgcttttcaagtacccaatctggacattcacttttcaccaaaaaggtactgcaagatagttgaactgcttggtgtgcttctccatatgaagggaaacaataatgaatattcaaataaccatgaaagtggtagcttggcgccttggtatcctgctgatctagctggcgatgctagaacattggtttggagggtatgaagttacacttttgttctgattattcaatcacattgtaccatgtgatgcatctattcaatttgctgataccatatttgtatgtgttgttttcggttcaagggcattggttattcgcaagctgaatggcatacttgctatgttgtattatctgggatgtatctatatattttggagtcagaattctccgcgaattaccaaag

SEQ ID NO: 190386 - DNA, 603 bp, Zea Mays
caggagaatatagcaaattccgttcaatgccattggtggaaacagccatagcattagccgaaagtggcaaaattggggctttaaatcttatattcaagcgtcatccatatactgtctcttcagatattttacgtgttttgtctgctatcccagaaacccttgctgttcagacttatagtcagttgctgccagggaaatcccttcccagtgttgtcatattaagagctggtgattgggttgaatgtgaacagatggcttcatatataaacaattgccctgccgagttggacaaggtcgaagagatcaaaacggaaatacttgtaaagcactcaaaaggcttttcatggccttcagttgctgaactttgtgagtggtataagaacagagcaagggacattgactgcttaagtggacagctggaaaactctctggccatgatagagcttgcatgtcagaagggcattgtagagttgcagccattctttgatgatattaaatgcctctaccaggttgtatattctaatgaattgaatgagtttacaatgaatcttttgacatgggaagatctgcctgattatgaaaagttcaaaatcattctcaaag

SEQ ID NO: 190387 - DNA, 628 bp, Zea Mays
ggaaaagggcagagtccttgcggagctggagcgtgccaagcaggcggctgatgaggccaatgccaagctgcaggaggcgcttgatgcgcagaggagggccgaggacgcgcaggaggctgacaaactccctgccggcgagtcggaccaagcaagcatgcacagccagcaggaggctgatgttactgcgctgcgatcggcagtggagcagcttgagaaggccaggtatgagctggccgacgcaatcgatgccaggaatgaagcactcagccaggtagatgatgctgttagggcttctgaggtgaaggctcaggaagccgagctgcttactgcagaggttaagcgcctcaaagggctggttgattccaagctggatggcgaagcgaagactgtagagaggattcagaatcttgaagcagagaactctgcattaaagctcgagctcgagaaagcaaagtctgctgaagagaaggctgttcaattggagcacatggttgatgaacttaagagtgatgttgatgatgctaggaagtctggctccaagtcagagcagttagctgatgaatggcagaagaaggcacatctgctcgaggtcagattgcaagaggctgaccagtctaatattttgaag

SEQ ID NO: 190388 - DNA, 431 bp, Zea Mays
gttgaaatatgacctcatctttgatggaggttgcccttctttctgttcctggaagaggttgttccacgaggaagctaagcttcaagcacttagattcagtgatggtaatcggcctgccttgctctgtttagactctctatcttagctttcccttttgcctccctcagtcttgtcgttcctctctttctggttgttttttggtatagtttgagacgtctttgcacatgcttcccttattttatattaataaaattcctttacaatatgtgtatgggtggtgggggggtctcccctgctgtatctttcgctaaaaagagttgaaatatatgcacgggcattcaagacatactttatggataatttaatgaaactaatttgatgtcgtatatatcggtttattttctgtgaacttggtcagagctagagaagtt

SEQ ID NO: 190389 - DNA, 315 bp, Zea Mays
ccgcacctatactgcagttgttggcatttgacaagctgttcacggtagactgtgatgcgtcgagttgggtgcactaaggcgccagagcattgtcattctttagtgtaggtccttcgtagctcgacatctcaaggtggtagcctacgtgtgtgatatgattggcatggtgtaggcggtacaacgttggaggcatgggcttggtgcaggcggtacaacattggagtccctacttatggggttgaagccgatatggcattggagtccctagttacggggcaccattttctgcgcttaaagttcctgctcgatcaaata

SEQ ID NO: 190390 - DNA, 372 bp, Zea Mays
caacatatgcaccatatgttggctgatgaagttagaggaactgccagaatccacaagcattaacatggtatgttttcccaccactgacctgatcctcatgctttgttcattgtcagttcctgatacagcctgaaaagataaccgacagcagtgatcctccctctcatcctcctgggcaagtttccggagaacgtcatcagtgagttccattggctcctcctcagtaaccaccgcattcaactgaacgggtttcctccttacacacttggccaggtgtccaggctcgaatttctcaccacatgcatagcacagtccattaagcttgcgaaactctctaacttgtctctcacgaaataattctccccccatttg

SEQ ID NO: 190391 - DNA, 461 bp, Zea Mays
caagacccgactgaaccaacgggccatcctgatcatccaaaatagatggtctcaacctcctagagtagactttaaaaacaggcggcttcaaattccatctagcagaagaagtattgacaacacaactcactgccaacaacgaatcctccctcaactcagcagccaaatcagcagaggcaccatcaggagaataaacgggaaccacaacatcacacaaggccagaacaccaggcgccgccagcttctcaaccgcagcacacgggagggtaggggcatcaactggttctgccaacgaatccgaagagacagacgccgccacatcatcactgttatccattaatgcatccaaaagctccacatcatcagagggtccaacacgcgtcgacgaggaatgaagacgaggacccagccgcgagtgcaccgaagtccgaggcaatgaggcctgatcacccagcctctgc

SEQ ID NO: 190392 - DNA, 271 bp, Zea Mays
gtgctctgtagtatttagatactctgctgtgtttcttccctccaagaaaaccatcgactgagttggttcaagaagcaagtttgttctgtagcctctgctactgccttgcctgccttgcgttgtttcactaacctcccgccttccctcatgtattcatctctcattcgctcccacagtgctgccttctcttctatgtcctatggtcttccttgcaacaagttggttaccagccattcctatgaatagttacggttgaaagatgattagttac

SEQ ID NO: 190393 - DNA, 373 bp, Zea Mays
ggatatgagtccatcggcataccagaatatggctagggaaacccatttattgtcgatgtgtttggcgcaattgtttcggcgcctaatttatgtgataaaaaattaggcatgtgagtttttcctaatgcatgtgccaccctctctatatcctctgtgatacttttaatccgattatcaaaagaaattttaatagatggaatatcatcggctgacctggcatcacctatcgtggggagctgttgcagcacggctgacatatacttggcgtttatctccctctcttggacggtcttctggtggcaatctaccctgaagtgcgagaggaaccacttatccgccaccttgagcacctgatctttttgtcgctggacct

SEQ ID NO: 190394 - DNA, 328 bp, Zea Mays
ttccctctcacactatccctaaccacatggagcacatgaaacaaatgaaaagagaaagagaaagttgattggtcgtagaggactagggtatatggtggcggcgacgacctgagcacaacacaactcaatggaaacacttattgtatcatacacgatgtatgttgactctattgcatgttatgaggcatcagaaactgctatttggcttaagaaatttgtatctagtgtaaaagtggtggagaccatatcaaaatcaccgaagctacactacgataatggagcaataatatattactcctataaaaataggtcaagtgatactaccaaa

SEQ ID NO: 190395 - DNA, 1347 bp, Zea Mays
catgaccttatttcagttaaaccagagtataatgatagcagcagatgctcgactagtgctcgtttggcatcaattgccccatactctggccggagggagacttctgtctatgcgactgatatcatcagtggaatcacgatacactgcaaagtattcgtagacaagatctcccggatcagtattttccaccatgctgttaaaattgatctagatgaaattgctacattacgtatacatgccttcgatgatgaaggtaattcatatgaaccttttgtatctttcattcttacgttatgaaattgacatagtacatataaacagtgatactgctttttctatctagtacttgggttcattgtttgtagatcatcagtttacatcacattttgttcccttcttttctggttcttatttcttaatgccccgaagtcgttgttgacctaagagcttccttttggaacacttttagatttagtaagccttttttccagtcaggcatagccgtttagaaccaaaaaaagttggggtaggctagagatgaaaccatctatgaaccacaaacaaaaaggggaaaatttatatacaaaactactgtttccactgttcacaacttctaaatggtaaacaaaggcgaaccatgtcgtttaggccctaagcggtgaattatattgttaggccgtttaaacccttttaaaccgttaaaagccgttttagtcagaatcgattaaacatgattaaatgagctaaatggacatttaatttgccatttactcaatgagaggatcagaggattacaactaccacacttggtacccaactaattaacaccgtaagtacataggtgcagtgggatttagttttcttccaaaaaatcatttggtagaatacttatattttacatgcataaatatgcatactttctagcatgtttgaattctaaatacattaatatgtatattttagtgttgctatacaaaatcgtttaagccattagctccatttaaacaccataaaaaatggcctaaatgctaagcaaaggatgaccaactgtttaccatttagcgtttaggataactctgctattttcctggcattgctatattttcttattttagcatacttaatttggttccttttgggtttagaaaatgtgttctcgacattggtgggcttgcagtttttgtggcaccttaccccgaggttggttgataacagtagccatcatcttattcgtattccactgaaagaaacacatttgagtgactgtggtggcttctgcggtgatatgaatattcggtttgagctagaagacaaggtaaactgtttgtgtgcttgttttccaattac

SEQ ID NO: 190396 - DNA, 452 bp, Zea Mays
ccgggtttcagcttctgtttatataataataagaggcgccaaaaggcaacagatttctgttggtttacaagaagtcaagaataggcgatgcgttcaagatgaacaaaaagatctcaggtttataagaacaacttctgtttatacttactatgtcgccatatttaccagacatgtactacatgttacaaccgttgatgtattgactagtaaccacagctgaggcctaacttttctatgagttgatagtacgtataggtgttaactgaaaacaatatcgcttgaaagcagagacactgtgcataaatttttgctctggcgcaagtcaacatgactgtgtagaggtgctcaactgatagattacagtcctcagcttaagcttcatggcaagttacagtagtaacgaagttgatttttccttgcaggtaacaattcatttgcaagttcataacagt

SEQ ID NO: 190397 - DNA, 301 bp, Zea Mays
gagttgtttctcaaacttaaaatgataaggtaatcgaacaagttcatgtttcttctttgttccctttagcttcggcatgccccaatcacttgacgttggagatgtcctgttggccaggtattcttgcaccaggtctctggtgctgatttgttcagccaccaccctgaattctactgcggccagttggcatggtgaccctagctgcatgttgcataggggcctggtcattctgaagtttagagatagcgggcacataattaaccatcgtcattagtttccctcttttctcctcatcagcctt

SEQ ID NO: 190398 - DNA, 420 bp, Zea Mays
ttatttgcttgttttatggctatgagccggagcccaaaattagcaccactgttggggtcaaataatcttgtaccagctattttttctattttgactgtgaagacagcgtcaggatccatcaccacctatgcacttgagttcattgagaatctgttgaggttggatattgatttgcagcagcaagatgaacatttagtgaagaaagttcttcttcaacatatggatgttcttatccatagtctccatgattttgttaatcatcgcaaagagctcaacaggttactcacgccatcactattgtaatactactgtgcagaatgcaaaaccttgaccacttcaatatactaaaatacttctttcactgtacttgttcatgacaccgggggaatgtgattcggtatatttttaaaaagggcagac

SEQ ID NO: 190399 - DNA, 379 bp, Zea Mays
gtctgtcagcctggctggctttatgatcatcatgtcccggttggcctgcccctttgctacgtctgcatgcacgctcggcaactaccgctgctttaagagcatccaagtgcgtggtgccccctttcgtacacagccttgcggtggctgcgaacaagcgcactgcatactgcccattcttcaagaatcacggctgccaccactgcctcatccgatccatagccgccaccactggcttccttcccctgattctatgtttccctttctcagcatgctcatgcatgcatgcaagttgcaaccaaggaactaacacacattactagtttcatgcatatttctgctacccatacgtaaccgatcttgccttcaagggactggtttg

SEQ ID NO: 190400 - DNA, 638 bp, Zea Mays
cagctccctccattggcactctcttgagtcttgacctttccaaaggaaacccctgccgtttatcaatggctttgactactcatttaggaagctcgatgacaatagcattagcatgatagatggtactatggtagaagcagttagaaccaccttgaccatagtgaggcaccctgctctgttcatcagggaggccttccaacctggaagttgatcagccaccttgttcaccaaaggaaggtcagccttagaagctttgtggatggtgagagggggggtcaagatacttgcaggggaagtccttcacagagcaagccagattgccagaatatcagaggtctgctgcaaatgttccttttgcttgaccaccagaatatcaaagctttgtagatggtgagatggaaaactttgtagatgatcaccaagagggggaggggaacatgggctgcctggtgggctgggccagcccacttcttactctgttccttttctttttctcttcatcatctgctgctctaagctgctgttttaaattttccttaaattcttaaggtgtcacctcacctcacactttagtcgcttaagtgtaaggtatagtcagtcaccacatcaccataccgccttgataaccatgataaaag

SEQ ID NO: 190401 - DNA, 325 bp, Zea Mays
tgacaatgcagcgaggttttataaatggttctcagaggttgggatacaaatttacttttatggttgcacttgtggatgaccctttggtactatgcattaattgccttttttgggtttggctgcagggtaatgagagaggcgagtggttgaataatcttcggtttggggtgtttggcctcggaaatagacagtatgagcactttaacaaggtttgctggtgtgtctacattgactggatgcatgcatgatctctgatttgtacttatgctattcttgttgccaattcattatcaactgaaggttggaaaggtggttgatcaactcc

SEQ ID NO: 190402 - DNA, 485 bp, Zea Mays
ggtttctacatttttacaagtgactgcttggttcatagatttgattacactgaagaacctgaggcatgtttatgcgaagttcccatatcaactaaagatgcaatgtcagctaggactatccagttacctcgaagtttatcgtgcattgattaccatcaacgtcactcgctatttgtcctagttggagattccaatgtttcatttagctccaatagttattctggtatgctcattcaccagcctgttctcaacttctacacttgctaatcctgcactatatagcttgttcactgaaattcaaatggcgttgtttctaatcttctttattataatattttaggaacctattttatgtatctattacacttcaacaaaaatctggaacttagtctttcatttaaaagcatgcagttggaaggggtattttgtcccctgaaggatcaaagaacctttgtttcatccccgaaaatcaggatctcgcctca

SEQ ID NO: 190403 - DNA, 288 bp, Zea Mays
attgggacagaggattcaagacttggcacctcatgtatttagtatggttcctaacagaattgtgaaatggtgacatgggagatcattgctgatttcctcactcttacagatgctatcactaatttcgctcttcagcctggggttccagataagcacctttggagattctctagcaatggtctctactctgccaaatctgcctatgaactgatgttcagtggttctacctccttggctgccttcaagagaatctggaggacttgggcgccgcctaagtgccgttttttc

SEQ ID NO: 190404 - DNA, 602 bp, Zea Mays
tgctcagccgctctgtgattgaggttttcccggacgaatattccctcatattagtcttttgcatctgcattcgctcgtcaagccatgcttctgaaatatgaactacagacttgtcaaacttaagttcatactcctttacgtgtttttgctttaacaacctgacttcctcctcgtagtttctgattcctctcgcaaactcatcacaaaggtcttccaacaggcaggttgtcttcttctctttctccagagccttcacagccttgcaaaatgctgatttcatctcggatagctctttgcctagcttcctatggagagtctcagaatgtttccttagacgtctctcatcttcaagctcctcttgcagggaacgaagggctgctctcatcttctcttggtccttgctccttcgagccattttgtcttcggtggcttgcctggctagtgaatcaatttcctgatgatactgctgcctctcttgcataagttcttgaatgcatgcctgggcatgatgcaactctcgtttcagtcccttcattgctgacacatcagctgcatgctgttcttccaagctccatattcgattgagaactttcaatagctct

SEQ ID NO: 190405 - DNA, 463 bp, Zea Mays
gcttgaggaagcccatgaagtttgtaaacatgatcaataaataattgagcaatagaagtagctgtgtatgggtggtgaattggcagaaagtgactgtacttggtgaacttgtccacaattaccaggataccgtcagcattgcctgacttgggtaaaccggaaataaaatccattgatattgtctgccaggctgctgttggaactgccaatggttgcaagagccctgggtaccgtgcacggtctggtttcacctgaagacagatggaacatgaactgacgaagtcagtaacggacttgttgagtccccgccaacagaagagttgtttgatgcggcgcgtggtgactgggataccgctgtgaccacccacgacgctggtatggaaggcgccgataatggactgctgggtgggcaagtgagaaccaacaaggattttacccttgtggcggaggataccgtgctgta

SEQ ID NO: 190406 - DNA, 520 bp, Zea Mays
gggatgaataacctatagaaatttacttacacaactaataattacaattatagcaaatataaaagatatacgaaagcgattacttgctctagttttactcaagattattttccttaaataaataaatagtgggaaagggatatgtatgaaaaagataagctatgtactaaataagatatgcttgataagtggatgagctagcaacaagtatatgtaaaagggaggatactttgggaagtaaatcacatctggcaagatatgatatgatatttatcctcgaagtttagttgcttcctcaatgtggcaaatctaaaccaaatgattcatgtgcttaattcgtataacaagccaagcctataaagggtggcgtaagcattactctaacaaggcactccagcaagccatgatatcactaggatgtttgcgaatctcacgtggggttgaccacaaaaccccttacaatatgatgatcggagtcaacaacaatcacaaaaatctttcaatgatcctccgctatctc

SEQ ID NO: 190407 - DNA, 1286 bp, Zea Mays
cgggtttattctggttacaatctgtagaacatcggcttagatacatgaagtgggatgaattctgttctggattgtataacagatttggaagggatcaacatggtaccttgattcgacacttctatcacatataccagcagaactcagtggtggaatatgtggaacagtttgacatgctgttacatcaactactagcccatgaaagccagttgacgccaatgatgatcacttccagatttgtggatggtttaaaggatggtatacgggctgtggtggccattcaacgcccagccgatctggacacagcctgttcgctagctctattacaggaggatatgttgacacaacccaatcggaaggaaggcaggagagtggaattgggtggttatactagaccctccaatccctccatgaagactgcgaccatggctggacatcaagtatcagttaccacaagtcggatccatcccttgtcagaagatcgtcgtaggccgtctgggagcgatggaaggacggaggatcagaaacttgctgccttgaagtcctacagaagagccaagggcttatgttttaaatgtggtgaaaagtggaattataatcaccattgctctaacagtgttcctcttcatgtggtggaggagatgtgggctgtgactgaccagggaaaggaggaaggggacactgatccaaaggatgagcattatgaaactgagaacgaggaggcagtgttggcgttgtctacggcggcagtaaatggtagtgaaaacaacaggactattcggttatgggcctcgattcactgtcaacaggtgctcgtattggtggattctggtagctcggctagttttatgggtacccatctgatggaagtagtgaaaggggtgcagaatttggtcagacctgttaaagtcaaagttgctgacgggtactatttgtggtgtgaaaaatgggtaccaagctgtcaatggctatgtgagggaataactttttatactgatttcaagttcttgccattggacggttatgatcttatactagggatggactggttggaggatcttagtcctatgtctatagactgggctacaaaatggatggagttcgtgtacaagggtaagaaagtgcagttacaaggcgtaactcctaaattaaaagcttgtactcccatgtctagtgtgcaattgaagggtttgctcaggaaggaagcggtggaacaagtaatcgagttgaggatcaccatggagactgagacaaacactgttcccgatcagattgttgagttggtg

SEQ ID NO: 190408 - DNA, 833 bp, Zea Mays
tggtgtgatgaatctcttgctttagtgtatgaatcttggtttaaaactcggaaaatcagaacatgggtgctctctcctgataaaaaagatgtcagcccacgcgttttattcgaccggtcttcagaagatgtatactctgaccctggctcaccaatgatgcgaagaactgtgatgggaacatatgtcatcgcaaagatcaagaaagaagacggaaatatttatgtcttgttgaatgggatgggtgccacaccagaaggaaatattccattcctcgatttgtttgatatgtatgtttagacccactaatcgatgtctatatttttactagaatataacagtaccaatatatgacatgggtaatgggttgattgatgcaattgcttgtccctccctttttttgcagaaatactgggagtaaagagcgtatatgggagagcgacagggaaaagtactatgaaactgttgttgcactgatgtcagacaaaactgacggggaactgctccttgatcagttaaagatacttacgtcgaaagaatcaaaaacagaaaacacacaatattacttgcagacttggccagaaaagaatcaagttaagataacaaatttcccccacccatatcctcagcttgcttcattgtataaggaaatgataagataccagcgaaaggatggagttcaacttacagcaaacttatacctgcccccagggtatgattcatcaaaagatggacctttgccatgtctagtttggtcctaccctggtgaatttaaaagcaaagatgctgctggtcaagttcgtggttcccctaatgaatttccagggattggtgct

SEQ ID NO: 190409 - DNA, 373 bp, Zea Mays
gaacttgggattatgcaggcatcagcagctcaactcactaagacttagtagctcctacatgaatggtaatgaagtggctaaatttatcccagatgacattgtacttgaaaagatcatacctccaaggaccctggaacactttgaacttttgggctatcatggttcagaatttcctgagtggatgctgaatctgacaaccattttgccaaaccttgtacaccttaagctttctggccttgctacatgtgaccatctgccgcctcttggccagctaccaaatttgcagtccctggtcatagaatgtataccaaatgtcaaggctgttggagaagtttttgctggtggcagcagagcgtttctgaaattaagggac

SEQ ID NO: 190410 - DNA, 612 bp, Zea Mays
agtccctgcacaggttgtggtggaaaacactcctgtgggatctggcaggctcctgtgcaattggtatggattttggagggcattcagtctagatcacaacagagcagatttgatatggaatgaacgcaccagacaggaactgagggaagcattgcaagctgaagttcataacctggatgtcgagaaagcaagaacaaatgatattgtccctggaagttcagtcactgaggacgctggtggtagtgacaacttacctcgaatgtcatggaattatgctgaatttttagtgagctacccaagcttgtccaaagaagtctgtgtggggcaatactatttgcgactgctgcttgaaattggaagcaactatcgagcacacaattttccactacgagatccggttgccttttttagggctctgtaccatcaatttttgtgtgatgcagatattggtcttactgtggatggtgcagtacctgacgagttgggatcatctgatgattggtgtgacattgggagattagatggctttggtggtggtggagggtcttctgtaagagaactctgttcaagggcaatgactatagtttatgagcaacattataaagttattgg

SEQ ID NO: 190411 - DNA, 353 bp, Zea Mays
ctcccttccccaaaacaagaactgtcaatgcatgcagtccatccagccctctctctctcatcagccgtcctgcccagcccagatccaccccatcaaccagcaggtccagtccagccatccaactccagcacagaacgagaacagcaccactgctgctgtactgcttgctgttcgcctcccagcagtggaacaccagcacttccccttcagcgtccagccgtcgaccgagcacacggccagagcggtgcctcgcttctgctttggacgcttgtgatccagtagagtaaccaggaaggaagcaaatcaacacggctgctaaaaagaaaccggcgattaaaccaggtgtaaagtgg

SEQ ID NO: 190412 - DNA, 1195 bp, Zea Mays
taggggagacacaacctagatataccagtattgactaataaaaactcacgacagtttggttgaatttaacaggtatataatgctatctgtttcgctatttcttatctattgtttaccttctgtttccaactttgtatgcatggccaacatctgccacatttgacaattcatagaatcgccaatcttttaaaatgatctacacagttactgttgcacaatgcgagacagacaagcgatccatctatctagtacattccttcggatatcacttcactgttcagccttatgaacagattactgcgaagctcaagccgctggttaaaaaaagaggctccggatagtcattcatcaatggattctaacactatctgaatgacaacgtcatcaagaaggtcctccaccatcagatcctccatgtccaacgcggtgcactccgcgtcatataccaggttcatccagccgtcctttctcataaggtcatgtgccacaatgtcctccaccgtctggccttccttccaatgcaggctcaggtagcagctcaccttcgcccacacctcctcaaggacatggtaccccatgggaatgggtctggttcgcaggtcgaagcgtgagtgccatgggccgatgacgagtgaggagtcatagatgtccagcaggacctcgttgatgagatcaaacaggagcatgcgcctgacgatgctgtgaggttcatcgcttgccatgctgacctcctgacacgagcattctgcctcgtcaaagaccacagggctcactggctgattggacgcgtaccagtcgacatcgccgcagctgaaccctgatttcttgaggatgtccttgacatactggaaatcagcctcgttcttgtcactgacatagatgtgcaagggttctgcagcaccttgttcagaaaattcgtgtatgaagcggaagtccgaatccaaagcatcgttaggctgccctgacttgactaaccactcttcagcttcaagatcagcatccttggcaccagacagtttcgtcgccttaactaaccactcttcatcctcatggtcaataccattcatgacacgggagcgcttcagtggtgtgaccagccattcttcatcattgaaattggcagcatatgctcctgcggacagtggtggcttgactaaccagtcctcgtcctcaagctgcaagttttcgaactgtg

SEQ ID NO: 190413 - DNA, 358 bp, Zea Mays
ttattccatcatgtaggctactaacccgactcgttccaaaacttggaaaggacctgcatactttggtgccagcttgttgtgtgctttgtcaaccagggagcgcattggcctatgtaggagtcgaagccagacccagtctcctacctcaaaagtcacttcccggtgatggttgtcataccaacgcttggcatgctcttgtgcttgaagaaggcggtcccgcacctctgccaggaaattgtctcggtcttgtagcaggtcttccacggtttgggattgcgccgtgccctgttggtatggtaccagtgccggaggctcacgtccgtataccaatttgaatggtgtagtctgcagcgctgag

SEQ ID NO: 190414 - DNA, 571 bp, Zea Mays
gtttgctgcatcctgctgaaggctggatgtaatatatggcaatggaggattcttgtgaattttacttcttttaacacctaaaacttcaaatgtagaagaatgaatcatcttttctatagcttgcgcttcttcttgagagggtatggaaagttgatccagcttttttgaattcaaatgctttatacagaatggaatacatgtggcatttgaaggatctgctgattgtattttgaagtctgtctgtactgtccagtactcatgtgccttaaactgttctatttcagcttctcgatcgcacacaagggccaaagcagcagattggacccgtccagctgattggcaaccaggcaacttcctccacagaagtggtgatatgccaaacccaattagataatcaagggaacggcgtgcaagataagcattgactaagtccatgtcaatatacctcggggacattaaagccttctttattgcatcctcagatatttcatggaaaacaactcttgcaacagtcacatcaaaacccagtacaccttgttgttcaagcatttctttgatgtgccaagcaatc

SEQ ID NO: 190415 - DNA, 1335 bp, Zea Mays
gattggagctactgacgaagatgaatactctttaaccaggtataggccaatagcagcatttttttaacctctggcatgcacacatgttagtttgacactagtatccttaattgtttttttgttatatattctgtgctccccttgtttcctcctaagttcttaggaagcctatttctatcatatgttttgccttatgtctcaggatgttgtgttttgaatatcaataaaaataaaggattggtttgaaaattgtgaatcacaataccagcgaaaggttgcccttgatttcatttcgagcaaagtaataaaaagtgatatttgagtcacctttcatgtgaagcaggattttttatgatataccgggatgcatgtgcagatgcacaccattttcataggaattcatgccatattatttttccataatgatttgattgtatatttcttatttatgattcctccaatcatatgtttttccaaccaatgctctcataaataaaagtaaaaccatgtcactcatgacttctattatgtttttccttgctttgaaccaagtattcatgcttctcgttatgcagctgtgatgatgattggtatgggcaagaggaaagcagcacactttccttcccgtcatactatattgatgcagaagtaacaatactcagataacactcatcatctctttccaaacaatcatactcctctgtcccacaaagttgattgtgtggcttgctctgttttattgcattttccaggccgtagtttgtttggatgatggtgattgcaagattcggaatggacttgtggcagctgaggatgattcaactttagatacatctattgcttgtgattcctgtgataaatggtacttgctgttgtgttaatctttatggaattattaattgggacttaggaaccaaccatatttgtcttctaattttgttgttccttaacgctgagtcaggtaccatgctatttgtgtggcgttcaatgcaacaatggcatctgacagttcatggctctgcccaaggtaatgtgatatcttctgactctcttgaatcaccctttccaaaaaaactgcaagtagtaatcagtaatcatgctgaacttgctcgaactcttatgataccaaattatcaattccatttatagatgcaagtttaacgaagtggaatatgaggcaaatgtaatcttgaagcaaaaccttggtgaggactgtgtgattggttctgataggacatgtaccaacgcatcattttctgggagggtgtcagtatctgttgctgatgagggagaaactgcccttgttgtatcaatggtgggtgcacattctgaaac

SEQ ID NO: 190416 - DNA, 720 bp, Zea Mays
atctgcatctacctcctcgtcatgtttggtttcagagatccgccactttcctctgcgttttttttcgggatccttttgtctttccatggtagggtgcgatgacgaggtacacacaaccctgatcaatcgcctccgatggcgatctgatgttcaccttttacctttggttcgtattcgctgagcatccgatcttcttcatctatcgaggccagcattttttgtttctttttttttcttgctcggtttgctttggatcgagggacctggggatccgccgcccttcttcgtgcggcgtcatccagtttttacccctcgaatacggcttgcaggcgcgtcctagccatctcgctctctgcataatcctctgcgagacccgggctcgtatgccacattcgtcgttgtcaaactaaacaaaaaaaataggcttttgtcgcgaagatcccagcagagaggtgcgctgatgcctccctaacaatcataatcttcgcagagaaacgctcatgatccgtggtttcgtggatgtgtgatttggatttttgttccattacatctgtttccacggcgacattttcatgattactgcagcgaactgaacgagggacctatggatggactgctctttgtccgtgttgtgccgtccaagtttgccttcggatagtaaaaccagcaatctggtcacgagatctcgcaagccttttcatgtttgtgggaatggtgtgc

SEQ ID NO: 190417 - DNA, 536 bp, Zea Mays
ccaaggtagtcatcaattcctctatgtttataagtcgagtcaagtcgatgcgaaattggtgttcgttaaattatgttttgcatatagtgtaatggagttagttgttttgggatcattattaaaatgctctgttcatatgataaatatgtatgattgcagaaatgttgaagtgtatgtgttgtctcggattgcgatgagaagaggcaagccgacgtgtaggatgtatagcggcctatgttgttgcgctagttagccgaattttagatgacttggttaagctcgtaatcaaggcgaattacttgttgtggtctaaatatgtatagttgtggtcgcgggtaaagagtagtagtgctcatgtgatgtctaattgaaaacgcaaattgttgggtgattatcgtgaagaatacgttgttaattggttgttgtaattttaatgcactaaatgatttggataaaatttgtaaggctacttgctagtcctcatgtaattaatttaactctaagaagtggtaaagtgctagaatgattcaagtccc

SEQ ID NO: 190418 - DNA, 473 bp, Zea Mays
ctcggtatcctcttcattaaaatcaattgcatagtatggatcaattgcatagtatggatcatcttctgcatacctctcaaacaccttctcgtatgctactgctaccttgagcatattatatgttgagttccagcgtgtgacaacatcaagtgccaagaaagccttggtgttgaccttctctagctccgcacacttcttaaatttggcaatcctagaaggggagctcttaatgaatttaacagctgcacggacacgcttgatagatatgtcaagctctttcaatccctcttggactatcaagttcacaatatgggctgcacacctcatgtgaagtaacttggattccaagatgctagtctttgatttgttagtgacctttgccatgtacgaaactgcgccattattagctgaagcattgtcaacggtgatggtaaacaccttacctaatccccactcagccagacacttctcca

SEQ ID NO: 190419 - DNA, 940 bp, Zea Mays
gagacgatgattgggaattcacggcggcgacggggcaacctgctgctgatcaggatggaggcggaccagggcatgcggatggatttggtaagatcgaggtgagcctgccgcacaagttgtcgtgagacgtttggacctgggagatctcgttgccaaattgtcgtgagatgtttagacttggagtgtaatggcatcgactctatccaatccagtatgcgatccaagctctcaggactgttggggggagatattttgacatttgacacccaattcacatgtctttcaagatttgacaccccctatcacaatgacatacggggtcactgagtgatttacatgtgggccaggatgtcaaatctcgaaaagcatgcgaattaggtggccagcgcaatgcattggtggtgataaaatgtgacacttaatgcaaacttgaataagggtggtgtaaaatggagggtgggctactgggctgagatgaacaaactggttcctgggtaggagctggacgaaggattgttgattccttacatgcttgcaaactttaggctaggcagacaaatctgtcctgctttagaaaatccctgagcaagacttgttgctattggaacattaggatgtctcccgtatacggaaattagatcacattattggagtagaactactttgtgaagtctttgttttgcctatttgtacaaatggcaaaggtgaatatttgagcgacatattcatatttttcaggatatatcgaagtcattgagcaccgaccaggaagactggtcatcgtttaccagtgccgatggcaaattgaaccatgttcgtctaacaaccgatggtcttgggaatcatgagtccactggagaatttgtgagggcctccacttattcaccagctaatagttcggccatactcaacctgtacaaaggaagcaaacgggttgatg

SEQ ID NO: 190420 - DNA, 1674 bp, Zea Mays
aacattttcacatggtaatagagccaagatccaaccaataaacaatggccaccctttcttctaccacctcctccctcacctcctccagcgcttccaccatacaatctactcctgctcctctccatcagatcgttaccatcaaattaaccaagaagaattttctcttatggcgtgcgcagctgcttccttatctccgaagcaacaaactcatgcgcttcctcgatggatctcaacccatcccgcccgcaatggttcctgcgtcaacaagcgccggtgccgaactcattgtcaacccgacctatgagacctggtatgatcaagaccagcagctactgggcggtcttctgtcctcgatgacggaagaagtacttgctgatgttcagtccgcgacaacggccaaggaggcgtgggattctctcctgcgcatttatgcctcctccacgcgggctcgcacggtgcaaatccgtgttgagttggccaacatcaagaagcgggatctcacggccgcgacgtacttcgccaaggtcaaggcgctcgctgccgagatggcagccgcgggcgcccctcttggtgatgaagatataatctcatatttgcttgcaggacttgccaccgactacgatgcctttgtgacctcgatcaccactcgaagtgatcgcctttccctggatgaggtttattctcatctcatggtgtttgaggctcgactccaacgcaaccaggcggagatgcagatgcatctcaattcctcggccaactacgctcgtcgcggcggcaacaacttgcgtggtcgcggtggccctcgtggtcgcggcggtcgcggaaactactcgcatggtggttcttcgtcgcgtcctacagatccgcctggtgctcgacgtcctgccaccaccaacaacaacagccggcccctttgccagatctgtggcaaaataggccacactgcggtacgctgctggtaccgtcatgatgactcctacaacgaagatccaccgatggccaatgtcgcctctacgttgccttcatacaagcttgacaactggtacggggacacaggcgccacagaccacatcaccaacgaacttgatcgccttgcggtccgagaacgctacaacggcaatgaacaagtccaagtgggcaatggtgcaggtttgaaaatttcacatatcggtcactctactattaatactgctgcacgtcctttatttcttcgtaatattcttcacgttctggggattaccaaaaatctattatccattcatcgtttcactcgtgataatgactgttattttgaatatcacccttggaattttttcataaaggaccggcaaacgaggagatgccttctggaagggcaatgtgaaggtggtctctatcccctgacgatctctagcgcacaagacctgacgcatgcattggctgcccgcaaaataaatcgtgatcaatggcatgctcgcttaggtcatccagcttcgcaaacagtccagtccatcttacgtattaataatattatgtgttctagtgagtctttttcatcagtttgtaatgcttgtcagatggctaaaagccaccaacttccatattctaggtctatgaataatgcttcagctcctcttgaattaattcactccgatgtttggggtcctgccgctacatctgttggtggttatcgtt

SEQ ID NO: 190421 - DNA, 673 bp, Zea Mays
tagttggtggctcgtcgaagcccagcgcctgaggaccagtgggctccatggaagccatgggttagggcgaatccagtcactagagaagcgcaaaggggatcaggtccttggatttgtgtcggctagggtttatcgaagacaaaagtgttggcttcatgccggcgcccttgccactgtttaaatagcgtgtatcatgatccaaaggtctcaaccatgaatcggtttgcgccccctatcagggcgcgagcctaacataaggggggaaagagagactctaactcggtctctaaccgagtcagagaacattcctaacaagtgaaacaattctcaccgctgcaccaggcctgcccttcgtaccactcttagaagtaatccctcattttccttttacgaggcaagcaggcaacctaacattcaagctttttaatatttgaccaacaattaatctaagaacttgtagattagaccatatgaatttagcatcattgaattcatatttgaaagcgctttgatatgatgtcgatttcacagctatggacattttagtatatatgagatgttaatggtcaagtactcaagtgtgatattggggatcacacccagtcaaaccacaccttacatttaaggaataaaatgttatcgacaactgcaatatgtataggcatcatcaaac

SEQ ID NO: 190422 - DNA, 492 bp, Zea Mays
gcggagatgcctcaggtggttcgcccaagagttattatctatcaaaatgttgtcaaagaaggcaagcacaaactggtgaaggtaggggcgcaatacgtcgttcattagagcctagaattttgctggggcgttgcacagcccgaacgacatcaccaggaacttgtagaggccgtcgtgggtacggaacgcctttttttggacgtcctccggccgcatccgtacttggtgataccccgaccgtaggtccagtttggtgaagaggcgcgccccaaggagctcgtcgacgaccgggatcggaaatgcatccttgaccgtgagcgcgttcaacgcgcgttagtcgacgtagaagcgccacgactcgtccggcttcttgacgaggatgactggagatgagaatgccgagtcgctgtggcggacgatgccctgcacaatcatggaggtacactgtcgctcaagttcgtccttgtgagctgcagggtacctgtacggtcg

SEQ ID NO: 190423 - DNA, 505 bp, Zea Mays
agcaatctgtcaaaattattctacgattgcaaggactacataattggcgtttaccacaatgacatgtcaaaagatgagctagatgagatgtacaaggtattcttcttttatctatccatccagaaattgtgatactgcagttggagtctagcatgacacactgatggcacgccaggtgtacgagacgatggaagccatagtaacccaccctgaagaagctctccagatcatggagcaacctgatgagaagtctgttgacaataaaaaccgcttcacgctgaagctcaactttatggccaaagatcgcccgccgctctggaagcgcacgacaaaggacgacaagatttctcaaaaggtcgagaagaatacgtcagaggaaaagaacacgaagatattctccaacctttttgacaagaaggtcagcatattttcaaagaagaatgtgagatcgtcggaggtgccaccggcatccacttcatcttcttcgccagggccatttgacgag

SEQ ID NO: 190424 - DNA, 381 bp, Zea Mays
aaagcggaacacttgaacttctttcttttgacctatcctatgtgcacggtcctgagcttgcagatcagcttgtggattcctggaggcacagaaataacagaggcattagattcattcttagggtaagcaacagaatcaagtttagcatagtctcataccaatcgctgtcataaagaaccacaacatcagcagtggccaagttgataccaaggccacctgccctagttgaaagtaagaaaacaaacttttcacttcctggcttattgaaggcttcaatggatgcatcacgatcttctccacctgtatttccgtcaattcgacaatactgataacctctatacataagataatcttccaagatatccaaaagcctggtcatct

SEQ ID NO: 190425 - DNA, 518 bp, Zea Mays
cggagacagcttaagcatcatattttgggcttgtcttcctttgagagaaccagggcaaggctgcgttctggtctgagatggctcaaagagggggatgccaatactgcttatttccagcaccatgccagatacaggaagaagaaaaactttattgccagtttgaagaaagaggacagggtgttcactgatcagaaggataagattgaggtggtctgggatttttacagcaatttgttgggatctgagggacagcgtaacttcactcttgatcttcaatcctttcacgatcagttgttgatcttaccgagttagaccggattattgatgaggaagaaatttggaacaccatcaaatccatgccttcagataaagctcccgggccagatggctttacaggtagattctacaagatggcttggcaaattatcaaagtagattttatggctgctgtgaatagactgtttcagggtgatgatagtagactttttctcctcaattctgcatatattaccctgctg

SEQ ID NO: 190426 - DNA, 296 bp, Zea Mays
cctaagttggacatgattgctatcccggatttttctgctggggccatggagaactatgggttagttacttaccgagatacagctttgctgtatgatgagctactatcatcagcatccaacaagcaacaggtttttgataatatttaaatcaaatccatttatttcataagctaataattgatgactgttgccaagattgctttgctacaattataaccaagtatatctcctcttttccccttgatatctttacttaggtagcaataactgttgcacatgagttggcgcaccaatgg

SEQ ID NO: 190427 - DNA, 364 bp, Zea Mays
ggacaagtttgcgcctaatcacctcagacatgacctggagaaagttgacacgaaaaccagcccatttgacacgcttggcgcatgcctttgtcgcaaccaggggactgtgacagacacgacttggcacggccatagctcctagcccgacgtgtatctcggcctggaactcacacagaaaagcaagatcttggtgcaaggaagagatcctacatggaaccctcgctgagatagggactctagggcaactaaatcaacgcttgaactcgggcagatgccatcctccacgtgtttgacctgtcttgggcacactctgaccgctgcgcagcgcatgccacgagtgtcggtcggcttggccgcgcgctcc

SEQ ID NO: 190428 - DNA, 1588 bp, Zea Mays
cagaaatccccagatgttccacagcaagtcgctccctaggcccaaggacacatcggtggtggtggtcgtccttgagacgacagaagtgtacattgtgatcagcttgtcgacgaggagagacacccaggtcgtatacgtcgatccgaccaccggcgccctgcgctacctggggaagcatggggaggacgtctttgattcggaggcggcggcgctgaaccacatcaccaacggatcaagggttctatccaagagcactacatatgccaaggcagtgctgggatacgcggtgttaggaagccatgctctgctcttggtcgcgacacagttgagcgcgtcggtccccaatctgccgggaggcgggtgcatatacacattggcagagagccagtggataaagatccagctgcagaatcctcagccccaggggactggagaacagaagaacatacgtgagctggccaatctagacattgatggcaagttcttcttttgcgagacaagggatgttaccaggcccttcccgagtcctattacactacgggaaccagatgaggaatttgtttggaacgagtggctgtcaaagccctttaaggacattggtttgccaggacactgtgtcattcttctgcaggggttcgctgagtgccggaactttggaggtgctgggcagcaaggtgggttagtcgcccttattgcacgccgaagtcggttgcatcctggaactcgctatttggcccgtggactgaacgcatgttcaggcacaggcaatgaggtagagtgcgagcaactcgtttgggttccacggaagggcggacagcgcatcccttttagctcgtatatctggcgccgtggaactattccaatatggtggggcgcagaaataaaaaacgcggtgtcagtggaggctgaaatttacgttgccaacgatccttacaacggaagcttacagtactaccaacggttgggtaaaagatatgggaataaatcatctgaagcgaacgtgtccaggcaaaaaagttctggaagggttcccattatttgtgttaacttgctaagatacggcgaaggaaaaacagagtcagttcttgttgatcatttcaaagaatctatacggtacatgaactctactggaaagctgggaagcacgtggattcagttaataaattatgactggcatgccactgtgaagttaaaagggcagcagcagacagttgagggcctatggaggcatcttaaaccacctacaatggtcattggcttcagtgaagggaattactatgatgcaagacagcagcttaatgaatgtaaaggatcagttatctgcaatgacgatgtaaatggtgggttttgcatggaatctattcaaaatggggtgatacgattcaactgtgcagactctcttgatcgaaccaatgctgctagttactttggtgcacttcaagtttttgttgaacagtgtagtcgattgagcatctcgcttgacatagatgcaatgtttgggttgtcaagtagatattctgaatatgatggtagaaacactcgttctttgccccctggatgggaggagcgctttgactctgtaacaggg

SEQ ID NO: 190429 - DNA, 312 bp, Zea Mays
ctagcactagcccatccgttcacagctttaaccgtagctaagctttatctgtcagacatatataagttgcatggactgccatcgtcgattgtgtctgatcgggatcccatattcactagcaagttatggcaagaactgttcagattggctgggacaaagctgtgcatgagtagtgcctatcatccacagtctgatggtcagacagaaagggttaatcagtgtttggaagcttatctgagatgcttcgttcattcttgccccaaacagtggtattcttggctctcgctggctgaattttggtataacacttgc

SEQ ID NO: 190430 - DNA, 564 bp, Zea Mays
ccgacatcgccgacaccatcgccatctactactacgccagcatcgacaccaccacgtcaaccaaccacggcggcacaacccgttcgctgtctttctccaacggagatggacgaacgccgacgcctgggcctctgcttcaactgcgacgagaaatacgcgtgcggagtcgcggacacaatcgtgtttgcaagcacatcttctacctcaaactccatgacaacgactccgaggacgtgggcaccaccaaaccagagtcggagaaccctgtcatctccctccacgccatagccggggtgacagccaacaagacgatgcatgttcccgtaaatctgggtgtgataacggtggtcgcgctcatcgattcgggatccacgcacaacttcatcttcgaagatgcggctaaaagaatgggcctgcccttcgtgccccccgaccacatgagcgtgacagtcgccaacaacgaacttctacatgcctgggggtcttccgcagggccttgttttgcatccacaacaactccttcacaaccgacctcatcgtcctacccctagctgggtttgacat

SEQ ID NO: 190431 - DNA, 596 bp, Zea Mays
agaatatctataaggccttgagtttaccgaaatagaccctggcaacagaggaatgtgatggtcataaggcctgattagaggcaatttcgaaggcacaacaaaaacatcttctaattcctttaaaatctcccgtagaactgcatcatttttcccaactatttcttttgtaacctactccagaagcacaaatacctagacttcctctcccttcatccatttctccagttgcaacacagatacttgtcgcacttcctacacctctctagcatcaccctgtaaccttaccatctttcattgatcagtaaaggttaacaccttgttattccagtcacactccataggactctgagccttcaaccaatcataccctaggatcacatcatatgcttccaaatccaacaacctcatagcagtgttgtacaggtgccccccagaactccacactatctccttaactcttttatcactgatcatagctgtttcatttgccacattaacccgcacagtggagcaatcttcagtgaccaaccccaattttgctacaattctctggatgataaaggttgcagaactaccagaatcaatgagcatgacca

SEQ ID NO: 190432 - DNA, 360 bp, Zea Mays
tcagcgccatgccagtacccctcctgctgcacatctgtgcttcgtatccttcttgcgccatgtgcctacgccatcaatgcatgctctgctcctccacatgctgcgacattgctactccgtctccactctgcgtaggtaggggagaggaacaggaaaagagcggtggctagggtgatgctgtgccagggagagaagacagggggagagggtggcagcgtagcgatgggttcattgtggcctctgagtctctacccaggggttgctttgtccttgcgcctccagctcagcagttcgctgtggcttccttgcctaggaggaggcgacctccttgctccgcatctctgccatgcaggagaggag

SEQ ID NO: 190433 - DNA, 457 bp, Zea Mays
ccaacacacaatgtatttctcttttgtctttatgtgcaaagaacaatgaaggcaaagagttggcccttagtttttctcaaggatcagatttcgttgaaatttcttctgatgttgacaagctgtgttcaatttggagcacagtttctctaagggttgatagttctgaggatgacagtgatgatggaaaaccttacaaggttataccaagaagttcgtaccatcttgtcaacaagaaaaacaactatggcattgcatttgttgatggcttgctagagtttgtgaaaaagccgggaaatccatttaaagtgcaggtttttgatgaatctattttttctgatgcttcaagacttactgttaaccatatgaaatgggacaattatacttacttggatgtggacgatgatgtgcctttttctgtgagggatagattggcaagtggtgcaagttctcaacatgt

SEQ ID NO: 190434 - DNA, 432 bp, Zea Mays
cgcttactacgtggtgaacataatcatttatgtgaagcgtttcttgtgatgtcatcctctgctgggtatttggctgctaaaccttttcgtatttatgcctgcagcataaaagcagttttggtgttgcttctgttacaattcgtatttttttgtttctgtaggattcaacagcaacaagaagttcttgcttggttacttgaacctcttaataaaatgtggactcaagtggaatggcaaactgcatacttgtctgatccttctggtttgacaaacatgtttgctgatagccaattcatgtggtcaatttatcacacagttacattctttgaaaaggcactcaagagaagtggaaccaaaaagtcttcagcaactccacaagcacccaccacaacagtacctggttatctgcatccgatgtcttcacatctagca

SEQ ID NO: 190435 - DNA, 638 bp, Zea Mays
ctgggagctgtttctgatgccaagagagtgtttgatggaatgctacatcgcaatgcagtgtcctgggctgccatggtgtcaggttatgccactgggaagtgttctgaggaggcctttgagctcttccggctgatgcttcagaagtgcccattggagaaaaatgagtttgtaaccacagcagttcttagcgcagttagcgtgccactgggtttgcttatggggacgcagttgcatgggctggtattaaaggatggtttggtgggatttgtgtctgttgagaattcgcttgtcacaatgtatgcaaaggctgagtgtatggatgcagcaatgagggtgtttgggtcatctaaggagaggaactccatcacatggtcagcaatgatcacagggtatgctcagaatggagaagccaattgtgcagctaggatgttcctacagatgcattcgtcaggatttacgccaactgaattcacctttgttggggtactgaacgcatgcagtgacatgggcgcattagtggttgggaagcagacacattgtttgatggtgaagcttgggtttgaaacgcaggtttatgtgaagagtgcactggtggacatgtatgccaagtgtggttgtattggtgatgcaaaagatgg

SEQ ID NO: 190436 - DNA, 754 bp, Zea Mays
ttgtccaacacctgtcatgctccacatgcataacctttctcgtcatactgctttttttgtacttatacctgttttccttgtcatgtgcttgcaggcttgtgtagaattagcaaagagcgttggtgagatgaggacagaaactgagttacttccacaatgttgggagcaggtattttacattttggtagatgttctggctttctttagaatataatctcacatttgataatctattcgtgtttagataaaccaccaatatgaggagcgcagattgcttgttgctcagtcgtgcggtgaacttgccgtttatgtccgtccagagatacgagattccctcattttatccattgtgcaacaacttgtcgaagatgctgcaacagttgtaagggaagctgcaacacataacctggcattgcttcttcctatgtttccaaatctggacaaatattataaggtcagcctcacttatgcttagaatcagtgattggtaaaagatttcacagaattagctacttttaggctttgtggcaagattggacattctgtttagtttagaattgagtgcttgcagattaccaataaatgaagatgatattgtcatttataagttccttgactcttccttctttggggtaggttgaggagctaatgttccaattggtctgtgacccgtctggggcggttgtggaagttgcactcaaggaacttgttcctgctgtagtaagatggggagataaattggatcagatatcaa

SEQ ID NO: 190437 - DNA, 382 bp, Zea Mays
gggcaatgattcactttaatgaggcaagccccagagagtgcttcttcaatttaaccttgagccagttttcacttagcgttaaagaccgagcatcttgggcaagaacaactttctggattggtggggcaagataagtgaaatgacaatgggttaaaccaagattgggattaactctctagtttcgcttggtgcttgggccttatggaaacaccgaaaccaatgtatcattgaggacatcaacccgagtattgttgttgtattggcgcaggttggagaagagagaagtttgtgggagatggcaggggctaaatttcctagcagcaaccctctcagctgattgttgtttattggtgtagttttttccttggctcggtttcatgga

SEQ ID NO: 190438 - DNA, 330 bp, Zea Mays
cccctcgcgacgccgcgatgcccgcgcctgctctgccttctccactgtgtctcgcactcgtgacgctgcccctccccaacctgctccgccccgtccgcgtggacgtcgtccctcgtcgtccttgcctcgccgattccctgctccatcccaccgggcgtccctggggtccgcacccaagacgcctccccgttgtcctcacttcctctctccaacgcctgttgcctatctcactccacggcatggatctggaattgtgaatccctcactgaggccccgaatccaacaaccaatgctgccttcttctcccccctcccctctgcacgacattgc

SEQ ID NO: 190439 - DNA, 730 bp, Zea Mays
ttgatcaggaatcttaacatctgaaataaaaatacctgatcaataatggttctttattttcacgctgatcaggtgaatcaggttttacattcaacaaaatccaaatgacaaatcagagatgaagaatcgtcaaccgtccctcgtcgtttctggcgaagaaccatcatccttgtagccccggggcgactcatttgtgttgccgccggtgtttgtgctcagcatcctgggggattcactagcaatttcgacgccgctgtttgtgttcagcatccgcggcggttcgtggtcaggggtgccgccgctgtttgtgttcagcatccgcggcgattcgtggtcagaggtgacgccactgttcgtgttcaggatccgtggcgattcgcggtcaggggtgccgccgccgccgctgttcgtgttcaggatccgcggcgattcgtggtcaggggtgacaccgccgccgctgttcgtgttcagcattcgcggcgactccgtctgctcagtgggcgactgcggttcggcgcctggatcggccgcctggtgctcctcttcctccagcacaagccgggacggcaggcacttgcggcgatcttggtactgttcagcctccaactccacgtcgtcggcgttgacgtcgtaatcgtcgtcttcttcctcgatgtcgtcgtcgtcgtcgtcaaggttgacgacgtcctgcatgttgagctggtagtagtcgacgatctcccgcaggaac

SEQ ID NO: 190440 - DNA, 401 bp, Zea Mays
cagatatgtaaggactaaggactgtactaatgacatgtttcatagccaaccaaaaagactggtgcaataaaatcgaatcgtcgatgatggatccttatgtaaataacactaagaactcgatgcaattagacagcagtttgaaaattatcattatggttaaccgaagtatttataacatgcatcacttttcaggaaactcaaaggaagtaagactgcaaccaaaatatctgagtgcattccaagcttttgtacagcatatgttatttcaaaaggcaaactatcatttgtgcgctcagctacatctgatattgttgaaacgcctcgatctatatcctcttcaactatttcttcacctagcactagaagtctttcctcctgtgcaccttcaggtaacatacaag

SEQ ID NO: 190441 - DNA, 874 bp, Zea Mays
acagtttgaaatctgcttttctccaagaattaagagatattagaaatacatgtgtgggtccgtggatagttgctggtgattttaatcaaatttacaagtcagaagacaagaataattctaatattaacaggtcttcattgggcaatttcagaggccttattggctccttggatttgaaggagattcctttgaatggtagaagatttacttggtcaaattagagggcggttcccacccttgttaagctggaccatgttttttgcactacctgttgggaggaggctttccctgattgttttctttacagcagtgcttctgaaatttctgaccactgtcctctaatccttaaactcaatgcggatcttagagggaggcgtaggtttcattttgagaacttttggcctaaactcccgggttttttggaggaggttgctgcttcatgggatcaaccggttcagtcttcttgccctctggagagggtgtcgatgaagcttaaaagattagcgcgaaggttgcagtcctgggggcatagtgcagttggaaatgtcaattctcagctggggctggctcgcgaggtgctgcacaggttggagatggcgcaggacagcaggccgttgtcctcagatgagctatggttgctgcagaaattgaaacaacactgccttgtccttgcttctttggaaaggacagttgcacgcttgcattcccggttgcactacttgagagatggagatgccaacacaaaaaaatttcacctacaggctcgcttccgcaagaagagaaattttatttcccatttggagaatgaagggaggacagtcaccagccatgaacaaatgcaggaggttctggatgattttttctccaatctttt

SEQ ID NO: 190442 - DNA, 548 bp, Zea Mays
tgaaagtagcggatggaagaacactgtggagtcgatatgaggtcccagattgcagttggttatgtgaaggcttaactttttctagcaattttaaaatactacctctagggggttacgatatgatcctaggtatggattggctagaatgtcatagccctatggatgttcattgggcacaaaaatggttggagtttgagtatgaccaaagaaaggttcggttgcagggagtgctgcccaacacacaaacctgcaacaacatcacttgtttgcagctgaattccttgatcaggcaggaaggagtcgagcagttactcgaattgcaacaaatgaaatagacaacaacaactgaacttccagagccaatcaagcaattattgagtcattatccacagctgttcagtaaaccccacggcctaccacccaaaagaacagttgatcatgccatcgatctgatacccgatgcaccacccttcaggcggaccttaccgctatacacctcaacaaaaagatgaaattgagaaacagatccaagagatgctagacagtgg

SEQ ID NO: 190443 - DNA, 339 bp, Zea Mays
ggagagcctgtgaccatggggggtgcagggagatggagctgggggagagagagggtcggcggccagggagaaggaggtggattgcgggtccggcgagctcgcatcgacgaggggcgatggttgccaggagctgggcgccggatggggaagagaggtgggggatggcggcagctggggagatgggccgaagatgggcctcccagggacggcgacgcagaagcaggtgcccagcggctggcagctagcatattggaggagccggcgatggctgctagttgggagaagaggaaaacctagctgataccatgttggaatgggaaacccttgattgtattgcat

SEQ ID NO: 190444 - DNA, 278 bp, Zea Mays
tttgcagcagcatccatgtcattatatttgaaatggaggctcaatagactgtcataaaaatgcaggtagtactgaagaaatgtcaaagatgttaaagaatcgatgcttcttttcatatgtatcaactcatcccgttgcccaaccatctcaaagacacggctagccatcaccactgtatttacatcggccacaactccgatcaatgacatcagttccattattttctgggccttgataatgcatttaaaggtcacacatgactccaaaaccatattgaa

SEQ ID NO: 190445 - DNA, 1096 bp, Zea Mays
gtcagagcggaatgtcttgaggcaagatcagcagataaagattgaggaactgctccagctgcagagagaaaaggaggaacttatgaagataagtgatgaattcttggaagaggtggaggctcgtaatcacaaagtggatgagctaaaggctgaggcgaagttcttggttgtaaggttctccgaactgcaagagtctaggaggtcattgcaaagcgagatcaccaagctattacaatcgaactcttttctatcaaatgaactaaatgattccattgaaaaacagaagaggtttgaacatgatttcagcaatcttgttagtgaagcagttagtaaagatatcctcagtgtgatctttagaagccttcatgaagagaggacattgcagctgaagtctttgcataataactttggctgtcttcaaacagcaggcggtgagctttatcaggagatcaagatgatgaacaagaggcttggagacatagaaatggagaacaagtaccttggcaaagaactaagtagaactatgagtgtttatggtggatctattgtgcaaacagcaacaggaaaaggaaatccagggcgaagagatgccaaccttctgaattcaaacaggaaaatccaacaagattgtcatgtaaatctggaggtggaacaagaggaagtttgcaatgctgattttcaggagtcaaatgaaacactacaggatgaggtccgtaagttaaggagcgaagtggaaatgcttaggagcaaggagaaggctgtgttcaacatcaaatcctgtgatgaagagatcatgaaattgctggctaacatgcaaatggctatcatgaatgcagctctgttcaaagagaaggttcttgagctcatcataacatgcgagagttttgagataagtgccatggtacagaaggaggttctgaaggaagaaatcatacaaagaaattcatatgtagatgagctgaaggacaaactaaatgctgttgagattgaaaacagaagactgaaggtcgacctaaatggtgatttcacaatgttagggtcattgcagactgaagtcagtgccctggaggagcaaaccttatctctcgctaacgac

SEQ ID NO: 190446 - DNA, 987 bp, Zea Mays
ggcgattgggtctggctgtgccttcgccatcgtactccagcctccctccagggggtcaccagtggcaagcttcagcctcgcttttatgggccctaccgcatcatctccgtcgtcaacacggttgcctatcgccttgagcttccacctcgggctcgcctgcacgatgtttttcatgttggcctcctcaaaaggtttgtgggcaccccacccacgacgcccccggcactaccgcccattcaccatggggcggctcagcctactccagagcgcgcctcccgcacaagactatcccggggcgttcgtcaagtattgatccagtggcaaggtgaaccggcagcttcgactacttgggaggatcttgaagatttccaggagcgctacccatcattccagctcgaggacgagctgctcgtcaagggagggagagatgtcatgtggggccggcagtacagccggcgccaaagacaccaagaagaggccagcacaggtggccagggcgccaagggacaggaggtgactgaagggccataagtgtgaaagtctagatcattatggggtgtgaacatgagtttagcaggaagtttgaaagcctagaccattatgtggtctgaacatgagtcttggagactaatagccagcaggctctatctcctatatatatatatgtaagcagtatgcaaggagggatcaagaaagaagtattatctaaacctctcacctgttctagccttcaatctcatcccccttgcttcggtgaccaggaaacagccctggcaccacatctacccaactacgaactacgtagtcagggacctcccagcttagggaccgaggcccttgacacaaagtctaaaacagagatcagaacacttgtaaattacacacatctaattacagaaacatgtaactactaactacacatgtcttaaagtatagatcaaaacacttgttgatggaataagtcttgagcatctagaggacagcctg

SEQ ID NO: 190447 - DNA, 281 bp, Zea Mays
gctcgccacaagggataccgatgtcttgatcctacctccaatagaatcatcatctcccgtcatgttctttttgacgagaccgcttttccctttgctgagcatacctcccctgccactgctgcggacttcaccttcctagatgaattccctaacccggcgcctcttcccatagggttgccgactatgtctcctgcaggtcctccgggcgccaccactgttgctgcacgcccccatgccgacgtgcagccgcgtcctgcgccgccagtaccaccaggatttcc

SEQ ID NO: 190448 - DNA, 378 bp, Zea Mays
ttcctaatttagtccttccatttagcaaaatatggactaaacgggactaaatattagtccatctaaccaaacggggtctaagacgtggtccgtcttttttcctgaagagctgaaaataccaaagtttctagttttctgttagaggagctcgcgtgtagtcgaaacagtgattgccattggcatgggttggcatatggtggtgattggtccaacttcctcttccgtacccagtactgccgaattcagtatatgttggttttttgcttgcatagctaaaactgggcctgttcttttttccccaaaaagtggccttggaaggctagaagtagctgttagtgttattggttacgaactctgaaattagaagcttgcatggct

SEQ ID NO: 190449 - DNA, 331 bp, Zea Mays
gttagttattagcatgcacgtgcttattaaggttttgccttagcgacacttaagcggtaaggtgtgccagccaggtgaggcgtcctccgcgccttactcaggcgcataaagtgtcaccttaggcgtggggcgtttgtgaggcgtccgcagggtgacgccttgtgaaaacggcaggaggatgaggtggcgggtggcacgcagggcgtagcggcggcatgcaggtcaaggtgcagggcgtatcagtggcggtgctcagggcacagcgcatggcccgagccagccagcagaggaggaaggagagctgcaggggagggagaaggatagctgtggg

SEQ ID NO: 190450 - DNA, 273 bp, Zea Mays
gccgagcatcccgtttggccatctctggttccaccgatatcttgcaacctgacctgacgttcacacaaagcaaagcggtcctcgatcctcctttcacattagtagtcgcctacactactcagctttgcacattagtagaccgaacacaacctcgattgaagagcgaagaccatgttgagcggaggctcgactcgccctcgttctaagctaacgaatacccccacttcgccttcaattgccttcataggttcactgtgtagggacttcgaccaa

SEQ ID NO: 190451 - DNA, 634 bp, Zea Mays
atggtgtctcgctgatctgccacccggacgcaaagccataggagtaaagtgggtgttcaaggtgaaacgcgacgagcgtggggcagtgtccaagcacaaggcacgccttgtggtgaagggctatgcgcagaggcacggcatcgactacgacgaagtgtttgctccagtggctcggctggattcagtacgcctgctcatcgccctcgcggcgcacgaggggtgggaggtgcaccatatggatgtaaaatcagcgttcttaaatggcgacctccaggaggaggtgtatgttgaacagccggttggtttcatcgctgcagggaaggaacatcaggtgctcaagttgaagaaagcgctttatggcctacaccaggcgccgcgcgcttggaacgcgaaactggacgacaccctggtgtcgctcggttttcagaggagtccgtcggagcatgcaatctatgtcagacagagaggcaatgcccagttgacaatcggtgtctacgtcgacgaccttgtgatcactggctcaaatactgacgacatcaaagaattcaaaaaagaaatggcagcagcattcaagatgagcgaccttggcttgcttcactactacctcggcattgaagtgaagcagagcgcagag

SEQ ID NO: 190452 - DNA, 623 bp, Zea Mays
aaagagccatcttttgtcgtcccaggggttccagcaatagttcaacatgaaataatgaataatagaaggcatgtactgacaaaggtgagatttcttttacttatcttttattactaaactgcaaggagtggcatattgatgtgtgcactcatatcctttaattcaggataccactggttcagtcaaattgtgggagatcacccggggtgctgttattgaagactttggcaaggttatttgtttctcaatttcgtagatgtttttcccttggatatatatctgctatttgtatcccgtttttgtaatgacactggttcttacttgatgacctttcgaactaacaagatgtttgtagaatgctaaactgattcgttttgattatgcaggtttcatttgaggataagaaaaaggagttgtttgagatggtattattgaaatgtcatgatttcagagttttatttaaaaaatcgctacccatgtactgtttaatttatcaattgattattaggtaagcatacctgcttggttcaccatggatgctcgattaggatgcttgtctgtccacctggatactccacaatgcttttctgcagaaatatatgcagttgatctaaatgtttctg

SEQ ID NO: 190453 - DNA, 601 bp, Zea Mays
caggggttcagggattttctcgacctacgtgaggtccttttcttaatgtaatactcgagggttgtcttactcccacaggtcgagttttttatatgggctaggatgtacaaggagatggattcgaggcccaagctacagctctagcccttggcccattacctttgagcttaccggagggaggagggtataggtcccaccactagcgctgctcacggggctccttcttgtcctcctatttccctacgtcatatcaggctccgcatgccgagggatcgagatccagcgagccccctttatgcgtagcctggagtagggaggcaggatgatggtgcacaaacatcgtcgctgtgaaggctgtcgtacactccattggcctcgactttgacatatttggtgaagagtgcacataaaatgtgtgtgttggggggggacagtgttgttgggagagcacccgacacatgttcgatatttctagcaacattcaaacacttgtatagtagcatttccattattaataggccaccagtcgacgacacccattgcttggtggcgaaacctcacatcccaatttgtctatattgcttggggcatatttagattt

SEQ ID NO: 190454 - DNA, 386 bp, Zea Mays
agaagcgggaaggacttggtgggcgggatcgggagagcacacctgaggcagggaggacgggaaacacgacggctcgggcggcagcgagaacggtgcgtgcggcgcctgggtcagccgactggccggcggcgagggcccccgctagggcctcgagccccgggcgcgccgcgggcgaccggaggcggcgtaccggcggctccgtctccccggaggcaactagaaggtccagcatcgccgagatctccgccgccgccatggtgagggatctactatcggcggcggcccctgaagagagaggagcaggcgtcggatcgatcgccttgtgatagaaagggttttgtgtgagagaaataagagaaggaaaggagaaaggagagagatgtgca

SEQ ID NO: 190455 - DNA, 727 bp, Zea Mays
tggatgtggaagcgttttcagcccaagcttctctaccatggtggtgcttgctaagttgttgcagcttcctccatcaattataatacgacaagatcgttccaaaactacacatttagtgtggaacaaattgtgtcgctggttttattcagctttaataatttgggcactcaagacacgtcttacaacgaggctctcatagtgttcagcatgttcagccccaatatgctcttcatcatcattctccttttcagcatcttgggcagcaagcatggcatatgtatcattatctaaatcgctagctgatgagtactcaccattttctcttataattagcacacgcttgcttgggcagtcccttcggatgtgtccaaatcctttgcattggaggcattggatgtcctttgttcttcccgtggaagcaatagaagaagatttggctacagcttgggaggatcctttccctgtctcaatagcacgagaaggtgttgatttcgatggtgttgtggatgatctattggaagcacctccctgaaatacatggttagagctagcagcactagtgtggggctgccaagatgtattgcgacctgcataagtgttagttctcaagcatcgtccctgaacatctctttcagccttacaagcaagatgaaataagcgagtaacattagtgtattccttgtaagctaatatatcctgaatttctcttgtcaaaccacccatgaac

SEQ ID NO: 190456 - DNA, 485 bp, Zea Mays
gccagaatttcacaccgtcgacatccctcccgccgctcagctgctcgtgccgtggacagactctacggtcgtcgttccaccagtaagaaccctactattcaatttgcgttcgtctaagcattgtgttcctttagatggcgggcgaaatcacgtcttgaaccgagcgacgcgtttgcgttggcgatggcgccgccgtgtttggtgatgcgccgccgtgcgcggtcggccggaatcaggatttggggagaaaacgccccgtatccaaatcctgtccatccgatcataatgaatgaccctgattaagtgttgaatgccttcgtctggattagatccgtgccgttgaagttagatctgaggggtgagtgttgatcgcgattcataaaatctagaccgctgatccccaatccaacgtgcgttgttagatgccagttccgtgattcacagcactgttttgggccgcctgtttctaattagacggctgtgag

SEQ ID NO: 190457 - DNA, 287 bp, Zea Mays
cgagcgcctgggcgcgctactccttcaacaattggtgcagcccgcactaccggtctttcttcagggaacgtatctgagggcacatctatgcccagcttgctgccgcttatcgaggggacaacacctcccaatgcagtcaccgttcaaacgcctgcaaatgaccacaccatgctgacgtgtggcaaatggggtttttgtcaaccaaaggttcggcttgatctgcatgctgctccgttgtctcctatacccaaatcctacaaaggggcactggctgattcaaactggag

SEQ ID NO: 190458 - DNA, 440 bp, Zea Mays
caacagtctagtagtagtctccctttgcagccttgttagagtagtgaattcttgttcatctgactggtgccgtacatgataatccatggcatcgccgttaatgcactgaatgaatttgattttccgatcataagcctaaaacatacctcctatgaacgaaggtatcagaatataaaatattttaataattcgatttgtagaacaaacagagtcacataccatgttgttgatctgttgatgccaaagccatgcaggtcactgatggcgaatagattgtcagggccttttcccatggttctcacaaagatcacaaccctgactaacctgtaagagcctgaaagcaactagtatttctgttgattactttataagttcccttcctgaattatgtctggaaaattaatctgcaggagcattgaaggcaatgagttctatgggcc

SEQ ID NO: 190459 - DNA, 590 bp, Zea Mays
gcccagcagttgttccgagatgcgtgtcattgttaaagagatatcttatccggtaagtggattgcttcttgtctcttatttcagttggtgaaatttgtttgcactaaaacaatcaaggattttgtcttcaggtacattccaagggtgcaaactctgcgacaaattgatctgttttgtgcgaatacgattgcaaaatgtgaaccgatggcaaataatagagcagcatcttttgccaagaataatgtatcagcagcagctgcaataaattcttcatcccttgccccaccaatatccaactttgcttcagcatctcttgtgaagtctttaaactatgttcgctcattggttgcaaggcatactccaaagttgtcattccaatcaatagtcgcggcaaagcagtcacttccttcactttcatcatttctgaataggtccttactttctcaactaactccagaagttattagcaacagagaacatcttgaatcgaaggaatgccatagctcacctgattttatatcatcagcaagtgaaaaagttgatgtgggtgaacctgtagatgatagcaaatatatatccttcgacatttt

SEQ ID NO: 190460 - DNA, 392 bp, Zea Mays
cggtaatgggtcaactctgcctatcacctcagtaggtgacacggtccttcctggttctttgtacgtcaacaacatccttgttgcccccaacatcatccaacaccttctctcagtctgtcgcttcacacaactgctgctctatggagttcgatccctaaggctcaccatactacatcttaccactcgtgctgtggttgctcgttgcgacaactcctgcccctataccacgttcgcttccccaccccaccttcctccgcccatgttgtccaaccctacgcccttgcctccacttgcccctgcctcgacttggcaccgccgccttggccacccagaccacgacgtcctctctcgactctcgaccacgccgtccattcctttcccttgcgacgacg

SEQ ID NO: 190461 - DNA, 321 bp, Zea Mays
ttgtaacatatatttgtcttgcagcaaggtttgttaaattaaccaacttctaaataaacgaaggaacacaacttactttgcattctaaaacacatacacgttatcgagttcttcaattgacctatccaatacctttactttgcatccttcccttcatcatacgccttctgaattcctatctttgattgtcaagtctgcagagcttgtctatttgtgaataccaaaagttggttcagacccatcacgtgtgttgcaatgtaaaagtctggtgtcctttttaggtgtgctcttttaatttgccctttttactctttgtatctg

SEQ ID NO: 190462 - DNA, 535 bp, Zea Mays
aagccgaccgctctgagagcctaattgtgcagcatgtgctgagcgcacaaatggagaaagcggagcaaaatcagcggcacacattgttccaaacaaagtgtttcatcaaagagcgttcatgtcgagtgatcatcgatggaggtagctgcaacaacttggccagtagcgacatggtgaagaagcttgcacttaccacccaaccacacccgcatccatattgcattaaatggttaaataacaccggtaaggcaaaggtaacaaaacttgtacgaattaatcttgccatcggatcctataaagatgttgttgaacgtgatgttgtgccaatgcaagcatgtagtattctgctaggaaggccatggcaatttgataaagattctatgcatcatggtagatcaaatcagtattccttccaataccatgataaaaggattgtgttgcatccaatgtctcctgaagcaattttaaaagatgaacttactagagctagtaaaatgaagaatcaggaacaggctaaaagtgaaaatcggattgt

SEQ ID NO: 190463 - DNA, 550 bp, Zea Mays
tgtggagagggggccgccagccatggtggttgtggcctgggagtgactgatggcggtatggggtaactggcagctgggggaggggaggagggaggaaagagtggttggataccatgttagaggaagtgaaaccctaattcattgaatggtctgagtagtacatatatcagaattacatgggctgggctctagcctcataacatttaaatagaaatacaatagtctaacatgatccattaagttcagtccatggagaagaatttggaaaagttgggcacctcttcggtgcagattctttctgtggcttgctaagaataatcgatgttggacagtggatcgtcttgccaaatgtggtctccgtcacctggaggtctgtcccttgtctgaccaagttgatgagaccctccaacacattctccctcggttgtgtcttttccagtcaggtctgggtcttgatcctgcaatctttgaacttggctgacattgccctcttggtggctgattcgtgttttttccctggtgggcactgggcactctctgtcaagctggt

SEQ ID NO: 190464 - DNA, 456 bp, Zea Mays
caatatggaagcctccaagcgtgctgcatatataaaaagatacatgagaataccaatgaagcaattgagctcaaagtagtgtgcaaggctgcaaacatgaacaagcataggaagaaagtgttatttgaaccgggggacgtggtttggattcacttgcgcaaagaacattttcctgatcagtgcaaatccaaatttatgccacaaggggatggtccatttcatatccttgccaagatcaatgataatgcatacaagatagatcttccaccaagctatagcgtgagcaacacatttaatgttgctgacctcttactagttacaagtgaagacacttcagagtcgaggacgactccttttcaaggggaggaggatgatatgaccacgccattaagcaacatattacaacccctaaatcaagctatatcaactcaagtacaaccaatatcatcaccaacc

SEQ ID NO: 190465 - DNA, 640 bp, Zea Mays
cgccgccgtatggtcctggatacggttacgggtacgccactgggcctggtccgggtcctggtcctgattatggcggtattggcatgaacggcggcggtggttatgaaccaggccatggtgtcatgtatgggcaaagctatggtggcagcggcagcggcggcggctatgatgaccagggctatggtggcatgggcagtggtggcggcgctggcggctatgaccaaagctatgctggcataggcggatatggccagagcttctttaacatcagctacgctcgcagccagccacctccaccatctgtctcgcacgagcaacgcctggaggcgactaatgccagggtccactactattccggcaatggcgagcagcagccacccccgcgtggctatggtggtgggtactcctacccaccacagagttcaagatcatataatcagtatgcctatggtggttactatggaggtggttctgctcctgcaccaccagcagacatcccatcctcctccggtgagccagcagcagtgccaccgcctccatctccgcccagggtgtccacctgggagttcctggacccgtttggaacttatgagagctactacgagcaaccaactgctacagcagctccatactctcctgg

SEQ ID NO: 190466 - DNA, 409 bp, Zea Mays
tgcattcaatgtgctaatcaacaatggagagaaggcagggcaagttatttttcatgtgagtactatgacatgctgtttttcaccgaagtaaatatcatgttactattatccctaccaagttttgttaatagaggttttattgcagactcatgtgcacatcattccacgtagcaaagatgataacctgtggtcttcagaggtaattgaaattttgtttatgtctcctttcatgcttaagtaattttctatcataatttctattgatatctgtgaacatttgcacagacctactcaaggagccatatttcacatggccaggaaactacgcatcttgttagcagcatcaaggaaataatctcttcttcccccgaagactacagtactgtaatgtcatccacgccaaaggaac

SEQ ID NO: 190467 - DNA, 274 bp, Zea Mays
tccaagtcgagtcgcacaatcccaattcggtggcctgtattttattaaactggatctaatcctaaccgctcatttctgatctgtcgcactgattatatcacccgaattcttacccgatcccctaatctgagccctccgttgttgaccccatattcccacgattcgcacccattctatccatccgagagaagacaacggtcagggacggcgacacagttagcccgcacggcggcgcatcgacggcgcgcaccccattccaacttcgagtgccaaa

SEQ ID NO: 190468 - DNA, 476 bp, Zea Mays
acccaatggacttcggcaccgtcaggaagaagcttgccaggaatgcatatcgctcgtttgagcaatttgaggtcagattgataggctttggtcatatatttaggtagcgaatggataatgaaatatcatgttgtgatttgttggccatggaatagttacctttcagttcattttacttttgttgtcagcaaatttcatgtgtaacggtttcccaacgttagatttgcctaagggagtcaggtttgtcgtgcagcctgacaaatgaagtgaggtagctggacttctccattttatcatgcatttggaaccacatttcttggtcttccctttcacgacaatttcgtgcacatgcaaggtggatagctttccgctttgtctgtttgtactacatttgtgctggctcatgcaaatagtcattaaccagtgttattctgccctgcaaaagttaccttttccaaaataggcttacattcaca

SEQ ID NO: 190469 - DNA, 289 bp, Zea Mays
atcgagcgtgcgtggtacatatgcatggacgccatgtaaacatgtcctagcagctgctaacaacgtaccaccccaatcctcccagatctagcctcaccttgagctgtgtctggcactgtctttagctcagtgtcgctgctgccttcgggtttagcaaaattcaccgtgcccgcgagttcatcacccaaattgataacacactatgcttcgccaccctcttgcgcttgtgtaaccacaacccagccgcatgtcttcacccgagccccctgagaggcgtcttgccctactg

SEQ ID NO: 190470 - DNA, 477 bp, Zea Mays
tttcaacgaggtgaactcgagggagatggagagggtgaacgtgttccgaggcatcctggacaacaacgtgttcgtcatggtcctcggcagcaccgtcgtgttccagttcgtgatcgtgcagtgcctcggtagcttcgccaacacgacccctctcagcctcgcgcagtgggtcgcctgcgtcgccatcgggttcgtaggcatgcctatcgccgtggcggtgaagatggtgccggtggagtaggccggccttcagtggaggcagccaggcagttttggccgttgttgcttgccctcgtcatacagacatcttcctcgcttatgatctagacttctctggaggtcgagccgccatggcgatcggctcgattctgaaaagtgttgggtagaatcttgtagctttgaaagtttcagtttcagttttttttttgttcccagacgttcttcatttggaagtagtaactgttggcttgaaatgtt

SEQ ID NO: 190471 - DNA, 474 bp, Zea Mays
cgtgggctcagcctacgacaatggatgagcattggcatgtcactcttcaccatggcttcacacactaattatgttcaccgcactagctcagttgtcgaggagtcatgggacttcgacccaagggcactcattgcacatgttggcggtgttttaggggaagacatcgataaaaagaaatcaagcttggtcgtacctgtgccgtggaaggcgaggcgcttgtgagtgttgatggtgatgggcatacatgctcaaaagaggctgttctcgacagtgtggttcatgttgtctttgcaccttcctggtgaagcacgacgttggggcgatacatgctcaatgccatgctggctgtgccctctagctcatgtcactttaactctccttgtccttttttgcaccaccacattgtcagttagcacttgctccttggcagctcccctgtccttctcgtgccactgtgataggggtggtacccta

SEQ ID NO: 190472 - DNA, 597 bp, Zea Mays
tctcgatatagacatcttgttggcagcttggtttaccttactgtcaccaggccagatattgctcatgcggttcagatcttgagtcagtttgtctctgctcctacatcagttcattatgggcacctacttcgtgtgcttagatatttacgggggacaaaaacacaatgtttattttatgactcaaattccccacttcagcttcatgcttactctgatgctacatgggccagtgatcctacagatcgtcgctccatcactggttactgtattcttcttggatcatcccctgttgcttggaaatccaagaagcaagctgctgtatctagatctagtactgaagcagaacttcgagccctggctactactactgctgagattatctggattcgttggctcttggctgatctaggtgtttcttgtgactcgcctacacttcttcgctgtgacagtactggagctatacaaatctgtcatgatccagtgaagcgtgaactcacaaaacacattggtgttgatgtctcattcactagatctcattgtcatcagaagaccattgatcttcaatatgtgccctcagaattacagcttgcggatttc

SEQ ID NO: 190473 - DNA, 334 bp, Zea Mays
gaaatggccatcagcgtgccctcgtcggggtccctcctggatagtgcgtcggcgacggtgttcgtggcgcccgagcggtattcgaccgtaaagtcgactcccagaagtttgcccacccaatggtgttggggaatcgtggccaaccgctggtcgaggagatacttgagactgaagtgatccgtcttgacgatgaagtgccgtccccataggtacggccgccagtgccggacggcctggaccaggccgataagttcgcgctcgtaggcggcgaggtcgcggtggcggggtgcaataggtcggctgaagaacgcgaccgggtgtccctcctggacga

SEQ ID NO: 190474 - DNA, 453 bp, Zea Mays
gtggtcaaccctttgtacttgctgtgcgtccgacgatgccaatggctgccgccaagcaagaaggcagaaaagaaggatgctgccatggaggagggagaaaaggggactgaatcactgaactgagtttcaatctggtaatgtcgactaggtacccgcgatgaggatgatagcaggaagcagcccccatcttttacagcttggaacttcatgagcagctatcggatggctctgagcagttggcgtcttggcgagatgggttccgtaccagtggggttaaaaaaaacaaaaatgaagcaagtatgatgtagcacggcagtgacggcacggcacggatgaaaagcgaacgtgggagagcagtagcaccaacaggataacttggacagcaaactgccacatcacaggtgttgttcacacctcagccttcgccatcatcgtcatggatcacaatacaaa

SEQ ID NO: 190475 - DNA, 432 bp, Zea Mays
cttcgctttccccatgccccattcctgctgctagcataatccatgcaccgtcgcttgccaaccatcgttgctgggccaattcgacgccgtcgagcctccctcgctgccagcaacagcttacccagcatctcctcgcctctgttctactcgcctgccgctgctcgctgtcgtcgccgtcattgctgctgcatcgcttgacgtcgccggtgctccccaccgaagagcctcgtcgcattcctacacgttcttctccgcgcctgctgctgccgtcgcgccatcgccatacctaacaccgtcatcatcacgagaaagatccgtccctgcgcctagctcgtccgcaccgctaaaaccgtcgatccgctccatgtatcgtggccacgtgctgaaggtagaagacgagatctattttttgttagctacccttcgattttt

SEQ ID NO: 190476 - DNA, 395 bp, Zea Mays
cttctggatcaatgtcccatttagcatgtgcgccatgtttgtagccatctgttgatcttgacaaaagtcgcaaattggagtggatgaagactaatttatctgcagtggtagtgttcatcctattgcgcttggtgttatggatatggctgaatgtgctccaaattctcttggtcgatgaactgctgatgggttgagataaaactttttttgcaacctcagctaaatctagagtctcagaaccataacttacccaccattcaatcggctccatggtaaatgcatccaattgaacaggtggcagcgcaaacattcccttcttcataataaaagcattaaattgctcccttaaaacttgttcccttggagaatctgcaattttactaaaagcttcaagc

SEQ ID NO: 190477 - DNA, 397 bp, Zea Mays
ggcttctgaggtcatgaaggcgctcgcccccgacacctctctcgcgctcagcttcttccgcttcgccgccacctccctccccggcttccggcacgatgccttctcctataaccgcatcctggtcctcctcttcagcaaccgcgccgatcccgccgaggccatgcggctcatcgcggagatggagcgcgacggcgtgcccggcaacatctccaccgtgaatttgctggtcgggatgggcgtggaggtggggaggtgcctggacctggcaagtaagtgggggctcaggctgaacgggtacacctacaagtgccttgtgcaggcgcatctgaggagtcgggaggtgtggaaggggttcgaggtatatgagaagatgcggaggaagggctacaagctggac

SEQ ID NO: 190478 - DNA, 818 bp, Zea Mays
aaacacataccactatactcatagtcctgcacttcatcagttgtatccaacagttctgacattagcctgtatctatgcggcccttgatcagaaaaagctgaatcctggctcggtggtgtgacaaaaacatgcccttgtgcaacactcgactgtggtgtgacaggtgtgccaggtgcagcttgatcataatcagcagcacccccttgatcttctgaaactgcatcttcagctgactgttctgtgggttcaggatctcctattgtagggttactgtcagaatcttcataatgaacaataaactctcctgacagctgatctgtgttgcctgctgcattggcccagtcccatgacacattttcatcaaatatggcatctctcccaaccactagcttgctagtagcaggattaaaaaatctatagcccttggttccactttcatagccgatgaaaatcatcttggctgatctgtcagatagctttgtcagaccaggtccaaccaacttcacatatgcaacacacccaaaaatcctcatgtgcttcacgttgggttttcttccatgccaagcttcatatggggtcatgttgttcaggctctttgtagggcacctgttcaacacatacactgcagtacatatagcttcgccccaaaaatcagaaggtagtgccattgtcttcaataagcatctggccatctcaactacactctgatttctcctttctaccaccccattctgttggggagtatagggagtagtagtgtaatgctttatcccaccttcactgcagaaaattgagaatagattggaattgaactctcc

SEQ ID NO: 190479 - DNA, 389 bp, Zea Mays
gttttactatcccttcgtttccgctagccttctccttccagagcaaccgcgccattcgtctcctccgtctcgttcgtagtgcaacacatacagcctcgtctggtgaagtgaaagaacgacaagatctgtggtacggcggtgccggccgacatccacccactgtgctaccccttgcggttccagccagcgcagcgatcgattcccgctggccgctgccgtcggtgcctgcccggtcctccactcctcccgctactagtactagtaccagcacactccactgtccactccactgccagtgccatcccattcccatccgaggtaaacgcgtcaacgcgaccagctcacctcgtcatctcccattctctttcatatttgcatgcatctcggtt

SEQ ID NO: 190480 - DNA, 931 bp, Zea Mays
ctccatggattcaaacagaatgatatttttctggtctctgtcaactttctcaactctcataccgacaatgcatgcacctatgtatcctctatggaagctgttgtgcaaatttgatttgcgtaacatttctgaagatttcgagtactcatgtttgtgttgggcaccttctgttactcgtgataatagatttcttgttcttggatgggaaagtggagtcgattgtttcgtagttagaattcagaaagaagaggttctttcatgccagaagattttcacaatccccttccttgcagaaagcaatacagaagggccacctgacagcattcatacgataccattagcttctaaatgcagcaggtgttttgtgaacaacagtttcctagtagtatgtatatggaagaagaccttcaaaggtttctcatggaaagtagtattgcattcagaaaatcaatatgtcaatgggagatgcttgtgtggttttgctcctagctctctttccaccacaaaccaaggggcacatgcatgcttcagcaatgaaatgttttcagcagtggtttatgaaggttcttcagtctttccttctggcctggagggagaatataccacgtgcatttctgtaatgccgctgaataatactgtactgcctatacaacaacatgacccttacagaactgttccaggctatcatattgctactggttgctctgatggcactgtaaaactttggaagatgacttgtgcagaggactctttgcagactaagaaagaaagacacatctgggagctagtaggcatgtttggtgctcatcaaggaccaattgacatagtttcattgtcaggctgtggtagagttattactgttggcagaaatttgaagaaaaatagcacctccattcatatctgggaagcaacaaaaatcaggggagacggg

SEQ ID NO: 190481 - DNA, 405 bp, Zea Mays
ggaggggggtctgaagctagcagagcaatctatatgaaggaatagagaactagggaaggaggggagaaaaggatgaggaggagtgcaaagctagaagaagaataggacatgaactgaatgccctcccccttgctgatgtctctcctcttgtagttgctgcgatttgttacacaggcgaatgggccatggcccacacgagaggtagcccatttgatgcaaatacctgtcattaccctcttcttgagaagctgattgccccaagcagctgtacgaaaaccttggagatatcttgtcttaaagccggtttgcagagacatccattgttacttcaattgtcccctggatatctctattgtttcctggtatgaaatgatcatgccttagttccgatccatttcgtatggc

SEQ ID NO: 190482 - DNA, 356 bp, Zea Mays
gtccttgttaatttgggaaaggtcctatttgtgccctgttggaagaatgaaaccctaataattcatggactgcagttttagtactacatatatggtactcctaatgggctgggctctaggtccataatacacacatacaagattctaacactttcgcagtcgaaaccctagccacgatagatattgagactggaccgaaagtctgagaacaacgaagcgtgaagacccccaataaagatgttgccaaactgtgagcttgtcggaacgtgatgaacacgaatgtcctcgacagccacacgctcacggacgaactgaagttcgatcccaacatgcttcgtgcgatggtgctggacgtg

SEQ ID NO: 190483 - DNA, 510 bp, Zea Mays
attagttaccaaagtagtaggtccttcctattatcacccactaaattagtgggctgaaggctatatattcttgtaaaccacatatggaggaggcacgcaataaactatttcctaaccccttctctctcaagcctgcggttgaggagtttatcctcacccgagaagacagacgtcggctacgagctacgtagtcgtggtccggccagtcaggggtttgatgcccttaacaaccctaaaaccctaaacccaccgaccatccgatcctatgagtcgggagacacacgggtggtggtcgttgccaagaacatggaagaacgctaggaatttctcgctgacatccgcgctcgtctcgagcaagctcaggcatttcagaagcatcactttaacaagacccatcatgttgtttcgtacaaggtcgatgattgggtgctgctacgacttcgtcaacgcccggttgcgtcgctgccctaggccacctctggcaagctcaagccacgctacttcgggccc

SEQ ID NO: 190484 - DNA, 437 bp, Zea Mays
ctttctatctccgtccccgtgaacccgcaccctccagcctcccgtgctccactggcgcccttctggaaccctcagccctcctaatctcagccgaagttattaacctctttttttcttatataggccaaattagttcccctcccgcgattccaaggctttgctcttcgatctcagccgcgccgtgttcttcgcggcgagttcggagcgttggtgcccaatccgtcgaggttgtgagttgcttccgctgctgctactgccgccgccaccgctggtgttagtgatctgatctggtgggcggattgcggcgcggaggtggaattgttttggctctggggaaagctagctatgcggattgaggcgtcgccggattgagcatgaggggcggggctgctggcggtggcggtggtaagcgtggcgcggatgatgggatcgccgga

SEQ ID NO: 190485 - DNA, 545 bp, Zea Mays
catttttagtctcttcggtgtccatgggatgctccatctctcagctgcgggtaagtgcgtttgcacggtgatgaccacgtgcctaaatgtactgtatgtaacctccatacattcactgtaatgctgccctatgtcaaattggcaatggcctactgcaagcagcactccctttagcacgctcaggtgtactgccaaaacgcagccttttgaatgtgccttatattaccgttcatttatgctgtttttccgtgttgtttctttgggattttgctttcagtccttcgcgctggaaggatacatctgtttgctggtgccatcagaatgaactgccgctttcagtgacatgcatgcgatgcatgcttttgcttttcttcaatggtgaatgctgagccatgctcgatgggtggaattatggattacggtgttggtgtgggcaccaaatcttcaccacgcagtatggccattgagaaagctcaggaggagctcaggcaggagtctgatgttcgcgatgaatggaggagagaattggaatttctagagaaagt

SEQ ID NO: 190486 - DNA, 347 bp, Zea Mays
ggagttttggtggattaccttcagatttggaaccttatgtctgggatagtgctgcagcctactattgaagataaacatgtttttagtattgccccagacggtatctattcagcaaaagtggcttacgagggattcttcatgggatctacctttttcagccactattccagggtgtggaggacttgggccccgcctaaatgcagattttctttggcttgtggcgcacaacaggtgctagaccgctgacagattagctagaagagggctggaccaccctccgttatgccctctgtgtgatcaagagcaggaaaccttagaccatctcctggtttcctgtgttttctcaa

SEQ ID NO: 190487 - DNA, 501 bp, Zea Mays
ccgatgacgcaggactgcaggctgcgtccgtccaggaccctgaggccgctattgcttttgtggtctccctccaggcactcgcaggcattcgcacagagagctccatggtgcttccggtgatggtcaagggggagcgacttatggctctgctggacaccggctccacgcataacttcctccagagtgccaccatgcgtcgtttggggcaggtacccgccgcaggggagcacctcagggtcactgtcgcaaatggtgacaaccttcgctgcgccggggtggcccgcgatgtacccatctccatcgagaacgagcacttctccatcacgtgcgtcggcctcgacttgggttgcttcgacttcatcctcggcgtcgactacctgcggaccttagggtccatcacttgggacctcaaggccatgacgatggcattccagcgcgacgaccaccgtgtattgtggcggggcatcgggggtgccgaccctcctgaccctcgagcctccg

SEQ ID NO: 190488 - DNA, 296 bp, Zea Mays
taaaaattataggtatgagggatgatataggagatttattgcagcaccatcgtctcctaaaatgctactttttaggtataggagattgtataggaatacctggtggagatgctgtcttttctgcaatttgtcgattacaacgcatgccacattgttgttggataatttgaaacttgatatgtagttcaatctattaatcaactatttagtaggactgtggacttcggtatcatcaatgccaagttgaagctctatgtccaatttaacatatacttgattccagaaaagttgcaatt

SEQ ID NO: 190489 - DNA, 316 bp, Zea Mays
gggataccttcaatgtcaccatcagagatgctacctgggcggagtttgaaacggctttccgggagcaccatgtgccccaatggatcgttcagctaaaggaagatgaattccgagaactgactcaagatggaagatctgtcagtcagtacgtgcacaaattaacggagttggcccgctaagcgccggatgacgtcagcaccgaagtcaagaagatggcccgcttcttgaaggggctcagaccagaactcaagaccatcctagccagccaagacttccttagtttctcgcacctctccaacaaagccatgcaagtgga

SEQ ID NO: 190490 - DNA, 634 bp, Zea Mays
attgttctctctttggttgtttcacgctcctggcctattcatcagctcgatgtcgacaattcctttctacatggtactttgtcagagatagtttattacgcttagccatccgaatttgaatataccactcatcctgattatatgtagcaccttaattgttcactttgtggacttaaggaggcacctcgtgcttggcacaagtttgcttttcaccttctacaacttgattttattgaagccaaatgagacatgtctctatatgtttatcggcatggagcagacatggtttacttcctactctatgttgatgacattgtaccactctgctctgaggtaccattggtgccattcaacatgagttacctatgaaggatctcggtgctcttcataacttcctaggcatgcatgttcaacacacaggctcgagtctcttcctctcccagcggtactatatgattgagatccttgagcgtgatgaaatgcaagccatgctcaatgctcattgatatcaatccaaagctctcagtagatggcaaccatgtacctgatcaatagattttcgtagccttgctggtgctcttcggtatctgactttcactgggccagacatatcttatggcgttcagcaagtctg

SEQ ID NO: 190491 - DNA, 423 bp, Zea Mays
tacaggagatctactgccatctgcttccaaatctgctgagctgagatgccaggctcttagagtcactgcaaatgtcacttctccacccggtttaatagggagcgcagatttccatgtgctatgagcaatcgaaataacagaatcctgattcttccctgacaatgcaacatttgcttcttcaactggcacggttccggcatttgtcagtgttatcagaacatcacgaatttctccttcataaagaagaatagaaccatctccacccacaacattggcaattaacaatggcagaggaggaacaacagaaatgctaggaaagttgacactcttgaacttgctagagccacagcatctgaaaggatcagaaaggacaagcccttgtgcagctccaaggagcaaacaatcgacctctttgaataggtg

SEQ ID NO: 190492 - DNA, 285 bp, Zea Mays
cgattgtgcacgcgtcgtttatcgctgccggccgtgcccctagcaccaaaagaaacatccacaccaaggatagccatggggagacgatgacacaaggcgtggatgatgtggacgcaacgcagctgtacccgggcatcagctacatcaccgtcaaagactacctggacgctctccctccccacaacacactacgatctgacggttcacgaccggactctagatgatcaaccaatatgcaagcaagcacacgctcacatcgtcctcgtaccattttaggagtctgca

SEQ ID NO: 190493 - DNA, 498 bp, Zea Mays
tgaagaactggggaacatcaacaaacaaacagagagagcttatcaaattgttggacgagtggtatattgctgttacattctctcttatggaactgcaaatgttccttcatctaatatgattagtttactcattttagggctgtattcattagaaggaagtacgggaataagccactctcatcctcgacatatcttagtgaagcagagcctttccttgaacaatacgccaaacgaagccctgcaaaccaggctttgattggggctgctggtaaccttgttcaaactgaaaatttcttggccattcttgacgcaaagagggatgaagagggtgatctccggacagatcatggggcagcaccttctggtcctgtgtcaacatctgttgatgtggttcccaaaacagagggccttatagtgttctttccgggtacttactgctgatatatgttttatgtcattttcatttgttagagtaactgagacactggtataatttca

SEQ ID NO: 190494 - DNA, 464 bp, Zea Mays
gcacagttgagggcattcaatcgttcaaggggttcaagggaccttcctgagtttgtgatgtttgagggcattgcggagattacagagatgacacacacaaagggagaaaggatgcacaagagtgaggatgatgttctgagcaaggagaagaaatcgaggcgcgctgggagttcacgtagaaaaggagaggctttaccagaggctgcaaatgatgatgctatagatgaagacagcaatggaggggcaggaaatgatacgttgagtcagggggaaaagtcaaagcgtgtgaagagttcatcgaagaagaaaacagacatttacaaacatttatatggactcaaaactgattctgttgctgacagcagaacactggacaagaagggagtagatgatgttttgagcgagagaaaatctgggcgcacactgcgatccacgagcaagaaggaagatgcattagagggttt

SEQ ID NO: 190495 - DNA, 354 bp, Zea Mays
agcagcaacacaaagggcgactctaaacgccatgacgatggcagttaagacggttgacatagtagatggtacagacccacatgaggatagaagatgatgtactactcttgtgcaggctccggcgctaaggtgttctcgaggccaatcagagcagaaagggtcgtgatggctactcttgtgcaggcttcgacgctaacgtgttctcaaggccaatcagagtagaaagggtcgtgatggtggagtcattgagcggcccttggaagaggttgacgtagtgcaggaaacggtcattgtcatagccttcgtttgggactccgagacggttcatgaggactttgcgagcacattctaggg

SEQ ID NO: 190496 - DNA, 518 bp, Zea Mays
cagccggacaagcacaataagcgcgtcatcgaagtcttttccgaacagacactccgtgcaaaagtcgcctaagggtgccgccggataagcgcaacaagtacgtcaatcgacactcctcgcaaaaagtcgcctacgggtgcagccggatcagcacaggcgtgcgaaaacggccaacaggccacattacaatacaagttgcagttacatacacacagcgagggcaccatatactacatcggctcaaccttcggggtgatacccaactctctataattaaacaacattattctcaattcctcaccctcaaaaagatttcgcagatccccctctcctatgctcgtcccaatcggcggggacaacagttctcgtttaccaatccggtctacacgaagacggtctcgctccatcccaatacgacggcgcctaccacttcgcgaaacctcacccacgctatgctttgacaccacccctcgccgcctgtacttggtcctcgcactaggaagatcagccgcctcgcc

SEQ ID NO: 190497 - DNA, 359 bp, Zea Mays
tgcagaaccaagatgttctaaatctgtaaaaacttttgagaatgtcatggccaagaaaagaaaacgacctattctatcatatgatgaagatgccaaggccatgcagatggaagtgaggatgcgcaggagacacagggaaagtggtgtgatgaagctgcgaagatccacagaaaattctgatgaagcgatgtgtccaggaaattcaaataatcaacttaccaatgatcatacgaaggcaaggaagcagagaagggccaacaaagacaataaaacaccaccagtgaacgctagtgttccatgcacacagattgatgctgcacgattagcatcagatcagcaaagctttatttgcacgcgac

SEQ ID NO: 190498 - DNA, 296 bp, Zea Mays
attcaaaataggtagagatatccatggagaataacttttgtgaagggatagtggtctgttactaaaagaaattgggtgatcaatgcagctaaacaatgaaatgtgcaagggggcagtgttggctgattcagtaaattcagaggactgaaactgtgttttagtgatgtgtggccaacttcagagccacataacttgtgatctacatattttgggtcgtggatttttatagtaaacctgaagagccatggttggggaacaaatctgttcaggaatgcttgagctatccttgtttggaa

SEQ ID NO: 190499 - DNA, 568 bp, Zea Mays
ccgaactctagcaggaccgccgaaccaagtcctctgccctaggcgggaagggacagcacaacggcgaccatcaccaggatcgaccccctcggttccagaagttggacttcccaaagtatgatggcaaaactgatccattggtgttcctcaaccggtgtgagtcctacttccatcaacagcgcatcattgacgaggaacgcgtgtggatggcctcctacaacctcgacgacgtcgcccaactgtggttcatccaaatacagcaagatgagggcactccatcatgtgtcacttctccaaactcctgaacctgcgcttcagacccccctgcgttcaaacccgctcggcgaacttgttgcatgtcgtcgaacggggttggtacttggtggtggactaccaggaccgctttcaagctctcctgccacacacgggccatctcacggagacacaacgtgtacagctcttcattgtaggcctccaaccgccactcagcctcgacgtcgagatccacaacccccagcccttgtccgtcgccatgagcctcgccaggaagatggaactccgggaacaa

SEQ ID NO: 190500 - DNA, 695 bp, Zea Mays
ggctgaggcagagtgatgagaaaatggtgctgtatgtactagaacctcctgagccttgcttgcatctgagtcccgcacattagtacatatatctccaggagtatttgcattagtgccaactggatgatcattaggcaataaggaagtagctgtaaattgatgtcccctattttcaaagttagataaaggtagcaaggtggaagggagaagattaatctcagcctgtaggcgcgcaccagcattagcatgcaatttggtgaaagagaggactgcttcatcgaaaaccacttgagatgcaaggatttagcaggggtatcaataacagcattaccaatattgctaatgttcatacctgcccgctgactgtgaggatctgatctggtcccttgtatgcgttttggcctgtcaacttttccagttctgaggtgatgttttctgttgcagcagtatcagtgtaccagtttgtatcaacgccataaccacagcggcagcaccatggctgtgggtagcagctgcagcagtcttgttgttggaggagttctcatcaaatctccaccagcaatcaagagcagtattccagtcttctcacaaacctgacatatgatgtcagactttctagcatctgatggcaccattctttgggcactatgaccaggacctcctttgccacggccaggaccattacgaccacgacc

SEQ ID NO: 190501 - DNA, 422 bp, Zea Mays
cgtcgcaacgcacgggcaaccgactagtatactataatcaccagtgttcactacgcgcgtcaagccaccggcgtcggcccaataaaatttacagcaatcattatatatcccatataaagaacagttcataatgaataaaataagtcaagccggagaatgaataaaataagtcaagccaccggcgtcggcccaatagcatttacagcaatcattatatatcccatataaagaacagttcagaatgaataaaataacttcaggcaaccgtggaatgtaaaataacttcaggcaaccgtggaacgtgaggagttcgtgcaggtgtgggcaggattgtgattattcaatatgtagatgacacacgagaccaaccaaagggccaatacgggatcgaataaggaaggacttgatgagatgcccctaac

SEQ ID NO: 190502 - DNA, 556 bp, Zea Mays
ctgcacccccttagctgcttttatgaagattctccagaacaaagtggcaagaaagtaaattgcataatccacttaggtccatcacctgtgactagatctgttgactaccagaactggatgaaaaaatttggtgcaacgcaacatatcatggcaggacatgaaatgtacgattcaattccattttcttttttaatgaagtccattctgtgtgtagatttcctatgtcagtttgaactgattgacactgcatgcaattatgcaaacccagagttaactactgtgttgctgaatacaagcgaggtgaaacgactatgttcgtatatgttagtgagtagtgactgctggttctcagggtttagttttccataatgatatgggaaaaatacattgtatgcaactgtttaagttgtattttcagcttgtgccacagttttttttggctgattggccttatgccttttttcttctgtttttttattcacacagtaaaaacatggaaattcctatcttgaaaggtagtgcaaggatatcatcacacctcaattttgtatgccct

SEQ ID NO: 190503 - DNA, 408 bp, Zea Mays
gttgtgaggagtctcggcggcacagtgcaagctctgtccaacccagccgacgaccaaaaacatgtcatcgttagcgagctaacctctgtggtcgttaaacatagaatccaactttgccttcacgacgaccacagtgattggcgtgaatacctacctctccccgcgcgtaaacagaaaagcaattgacacgatctacaacaaccccgcatgaatcgaagctcactcgatctccttcaagatttcctctcgttccctgtcaatagatcaatctacggggcaggggcggccacaatgtcttcctcctcccctcggtaattcctaaccagccaccacgtcttcctcctcccctctgtaattcctaggtcaaagggagcaggagcggccatcccccatcccttcccttccagg

SEQ ID NO: 190504 - DNA, 386 bp, Zea Mays
cgctccccaattggagggtttccctccccttcccccaaatcgaatcgcagcattacccgccgagcaagcaacccacacccactcacccgcctttcaaggttcctactgcgctggcgatccagctgggggcgagcgcagcggtggcggccggataatccaatgtgtatgctctgcgccgtgcagcgctggtcgcggcgcgtcgccaccatgctcccgtggctcgtcgtcccgctcattgccatctgggctgctacccagctactcctcccggccgcctaccgcttggaggtcacctccccgcgcctcgcctgtgtctccgtcctcctcctcaccctcttctggtatgagatcctcctcccgcggctctccctctggcgcgctcgtcg

SEQ ID NO: 190505 - DNA, 994 bp, Zea Mays
ttgccctggttctctccaaggaagacaagcccaaaatatgatgcttaagctgtctccgaagccaaatttccagtgaggacaacaatcttgaatcctgggcagattccagttgatgaataatctccctcgcaagaagttgtcgcttgatattgcctgtcttcctatgactccaagattgcagatttttggcaagcctccgcagcttgtctgcgagcctttgtaaagggcaaacagccataatcggctgctcccaggactgctgcacaacctccataaagccatcaagttttggccaaaaactttcgaaatgaaagcgacgtttacccatgaaggagtccctcaaacccagcaataaagggcaatgatctgaaatggaagaagccaaagcatgcagaatgcaatctgggaacagctggtcccaatcagtggtcacaaaaacacgatctaatctgacaagggttggcgcttcccgctcattagaccaagtaaattgtctacccaaaagatcaatttccaccaactcaagctcattaagaagacgacgaaaacggcccatcattgccctgtcaacattttgattatttttgtcttccactttataaatgaggttgaaatcccctccaacaacccatggtccaacacaggtaaggcgaatgctacgaagttcttgcagaaattgcaccttcaagatgtccgactgtgggccatagactccagtgaaccaccaaggggggcccctcactctgctggaactgaacagaaacagaaaaaacatccacccttgatgcaatagccttgcacacatatgcccttccaagccaccagaatgccaccccgagaaccatctgctgggaggaacacgaattcatcaaaatcagccccaagggtcgacatgactgtcctcctagaaatattttccttttttgtttcttgcagacaaaccacatccggcttcacataatcaatcaaactacgaacagaatcccgtcgagac

SEQ ID NO: 190506 - DNA, 288 bp, Zea Mays
aattgatagcaatagtattcttgcatggttatatgagcccttgaatgtgttcccctaacccttgtatcactatatgcaacaccaacttggaacccacgctctccatatggaaacagaagtggatattggagagccatatatgctggatgcaatgatgaaatacgcctcaattccgaatttcttgtctctataataatgtctcgtttgaaggtatcaagtgagaaatcaccaataacaagcatggctaaatcatcggttgttggcatattgtactgcacaggatctcct

SEQ ID NO: 190507 - DNA, 417 bp, Zea Mays
ggacaataaagctacgcgcaacaagctcttctagggttaaggactgggttactgcaataaatgctgctcgacaacctccagaaggctggtgctatcctcatcgttttggctcatttgcaccaccgaggggtttgttggaagatgggagtatggtacaatggtttgtagatgggcaagctgcattcaaagctattgcatcctccattgaggaagccaaatcggaggttagctttttatttccttcaacatttactacaggataattttctacctgtttgttaaggaagatgattaaagttcgatgcagatatttattactggctggtggctctgcccagagttgtatcttcgacgcccattccaacatcatggatcatctagacttgatgctctactggaagcaagagctaagcaggg

SEQ ID NO: 190508 - DNA, 425 bp, Zea Mays
ttcctgtttagccgtgctggcgtgctccatgccgtccacaaggcgattctcaaccgagtatttttttttcccgctccaaatgtgctgccccaccccacagacagctgccggttcgggcatcagtgtcggcgaaaatacacacactgctacgaatttggttctttgcaggtcaaggtaggatcgatacgatagtgccagcgacgtggtcaaactgacacgcaaatcgacaggaactgaaagttagctgacagaaattcgcaaggtctctgccagctgtcgtggctgggcctcaccggcaagatcactaaaaataaaaacaattgtagttctggcacgaaggcaacacgaagcacgacgtagaatgtaccaggcatgcgtttctgaagcgtacttggtttagaatagaatagcacaggtggtagggt

SEQ ID NO: 190509 - DNA, 722 bp, Zea Mays
ctttataaattaaattaaaatccccaaggaccaaccaagggccagaacaggaagcacgaatatctctcaattcttgaaggaaggcaattttgtcctggttgagctggggaccatacacacaagtcagccacccgcccaccactccacatcatcaacaggatgaaaaagaattgacaatgaatgatcatccactctagaaacaccagcccagtttatatgatctttccaagcaaccaaaatgccaccactagcaccaatcgaagggcgaaagacaaagttggcaaaatctggtccaagcatccggataaccaaaaaacgagaaatatcctgcattttagtttcctgtaaacaaaccacatccactccagatgagacgacctcagcccttacagcatcctggcgagccgaggcattaagccccctaacattcaatatgagaatttttgacggatccataaaacactagcttaagacgaccaacaaacccgcaacccaaggaagagaaccttcctcaaagagtagcctccacaagcaacgtctcttctggtagagaccaaccgaagagagaggcaagggcttggatctgcacctgggatagagaattgctgaaaatgctactatattcctccagcgcctcttgactcagagaatccccatcatggatcactcccagtgtcttcataatggtcttcttgcttttcttgaaagaagaaaggcgttgg

SEQ ID NO: 190510 - DNA, 631 bp, Zea Mays
agccaaactctctagcaacaagctgtggcggtggcaatatactatgcctcgtaggtggagagtgccaccaccttctgcttctgggattaccatgaaattgcgcacaatctgaggaagaagatgatgctcgtcgtgctgcgccgcccgtcgacatctcctgccatctcgctgtcgctgtaccctgtcagctccagtcgtccgcctcctctcttcggatacacaagcccatgctcgatcgtccctgcaatatagcggagaaggcgcttgatcgcggcgaggtggtcctcctgcggatcctccatgaaccggctcagatagccgatggcatagccgatgttcgaccgcgtgtgcgctagatagagcaaaccgtcaacgatgctgcggtagctcgtcgcgttcacccttggtgtcggtctgtcctttgacagcttgagcttctcctccattggggacaagcacgacttgcagccgcccatcccgctgcgctctagcagtttcacgacgtaggcactctgccgcagggtgatggagcgcgccgtctgctccacctcgataccaaggtagtagctgagcaatcctagatcactcatcttgaacaacgccgtcatctccctcttgaattcgtcgatga

SEQ ID NO: 190511 - DNA, 353 bp, Zea Mays
ccggcgagtgcccaaaccactctgagggccccaaacaaccattcgagcgacgctacacgcagagacgatgagtacaaacacaagggttggtagcataccatcgatcagagcagagtgggccttgcccacggcggatggcggaacaacgactctgtaggagtccagggagcaatttcacccacaccagtcgacttccgcgcatggccgccacattcgcgtgttctcagtgcttgagcgaacgtcctgggcatgcatccaacctgcgcacggcagtggagtgcgctgcccacggagccatgtgggtacgccgccatgagttctcacaagcgagcgacactggtgaacacaaggcc

SEQ ID NO: 190512 - DNA, 622 bp, Zea Mays
atccgcattgagcttaaggatcagaggacaatggtcggagactccagaggcactgctatagagaaaacaatccgggaaagcctcctcccaacatgcagtgcaaaaaacatggtccagcttaacaagggtgggaactatcctctgattggaccaggtaaatcttctaccattcaaatgtatctctttcagatccaaggagccaataagacctctgaaatggcctaaaagagacctgttaatattagaattattcttgtcttctgacttgtaaatttgattaaaatcaccagccaccatccatggccccacacatgtattcctgatatcccttaattcctaaagaaaggcagatttcaaattgtcttgatgaggcccatacgcccccgtgaaccaccactgaagaccatcatcaccttgcaactgaaccgaaacagaattgtccttgattattgaggctgctgaaacaaaggaaccatcacgccaagcaactaaaatacctcctctggacccatgggcaggactaaaaacaaaattactgaatccggacccaagaatagaaagaatgttgaagtctgagatggagaccattttggtttcttgaagacatacaacagcaggtctg

SEQ ID NO: 190513 - DNA, 433 bp, Zea Mays
gctgaaagcacacacctaggataggaagattcttttcttggttataatcatcacttcatcagcgagcttgcatgctgaggatggatgtaggtataggtctacataatcaatcaacaagaactgatgattaagggcatagaaacccattcaactccgagtacagattgatgtgcataccttgctgaagtggacacggtattatgtcgtccttttcttttgttggcacgtatatttgtacttaattaaaagtcatcgataaaagataaagatattaaaaaggttacttctgcacttctacgtagttgtatttagggttggacgaaataatcacggctcgtcagctcacttagttcattgcttattttatttgtttgttggatggttgtgaaattaatattatcggggcgaactacccgacaaatatctgttatct

SEQ ID NO: 190514 - DNA, 404 bp, Zea Mays
gtcttgtcagtggtctaggccgacagtcccgacacctcacgccggaggagatggatgagtgtcgacgtcaagggttgtgcttgaactgcgacgagaagtgcgttcggggccacaacaggtcctgcaaacagctcttcgtcatggaattggcgaacgacagcgagagcagggacgaggacacgactctggactgcaacgaaccagcaccaacaatctcgttgcacgccatctcgagggaccggacgagccagaccatgcaggtcccactgcgttgggggtcggcgaccctgcacgctctcctcgactcgggctcctcccacaacttcgtgtcagctacatcggccaccagcacgaagacaatcttccagcagcagagcggtttatgggtcacggtcgcaaatggc

SEQ ID NO: 190515 - DNA, 489 bp, Zea Mays
acgccgccgcgctggcgctggcgatggcggccctgtctttgtcattcgtcatggccttggtggcacacttgacgacgacttcactggtcgcctgcgcctgtggctgtgcctgtgccatggtcgtgtgtgcttcgattggtacgtacggcgatgctgatctgatagttattattgacgacgacgaagcaataagaccaaccaaacgatcggcgtgtaggggcggcagaggaagccgtctatttatatagatatcgattggcgaaggagacggcgacgacgacatggtggggagcggagggtacaccagtggttgcattggcttggcgtcgggagacttttgtttgtgaagcgagagcgtttctctccatatgcatgcatgcacgaccacgacgtcgtccttcccttctagctatcatcaagcggctatggtgtccgtccacacggaaaggaatgaagacgacaaagactgttgatgaccgctcgcatgcg

SEQ ID NO: 190516 - DNA, 891 bp, Zea Mays
cttgttctatggagtttgacctttttggcttgtccgtgaaggatcttgtcacctagagtcttcttgctcgatctgatagctttgggcccatgtacactatgtggattcctgctttcactacttcatcttcgtcgatgcggcatgccactatagctccatccaacacttggcatcgttgcctcaatcgtcctagtcttgatgttgtccaaactatctcgtagtttagtcatctcttgtattaggggcactcatgagcatctgtgtcatgcttgtcagctagaggtcatcatattagacttctcttccctagctcctcctttcaggttgcagatatttctggtctcattcactgtgatttgtgcacctctcatgtcagtgttttagatattagtattactccgtggttcactggttcataatgattgctcccattactcatgaaattttccttcgtgcttgaagtccgatatgtttactaccctttttcacttcgtcgcttaggcttccactcagttcattcatcgaagtagcagtgacactgtgcacctcctcatgcgatatgttttctggtatagctagtttacttccttgatctcgttgggttttatcaacgctaagtgcctaagttggacacctcatgttcattcatcgaagtagcaatgacactgtgcacctcctcatgtatgttaacgatattgtactcacatcttgtagtatgagtgtatgatcgttttgcaacacactattttagcattgcagcaagagttcgctatgaagaatctaggctagcttcaccttttcttgggtattgcagttgaacaccgccccgatgcattgttccttcagcagtgacattatactttggacatacttgagcgcgctggcatggtg

SEQ ID NO: 190517 - DNA, 490 bp, Zea Mays
caaaaaacggctgcgggaatgggaaacaggtgaggcgtagcgagatgagcgcgactgcgggcgcatcgtagcgtgggtggcagtgacgcagcgcggtgcgggcaggttggatgcgcgggcgcagaggagagtgatcaagggaacatgagaagagttcgacgtgtccataaatagcccagggagaaggaatggcgacctcggaaacgtctgcacgaaccaaatactattaatgaccgccatcgagcagacgtgaatgcgggagggaaaacgacgacgcggtcagtgaggagaggaaacggacaggtgcgggcataaggctgctctactcgcggctagggcagggaggcgtagaggtggccgcgcagagccaaaagggtacgacagcagacgtcccgacggcggctgcgctgtccttgcgtgcgggtgaggagccggaagacgaccagtgctgggaggggtgagtggggtccacatgccaggaatgagggag

SEQ ID NO: 190518 - DNA, 278 bp, Zea Mays
cgggattagatgatgtgttgggcaaaagatagccgtgagattatagataagctgtgcagatttaatcgtagatacctccctgggcgattcaatctggaccgtagagttgatcgaacggtttggggcgcgtcagacttcataaaaatataaaccctagaattccgatccgacagtggcgatcgtgtaccgtttcggtccactctagatctaattcgaagcacacattttagatccaacggccagacacagtcgataccccttcgcgggtcagatttgca

SEQ ID NO: 190519 - DNA, 802 bp, Zea Mays
ttggcaactctggcagtatgtggtgtgctagtggtcgtgtgggcgtgtggtggtgggaggtggtcgagactcaggcatgtggattgtggaggattggagttggagacttggagtggaggtggtcgggcgtgtgaccaactggacgtggtggtgggccagttgttgatggtcagatgccggcgggtggagtgcatgtggaagtggaattgtggagtgcatgtgcaacacttaggagcaataaactaaaatctctcttaaatttctacacttcccaggttaaggccctttcttgttgctcgatgtcctcttttgctctagaggcaacttgtgctgccgtttgaaaggtgtcggtgaagatccttctattccgttctttccagacgttccaaagagtgtaaatcaccaccccattgaataacctttcacttttcggaatcttggcttgggtttcttcccaccaccggatcagatggctaggctcatccgatggtatgattagattttcatcgaaatgcacccatgctagggtgaggctccatattgctttagcaaaggggcaaagcaatgccaaatggatacatgtctccagtggcccattgcataatgcgtattggtcttggtgtggccaacccctttattggaaactgttgcggtgagtactttctgtatttggtatgctgatcgagtggagtatgttccgtctgccgtccatctccagagaatggagtccctcatgttcggtgtaagatgagtgtcctggattctgatccaaagggatacaaactcctgtactgggctgcag

SEQ ID NO: 190520 - DNA, 552 bp, Zea Mays
gtcacggacgccatcggcttcaagtacatgatcgggcccatgatgctggggctggcgctccccggcggcatgcccattggcgccacgatgacggagcgcctcgactccttcttcatcgcgctcttcctgcccgtctacatggcgctctccggctaccgcaccgacttcagcaaggcggaggaggcctcagagaggtggtgcgcgctggagctgttcgtggtgctctgcgtctccgggaagctcgtcggctgcgtcgccgcggggctcttcttcgccatgccgttccgtgacgccgccgtgctggcgctcatgctcaacatccggggcatcgtggaggtggcggccatcaacagctggggcgacagcatgaaggccaccgcggagcactactccacgctgaccctggccatggtgctcatcaccgccgtgtccacgccgctgatcaagctcctgtacgacccgtcggggcagttcgcgcgggcgaagcggcggtcgctggagcacgcgcgcatgagcgccgacctccgcgtgctcacctgcctctacagcgag

SEQ ID NO: 190521 - DNA, 317 bp, Zea Mays
ctccacgcaccgccatccgtggtcgtgtgtccacctctgccgtcgcgtcgtctcgcgtgtccactgtccaccctccccgcttctatgcgcgctcgcgtatcccttccctagtcgccaccccatgcggcatccacgtctcctactctctccttcctaggttcctcggtcctcgcgtatggtggcatatgcagggtcttgtctgtgggattttcttactggcaagcttccctacctgtgttgccctaaggctcctacccaacttgtgatatcgtacacggttactcctgacgctaaggagcagcttcttacatattatg

SEQ ID NO: 190522 - DNA, 893 bp, Zea Mays
aaagctgaaggattggtggcattgggtatgcaatatatcccatgttgcaaacaattttagataagtatgaataacagtattccattcggttggacctaataaggatctaaactacaggttgcagaaggtgatctgccaattgttgcatctcatgggttagtcctgcacacaggatattcttgagtaaaccttgtactgcaacttcaaattgacaagttttccaatcgttccatcttgcagaactgaaattgagacgtacaaaactatagaaccagctattcgtttactaatcttgaaagcgatatgtgatatccgtgttgaggtatgtgctgattttattttaatgtaacggtgaaccaaaagaactttgacaaaatggacacttagccttttccatctgtatactcttgcctcatttcttgaagcctactacagtcataattgtttatatcaatttcaattgagtctcagcctcccagtgtcaccagttcagtttttcggaaagcttatttccatataatgggtaaatatcagtatgatcaatatccatacgcttgcattgtttcaaaattatttaacagtttagcctacagattagataaattcctccatgcttcatttattggaatttcaacaatatttgctggctagtgcctgtgttacaaacctgtgtttggagaggatgtcgctagaaaaagcgtctctatcagaataaattttacagcatgtgtattaagtgcgtttgacattagctgattggtatgtgtatggacatggacaaatttgtatttgacattagctgcaagttaattttggcaacataacttattatgaatttattttgcagcaagaggatattcggaacttcattgacagttctcttaagcatggac

SEQ ID NO: 190523 - DNA, 477 bp, Zea Mays
tagctcaaatatctgctttgtccagttattcaaatagagagtagagcagataagggctcattgtccacaaatatccaaccaatccactgaatacagacaggagtagagacagacaaaaactctactgtggtaggctcaaacaggtgcaaaactgatatttttctgcagagggggactgaacctcgagccccatattgcccaccccaagtctatctcagtttgtgcacataagtggaggacagcagggatgtgaagatctttcttcagatttttgtagcaactcccagtacctgttgaactctgatctctccctattcacctccctcaatcccacaatttcccatagtaacatggggagcacacttactaaaactggtcgattaaacaaccctctaccaattcttcataaagacttcagccttaaaccccttagatcaaacaccaaacagctccaatactaacagaaaatactagaac

SEQ ID NO: 190524 - DNA, 293 bp, Zea Mays
cagcttgtcggtcgatcggataactctcacctccgtcgagctgtcgccgttgcgcgccacgtgcttaagcgctggccctcatcatggtgaaccatggggtacatgtccggtgaaagccacctgtttcacacaccgagctctttttctcctccagccgccagcgctcctcgaccgaattgatcaccaccgctcaagtatcctataaattgaagcctcagcatgttctactaggtaatcgtgcgtccagtgaaccaactcgtagctccgatcgttccccacagctccccaatttg

SEQ ID NO: 190525 - DNA, 381 bp, Zea Mays
gatagatgtgagatgtcagtttcatcttcctccctggagccagttaatgtataaaccataaacaggaacatggaaatgatcccccacccctacatccctctgttagatgcaccaggttaattgggctaatgagcattgaaagagtgcatcatttttgtttctgatgggtcctgaccaataatgtcggctccctgccttcaagttcattccagagtatgcatagccaaaccatgtaaggatttcatttctgttccaaaaagaagggaccaagtctaataaaaaagatcactgtatttccattgtttctatgataggtctaatttggttccaccgttaccatgtggcgctagtctatcatgcgtgacaaagcttttaatgtgc

SEQ ID NO: 190526 - DNA, 475 bp, Zea Mays
ggaatatcaaattttacactaaatagcctactttattaagtgcactctaattcctccgaaatgaagggtccaacggccctttacacatgcatcaacattcaggagccttaacttatgagaataatttttaggtattaatgctatatctccagcacctcccatatccattacctatctcactcatatttcaaactccactgagtatatgcatatgcataatctactaaaaatagaatacaatgatggccaatatggtctaaaatttgaggcaccaatcaaggccgtgttcagttgcatgtgcattagagaagattgaagaaaattaaattcttttctattcaattttgactagcctcaaattctcttcaatccactcctaaccaccctaagagcttgtttgatttgagggtaattccaaaaagaattcgagtttaaaaactagtcctaatagaaatgcagaactcgcccattctac

SEQ ID NO: 190527 - DNA, 452 bp, Zea Mays
ctccctcgtcgccatgctggattcgggcagcacccacaacttcatatcggaagccgcggctgcacgcacgggcctgcccctcgaacaccggccacgcctcacggccatggccacgcctcacggccatggtcgaggagtgtactggtcgcttgtgtgagcgtcatccgcaacgcaccactggacatcgacggccactgcttccctgctgacctatacgtcatgcctttggcgggctacgacgtggtcctgggcacccgatggctggcagcgctgggaccgatcatgtgggatttcagcaaccacacgatctccttcaccttctagggcagggcgttctgctggtaggggctcgcggcctgccgaccggctgctgtcagcacaaccaccgccaccagtacactcctcgacgagctcttggcggacttcgacgatgttttcagcgagcctcgcgg

SEQ ID NO: 190528 - DNA, 626 bp, Zea Mays
aaaggcacggtccaaccggacaagagtgggattttccctctcattagaccacgtgaatttaggaatctctttaagttccagatcatctagaacacgcctgaagcgacccatcattgcgcggttcagattgctattgctcttatcagcagcttgatagatacggttaaaatctcccgcaatgacccaaggtccagggcacatagttctgacatcccggagttcttgaaggaaagaaattttatcaccatcattttgggggccatatacaccagtgaacctccaattacgaccttgttcttcaacaaagtgaactgaggctgaaaaaatgtctactcgagaacctaaagcttgaatgatggaagtcttccaagcaatgatcagccctcctctagtgccatcagccggcagtaagacaaacttatcgaaaacagacccaaaagctgagcaaaacaaaaaatggtccatggtagccaacttggtttcttgaagacacaatatccgctctagatgagaaaattacctcccgaacaacatcccgccgacccttcatattgagcccgcgggcattccagatcaaaatagttgatggattcataagagaaactgcataagaaccaccaaaccgg

SEQ ID NO: 190529 - DNA, 320 bp, Zea Mays
gcgatttggaaaatagacaatggaaaattcctgtcaaagtttctgtttattttttctggataatggttattgttcagttcttatagaaccatgtttgcttcttaaatacactgcactagataactatgttgttatatgcaatccaagcagcacatcttgccttagtaatttattttggctatttttatacgcgctgcagctaatgtagaagtccgagagtaccagaagtatatggttgaaaaggctctgtttaccaatacgttaatagctttgccaactggacttggcaaaacttttattgctgcggtagtgatgtacaa

SEQ ID NO: 190530 - DNA, 2163 bp, Zea Mays
gctctttcattgcggccagcagctccagcctccagcaacggtgagcgaggccccgggacctctcctctctccccgccgccgctgttcttgcaccgaggcaagtgctcctcctcactcgtcccctgctaatctgctatagaccgattagtctgcactgtatatcccttctattccaatccactgttctccagtatttgcggtagattagattaaatgaattcggaacatagctcagggccgtggctataagccatcacttgtagattgatctcaggtgtaccaataccaaccttactttcgtgatcttttcagagaactccaacttttcgcgagttgagggttggccttgggaggaggcggggcaatgggcagcagcacggcggagaagttcaggttctgcattgacaggggcggcacctttactgacatctatgccgaggtacccgggagaagagaaggctacgtcatgaagcttctctccgtcgacccgtcgaactacgacgacgcgcccatcgaagggatcaggaggatcctggaggagttctctggagagaggatcccccggtcggccaagatccccaccggcaggatcgagtggatcaggatgggcaccacggtcgccacgaacgccctcctggagaggaagggcgagaggatcgcgctttgcgtgacaagggggtttagggatttgctccagatcggtaaccaggctcgcccgaacatattcgacctcaaggtgtcaaagccgtcgaatctttacgaggaggtgattgaggtcgacgagcgagttgagctcgttcgggatggtgacagagatgagtcatctgttgaagggatctctggggaactggtgagggtgtcaaaacctgtcgatgtccaagcactgaagcctctgttgaaaggtttgcttgacaaggggatcagatgcttggcagtggtgttgatgcattcgtacacttatcctcaccatgaactcctggttgagaagttagctctggggatgggattcaagcacgtatcattgtcttcgtctctgacaccgatggtccgtgcagtgcctcggggcctgacggcaagcgtggacgcgtatctcacaccagtgatcaaagagtacctatcgggattcatgtcgagatatgaagggggctctgaacaagtgaatgtgctatttatgcagtcagatggaggactagcaccagagaggcgattctctgggcataaagcagtattgtcaggccctgcaggtggcgtggttggctattcgcagaccttatttggacttgagacatccaagccactgattgggtttgacatgggaggtacatccacagatgtcagccgctatgatggaagctatgaacaagttctggagacacagattgctggggctattattcaagctccccagcttgacataaacactgtggctgctggtggcggatcaaagcttaagtttcaatttggcgctttcaaggttgggccagaatctgttggagcacaccctggtccagtttgttaccgaaaaggtggtgagctagcaattaccgatgccaatttgatcctaggaaccgttattcctgaatacttcccatcaatatttggtccgaatgaagacatgcctcttgattatgaggctacaagaaaggcctttgaaaatcttgcacttgaaatcaactctcaccgaaagagtcaggacccatcagcaaaggacatgacaattgaagaggttgcacttgggtttgtcaatgtcgcaaatgagacaatgtgccggcctatacgccaactgactgaaatgaaggggcacgatacaaagaaccatgccctcgcatgctttggtggtgctggtccacaacatgcatgcgcaatggcaaggtctttgggcatgtctgaggtacttgtccaccggtactgtggaatactaagtgcatatgggatgggtcttgctgatgtcattgaggatttgcaagaaccatactctgctgtttataataccgattcttctgcagaagcatctagaagagaagcccttttagtaaaacatgtgaaagaaaagctgagggagcagggttttggagaggagagcatcaggacagattcatacttgaatttgaggtatgagggaactgatacagccataatggttagacagccagagcaaggatc

SEQ ID NO: 190531 - DNA, 397 bp, Zea Mays
gtactcagatggtgaaaatggaacaaaaatggtttcacttgggaagaaaatcaaaagaaacttttgaatatgattggtacggagaggaacagtcctggcacaattttttccaacataaaaaggaaacggtcttaggcatgcatatgcatagctacaagttctaccgagttgaggaagagcatagcatcagcgtgtaccagagaaataagaaatggaatgccacccatcatgcttgcttgacagcagcgtccacctaaatcgatccatccttcgacctcgtcaaggtgcatgtcgttctgttcagggtcaccctatcaggcatcagctgaacctgctagaaacatcatcgtcactgcacaacgatacaacatgtttctaatagttatatagataaaca

SEQ ID NO: 190532 - DNA, 412 bp, Zea Mays
cggtggggagaacggagaggtgcaattggtgggcggtgcagtcaagctgtcatcggatggtcagcaaggggacagggtggtgcaggtggcagggccaacgttagaagtactggggagctgtaccactgttggtgctagttctatgcagaacggtggcgagggggatggcttgttggtggcagcagagaagggctgtggtggcagcagcgatatggggcaggaggttgctgctaatgatttcacagagattgaaaacaaaacaggcactggtgagttacagggaaaggaaaatggaattgcaggaagcagaacaaaacggtggtcgtcggaatcgtctctgaatccgctgcctaagaggagggcagtctcagccgtacgcaaatttccacctggctgtgggaggactattgtt

SEQ ID NO: 190533 - DNA, 299 bp, Zea Mays
catgtggaccccagatctgatatggccgtaacttgatatacaagcacattctattctaacactctcttatctttatgattagttaatgtgatataagcaagcttgctttccctgtctgtttgccttgcaattacttgaacctggattgaaaaatggaatgcgttgcgtcttgtttgttgaccccactaacagtgtttcttgtatttctaggttctgttcttgcatgaattttgcacacttagcaagagtctaccagttgttcagcaactgcgactgtttcggtaagtccttcagtttca

SEQ ID NO: 190534 - DNA, 412 bp, Zea Mays
cccttatcttcttcctcggcgttatctcctggccgccgttcgtggaagaaccatctgccgccctgttgatttttacgcgcagtacttatctccctggtcgcgtctcctctctccctcatcctcacgctcggtcatcttcatcctcctgccgtggggctctcacggtcgtctctctcccctgcttccctcatggcaccggcccagctcgcgccctccctgctcctctcctccccagtcgttcctcctccctgtattcctgcatccatggccggatttcttgcagacttggccgcgtccccctcagtccaccctgtacgctcggctccctggtgtgtgccacgcctctgctcttccctgcggccgagttcccatctccatggtcgctcttgctgctcgccatgacatcgcgccc

SEQ ID NO: 190535 - DNA, 862 bp, Zea Mays
caaaaacgcagtggtggaggctcaagcgcaacgttgcgctccatcgtggactactttgctggcggctcctccgatgacgaaggagttcgagtagaggaaggggcgtgcgacaccaccgcagtaccggaccaagcggcacgggagcaggacgatggatcgcattttcggccgagctatctgcttgggagccacccattctctgcgccatggattcacagggaggaatcgaccaatgataggggggtttccggtccggtggccgaagaggaggaaaggttggacattcgtgatgcttctgatgatgaactgggcttggtggatgaggataaggaagagacggataatggtgaggagcttcttactgggggtttagaagatgaattttatgatgattatgccacaccaactatgaattcttcatatggagtggatttgtcagtggacaaagatgcttatggtagcaggttcgataggagtatgatgcagagcagtgtaaacaccatagttaaaacattgaggaattcgatggaggaaagtgacccgaatgccacggttgagttgtctaatgcagaagattttgtccagaaattgggccctgcactcctgccatgggaaagggaggaggaagatgatgaggcattcagcggtggcagggcggtgaggcgcagcaacacggagctggccgagaggtctattccagagcctgaactgcggaggcttagggacacggcgttgaggatgaaggagaggataaaggttgggccagggggtgttactcaagacatagtggagagcatccacaggaaatggaaggtggatgaggtggtcaagatgaggtttgaaggccctccaagcctgaaca

SEQ ID NO: 190536 - DNA, 399 bp, Zea Mays
gcgcacccggaataacgttaatcgaagtctatcattacaaagacactccgcacaaagccgcccacgtacgcagccggaacaatacaagtgtacgaatacggccaacaagccacaacaccattacaattacacacacacggcgagggcatcgcctatcacatcggctcaaccttcggaatgatacccatctccctgtaattaaacaacattatcctcaattcctcaccctcaaaaaactcccgaagatccccttcgcctatgcccgccccattcggcgaagacaataattctcgcctaccaaccccgtctactcgaagtcggccatgctccatccccatgcgacggcgcctgccactccgcgaaaattcaccctcacactgttttcccaccacccttcgc

SEQ ID NO: 190537 - DNA, 271 bp, Zea Mays
agcctgtcatcttctgccctagcgctgaggctgagtactgcgttgtggccagcgacgtggttgaggcatcctagctccatcagctgctctaggagcttcatagcaatctcgctcgtggcacccttgtctactgtaacatcgttagcacggtctacctctccaccaatcttatgcagcatcaacgcaccaagcatgtggacttctacctttactttgtcttcaagcgtgtcgctgtccacgtcttccgtgtcccgaccacctcccaatttgc

SEQ ID NO: 190538 - DNA, 961 bp, Zea Mays
aatattctagacgtgtcaactgaagttaggaatgcatcactgccatccagcaatttggatatccaatttacatcatatatgaatagttctgttggaaaagttgaggcccctcatcaacaagaagcacttgaaattgaaaatagtggaaacaactgtcaaagtgacagggctgagtttgctgtgcatggcaaaagaataatcattgtcggagcgggccctgctggtttaactgctgctcgccatttgcaacggcaaggttttttggtcactgttcttgaggcacgagaaaggattggtggccgtgtttatacggatcgcacatcactttcagttcctgtagatttgggtgctagcattattacaggggtggaggctgatatagctactgaaagacgggctgatccatcctctttgatctgttatcagcttggtcttgaacttactacgttgaatagtgcttgccctctgtatgatgtagtaactggtgacaaggttcctgattctctggatgaagatttagaagctgaatacaatggccttcttgatgagatggcactgctttttgcgcataatggtgacagtgcaatcggtttatccctggaggatggactggagtatgctcttaggaagcatcgcgcaactcaacctatggattctgtggaccaggatggccacttgagatttatgacaaattctagagctgtagacatttccgtaagtgcttcaataggaaaggagatagatcattgtggaaagaatgataagatagatgtcctcagccctctcgagagaagggttatgaactggcactttgcacatttagagtatggttgtgctgcaacgctgaaatctgtatcccttccatactggaaccaggacgatgtatacggaggattcggaggtgctcattgcatgatcaaaggtggctatgacactgttctacggagccttgctaaaggac

SEQ ID NO: 190539 - DNA, 588 bp, Zea Mays
cattccctaggacgcccctggggtgagacggcccaggcgccacaagcgcctctgttcgagcggtcgggtggcacagggtagacaagataaggcttgctgtccatcgcattaaatgcaatagacaacattgtggtcaaaagagcactatcgccacgtcgaagaccatagttgtacatgttgttactgtgtgtgtgtggtgtgtaccgcagtcactatagccacgactaaacgtgcaaacatacccgcaagcggcaagcgtgcactgtttaccaactatgtcgtactcaacaacatgaactccgatacctaccactacggttgtacatatcagccactgcagcaagacattctcgagattatggcacgaccgaggtgtgcactgcctacggctccacgtctacaagataggagtacctgaacctctactggacagagcccaccgccagcaagcatgtaactctctcctcccttgtggtataaaagggaggagcataacaatgtaagggacacagacacacacacacatgcacaaatcagaagcaaacgaaggtagtcagggcccaatcccaagctggtctagctcatttg

SEQ ID NO: 190540 - DNA, 340 bp, Zea Mays
catcgacacgctcgttcctacctcgattgcatcattgccttttgtcaacaacagccctaactacgtggaccttggcatcgccccgcccccccttccatggtgactacctcgacgtgtcttcatcatcaccatggcgcctcttgtgtgcttgcaactccaccaatacagcaacccgaccataactaaatctacctcggctatcttcagcacaacttcttcgaccatgtcaaatgctcccttaagctcagctacctcgacattagcacaaaggctaccaccttgcatgatggcttcttccccagccacagcatacatggtgcatcacctgttatcgttgtgg

SEQ ID NO: 190541 - DNA, 284 bp, Zea Mays
gacattactggtcggattcttgttgtcactgtgtgttctccaaggaagcatgagccgcctcgatgcctaaactatttaacatcacctcatgttcttatctggagtgcagtaacagcttcctgcgcttttcctggactttttgaggcccaagaattgatggcaaaagatagatttggtcaaaccattcctttccatgctccattcttattaggcatggaggaacgaactgttgctccaacccgccgctggagagatgggagcttagaaagcgatttacccatgaa

SEQ ID NO: 190542 - DNA, 292 bp, Zea Mays
aacaaatgtaccattgcatcaaccttccttgccattgcagcgtgatcaagcgttggcaatcataaacaagttgtcaaacaggagagttagctcttcgagcagtgttgtgagcgagatctcttacaatgatgagccggccctgacaaggtcacactccatgatatctgagatgcagttcagcagtggtagcagtggaaattctgtttacaagagcttccaaagggataatttgcctaacaactctgatgaggcatcagtttcagaaatttcagaaaatgtaaatcatctgagt

SEQ ID NO: 190543 - DNA, 1167 bp, Zea Mays
ctcaaataagcttgacatattcagtctgggtgtcatcatcataaagattataagtggacctacaggttacacccagtgtgctgaaatgccttccaaacaatttgttgagcttgtaagaaaacttgctacaaatggtgatcaattgtattttttgtggaaatagcacttactttttttaatatatactcaattttctatgttccgaatccaaaccatcaggtacatgaaaaatggaggaataagttacaaacaacaatggatgcagctgcattggagacatattgtgaacaagtagtgagatgcattgaaatggctttaagttgtgtggagaccgatcggcacaaaaggccgagtataggggctattattgatgagctaaataagatggagacaaataccgaccaggtatagtcactgatgacactttcatttctgattatttaatgtttatcttactgttaaaatctagccatgacataatacgaaggaagttatatcagccaataaatcttcataatcacatcatcaacaacctacatgtttggtacagagctactaatgcatgagatggacggttcaaaccacaacggctccttttttattgtggaactccacgttttggacaagaagtgattaatgttttctattgaagtagtaatatttgttagtaagacaactcatttcacatgtcttttcactgctctgaataaatgaaagaggaaagtctgttttgcacagtgaatttaggcatttacaaagcgtacacaatatttcaattttaccaccatgttacaccacatttaaaattgtaactccaacgttttgattttcccattaaacattttagctttattacatagagaaacaacaaaactgccaaaacattattgcctgaattaaattaatgttttcctaggttctgatatccacgtttaaaataccatctccaggtattttcagtggatatatgctcgactccagcacaaacacaaccaccaccccttcctgattctagccacagcacagaagaaacaagcaacacaaagggagttagcagactgggaccgagagagtacgtacagagcacaatgcgggacctggtaattgggataaccaagtcggtggtggagggggtgatcagcaaggcccagtcggtgatggaggaag

SEQ ID NO: 190544 - DNA, 1391 bp, Zea Mays
cacgcagggacgtctccctatcttaagaagaggagctgcaggaagccaaaggaaacgaagcatagccgtagaagcatttcacaagtcttgaagggattgtgcttgctgcttgcatagtggtaggagatggagcgtccatctgtgctgattttgctgatatttgcatttgctggaggaaatctgctcgtgggcatcgcctctaacgcaagaagcatcaagaacacaggtacaccgtaccggtcggttcctgtttttgccccttatcactttcttcgtgcacctcctgttctttttcttctttctcgccagttttctggagccaagccgtgactgataattccaggcttgtagcttgagcaattatctcgccctgcgaccctgcgttcatgatatagtgctgaaagtttaaatgagatccgatattgtactcaggactaaaaagaaaagaagataacgaccaaatcatcggctgatattgatagctcgtatagacaaaggctagttctttccttctcttttgagtggttttctcttcaagcaaaaatataccactggaaaaaggtctccaaaagctacccccacgagccctgtagtgtttttttaataaatcgtagtacacgcctgtatacatgtacgttgcaataaaattgcttcaggctgcccgcactgggcgacgccaaatgcctatgctagggaatcaggatgaaatattttttaagtagaaatttacggttccacgagtggtggatatcctcagcagttcactttaacaatttctatttactgagcaaacattacacaacaaacctacatgtatatatgcacgaaaaaaaggacttggtgcctgtcttttttttcaaaaagtaggatgtgatttggcccagcgcagttttcaataatgctagtagtacaccttaactatcgatacctcgtgtattatgttgttcatgaccatggcattattgacgtcaaatcagatccaatctcactaaatctgtactctacgaaattttttgctacctattgatcaaagattatggaactttaatcctagaatacgtgcacctcttaattgattgagtactctacctggtgcacaaccgtttcaccgtacttccgacagttctctctctctctctctctctctctcctatttggtgaaggaaaacctactagctttttacagaatgcgatgtaaccgtacacacgtccgacaattgtaggcgtggtatgtatgattggttagtctgcttttttttctttctgtcagcatctttttattgagcaattggcgagattatatttaggagttggggtatatatggcccgtgggcctattgctgacatttagctgaattccttgtagatccaggacatggaagcatagatct

SEQ ID NO: 190545 - DNA, 410 bp, Zea Mays
ccgcggccgaggccgcagcggccgctgtggcgaaccggatcggacgtgaggcgcccgtggatattacgacgagggacctttacgaccggatcgagttcagcgacgtcgacggcggtgcgtggaagcaggggtgggaggtcaagtacaggggcgacgagtgggataccgagaagctcaaggtcttcgtcgcgccgcactcgcacaacgaccccgggtggatccgcaccgtcgaggagtactaccagcgccagtcgcgccacatcctcgataccatcgtcgagtccctctccaaggtcttcctagtgttctcgccactccagatttgctttcgggcgttggtgctcttctccttttgaccatcgtcaggattctgctatggtataggattcgcggaggaagttcatatggga

SEQ ID NO: 190546 - DNA, 1231 bp, Zea Mays
gtcgtatatgaacgattggctgatggaaatcatgatatgaaaaagacaagcagagaacatctagagcaatttggttctgctggcttgcgtactctttgtcttgcctatcgggatcttagcagggagcaatacgaaagctggaatgaaaagtttgtacaagcaaagtcatctttacgagatcgtgataagaagctcgatgaggtgaatgggttaccatcttttggttattactatgacgattgacatgagttctgaatgcatttgcttgaaccgtggtcctttctgttagaacttgtgctactggatctataatttgtttagtaccacttcacttgcttggatggtttagggtttaagcgggtgcatctcatgcattgttggaagcaagcatgattcagtagtgttagtgtgctgtttatattgtaatgggccttgacccacattcctggatatatataatatatcccctacccaattagggttagagtttctttcttccaactagtagcatgaaacatttctagctctagacattgtcattagtatttccctgaaaagtttatttgtgacatccattagcacttttctattgtttaccataacatattagagttttcctgcgtttttccaaaaaaaacatattagagttttcttacttccattgtaaatttaatgagacttatccaggctttctttttataccaaagctacatggggcacgctgcctgtgaaggcgccaaagtagccacatgcagttattgcagttttgtctagtttgttgtcatttgctgcaataccaatgctaagtggtttgaacatcccgtaacggtaacctcagttagatattaaataatattttaaaataaaccacagtggttatgttaaaatcattttggtgaacatgttactgttatgtgagtgatgatatctgatgttcatttcctatttcagaatctatctttttcattggtttatgtgaactttatcatgcaaatcactggctatctgcaattctgcattctagaaagaataggtgatccttcaagttgaagctaaattgttcttctactgctgacaccattgtgatgcaattttccttctttatcctgtaggtggctgagttgattgaaaaagaccttatattagttgggtgcacagctatagaggacaaactgcaagaaggcgtgccaacctgcattgaaactctctctgcagctggcataaaaatttg

SEQ ID NO: 190547 - DNA, 320 bp, Zea Mays
ggaagtgtgtgttagtcaaagcgaagggcagtttcagcaggtaatatattgggttacttgttatgtgagagctgcttgttgttttgtggttacacttgcatcataaaaacttgttctgctattgcaggtcagctttgtcaacagaattgccaccataaggggtggaactcatgttgattatgtcaccaatcaaattgccacccatgtgatggcttttgtgaataagaaaaacaagaatgcaaacatgaagctacacaatgtgaagagccatttgtgggtctttgtcaatgcgctgattgacaatccggcctttgattcac

SEQ ID NO: 190548 - DNA, 279 bp, Zea Mays
cgcctacttgcgttgccatcgtttgtcgctgtacctgtacatgtccacccctcgtagcttttgcggcgttcagacagaactgagcgtgccatatcaagattccatgttgcatcacggcgttcccagtgcgcaccgaccatcaattatatcgagcgcactaatgaccgcacctgtcacaccaaaacctaacgagcgactagtttactctgctaaaaactccctggcgataagctcatagtcaccgtcacacactcacagcgcgcaagcgccggccgtccc

SEQ ID NO: 190549 - DNA, 549 bp, Zea Mays
atcggcgacgatggttcaagctagctaccggaggggctttacggacctacaacggccccggaacgcacgccaatgcaacccgaacaccctgagaacggcaggtccacgtgcacggtggaaaccgagcatgggagcacatgttcccaaacaaccatggccggactaagcaaacggacgccactgtgagcaacacaagcatggagaggttcggaaacaacacttgaattgaatggcgacgtaccagaacgagctggccacggtgagctaagttcttgcggtgttttgggtggatttgggggaaacgtgaaattgaggctcgtcggtgaaccactgggagcaatactggacgtcgaggtacttggctaccatacggagcgtgtggtggcttcaatttatagagttcatgggcggcggcgatcaattggagcaagttgcgctcgcggccggaggggaggaagaagcactggtttcgcgaattcgtggccaacgacgtggcagtaactccggtgagccacggagggttccgagaaggtcacggagacacggtag

SEQ ID NO: 190550 - DNA, 310 bp, Zea Mays
aaaattatgctcccggcgcctgctgcaagaaataatctattgtgttggtggcgtttctgtatttttccctcttctgatccactttgatgatgctgtggttcagaatggagagtttgccaccagagatcaattggctggtcaagttattgagcttgttgcatctgttctagatggaaatatagcaaatcagcaacagatgcatcttctttctggattttctattttagggttcctgttccagtctgtttcaccgcagctgctaaatatcaagactctttcagcatcgaaatacatgtttactattttgaag

SEQ ID NO: 190551 - DNA, 304 bp, Zea Mays
tctgcctccacatgcatgatcctcgggagtcccatctgacggtgatgaagtgcgttctacgctatcttcagggcactccagatcatgggcttcttcacttctccgcctcggagctcgtcatctataatggtgttgactaggctggttgtctggatacacatttgtctactatgctatgcttctcggcgacaaccttgtctcctagtcctccaagcgtcagaacatcatctccctctcgactctcgagcacagaggcgatgtatcgtgtcgttgctaatggtgttgccgaagtttcttggttgca

SEQ ID NO: 190552 - DNA, 315 bp, Zea Mays
gccgctgccgtgggattcacaccagcgcctccgcttgggtgccaatcgcccgctcgcaagcttcgccgagtcgtggggaaggtttccgaaggccaacgctaaggatttgtcgtcgggacccagggaattcatcaccggagttgcgcccgaccgcggagccgctcctcgccgtggttctccctgcactgcgaccctcgttgtcggtaagtgcattcctcagatctgcaagcatctagtgtccacgtagcaccatctaggtcagagttcatgggctggggcgggtaaaacgcgaggtccgaccatggcgccgccgtg

SEQ ID NO: 190553 - DNA, 321 bp, Zea Mays
ctaagagttcagtcactccgattcagtgtggggaggaagaattggctgctatcttggagctcctgccttgtgaattaaaggaattcccgtgcaattatttgggactgcccctgacaatcagaaaaccatcaaaagccgagttgcagcctctcattgacaaggtatcaaacaagttactaggttggaaagcctctcatgagttgagcagtccggctcgtgatggtcaaggtggtcttatcatcaatccccatctactatatgctcgctttcgacctccctaaatgggttttcaaagctattgataaacggcgaaggggtttc

SEQ ID NO: 190554 - DNA, 352 bp, Zea Mays
gaaaactgcagggactcactggtaacttatcctagacacagtgaacatcaatatgggacggcgggttctattttcttatttcccgaggactctttagaaaaatgaccatcgcgaagggggtatcgagagatcttggccgcccgatccgcaacggacggcccagattagaagttttatacgctgaaccggtatgcaatctgagccgcaggatacgtgatctacggcttagattagttcctaacgcgcagcgcacttctacccttggatccaaatcgagcggtccacacgtgcggtcgatctgggccgtgagttcgaaaatcagcggctgctgatcgtcttcttcctctagctg

SEQ ID NO: 190555 - DNA, 281 bp, Zea Mays
caatggagaaacatgcaccgaacaaattggtgaggaaagtaatgaaaaatgaagaccaagcaatgatgcacaactcttagcactagatggtccgattataagaatgttagtgaacattgaaaggtccagtgattagaagagcttggtaaaggaaatgcataatgcattggatggtctaacgattcacaagattaaatgacctgaggagatattgagtttgatgatgacactgaatcgattgcacgcacctgacagtctagttgtacatcgaacacataaat

SEQ ID NO: 190556 - DNA, 289 bp, Zea Mays
accgaccctgctctggtcaccctcaaggaggaactcatagcaggacaacgcacgggcgcatggtcgctggttgatgggctcgtcgcgttccaaggacgcctctacatcccaccagcatcgccactcctccacgagctcgtcaccgccatacatgatgatggccatgaaggcgtccagcgcaccctacaccgcctacgacgtgacttccactccccaaacctacggcggacggtccaggactacgtccgcgcctgcgccacatgtcaacgatacaagtcagaccacctac

SEQ ID NO: 190557 - DNA, 364 bp, Zea Mays
cgatgctgtgtcctggtccagggagctcccgagaagcggcgatgcattgtcagatcagatggctcgcttgttgccgtgttgcctgcatttgggcttggcaaagcaagttcatgagaaaattggaacgggttccttctcaacaggtgaaaatgcactgttgaattcgtactgtacttgaggtgctctatgtgtggcagagaagctgtcgatgagtttagagatgcgatgcacaaataaactcatgcttcctgttcacctacaatggcattgaagtaaaaggggcagaattcacttggtttgcttggaaggagcaaaatggtcaatttcctgccaaaataacaccccactaacagcacatggacgg

SEQ ID NO: 190558 - DNA, 377 bp, Zea Mays
cattgttccacgccgcccctctatctccaattccgaagactttccgtggcgctcttgctgatcctaattggcgagctgccatggaagatgagtatgctgcactattgcagaatcacacatgggatctggtacctcgaccccatggggccaatattgtgaccggcaagtggattttcaagcacaaatttaatgctgatggctctcttgaaaggtacaaggctcgctgggttctccgtggatttacgcaacgacccgacattgattttgatgaaaccttcagccctgtcgtgaagcctgctactgtgagaaccgtcttatcattggctgtctctagcagctggccgattcatcaacttgatgtcaagaatgcttttctt

SEQ ID NO: 190559 - DNA, 378 bp, Zea Mays
tttggaattctgtctcttacatctagaaaaatcatcatatgtgtgtgatgactttggcttactggtaagttctgtttgcttggtttcagttagttggggttaccattctgagtttctgaccttcaaagaataatttgatttgctgttgccattttgtttccatctttgttgagccagcattctgcatagatacttggaagtctgctgcattcttttgttcttgatttgttacaattatgtcatatgattgcagaatgaggttgcctgttttgtggaatctgtgttgcttaaaggtaccctcaataaggtatcctcattggaacccagcattataaatgacatcattgagcagtggacatctgtccaagctgaaactga

SEQ ID NO: 190560 - DNA, 401 bp, Zea Mays
ttatcccacagagtctacttctttcatgtgtcttccttccattcctgcatctgcacaatcatcttctatatccacatctgatgttctcattcccataacaccaccttccacctccacgtcatcttcttcttactcttccaaaccacctgtcattcaaacctacattcgtcgttcctgctctattcttgcggttggtcctgatactgatcatgtacctaattcttgtcctgacaataatgagtctaatgatgtttttaatcagggatatcgtcttcgtgatcgtggtaccattgaacctccagatcgctatggttttccacgagctggtgtggcaattgttgaacccactacatatcaggaagcttctaggattctcgagtggcagctagctatgattgatg

SEQ ID NO: 190561 - DNA, 391 bp, Zea Mays
aaagtggagcaagagctcttctggaaggttcactcattttcagcatagtacaatatttgtgtcttgctttccgccacaccgatcttatttttagtttcacaggctgagcgctcagatctgtcgtctagaccaaatctctataaggttctttattcatttgaagcacataggaacaaatggaggaaagcagctgcatacatgtacaggtactttgttagattgaatagagaaggtaatgcaggcggcagccaccaacttcctcacgtgttgcaagagaggttgcatgctttatctgctgctatcaacgcattgcagcttgttgatccctcatttgcatggctcgattctatttgtgaagccgatgataaaatttctccaagtaaaagacccc

SEQ ID NO: 190562 - DNA, 936 bp, Zea Mays
tgtgaacctggagcacaaccacgcgctcaacccatccgccgcacgcttcctcaggtgctacaagacgctgcctagcgggttgagcaaagatctcgtggtgagggctgccagaggggaatgctcggtggcgggtgacatcgatgtcccgatatttgatgaatgggggcggcttaagaccgggcaagctgatgtcctggccatcaacgctttcttcacccagatgcaggcaaagcttccaaactccttctatgtcatggacttctatgtggagggccatctgaggagtgttctctgggctgattccagatccagggcagcgtatcagtatttcagcgacgctgtttggattgatacggcatgcttaaggaacaagtatcatgtcccgcttgtttcgtttctgggtgtcaatcatcatggtcagcttgtattgctaggctgtggattgctgtcagatgagagcacagagagcttcttgtggctgttcaagtcatggttaacttgtatgaagggacagcctccaaatgccatagttaccgatgaatgtgtggcgataaaagccgcagttcgagaagtgtttccgaagacacgccatagaataagtgattggcatgtagtgagaagtatttcagaaaaaataggtgacttgccagaatatgaagcgatgagaaccaatttggttactgtaatatatgattctttaaacgacaatgagtttgaggcaaggtggaagaactggattgatagatttagccttcaggataatgaatggatcacctttctgtatgagaatcggcacttgtgggcccctgccttccttagggacactttctcagctgggctctgtactgttagccagcgtgaaagtccaagtacattttttgaggatgcagtcagttcagagaccacattggtgacgttccttgccagctacatgac

SEQ ID NO: 190563 - DNA, 336 bp, Zea Mays
ccagaagacagacgtggtgttgcctgttcccaatcaggtccccatcggttcaggaggcaggagtcaggacaggacgtcagaacgtctctctgcgtagatccctgaggtggggtcgggcgactggccactggccacaccggcagagctccactcgttcgttggcccgcgacccaaatccgctactagagtcgaacgccgtctcaactctcagactatccgcagccgttccccctatatttttccccctaaatcttactatgcagccacgtcagcaagattccctcccctaaatttactcgttccgcaaccgttccccctaaatattcccctacatat

SEQ ID NO: 190564 - DNA, 484 bp, Zea Mays
cagccgtcttcttggtgacatccctcgtgatgacattgacggtgttgaaggtctgatacttttttcagtaatatttgtgctctttgatataaatgctagaccatcagaggtgagccgtcttcttggtgaagcccctcgtgttgcagctgacactgttaagggtttgttactgttttcaacaagatcaatgctctttgatgtcactttgacaccatctgaggcgagccgtcttcttggtgaaacccctcgagctgcagctgacatggtgacaagtttgttattgttttcaacaagatccatgctctttgaaatcacattgacaccatctgaggaaagtcgccttcttggtgaaagccctcgtgatgaagctgatgaggtagtaggtctagtatctttctcaacaagatccatactttttgagacagattcaacaccatcagaagcaagttgtcttaatgttgagacccctctaggtgcaactgaa

SEQ ID NO: 190565 - DNA, 328 bp, Zea Mays
caccaaaaatccccaaaaaaagcaaaagcaaaattatatcacacgactgaactatggtagtgcagttaagatcaaggagagacagagaatggtgaactgtttcagagcatagctgatgcttcatgtttcttagcttctttttccttggtaccttaaataagtcctagtaatttgtaaattaatgtaactttgcaacaacctgagttactagcctatgtttctatgtaattcctatccacaaccgtattaatatgaagaagttcccctcccattttacccatttaaaaatatggtatggatatctttgatttttttaattataccaaaa

SEQ ID NO: 190566 - DNA, 284 bp, Zea Mays
cggttctgcgctatctcgctggcgcgcgggcccgccacgtcagcgatttccttaatgcgcccagactaatcatttctccgccacctagaccctacctcgccagtaccgtcttcctgctcggtttgttgcaaccgaatccggtggatccgccaggaatcttgagaccgactccaccactattccaccttgatgcgtgcccagccttcttctgtccggagtataaaacccagtcctctgttggaagttgctcccctgggcaagatgatccaacgggagagtgaaag

SEQ ID NO: 190567 - DNA, 397 bp, Zea Mays
ggacaacaaaattctgaaagttttacccatgcagataatgtcaagttggatttatgtgagcctgtcctaggtggagtccttatctgccttctattgtttatgtaaaatgaaccaaattaagtgttttggctgcacccatgaacctgtgtggcactgtgattgtatgccacgtgtggaggccatgcagtgctagcaccatatagaccactctccactgcctgcatggtgtgctcatggctgtttgctccctcgttcagccaccttagggtttggttttgtgaagtttttcccctactcttgagctccaaatttgtggtcatcgtgtgagtgatgtggcagtgttcaggcctgggtaacctccctttcaaacccccaaatctgatttgctcttgtgcta

SEQ ID NO: 190568 - DNA, 360 bp, Zea Mays
cgctggcagccaccaccatggaagtgggggtgtggatgaccattgcatatggttcagttccttcagcagcatgtttgttctgggcttccaggaacatgggggaagggacgaccagatttaatgtgaaggccgatggagacgaacatgtcgttgaggctgcgaattaggatgaggacgagggtacggttaggaacatattcaccaaggtcctcagggcgtcggccacgcccttgatgtgccgatagtagtcggtgactgagatgtccccctgggccaaggtccaaaactcggaatcgaggtggagggtgcatgtttcctatgaactatgactccatgaccagccacatcacacgggctgtg

SEQ ID NO: 190569 - DNA, 326 bp, Zea Mays
tacttcttccactcaactttaaccaactccttaagatcagcaacatgtttatgcaagcctgacttcataccaatgttctggtctttaactatcttttcgatgcagtcaagtttagcaacgatttccctatacagatgttccttcctagcgcatacctgcaagttaagtcataaaagattacctagggcaatacatctcccaaaatgatgtcaatgggttggcttttagagccaaattagacaagcttagataaaactaacataaacatacatcaacagcttctttgatgatccaatcttgagcttttggacaagcaaagtccagta

SEQ ID NO: 190570 - DNA, 384 bp, Zea Mays
cgctgcccccctccccaacctgctccgccccctccgcgtggacgtcgtctcccgtcgtccttgcctcaccgattccctactccgttccaccgggcgtccccggggtccgcacccaagacgcctccccgttgtcctcgcttcctccctccaacgcctgttgcctgtctcactccacgacatggatttggaatggtgaatccctcactgaggccccgaatcccgcaaccaatgccgccttcttctccccctcccctctgcacgacattgcctccccagccggcggctgaggtgcagcgccaagtggccaagtggcgccgccaatcccccatgtgatcacatccctactcggcaacaacctcctttctcgcaccgctgacaccgcgc

SEQ ID NO: 190571 - DNA, 702 bp, Zea Mays
gggccaatattaaggatactattaccatgtatgtatttactattcataatttcttgccaaatccccttctcgttttcaagtttccaccaccacttgcacattaaacaaatatttagcagtcttaagttcttaattccaagcccacctttttttttgctagtacaaactttatcccatctaacaagatgatatttctttttatcccctccaccttgccaaaggaacttcttccttctcttatccagattatcaatagttgttttcggaagcaaatacatcgacatatggtaaattggggaattggataagcaagcattaatcaaggtaattctcccagcaacagataaagaactacccttccagctatcaagtcttttttccaatttttcctcaagtttcctccaatcagcaatatgcaaccgattcggactaacagggactccaaggtacatcattggaaaagaaccaatttgacaattaaagagattagcatattgcatagcaatatcatcatctccattaatcacaaagatttcgctcttcataaaattaattttcagaccagccatcatttcatatatatacaatagcattttcaagtttctggctttcttaatgtcattctccaaacatatgatggtgtcatcagcatactgcaacaaggaaaccccatgggggattaagtgattgcccaagcctttt

SEQ ID NO: 190572 - DNA, 285 bp, Zea Mays
ggtgcgggaccagaggacgttcttgccctcctcacggccgtggtgccggacgtggaggagcacgagggtgtcgcccctgcggaccaggttgtcgatcgcccaacgcagcgccttcttgctgctcggcgagaagtccatcgccacgccgatcttccgctccgccatgctgctgccctgccgctccgcagtaatataatcgcggtgtccgctttctttcgctccggctagctattgctttggcatcgatctcccgtgacaagcctgtggtttcgtggggtgcgtgcg

SEQ ID NO: 190573 - DNA, 703 bp, Zea Mays
aaaatttctaactttcagtgggacattcgacgctttgagatctttagtgtcatcactaacttcagatgtcagcgcctcatctcctctatcttcactgcccacaatgtgcttctttgccctctcaccatgagcaccagaatagctaattagcagagtatttgtgctgcatgacttcatgaagttaaagattttctcttcaatcgtcaccatgattgcattggctgcagcacccagtccacgtgccggacactgctccctcaaaagtcgatgcacttcgcagtacattatagagatcaaaagcttggggaagagggatgtaccatatatcacacgatagtccttgacaatagacaactcaaggtacttcaaatgcagataaagtgacttgggtagcttgaagattgcatcccttgcagcatacttacccacaagagccttgaagagcttcacaaatgacttgtagcaattatctatttcagactcagagcgactcatgttcagtgatctgaataccagtaaatccaactcaggcagcacaccaaggttttcttcaatgaaatcggtgtcaggaatcgataaaccacatgtcttgctgaaatacaaagggagtaatccagatctcattagcttgcgaaccctatcatgggttaagaacgggaggtcattgtcaatatcttcaatgagacggttcataggtgccctg

SEQ ID NO: 190574 - DNA, 433 bp, Zea Mays
tatgcacgaaagcaggtcttacatccctccgcaagaagatactatagatgttgttggtctaggcgataggtccttagaaaggagtcctattgtggaggggaacatgtccattggatctgtgcttgcttcagctggctgtgatgcacctttgcagggaagaattactgagcccttttcccagcaggataaacatgatcatactgctacagttgaaccaaaatcttgtaggcaaaaatctccaaatctatctcactgtgccgatggagagggggcagatgatggtggctccagcaatcagtcatctaaggtttccattcatgaaggaccgagtgctcatgccccagtaacttcaggttttgacagaatcagcggtgtcttatcaacagatgcatctgaacctgagcatttgtctgagtgcataccagcacaggat

SEQ ID NO: 190575 - DNA, 474 bp, Zea Mays
aaataactgagatcgattcgcacccatcagattatggatctacggctcacatacggcacacccgaggtaataccccccatccaatcctaaccgcacaaaggtggatcaaaggtgccagccgcgtcttcctcatcctcaaaggtgaatcccgacgacacccagcggtggcggcatcaccggtcctagctgaaccccgatcctgagctcgaagcatctctcccgaacaagctactcgaggcggaggtaagtgcgacgttgttgcagggttactcaccgtgattctagcggcgccaatgccatggccacggttcgtgacagacccacggtggggccccaaagctcggcgagaaatcacccggtgatgaggccggcgttgcccaaatcgacgccggtgaaggactccccatgccctggcgaccacccgcaaccaggtcgtgtacaccgaacgccagtgggggcttggaaccatggcgg

SEQ ID NO: 190576 - DNA, 524 bp, Zea Mays
ctatgcggcacttgctgctttacctctggggttgcctttttctcgtccgtatcgaccactatagccttaagtttctccttgacttgggactgttgaccgttccccagcactagtggatcaacaagttgtttgccttcgatttcgtcgtcaagtaccacccttaatgcctcaacttggcagcagatgccctcttacgctgtgatactgacactaccgggactctgtacaactatacaccctcttggggccctcattccacctactcgacgagatccgtgccacaatcgtggatgaggaggtaggccgcctccaccagtagttgcaggacatgttcctcatggtgccatggtgaactaccaacaacttcctgctccatgataaccacgtctccatgccatcacaacccaacgtgtgccagcacgtgcttacgttggctcatactgttggccatgagggaatatagaaagaccctccagcgattggacacagatttctacatcttagcaattaggtgctcatacagg

SEQ ID NO: 190577 - DNA, 307 bp, Zea Mays
caggaggcggcggtggctgctaagggaaggagagactggataccatattggtcgagttgaaaccctaacccattgagtgggatgagtgttacatgtattagagctacatgggctggtctcaaggcccataacacttggatagaataaaatagtctaacagatatcattgttctgtgcctaatggatgacctgacccttttgtacaatgactcaggactggttgagattaagtggaacagtaaattaaggaagccatgctcacgaattctgtagaacccaattttatgtgttgacacaggatatgtta

SEQ ID NO: 190578 - DNA, 333 bp, Zea Mays
taaacacaataatgtgcacacttggaactacttaattcccatgtcaaagttaagataatatgcatgctagtagttagaacatgatcaaaggtagaagaaagcttaaattcactgtgctcgtaatctcatatgggcatagcaaggcattacccaggtcttctttccctacataggacagacatgatttgatgcctgaaaagaatatcctcgattcttgagagcctatgagcagacaaatggcgagaaaattatagtatcagccatcctcgatattcactactctgcatggtcaatctgcaactggcatgagtacaacagccaacaaaaaagttc

SEQ ID NO: 190579 - DNA, 354 bp, Zea Mays
tatcagcagcgagcctcctctctcggtctttctggaagcgacgtcggactcgagactcagctccactcaccaacgaggaatctggatagggcgacaagggttttgtcccggccaagacgcaacccatcccgcggtcatcaacagcatctccgatcgcgccaggttcgttcccgttgcctcgcctcgcatgtaatttgttcgctcgttcttctactctatcgtggctccgctgatgtcgtggctccgctgacgtcgttgtcgtgcagacgtggccactgctttcgtttctagttcacatgtgctcgcccgccacacgttggtttgcgactctcaaaacttacgttcaccatcttg

SEQ ID NO: 190580 - DNA, 449 bp, Zea Mays
ctccttgccctgctggattctgggtctacccacaatttcgtttcttcggaagcagcaggccgcacctcgctccaattgaatccgcgcggcaacatgaaggtcacggtggcaaatggtgagaaggtcccctgtccaggcgtgtaccgaaatgtccctttcaccattgacggcgaatcctccaccacaaattttttcgcgctgcctctagccggatatgatgtggtccttgggacagaatggttggcctctcttggacccatcctctgggatttcagtgcactcaccatgtcgttctggcatcacgaccatcgtgtttgctggatcggcgtagccggatcgcgggcaccatcagttcgggtgtgcagctctgatgacctttttccagccttattggaggaattcacgtcggtgttcgctgagccttcaggtatgccaccaccgcgccatcg

SEQ ID NO: 190581 - DNA, 495 bp, Zea Mays
gcacgccaaaccactaagatgaatgatgtaccaaagacaccagtgtatcaatagtaccaaaagatagttagggaagcagggagtgagtcctgaaacagtagagtatgtctacgaagtcatgacatcacaacctaatatacacagatttttagatgtttgggccatagtgtgcgtaatacgccttgtcctcctaatctcctatcgatcatagattgttgtatgcagatgatacacaaggttatgagctccaacccagtgagaaatagtccgtcttagttgaggagggatgaggcaagctagactagttctaactgttgctctctttgctcagttgaattgaactcctttgggttcggtttgttggatcttggaatgatactttgtggtgtgtctaacctgaattaaacgctgatctaccatctcttttatactccaaagaagttgcaagtttacatttatatgttatttgcgggccctgcttgtcattgggccaac

SEQ ID NO: 190582 - DNA, 1075 bp, Zea Mays
tccaccctccctccgtttcgccccttgctgggaatcgattgggccggaagctgattgttgcattgcgaaagaggaagaggacagtggtgctcgccgtcaccatcgaagatgttctcctcgcccttctccgtgacctcttcgcacagcagcgagcatgagccggttgcaagggacagctccatcatcgtcgccgtcgaccgggacaagaacagccagcaggcggcgaaatgggcggtggataagctcctcaccaggggcagcatgctccagctcgtccatgtgaggggtaggcgcttctacacccgttttatttatctatttatttatatatgccaatgtgggtttcctgcatcaacatgtacgagatgatatgagaataaattaagtcgattactcgccttgctactccaaccaacctcaacagcctttgagctaggacagtttctgaccattaggagatcttcagatcagatgcagtatatacgatgctaaaccatttctccgatattacaccagaccaattttccttacaacaagctggttttagataaagtgtcaacctaaaagtttttctttatatcgtaacaatatgagatgatgccattttagatatcaaccaaaaaactgaatgcctattcctttgtaggacaatacaatgtgcactaaaaaaaactcattcttctattcaacatggtctgctttatgttacaatcttgatctgatccattaaggcttattatgttgtttcatatgaccatgctacagttgaagcaaacaaagatgagggtgacgcagagataacacagctatttatatcatatagagggtattgtgctcgtaaaggggtaagtgggcattgaatattacctctttttttatatctcaaatcatggaaaatgttaggccaagttagcatataaaaatgatattcacgtttttgccacctttacatcgcagatgcatctgaaggagttgatcttggatggcactgacatctccaaagcaataattgactatgccactagcaatgccatcacagacattgtcgtcggcgcatcaactaagaacacattca

SEQ ID NO: 190583 - DNA, 288 bp, Zea Mays
ttaggttgtcgtagcactcattaaggccgcaaagaaggttgagtacgagggtacagttggagatcggctcgtcgaggtctcggagagcacctaacataccctttatctggcaacagtacttggtgacggagaggtcgcctagacgaagatctagtagccatcgtcgaggtggagaacacgagcttcacggatgccgaggaattgctccgcgatggcaacctaggcctagcgagcaccgctggggtggacctaaagaggcttgagtgagggcacaacccccaactcatt

SEQ ID NO: 190584 - DNA, 595 bp, Zea Mays
gcaccacgatggggttgactgacttccttggggggaatattgctgtaagtgtaatacttcgttccacatggccctctacatcatgcccttccagtgatgtatgactgatccccactctgcctctatttctgcacgtcacaggggtagctcaggcggagacagtggacaccctcctgtgcaaccgtgatgtctttctcgtggacattcacagttgtcttctctaggctcagcagtatgccaagcctacaacagccaccatcgtgagtttgagttcacaatgggtgattgggtgtgactctgtctaccaactgatgcactcgctggagtctcaacccaagggcaagctcgggccaagctatgccgaccccttctaggtgttggagcgcgttgggcatgttgcctatcaccttgcctttagcttctagagggcgctcgtctccatgacgtcttccacatagggcttctcaagccgttccaaggggaccctcacaactactgcccgcgccacagcgtgtgttgcgcgctcaactatgccgaggcacatggcatgttcttgtttaatggcgtggcctgcccagcggcgacaccacttgga

SEQ ID NO: 190585 - DNA, 377 bp, Zea Mays
atcaaacacttgggaattaagaaagatattaccatctaatcctctctcttcctctacctaagctggcggcagagggggtaacccaccgacgaagaatggcggcaagggggtataacccggccggccatcacggacagcggctacgatctacgtagctaaggtccccctaccctcgggctcactacccttgacaacctggtatctcagtcttatcgatcctctcccaccaactccacccaatcttccactgcagcctcaccaccattccagccgccgcctccatctgcttcctcgacgtccatgacaacgtccgcatcgtcaaccatgggggattgtgatcaacacaccatggccgaggtgatgacaatgctccagtc

SEQ ID NO: 190586 - DNA, 442 bp, Zea Mays
tccaaacgagaaactttcagtttaggtgcattgaatcgacttggctggaacaatgtaagaccaaccactaccaagacattggcccaggaaaagctcaaagattcagatcatgaaagcgggcttaaggataccaaaatggttgatcagaacaggatttctgcaaccgcttttgagggggatctgaaagacattaatatgacaaatgatgataaacctggagaaagcatcgaatcgtcacagggaaagccttctcaaacttctgaacctgttggaacagcgacagaaattggaactgaacagccttataaatcagataaagctaattatggaaccaatgatagcagtgaagggcagcatataacagaacaggacaatgaaatgactccaaagcaagtttctgatgatcagtcagtggccaactgtaatgggccttctaaagaaa

SEQ ID NO: 190587 - DNA, 375 bp, Zea Mays
agtaatgatagtgaaggtaaggctggaacttccagtgacagtggaagtgacagcgatagtgatagtgacagcagtgacagtggaagtgatagtgagagccaaagcagaagtgctgcggaaactggtagtgggagtagcagtgatagtgacagtgatgcctcatcaagcagcaaggaaggatctgatgcaattgttgatattacaagtgatgatgacaaagcaaatacagcacacacaaaagtagtagatgaccttaatttgtcttcatcaccaagagatttgacaagacttaatgttgacgatgaacaaattgacattggaacaaatctggactacaggagtgcatcaccccatattgatctgaacaattttaat

SEQ ID NO: 190588 - DNA, 415 bp, Zea Mays
ctcatattctaccctcatgtcaggcacaaatgaagcagcaaacaggagaacccagacaggaatggtcttgcccttccagccactttcactctctttcaaccacatgaactactatgttgacatgcctgctgtaagttattcttctaaaatgatgttcataaccagatggagaaaagttgatgaaacagaaacacatcaaagttagaacagaaactcactttatcaatgataatcttctgttgcctggtgcttctaagtcatgtgataatagtataatactactattttgaactaaggcagttgcctatacctttactactcaaatatgcaattgcaattcgtttgctaacatatgatgcggaattttgctttctaggcaatgaaagatcaaggtttcactgaaagtcgcctccag

SEQ ID NO: 190589 - DNA, 691 bp, Zea Mays
ttcgccttcctagtatattgctcccccgtcgttgtagatgtcatcggcatcttctccttctgcacatggaaagggtagtggttttcattgtgatcattgcggacaggatggacatgtagagtttttctatcgatcagcttactgatcatgaatgtcgtgttattcttaatcatgatttctgttatgttcaggatcgttccacgggtcgctgggttgggtactgactctcagcacctttgggatcttgactggcttcatcttttccttctgctgcacttgccagctctatcagctctgcattagctgctttgtccacgtcgtcttttgctcagtagcatcattgtctaggtcatctttgtggcactcatctgtctacttgattcattgtggtctcctaggttcggtttcaagtcatgagtccttagctcagtgttagggttttcaactgggcaagcagattcaccttccttatcattctagtgagtcagcgtctgagcgtccttttcatcttgtccactaatgtatgggtggactccctttgcttcaaaaggggcgtcaacgatattatattattttatagatgattttttcgccacacgtagatttattttatgaaaaacgtagtgaggctttgttcatctataagattttctctgctatggatcgcactcaatttggcacatctattcgt

SEQ ID NO: 190590 - DNA, 841 bp, Zea Mays
cttcgacggtcgcgtctatgtgccagatgtgtcgccaatttggtcacaactgttggcgtacgtccacgacaacaaccatgaaggtatccaaaagacggtcaaccgctggcgcgcctccttccacaaccccggcgtgttgcagcgcatccgcgattatgtgcacgggtgtaccaattgccagaagaacaagaccgatcatctacatctcgtcgatcttcttcagcccctaaccgtcccttcggaggtttggagcgacatttccgtggattttgcggaaggttttccacgtgctggtggcaagacggtggtccttactatggtggacagattctcgaagtatgcacacttcatcgctattcgccgcccatacacgacatcgtccgtggccagggccttcttcgacgacatcgtccgcttacatgggctcccctgctcaatcgtcagcgaccacgacacaatctttaccagtcttttctagactgaattgttcaagttggccggtgtcaaactaaacatgagctcagcattccacccacagtccgacggtcaatccgaagtggtaaatcgggtcatcaccatgtatttgaggtgtcttgcaggagaccgactgaagtcctggctgcagtggttgccatgggccgaatattgctacaatacttcataccaaacatccatcaagtgctcgccattccgtgtcctctatggcctggagccgccaaccctgttgtcctatcagtcaggctccactaaggtagcagcactggaccactagctgcaggaccgcgaaaattcttgttggaaatccgggagcgtcttcttgaggcacaaatcaccatgaaag

SEQ ID NO: 190591 - DNA, 564 bp, Zea Mays
tcctctgcccagacaacggaagcatttaccgctcagacttaccagcaatttgtctctggccgaatttgaaggcagcgacggcctggtggttggacgtcttgaatgctcgcgggcaccatgcgagcgcttgcgccggaccgttgtccagccatccagtgcatctacggcgacgtgttcaggcctgccgcagctcgcgggtgtcgcagagaggggggccgcagtgaatgtgggtctgctgccagatgcgcgcggcgcggcggagatgcagtgcaggggaggagtaatggcgaagcgcacacgtttggtgggagcgggggtggccggttggcaggagacagcagtgcaagcctctggaaccacaataactgaggctgggcgagatctcctctgtgatcctgccggcggcggaggcggaggtagacagggcgggggcgcggtaggagagcgcgtcggccgaggcgagacagggcttgggagggaggtagcgggttgatctatcgatctgcggtggaggagagaggtggggagctgggttgaggtgggggggtcggctgcaatggcggg

SEQ ID NO: 190592 - DNA, 349 bp, Zea Mays
cctcgagcctcggatcgtccacgctttcgcagatagcacctttaggaggtacacccctagcatttggctccaaatcggagccaacacagtttttagtgacttcgctaggaacaatatgtgtggcctaacaaacatcgaccacatacggtcggttcaaaggaccactccgacatctccccaagcaatatcgtgaagccaactatggagaacctgtcgaccaaagataagcaagaattccaggaatacaaaagacggttgatcaatgaggcgaaagggaagtactagatgcacttcagggtggaccgacactagaagatcatcaagcacggggagatcgagatgtcatttc

SEQ ID NO: 190593 - DNA, 946 bp, Zea Mays
ttcctataatcccctctattcaaggcatacctacaaggtgtttatgtccactcaagaaaaacaaaacacatcaatatgccacattgtttctaaaattaaaataatgaccttggaaaatttagccaaattacgtgagtgaactgtacaaagataggttaaggttgtaaggcaccttttttccaccatacagttgcgaaaaagttggaatataaagaattcaaaacaatagatcaccttttaaacctcaaatgacgtttctatgatattgagggcattgtattcacaactagtggatgatgacgttattgggctagctaatgaccttttgtgatactaggtttcctataatcccctctattcaaggcatacctagatggtgtttatgtccactcaagtaaaacaccgtacatcattttttccacatcgtttctcaaaataaaataaagaccatgggaaatttatccaaattgcgtgtgagatctgtccaaacataggttacggttgtaaggcaccttttttccaccatacagatgctaaaaggttggaatataaagaattcaaaacaatatatcaccttttaaacctcaaatggcgtttctatgatattgagggcattgtattcacacgagtgggttttagagtacaactagtggatgaagacattattgggctatctaatgatcttttgcgatactaggtttcctataatcccctctattctaggcacaccaagatggcgtttctgtccactcaagtaaaacaccacacatcattatgccacatcatttctcaaaatataataaagaccatatgaaatttagcgaaattgcgtgagagaactgtccaaacataggttaaggttatatgacacctttttccaccatacagttgctaaaatgtaggaatataaagaattcaaagtaatagatcaacttttaaactaaaa

SEQ ID NO: 190594 - DNA, 561 bp, Zea Mays
ttagcttaattaattagtgcctaaattaggattattagaatgaaatttaattcaaaggatccaaatggcgcctcattggtttttatgggacaccaaattaagcttgcacatgcattggttcgtgctgcagaatgacactgcttttgggccctccaagttccgggaagaccaccttgcttcttgctcttgctggacggctcggtcctggactaaaggtttgtaacatcacatcagtcacttttcattctttgaatgcgtgttcataaaaaaatgatgggcgactctttgtatctgggttaattcaatccattctttgtccatcacaaggccggaatgccggactggcatgttctattacctgacaatggactgtcatcagcaaaattagcctttgacttgagtcccccaacttgttactgacaggaagcacccaaatttgttgtagatgtctgggaacattacttacaatggccaccatttgaacgaattcgtgcctcagcgaacatctgcttatgtcagtcagcaagactggcatgcttcagaaatgacggtcagagaaac

SEQ ID NO: 190595 - DNA, 380 bp, Zea Mays
ctagaatggtgaactcccaactgatgctggtgttatcccaagggctgtaaggcaaatctttgacattctcgagtctcagtgcgcagagtatagcatgaaagtcacctttcttgagctttacaatgaagaaatcactgatctgttggcacctgaagaaccaaaattccctgttcttgaagacaagacgaaaaaacctattgcccttatggaagatggaaagggatttgtttttgtgagaggtcttgaagaagaagttgtgtactcagctggcgaaatctacaagattcttgacaagggttctgcaaagaggcgtactgcagaaacattgctgaacaagcaaagtagtaggtcacactctatattctcaatcacaattcaca

SEQ ID NO: 190596 - DNA, 469 bp, Zea Mays
agcccatgcccttcacacaatcaaaatcgaatgttggttacacaactggaaaaataacgcacaccccgcaacatactaggcacgtctttatctcggatcagtattcggtaatatggttacctgcgcccgttatttttcaccttactctttttgggtgcggagcacaaagctcatgactttatgggcactaacatagtactctgcatctctcaatagggagtaagaacgacagcgcattgccaggatagaaatcgtcctgatgttcttcgtaagtctggcatttagaccaggctgacaatgtcagcttccgagttcaggattccataccagcaagtaagtggctcatatgtttcaaccgtatttttttaatgttttgggctggagtttggctatcaatgtgtatatatagcccgttgcattattcaagtgctttacttgggtgataaactggatatgactgttagcaatc

SEQ ID NO: 190597 - DNA, 913 bp, Zea Mays
ctcacctcaggctgggcgagtctgtgctcggagatactgcaggttttcaacttggtctacaacttcttcagcaggttcgtctgctgctgccatcgccagaataaggaatacgtttactctttcccgtaccacaccgaagtgcccaaagtcctcctgttcaacctgctcggcttcacgttctcgatcatggcgcccctcatactcccctttctgctcgtgtacttctgcctcggctacttggtgtatcggaaccaggtgtgacaattcttgaaactactctctgtgcatgtgacatgatactgataccggaagcttcagtcgctcatatctttgtctgtttgaccttgatgggtttcttgtcccgcatgcagattctgaacgtgtactacccaaagtacgaaatggggggcaagctgtggccggtcatgcacaacgccatcgtgttctcgctggtcctgacgcaggtgatcgcgctcggcgtcttcaccatcaagcgctcccccgtgacggcgggcttcaccatcctgctgctcgtcggcacggtcctcttcaacgagtactgccggcaccgcttctcccgcatcttcgaggcctactccgcccaggtcggtgtcgtctatgcagcacgtgaacaacgcgtgtctgtcgtttctcaaaaaaaaaagaggagcattcatgtttgttcttgtgttgtttggctgtggcacctggtgtcaggacgtgatcgagctggacagggacgacgagcagtccgggaggatgcaggagatccaccagcatctgctggacgcctacagccagaccccgccgggggagggatcctccaggggcggcagccaggtgcccatcgagctcatcatggaggaccccgcgcaggaggcgtcggagtccagccaggagctctgcgacaccg

SEQ ID NO: 190598 - DNA, 305 bp, Zea Mays
ttggtggagacttcaacttgatttatagagatgaagacaaaaataatcctaatctcaaccgaatcatgatgggaagattcaggaaatgtattcatgatttagaaatgaaagacatcgatctgcatggaaggaagttcaccttggcaggggcacatgatgtgttggtacgactagacagagttttctgttccttggagtgggagcagaaattcctagatttcctactccaatgttctgcttcagagggctctgatcattgtcctctccttggattgaaggataatcgtcgggcaagaggagatttc

SEQ ID NO: 190599 - DNA, 497 bp, Zea Mays
gtgcgctgacctcccatgcatcagagctgcaacattggcaaacgctggcagcacacaagggatcgtgacagagtttggttcagtcccttgtgcctgcatctccctgaaaaactcgacagcttccaaatccttaccattctgcacacaacaagcaacaatcgaggtccaggacacgacattcagctcaactccccggtcaacaaactctttgaacaaccttagtgcctcgcagacttgcgcgttccgagatagtcccgcaataagggcattgcaagaagcaacatccatgtggctggactcatcaaacacccgaacaacctctgcagcctggccgcacttcccgtacatgtcgatgagggcggtgaccacgcaggcgtccgccctgcaacctgccttcacagcgtatccgtgcagctgttggcccaccgaaaccaaaccgacgtccccaacagcagacagcgcgcacgagacgcccgtggcgtcaggacgcaggagcc

SEQ ID NO: 190600 - DNA, 582 bp, Zea Mays
aggcactaaagatgtgcataaaagctcatgggtaagaactaaagagcaaagcagtttgcacatggacacaagaaaacagattaccccttcgcctaaattgtgttttctataaccagctaactaataatagaatgccattcccttagtatattaaaacttaaaaggtcatatcaagtatcaaactaaatgagaatgggctcgtagctgggtaacatggcatgtgaggtaagctgctcacttgagttcaaatcatcaggattgtttgaaaggtgtttcatcgtggcatgcccccataacaatttctagatcagcctctaggatttttgcgccaaaactcgggttgaatcttcgatactcaggattgtttgatgggtgtctcatcatggcatgccgccaaattaatttccagataaacctccagcgcctttgggccatgatgggacagcaacgggcccgtatttcaaaccagggcttcgtgaacctctccagcaggtatatgtgtgcatagggtcgatctagtgtacgtcttaagggcaataattgatgtacatgtgggatgtatggaatgtgttaagatgtgtg

SEQ ID NO: 190601 - DNA, 729 bp, Zea Mays
ttgaaactcaaatggtcaaatcgagaatgattagtacacatgaaaaaaacgactaaactcatacacttcagctctttatggctataacctgctttttggactacttgctaactctgcagcagggcaaggatcaggtgtcacacaaaacaagggggctgccttcatccgcgagccgtcgctaacaccggagagtcgcaaagtttcgtctagcgccaaggtgcgctgttgtactcagtgggaaaaaatagctatctacaatataaagcctcattctccttctgtatacactgagaaacaagctctacacatgtcttttatttgcattgtatgatatagacaaccccacatcagggagacaacctactgctaggaaaagaaattatccctgcttcgcctaacgtgcagacgccatcagaagcccacaacacccctggtgccaacactctccgcctggtatgaactccatgtcacagtcatcaatattagtagcctatcctcagtatttgtatcttgtcctcttgctgagttaacatgaaaaaacattttccggtgctgcgtatgcttacaagcagcttccatttcctcaacaaaatgtctaaatatgcttcatctatgcatccatttaccttagcatgcatgttatgccctctacattgttccagctgcctctaaaactggcaaattcgcagggtgacgcttacagtgtgctagatggatctacaaacaaac

SEQ ID NO: 190602 - DNA, 565 bp, Zea Mays
cgggcatcgagtctgatgaccgggttcgaatttctccccgcaagtgtagcacaatccattctgccttctgaactcctttaccagccgctccttggacatctctggcacaacagatgttcccttatggtctgtcttagctggctgcccaccaagccggccttggtttactgttttcagggatcgttgcctttgtttgtctagaataccttgctgaacttgagctagaaaagctgctcgctccaccgactccggaacatgagattgcaccggcccctgcagctctggcttcagccctttcacaaactgagacacataaagtgtttcatccagtgtgtggttgtgtaccgaggtagtataccgtgcctcatcaaacgacttctgatattcctccacggatccaacctgacgcaagttcaacaaggattgcatagcctgcgaatactcttgagccccaaacttttggatcacagccccacagaactcctcccatgaacccagtccatgctgaattttgaaaatctgaaaccaccttttggcatttccttccatattcagtgaagctgac

SEQ ID NO: 190603 - DNA, 824 bp, Zea Mays
gcggattattgatgcgaattggtattgctttgtatatacggatgttgcttgttagttgttactccaattacccaccaaactagatttaggtaccatttggatgggatatgtgggttgggaattagaaatgttgtggaggataaggtttgtcccatgttcgtttggagggaattgggaaacaagggaactcaatagggaaacgcgtatcctaccaattcaatcccagtggaagagatgggttacatctgggaaatgagaacagaagtgcagcgctttcaaactaggattggttcccacttcccaggttgctatggtgagctcggcgtgtgcttctgggggatgagaatggcctgttcagctgcttgctgttagcacagttattctttgagtggcagctgcaaagaccaaatgatgaacaggcccatggtgaacagctgccaaacaggccctgacagtgttgtatatatgtggccatggtgaacgaagccaccatcattggccttgccgcccggtggccagggcggtagtcttcagttttggctctagcacctgcggctagcggctagccacatgtgtgctcaagaaaggcagcaccagcaggaccagatcatcaacaaagcctaccatctttggttggatgtgccaatcgccttgcacagcagtgcgcggagctaggggtgggtgggggactatgtgaaggagaatagaattggtgtatttggatggatctattacattgcgcccttaggtggtttatattgagtacatgacttagaagcaacccacgtatacatatgacaatctatgagacacaatatctaaac

SEQ ID NO: 190604 - DNA, 465 bp, Zea Mays
ttggactccccttccctctcctctccccgtctcccggcgtgcgtgcgtactacttactgcttgtccaatcgccgcgaccagagctcccgcgcacgctactggagaggattccagcgcccgtcgagcaacaggactctagcgcccgacccgacaaacgacagatagtagctactgcctccctacaccgtctcggcatctccgggggcacggcacgggaacggaggagcggagaaatccatccgccgaaccgcttgctttgcttggcaggcaccccgtacaattgggggttccggttcgaggaacgctcgggggggcgtgtgtgcggccgccttcgctcctcatccagaccacttgattacgccgcgctccctacgacaggaggtgcccaggccgaggtccttcgccggcgacgagcaccaaccaggtacgtccctgcacccgttctcttcccctgctttatgtgtt

SEQ ID NO: 190605 - DNA, 706 bp, Zea Mays
ccatttacatgtgataggaacaacatgcgagggtaaaggaacaatatcccatgtaccagtgcgttcaagagcagccaattcatcaatcatggctagctgccactcaagattcccagaagcttcctgatatgtagtgggttcaacaattgccacaccagcccatggaaaaccatagcgatctggaggttcaatggtaccacggtcacgaagacgatatccctaattaaaaacatcattagacccattatggttagtacaagaatcaggtacaggatcagtatcgggaccgaccgtagaaatagagtgggaatgacgaatgtaggtttggatgacaggtggtttggaagagtaagaagaggatgacgtggaggtggaaggtggtgttattggaatgagaatatcagatgtggatgatggtgtagatgcgacaatggaaggaagacacatgaaagaagtagattatgtgggataaatatgaggagtgagtagactggttgtgaaagaaggggcgattttcattgaaactcacatctctagaaattcgaatacgacgagtcgaaggatcataacaacgatagcctttgtgttctggactctatccaaggaatagacattctacagattgagcagtcaatttggtccgctcacgtggtggtaacaaaacataacagatacatccaaacacacggagatgatcatatcgtgg

SEQ ID NO: 190606 - DNA, 287 bp, Zea Mays
cggacgggaggggtgtaagaggagcctcagaggggaggaaggagagggaagcggtggctgtgaggtgagcaggtggcgtcgcgatggatgggggcaagggcgagtatgggagaggcgatagttggagtcaggagatggggatgggatgagcctgtctcgacgggagtggggagtttagtaggttagactatggttaatgtgggagccaagtggctaggagaaaatttacctttgccataggccttttttcctcttttgtcttgaaggcctaaatccctcatttgggc

SEQ ID NO: 190607 - DNA, 661 bp, Zea Mays
gcttcagaaactcaagctactgtgcctggaagtagtgaggtgcaaaatgaccatgcagggaagaggacctctactgtagatgatagctcatcgacttgttcatcagactcagtcccttcagttatcgtgaatggatcatatacaggaggtgcctggacaagcgtcagatccttatccaataggtatatcttcatgagctcctctatcttactataggttggtattgatcatgctgtattgcgattcaggggaaacaaccggaggaataaggatactgaagcacgggcagcacttgcacaaggtggatcaagttcagcgcataatggttttataggatctggcggcagtgcctctggccactcaaaggaaagatacgaacctgaggtatacatctctcggatatctgagatgattcttgttattcatcaaggaatgaaagtgcgccatgaagcaatcctttttcctaattcttgtgttgcagaaaagtcttctcttccagtttttttttccatcttctatttgtgttccacttggttcagtaagcataaaaaacaattccttgcaggatgataaagttgtcatgcagaggaagcaacatgcacggcacattgatgtcattagcccctctaagtcaagaatggcagtgtcttcattttcttct

SEQ ID NO: 190608 - DNA, 405 bp, Zea Mays
tctttaaagcaatgcatggcttccttccagtcgccatgcgtgatcttaggaaatatgctcctgatgataaagatggtggttgggaggatgttggagggctagatgaagcagtaactatcattaaagaggtggacatttcttgctttcttgttttaagggtgttggtttcatcaacacacatggaaaaaattaggcacctctttttccttgtgtagatgttcctacttatatttgtgttccttcttgtagactcttgaattgccgtcaaaatacccaaatatctttaccagggcacctgtgcggttgcggtcaaacattctcctgtatggaccacctggatgtggtaaaactcacattgtgagagctgcggctgctgcttgttctttgcgattcatttcagtcaag

SEQ ID NO: 190609 - DNA, 382 bp, Zea Mays
tttcaatctcatccttgtgaaaaggtgagtatctataaggtttagaattcacaggaactgctccaggtaacagaggtatatgatggtcaaattctctgacaggaggtaactgagtaggaatagaaaataggtctgcgaactccatcagcaaagcctgaatatcttcatgctgaacagtgctgttatcctccttaacctcctctagcagaaccatgatccacacgtcatgacctttgagccatttctgcacttgcagaactgacacattctgaatggaagaattgttctcagcaccatctccatacaacttcacccattggccagcatccttaaactgtaatactttgtcaatccaatcacactccataggactgtgctccat

SEQ ID NO: 190610 - DNA, 328 bp, Zea Mays
cacagatctgttgtggcgaaggggtacgtcgggttcccatcaggaccgatcaaacgacatccaacggtgacggtaggatccaaggcgaaactttttcttctttgatcacgaccatccaccaagtgatcaacgtgccctgcttcatcttcttccctggtggcagagcacggcggcgcccttggcccgtggggcggctcctcccatctggcgacgaaatccgcgtgcaccccggcgagctactcacgacggccccacgggttccccaacggcgccatcgagttctctctctctccctgctctccttctcgctcggcttcgacgcggcggc

SEQ ID NO: 190611 - DNA, 582 bp, Zea Mays
tttatgaggcagttggtccatgtaatgagtgaaaccgtcatgatctctctgctccagccaccgccagagacatacaatctttttgatgacataatcctgctatcagaaggatacatagtgtaccatgggccgcgcgagaatatcctagaattctttgagtctgccggtttccggtgccctgacaggaaaggtgtcgcagactttcttcaagaggttacttccaagaaagaccaacaacaatactggtatcttgatcaggagcagtatcattatgtatctgtacccgactttgcagaacgtttcaaatcattccatgcatgccagcagatgcagaaggagttgcaaataccttttgaaaagtccaaaactcatcctgctgcgttgaccaccagaaaatatgggctttccagctgggaatcactcaaggcagtgatgtcaagagagcagctattgatgaagcgcaactctttcatctatattttcaaggtcacccagttgatcatccttgcactcatgtccatgactgtgtttctcagaataaagatgccccatgggcagattgctgatggcaccaaattcttt

SEQ ID NO: 190612 - DNA, 282 bp, Zea Mays
atgtattgagtcacagctcactcatttggcccacattggtccagatagcttagaattcgggcgatggacacacgtttagttctctgcgccttcccgccactcttggccgtgtcttcagcgcagatggttgtgttgcagacagtactccacaatgattcatcaggcatcgtcgtccaattgcgctcgctagcttgggacaatttttgttttagacgaatgtaaatgcgtgtgatatttaatctttgcgcgtagtgactagactactcctcccttcatcgtact

SEQ ID NO: 190613 - DNA, 509 bp, Zea Mays
ccttaccaccttaataactatggctgccacatatgcccttactactcagctcgcggaggcaaagcggcagcttgtggctgctcccctcaccacctacgaccacgacgatgtagctccctcgtcgtacgaagcctctgtcgtcactatcctccacgcccaagcgaccgatgttcaaaacatgaggtcgttggttccaatcgtcctcgacccagccttctccgcttacgctcgctagcgcgaccttatccttctcacccttgcaacgatatgcccacaacgaccacgtcctcatcaacgtcggttgttcacaggtgccttcttggtaccggatagacagtgtggtcctttcttggatcctcaacaccctcatcgttcatcaggcgtgacttgccattgaggagcaattccttggcagccgcaagatccaagccctccaccttgacactgccttccgggtcttcgtctagggtgatctctccatcactaagtactatcgccagacgaagggc

SEQ ID NO: 190614 - DNA, 394 bp, Zea Mays
ctcgaactcagtacactgaaatcagaacaattaaattgacatgtacaccattgaactgaacccagacaaacgagattcgaacagattcacaatgaaatgaacaagattgtactgaaccattgagagaacagagacaacggaactaaacaagactaacacaaattagacgagaacttactgtaggacttttggacagatgagtagcaagcacagattacgtttcactgttgcttgtggatgcttcacggttgcctgtgcatgaggttggagtgggcgggtggcggccttgcctgtggaatttccacgggtgttacacaaggaggatttcttaaatagatggtgggcttgctgtaatctgtgcttgttgtagacctaaggtagatggcaagctcta

SEQ ID NO: 190615 - DNA, 577 bp, Zea Mays
ccatcggtgaggagccatattcagtgactgaggctctgaaggtcactgattggagaaaggcaatgttagaggagatggcatcaattgaagggaacaagacatggccactggttgatttacaaaaaggacatcgtgccagaggtctgaaatgggtgtataagctgaagcgtaacgaatcaggagctgtgatcaagcccaaagctagactggtagctaagggatatgtgcaacaacaaggtattgattttgaagaagtttttgctctagtggcaagaatggagactgtcagggtactattggcagtcgtagcacatcatgggtggccaatccatcacatggatgtgaaatcagtgttcttgaatggtgatttggctgaggaggtatatgtcacacaacctcctgggttcactgcaaaaggggaggaaggcaaggttctaaaattgcacaaagctctgtacggactgcgacaggctcctcgagcttggaatgtgaagctagacaaaagtttaggcaaacttggtttcacaagatgcaagactgatcatgcactatatactagaaagaaaggtggtcagag

SEQ ID NO: 190616 - DNA, 331 bp, Zea Mays
gtgataagcaagtgaagaaatacagcggaggcatgaaaagaaggctcagcgtggcaatctcattgattggggaccctaaagtagtttcctttttttcttgattctataattttggtcatttcatgtaatgctgtccagccccagatgggttatgcaacttaacaaatgttcatcaggttgtcttcatggatgagccaagcacaggaatggacccagcatcaagaaataacctatggaatgttgtgaaggaggccaagaaaaaccgtgcaattattcttactagtaaggatcctttcctatccactcatgtatctaaattctagaatcgtac

SEQ ID NO: 190617 - DNA, 310 bp, Zea Mays
ataaatcctaacaccaagtctagcaggagagcgtgatggcggccgcctcacaaccccgcgcccgcacctgctgcctcgttgaggatccggcaacgacggcacacgaggagacagtggtgaggtgagcatctccctctcccccccttctcaccgttgttgtgagtaatgtgagtgaactatgagaggtctcgactcctaatctctgccttcctcgactagaagatctaccaatgctgccccgtctccaagcgggactcctatctaggacagtttgctgatcatgttcctgtagaactgaagtgaagagagt

SEQ ID NO: 190618 - DNA, 524 bp, Zea Mays
tttggactagatagtttcagtcagtagccatctaaacaagcccttacagtattcgctatttcatattgaattttcctcatattgtagagaaaatcgcagctaatctgttcactgtggatgagttgccccatggtttgttcttaatcagaagaatggacgtgtgcaccacagtttagtgctaaatcatatggatataggagagatgtgctctctcctgtcctaaaacagttcatgttctcgtttttctattctgacagttcataagcgccggtcttttagatgcccactgacctggacatgttggtagaaatactgggcaggtgggatcaactccgatatttggtcaatttctcaaccactttctgttaatacgcaatttttattgaaaaacataatgacgtgcaatgcaaccaccctattcaatattcgtatggttagcaaaccatacgatcaatagaagatctttttggtagcactaaactacctacatacttgcatgcatgcgtcctaatccttgagtttga

SEQ ID NO: 190619 - DNA, 455 bp, Zea Mays
ctcttctcgcccattccgccgtctttccccggcagagcagcaagagcgtcgccaccaaggactctgctacaactacgacaaaccatacatctgcggccacatctgtcaatgcctcttctactttgagtcgaccgacttcattgacgacgatatctcgatcaacatctctgctgcaataggtccccatgaccacaacacgtggatgaattttcgacgcctctaccccaactttcagctcgaggtctagctgttttcgcaggcagggagaaatattatcaccgaaaaggtgtaggcctaggacccagccaaccgatcccaacaaggaatcactttagtattcgataaggcagatcagattagggagaagaaataggagatctagttagagatagattggataagtattggagtaaaaataggagatccggttatgaactggtcttagcagaaggaag

SEQ ID NO: 190620 - DNA, 442 bp, Zea Mays
acctcgtgtccattagagcagtaagctagtgcccttggatgtcggtgacgattgcattgtgtccgtcgtgcgcaacccgaccatggcatgtagggagatgactaggggatcggtgtcaggaacctccatgcacagtggtgcaatgtcatcgtcgttgtcgatcaccttgaggtagaggcgccgagagtgatcaccatagacgaacggctcatcatagttgtagcataggccctggcgtcgatgttcgaccatctcgtctacggtgcgatgcttgtacacctggcccagcgtaggagctaaagtggtcgaggaaggaggggtaccggtcacgccaagtgtgtctgagggatggggcagtgctcgtgggccacgactgcccctcgttgtcacgccatcaagggtgagcgtgtgccgcttgtaggcccaaaccagtgccatggaa

SEQ ID NO: 190621 - DNA, 298 bp, Zea Mays
aaacctctaggcacgttaatgaagtatatcctaaggtgttggatgtgatgtctctcaacattacttcaacttttcatctaggctaatattacagttcatccattgagattttgtgttaccaccgtggacatctatgttgggcatcccagtaactgatataacttgtattttaattcctttaggattatcttgtaagttgtaacctagaaaggttattttaaataatttgtttgcagcattagacatttatccagatctatccgtgtcacagatgctaatcttctggacttagttaatg

SEQ ID NO: 190622 - DNA, 530 bp, Zea Mays
ccggttccgcccggccccctcgtagccatcgcctccttttagcgccgccatcccacctcgccggcggccatggcgaccccgtcttatgcggcggtgaagtgcctcaacacgtcctcgtccagccgcaagcgtttctcggtacgcctcttctccgactgctggctgttccgctaacacagaatccagctcgcggaagagttttatggatgctaatgagctatgtgtttctttccgcagtttaagagcttctcgcagcgggtggaggagatcgacatcgatgtgtaccgcagcctccacacactgaaggcggagccatccagcggatcgtccttcttcctcgacgcaattgtggagtggagggtatgcgaccttttctttttcttgcctcgtttatttcaatctctgtcatctctagatacactttggaagtaacatgggagcttaatttggtgcttagagcatcagaaagggtttaattgccttaatcgttgtctgctgtgttgccctgagtgttatattgtgtaatatag

SEQ ID NO: 190623 - DNA, 391 bp, Zea Mays
aggatggcctgcatttcatcagtcaaatgttcattcaagtcctcttctgtatgacattgacaaggatggtgtacgggaaatagctttggctacttacaacggtgttgtaaatttctttaggtaaggaactctatgactatgatgtacaggtttatccctgtcaaatgtagcaatatttatttatttattatgtagggtgtcaggttatatgatgatggacaagcttgaggtacctcgtagaaaagtacgtaaagattggtatgttgggctaaatccagatccagttgaccgctcccatccagatgttaatgacagttcaattgccaaagtggctacttctaatgaaactcccctaatagatcagaataaatcaggtatccaataatcttct

SEQ ID NO: 190624 - DNA, 416 bp, Zea Mays
ttgccatagggtaggggattgtcgagccatagagatgcccgagagtctggataggacgtcgtgaccaaggtggccaagccaatggtgccacgtggaggtataggcagtggctgcgagagcatagggtgtggcaacacaggatgagggaggtggggcagagaaccgaatatgatataggggtccagaactgtcacatcgggcaaccacgacacgagtagtaagatcccatatggtgagcccccacgaatcaaactcgatggaacaatggttgtcagtggtgaagcgacaaattgagaggaatctatgtgatattgggggcaacaagatgttattgaggtacaaatgaccaagaagaaccgtgttgcctactgaggtgacaggtagagtcgacccattatcgacaatgatggaagaag

SEQ ID NO: 190625 - DNA, 379 bp, Zea Mays
ctcaaacacttcactcctatatgccctggcagctggatacatgtgttcagaacctaagtagcttttgacataattgcccatgagatgtcggaagcactctctcttctcagcatgagggaaacaatgcgtcactgcatgcattaagcctttttgagcgtccgaacaaatagcgagtactccatgttctccaacagccttcttcaattgtgacatgaaccaaatccagttatctactgtctctgattggaaaaatccaaatgctaaaggatacatccaattatgcccgtcaacaccggttgctgaagcaagctggccattccatctaccattaagtgcggtcgagtcaacacttaagtacggtctacaaccatccctaaat

SEQ ID NO: 190626 - DNA, 357 bp, Zea Mays
gtgggctcgtcgttgtcgctgccccagtgccgtgccgtgaagctccacctatccgtggagaagttattgtggcctcgccgcgttgaaccggcgcctggggctcgggatttcttcaccggagaccgcgaacccactgtcctccgtggccagcctctccgcagactccttctctggtgagtcctcatcccccgcattcgctattgtctcctctacgcgtagctcggtttaatcgacgttttgggcactgtggtggtcggtggcctttgcgccaacggtgtggttccgccgccgtggaactcgcccgcgctaccgctcgagattccaccacagtgggtctgggagcttcgattagaggcg

SEQ ID NO: 190627 - DNA, 357 bp, Zea Mays
agtaggatggtggcatgaacgcatggaggagcatggtgcggatggtgttgtttgttgtgcgaagcatgcgttcagctttgccattttgtggtgaggtgtagggacacgagaggcgcagcgagatgccacagctagcgaggtatgaggtggtggcagtgttaacaaactcagtcccattatcggcttgaaatgatttgggtgtggtggcaaactgtgtctgagcataagcgatgaaatcgactatgtggcggtgtacttcagatttgtgtcgcagcgggaaggaccaacagtaatgtgaaaaatcatcaagtaggacaagataatatttaaatcctgaagtgctcagtacaggtgacg

SEQ ID NO: 190628 - DNA, 302 bp, Zea Mays
actggcaagcgtgcattttcaccttctagtactagattagttcatggctttggtgacgagcatgaacctgagaccagacatgtaaataagaaattcaggattactagtaatgaggctcccaagaagtttttgaagcatactgaagaggatactgcagataatgacttctcttttgcaagtgacatgccagtatcgggacaacagaatgatcaatatgatgttgcacaggaaacagagggtacacaaatggattgtgaaggtgaagatgctgaaactgatgtgccatatgattcagtatccag

SEQ ID NO: 190629 - DNA, 593 bp, Zea Mays
tgaaaaggagacggaagaagcgtcacacgcaggagatacagcgctgctgctagctcgcacagtcgagatatgctcaggaaggctccgtggtacggaacaggatctcgagctacgtctgccggattactccaagctccagcagctcactagatgcatatgctccagactagccactgaagctcctgctctggtatgtatactgtattcatcggtcatatgcatggcggtcgggtcgtatgtattcaacgtatgatagatgtttgttaattacagatcgaatcaaacgtcctcaaacagaatggagaaaccatggacaaggttgatgccctggacaggatggttggactcgagatgagagaactggctcaatgtgttttccgcagcggcggcagctccgtggacagagagacgaggcagacgtttctccacgtgaccaagagttactactacgttgcactctgctcgccggaaacacttgagcatcacatctccaaagtcttgtttgaggatgtcgtctagcaacgatgtttatattagagctcaaattccagtgtatccttgtgcatgcaccgtgaaggtgtcatatgatgatg

SEQ ID NO: 190630 - DNA, 402 bp, Zea Mays
tcgtcgcgtgaagggggaaacaagagaagagaagtggggccgctgtcgggtagctcggcggacaggcgcatccgctatccccatctacggctgcgtggcggtgtcgccatccttctgcaccggtggcgaatgtggcggcggttgctgctcggcctcggtcgggagaagaagaacatgtgggagtcctcggatccgaaatggagggctggtaccatgcgggtgtgggcggagatgcaggcgaagagcaggccttccgtcgcccagcttggactcaggtaggagaaagaaagctagccattggatcttcaattggacgctctagataacgtttcacccggatccgtccctggccgtctgatctggatcgtgcgcttgacaattgatctgagtgttttaaatctc

SEQ ID NO: 190631 - DNA, 312 bp, Zea Mays
taccagatgattattgcagggtagaagtgacgatggtcgtccaaggatctgaggacgacatgctagacatccttgggcccgaaggaatcgagacactcggacaagccatcaaaaatttcgtcctttggcctcgaagggatgtcgaattggttgatccaccaatgtcgtcgtcatctcatccccaaccatctccgcctcttcaaactttagtacctttacatccatcatcatctccacaatcttcccatgctgctcctcatcctctttctaatccatcgtctccgccacaggcatcaacatttaggacaccac

SEQ ID NO: 190632 - DNA, 1660 bp, Zea Mays
agagagaaaagagctgcaaggtttgctcaaatgtggaacgccattattacaagtttccgcgaagaggatctcatagacaatagggagaaggatctgctactggttccagactgtaaagaccgtgaacttgatatattccaatggccgcctttcctacttgctagcaaggttgatcttgctctttctgtaatttctctactcactatatttgtcgattcagcagtttattgtttatctgctgaattgtagatcccaatagcactggatatggcagcagacagtggtggaaaagaccgtgatctgacgaagaggataaagtcagatccatacttttcctttgctatcagagaatgctatgcttcattcaagaacatcatcaataccttagtatttggtcagcgggagaaagagtatgtcttctcttaccaagattattatttattagggaaatatggtacccattgttggtacttgctaggccagggctaaaactaaaataataccaattctgctctgaacacaccatcccaaatcaagggctcaaatataagtgatgcatttagtgtgaaagaatgaagatatgataaactgaaactctggccttgagtcttcaactgtcatgcatgcagcttttaatgaatttgtggagttactctattgaacttaccctccatattagtgaggtggttccttgaagcttccacatactttattctcatatgatatcagccattttgaatgggtaatagtttcaagatgctgaaactggaaagagttgtttaatatgaattggagggtgtgattatcacaagggatggaaggggggtgggggctttctaggattttctttttgtatatttaaccttggtgtgtaacatctgtttgactgaagttcctttaagcctcgttgattttctttccgaataaccatgtgatgcctatttcagtgtcctagtacagattttcacagttgttgataagcatatagaagaggaaactctgataacgggtctcaatatgaagaaccttcctgcactgagcaagaagtttgttgaattacttgagttactggtataaatcttatcattgttgttttaggtcatgttcatggtggataccttctaactgtatctatttcttgagtgcagcaaaaaaacaaggaggaagacttgggtcaggtagttattttgttccaagatatgctcgaggtggtcacgagggatataatggaggaacaggacctgctcgagacgtgagtagcttggtttccttctgttacattacttgatattcttcttcggatattaacatgcatagcatgccacttatgcagatctgcgtgcattctctgtcatagctaccgtgttatttctttttgtttgttagtaacaaaaactgaagctggagttcaattttgtttgtacatacaatttggtgatttatctagttactttttgcgatgatattgagtgattatgggactgattgtctagtctactgaaatgttgtggtagcttgtgttatatatttttattcttctgccaggttggattctttacatggtgccaatagtagaaaacatgaaggaattacaccgctagatcagcaagaccagttgtttgctaaagctattaagtttcctgtggtggaatcaaatgca

SEQ ID NO: 190633 - DNA, 311 bp, Zea Mays
cgtgggggcagcgagggggaaggcggcgattgtctcgatggcgttggggaaggcggcgattgtccgagcggagcgagggagacgacggatgggggcgaggggacgaacgatggaggggcactgtgcggagaatggaagggcacaacacagagaatggaggggcatgggcgtggtggcaatgaaagcgcgaccgagatcccgggagggagcggaggggaggatgtcggggccgatgatggcggcgacgaaagcgcgaccgagatcccgggaggggagcgtcgggaggcagaacaccactgtgtggacgccta

SEQ ID NO: 190634 - DNA, 406 bp, Zea Mays
gtgcaatacaagctctggcagcagcagattcaccgtcctacaaggagctacagaagaagtttggcagttcgaaagaactgatcgagtcggcgaggagcatcatcacgtcgaaagaagcgccagctgcggtggcagatctaacgagccgcgtcgaagtggcgaagcaagtctctgcctgcagctacgagacgggcacgagctggggtcaggaggtgtgcatacgattttaacactgtctgtcccgtcccgtccctcgcatatatatcacatcatgcatgacatgacattgcatgtgtcgccgacgccgtacgtgcgctcgcaggttggctgggtgtacgggtccatgaccgaggacgtcctgacggggcagcgcatccacgccgccggctggaggtcggcgctcctg

SEQ ID NO: 190635 - DNA, 306 bp, Zea Mays
gtttatgtccataaagagcaaggtgaacagaattgctgacataattttaagaaacgagtgatggctatattgtcataacatggggggtcgacagagacgtgcccttctccgcgaccaccaaacaggtctttgatgtggctgttgtgctctctaagaacatgcatgggttccagcttcatctcgcccgagcacctcgccatcgcgctcttcaccctcgacgatccaactaccaacatcctcctaaggaggtaggttctgttatttattttccattgcaactgattttcagatccagtgcaatcgata

SEQ ID NO: 190636 - DNA, 316 bp, Zea Mays
ttcatcgatgattttggcattggcaaaacttcaggaaacgagctcaagaaattcaccaacattgcacagaacttaattgttggttccgtccttgtttcaacggtcacgtttgcagcagttttcactcttcctggcggctacatatcggaggggcatccacacgccggtgcaccaattctgtcacacaggtacaccttcaaggcgttcgtgatggcaaacaccctcgcatttgtcggctccaccttgtccaccatctggctcacctatgctgggtcggaacacgtccacccactgcttcgtgcaatctacatgttcc

SEQ ID NO: 190637 - DNA, 447 bp, Zea Mays
tggactgcccccgcttcgtcacccctgtcgctggtaagtcctcgtttgttttccccgcatactcagggtcgcgtagcatcacccgtttagctaggtttgggccggaatcgccagttggccgtacaccggcgaagaccgcaggtgaccctgcgccgccgctctaatctgccgtgggtcgatcctggatgaagaagacgaagccgtggccgtgggatctcaaacgaacgactccgattagatctctggataccgattcggggcattaaatcgtgaccgtagcgatcagatcggtgggctcgggtgcaagtttgacgtggaagaatctgagccgtggatcttggatccaccggctgttagcgcgtaccgattcggtttattaaagaatttgatcctggtcgtccatctgcaatcgtgcggttcagaatcaatcttaccgcttcagtcagg

SEQ ID NO: 190638 - DNA, 671 bp, Zea Mays
tgcattctggtgaaggcacttccaaccaacctgtaactttgggggctagtaacggcaacagaatgttgaatactcctgctgaagtggatagtactagtaaccgtgaagcatctgaaaatggaactacagagacagaactgaaatcaaatggcacatcagatcttcccatgaacacagcagtaaatttcaagagaaaaagaaaatcagatagaaaacctggacctcattatagagattgtacaacaccaaataaagatgaccaattatgtgctgagtacagtgaaatccttccagattctccgaattcaaagaatgaagtaagcaagtcagatggagatgagcacttgccattggtcaaaagggcaagggtccgaatgggaaggtctcagttggaggattcaccagttgatgaaattgatgtttctaataagaagccagagcttgcaacagccttggaccaatgtgataggaatggtaaacctgcaagtcccgccaatgattactcagctgatcaggtgtctgcagtcgtaagttctgctcctaatctgtcctgcaaattggacacaactatcttgtcaaaggaaggtcatcttccttggaagaataaagaataccatccaaaaattttagcattagatgtggaagctgctttgcctccttcaaaacgcctg

SEQ ID NO: 190639 - DNA, 356 bp, Zea Mays
cacatattgacatcatggttcaaatagaattgcaatgtagatacactttgagccctatatatctatctacctcggtgatggataaagtcattgcaaaggacctacaacaagtagatatccctcggtgtatatatgttcttttgttgactacgtagtgctagtaaatggaaattggtggaagactaggttttcgctggcaaactagagacaaagattttagatttcatcataattccaacactacttaacctaaggagtgacatgctagtttggaagatcaattaatgtagaaggaaaccttctgatatttgggattgatggtgcaaagagatagtggcattagcagaaatgttaac

SEQ ID NO: 190640 - DNA, 280 bp, Zea Mays
tcttctgaatgttggtcttcagaccagaggcttcaccaaaaagatgtagaatccccttaaatgcctcaatatcaaccgcatccggccaaagaaaaacaaccacatcatccgcgtataaagagatccggtggtgaaggaatctcgaagaaaggggctggaggacccctaccgcagaggcacgctgcaccataatattaaggacatccataaccaagacgaagagcataggagacaatgggtccccttgacgcaaaccccgccgatgatgtatgacttctcc

SEQ ID NO: 190641 - DNA, 464 bp, Zea Mays
cagatgaacctatacttcgtgttaattgcaatgaaacagcccttgtacttggtggagctgcttctgctgcaatccccccttattccttttttgcttcttctggtaattcagtaccattgcacagtgaagtagtggagcatttagcatctgtcattgcaccagcattgtgcccttcggatattttaccaaaaatcaagttttccacttttttatatggcccgccaggttagtgcacttcaactatgacttcatgaaatgtgtattcccatactactcaaccttcaacagaactcgactctcaaaaaacgaccgctttgtaggatgtggaaagcgcacagtggttaggcatgttgctaaccatcttggtctgcatgtggtcgagtgtagctgtcatgatctgatgacatcatcagaaagtggggcacctactgcacttgcaactacctttaaagaagctcagaagt

SEQ ID NO: 190642 - DNA, 487 bp, Zea Mays
cagtttgtcatcagggacagtcgaccccaacagattttgaggaatccaatggaaaattagtgaatatagtgctaatacttcctaatgaccccacctattttcggacaagactctgatgatcgtctggcctagactcgcccctgctagtaacaatctatcattgccaagtgtgtccctgcttctccctccctcctccctcctctcaacaattctaacactcccatttcaaacattaatgcaacttggctctttcttctaatatgcaatacttcaacagaattttcaaactacaaagttaggaggatagtgacttacaatctcagacattgtaaaagaggcatccagtcaaatgatcaggtactgaagagatacctgagtacctgaccactaatagaaggatgaaggagaattccagggtcatagggtcaaaagagaaggatttggaacattcaattcccatcatatgtacaatatgagatgattttat

SEQ ID NO: 190643 - DNA, 900 bp, Zea Mays
cgggggaacggtgatggtgacggcggtggtggtggcgacggctggaagcgcccgcgcgcttcccagggagcgggtgtggtggaggaagcggcagcgcagggagccgatgtcatcgtccttgacgttggggtatggctattcctgtagctgtagtacgacgagtagacactgaccaccttccgctcttaaacaaaataccatatcatgtgtggcatagaaggatctttttacaactttttgaatacttggctacacggattgttactttacccacttgtaacagttttttcatatttagaattcggattgccataacataacaaacattctcatacaatcatgaatcagcaaacaaaccactaatgctactggtggtagaacctgctggattatctcttgtgtcaacaacccatctaaacagcatcgtttctgggacaatcactagaacctccaaccaactagtgtttgttctgggaaaaaaaaccctataagttatcatttgcatgcatgtttgtccttacatgctacagtttctgaccaccttgtaatctgtagctgtattagccacttgattagcttcgttgcagggaatgtcgtgtggtggatgcgcagcaagcgtgaaacgtattctggagagtgaggtaagctaagttagatcagcatgccttagatgtagagcttttggccaaagtgcttgttagctctctactgtttctagtagtgtttgtaactctgtatgtgcttggatttttcagccccaggtacggtcagcaactgttaaccttgccactgagatggcagtcgtctgggcagtgcccgaggatagtgttgttcaggattggaaggagcagctgggtgagaagcttgccaatcagttgacgacatgtggctataaatcca

SEQ ID NO: 190644 - DNA, 390 bp, Zea Mays
tcaaatttcatggaaatgtttgtttgtgttggaccattcaagctacaacataagtagatttattatctaaaattacttttacaacttataactatttttatttggtatagatattacctcaaatatttttgtaagaagattgacttaggacaaatctcatttgtgatcaatgtagtatgaatttgctttgtgctttgttggtctgtattcgtattcgcaggtagccgtctgtgttagaccatcaatgagtatccgtttgagttgtaagactttgtggtattttctgaagatttgtataagtttgtaatttattgtgatagtcttagcatttaaaagatgtaattgacatgacattattaaaatcaagtatagaagtctgcatgatatgat

SEQ ID NO: 190645 - DNA, 403 bp, Zea Mays
acgcaaaaaccttgcgagtccctccgataaaaagccccaatccctccatcccacctgcgtaccactcgtgtgctcgcaaacaagcgtccgagttcgaggcgtggcggcccgttttgcatgttgcgtttgcatgccgtagcagctctgctgccgatgttcctccccttccgaacccctcgccacctcctcgtctcgtgattcgaatcactgccccgctcccattgcgaacgagccagccgccacagctgttgccaggctcaagcggaagggctcgggttcccagacgtgccgggcgatcgatcggagagaggcggcgactcgggatcgggtgagtcgctcctccgtcttccgcttccgaaacccgcctccctgcgtgatgggcctgcttgggtgcgcctgttgc

SEQ ID NO: 190646 - DNA, 386 bp, Zea Mays
acgaaatctttctaaattaaggataaacaaagtggcatgcccgaaatgattgaggccatccgagtagcccttcgttcaatgggagacggtgagattagcatttcagcatatgacacggcatgggttgcacttgtaaggagtttgaataataatggagatgatggaccagagttcccatcttgcattgattggattgctcaaaaccagcttcccgatggatcatggggtcatgacatcttcttcctagcccaagatcggatcatcaacaccctagcctgcgtcatcgcattgaaatcatggaaaatccacgatgatgcgtgcacaaaaggtatgattattatagagggctcatgtattattctaggatataattctgaacatcaaat

SEQ ID NO: 190647 - DNA, 489 bp, Zea Mays
tagcactggcaaggctgcagtaggcagtgagatcgttgacaggggaaccgttgccatagaccttgacctgcgtgtccacctgtgttgtgcaaggcttgcactccagcatcccagcacgctccaggatatctagggtgtactgatgttgctgaagaatcaagccattcggcgatgctcaacaacaatccctagaaaatgaagaggacccaaatccttcatggcgaacttgtgctaaagggttctaatgatccggtgcagtaggcccgaggaagagacaatgatcacaatgtcatcaatgtatagaagaaggcatatagtgttactaccgtgctgatagatgaacagagaggtgtccaacttagcctcagtaaaacccagggagagcagatatgtggcaaacctactataccaagtatggggagctcgcttcagactatagagggacttgagtttgcagaccatattagggtgtgcagtcaacaaaaccga

SEQ ID NO: 190648 - DNA, 1356 bp, Zea Mays
caggaagagggtcaggctcttgtttctagactcttggatcggatgatgaaatgtgaaaagtatggtgagcgacgaggtgcagcctttggccttgctggtgtggttaaaggatttggaatttcttccttgaaaaaatatggcatcgctgtgacattgcagaaaaatttggaagacaggttgtctactttgttaccttatccactagtgctatatatagggatgttgtaaataaaatcagtattgcatccatctgtcataattttccactaaattatgtgctgcagcctttgtattcagttttcatgtcttgttattctctaggcatttgagtaaagtttatctagggtattcaatgggaattttctgattgtcaaacattatagtgttgattttttttttccatttgtgcagaatgtctgcaaaatctcgtgaaggagctttacttggatttgagtgcctgtgtgagaagcttggcaaactatttgagccgtaagtgaggcatctcttcacttaactgttgctctgattccaattgattcgttatattttctttcttgtaggtatgtcattcaaatgcttccgttcctacttgtgtgtttctctgatcaagtcctagcagtgcgcgaagctgctgagtgtgctgctcgggcaatgatgtctcagctcactggtcctggtgtgaagcttgttcttccgtcacttcttaaggtatcaatatatcttatttgatgctatcaaatcataacatttattgtgtccaaatgttctggagaatacaagtgtccagttcatctagttatatattgaaatctgacaaccacttaacttctgctgaatatttaggccattggcaccacaaactactagtttgttttcattaacttgaaagagcagaacatcttgaggtccatctattacatttttttttaaaaaaatctacacattctggaaatttgttggcttattttcatttgtgctgttcgtacctttatgttagttgtttaaatgaagataaaataggtattcagatactttacaaaattttaagctagtcacattcactttcaaaaagtgtcatacggtgaatttacttagcttgtctaatacaagtttccttgaagcgcatatttggatgaagatcattaatgttggatagattagaataatgggccaaccctagagagggttggctatatagagttcatacacgggcctcatgggcctagccacatgggcctaatccatatactctaacaattaacatggtttttccagggtctagaagataaagcatggcgtactaagcaaagcagcgttcaacttcttggtgccatggcatattgtgctcctcagcag

SEQ ID NO: 190649 - DNA, 321 bp, Zea Mays
gtcggagctatcacaccgaaggatcacgcgccgagtgggaagatccttcacagagcagccaagagggtcaaattccatagaacaattattgtcagtggtgaactggcgaacagaaattaaatctttaatgagagaaggtgaaacaaggacattgttaagacaaaagttatgagaaagttgagtggtgccagtggaagtgacaggaagaaggttgccattgccaacaacaatgttagagggtagatgatgagaagaagagaggtgggaaagtataccagcgtcgaaagtcatgtgactggaggcacctgtgtcgaagaacca

SEQ ID NO: 190650 - DNA, 606 bp, Zea Mays
attacttgcaagaagcatgggagcatatattgacatgtgtttctcgttttgaaaatctacatcttgttggagagggagcacctccagatgccactttctttgcgctgcagcagccggaccttgataaatcaaaacaggctaagtcatcgattcttcctgttctgaaaaagaaggctcctaatgctacttcagcttctaaaagaggctcttatgatagcgctggtgtcggtggcaaagcttctggtgtggatcaaatgaataatgaggtgacaagcctcttggagcaagttgggatggctgaaatgaaccgtgtatttgtaagaagtcaaaaactcaacagcgagggtataattgattttgtgaaggctctctgtaaggtttcaatggaggaattacgttcggcttctgatccacgagtttttagtctgacaaagatagtcgagatagcgtaaggaatctgaggctttattatcattactacattgcaatgtgtttttttacatttctgttcggtcttatagacagtgcatgattttttttttttttgccctcttgtaggcattacaatatgaaccgcatcagacttgtttggtcaagtatatggca

SEQ ID NO: 190651 - DNA, 443 bp, Zea Mays
ctgggagcattagtcaatccaaacggcataaccaaccattcatataaaccaaatttcgttttgaaggctgttttccattcatcacccagtttcattcgaatctggtggtaaccactacgcaaatcaatcttagtgaaaataatggcaccactaagctcatctagcatatcatcaaggcgtggtataggatagcgataacgaatagtgatattattaatagcacgacagtctacacacatacgccatgacccatccttcttgggaacaagtaacacaggaacagagcaagggctaagagactcacgaatgtatcctttgtcaagcaacgcctgtacctggcgctgaatctccttcgtctcatccggatttgtacggtatggtgcgcggtttggaagctgtgcaccgggaatgaggtcgatctggtgctcaatgccacgaagcgg

SEQ ID NO: 190652 - DNA, 436 bp, Zea Mays
ggaggaggaggtggcggtcgctccgtcgacgggcttccctccatcactctcctgctgcccgtcttgtgcggatcctgaacaagccaccacgcctcgtcttgtgctcttctcctctcgatcgcgcatgtcctgtcctgacctgaccggcccatcgccatcgccatagcatcgggggtcgagcagctcggcgaaatgacgcagctgggctgaggagagcggtcgatcgagagatcatccatcggggtcagggactcagggtgtgagcgagggtgtaggtagggtgggtaaagatggacaagatggagagctacctgaacgagaacttcgggggcgtcaaggcgaagcactcgtcggacgaggcgctggggcgatggcggagcgtcgtcggcgtcgtcaagaaccccaccaggcggttccgcttcaccgccaacctggg

SEQ ID NO: 190653 - DNA, 397 bp, Zea Mays
gttgtttgggcaggcatcaatattttcgtatccaagtccaaatttagagattattttcttagctgcataaaagttctttggtagctcatttccattagggatagccatatgcagaacctcaagtagatcaccaaaagatttatcagaccatttgttgatggacttgatattaaacagaagcacaaataaagttagttgtgtgagctcacagcctatccataacggccttttcgaatcttcaagttgtgtataaaactgttgtgcttcaatattgggtccctgggccgattcttgacctttagtcataggtgtgccatcatacagatgtccaagggcatcttgaatcagttggtcgacatcaacatgcctttcatcaatacgtgaatttggttccgaa

SEQ ID NO: 190654 - DNA, 689 bp, Zea Mays
ggcagatgagatatgaagttacaggtgatcctctttataaggtaattcagattttgttagggtaaaattaatttcaccaggcatgatagttccagttctaaaaagatcgttattttttttcctccttccacccagtagtcgcgtgccctctttgtctttgatctcacgcaacttgtatgtcaagctgaccatggcttaactcttgagccaggaaattgcgacgttcttcatggacacagtgaactcctctcacgcatacgcgactggtggtacatctgtcagtgaattctggtagtgcaccatagatggctgatgttgaggttttccatcctcttctttttctagacatgccatgcctgaaaactctggaatggattgtgtcaggtccaatccaaagcgattagctgaagctctgaccactgagactgaggagtcctgcacaacttacaatatgctcaaggtaggtgttcatattcaccgaacctgtactgttttttttttcatggctagagagtagagacaagcagttacaatctgcgcaacgaagctcgcaggtttcgcgccatctgttcagatggacgaaggagatcgcgtacgcggactactacgagcgagcgctgatcaacggcgtgctgagcatccagaggggcagggaccccggagtgatgatctacatgctgccccagggc

SEQ ID NO: 190655 - DNA, 422 bp, Zea Mays
cggggttctagtcgtgttgattggaagccggatcgtctgtgtgacatctccaccaaatcgaaagttacccctcctgacggaagatccataacccacgtccccatcaacagtcgtattcgctcaccctaggaaggagaatttctggtcggggatcctaaggcggcgtcggggcatcctgcgtcgtggacatcgcgacccctcacccatcgctggtaaaaccttgacagccgtattccccctgcccttgttgcaagtagcgtcagatccgtggcatggatgatagactgggcgccgggcggagccatgccggtaatggctccgccgttggtgctcactcctccatggcaggtcggtcggtgatgacagccgaacaggtatcgtcgatccggtaatgaacgcatgtgattgcatcggggtataac

SEQ ID NO: 190656 - DNA, 1894 bp, Zea Mays
agagttcgatgctctgtcgggaagcaagatagcttctattgaccttggtgcccgtgttgttcgtatggcatatagccctacaactagtcatgttgtcattgctattcttgaggtatgtattagagcttcacttgttttttttcttctgaaaaagcatttccttttattgctagaaccgaagtgccttcaaagtaaggcaaatgcttatgatactgttcacagaaaatcataagagtgacgatgcttcgttcttgttagtaggaaactaggcatacttttagcacttttatctagtcatctgccatgcagagtgaataatattattctctagcagcctgaatgcatgcactgctattggctaatggctgcgagttttgcatcttttattaatagcttgttcaactgttgacccctttgttatctcttgttctgcaggatgctacaatcagatcctgtgatttcgccacggagcagacacttgtgctgcattcgcctgagaaaaaaacagatcatgtttcaatagatactgaagtccatcttgcattgacacctcttgagcctattgtattttttggtttccacaaaagaatgagtgtaacaggttactctcttagcttggcaggttaccttttgtgtttgcttgggaggcttaaagtgatcctccatttggttttgtttttacaggttgtatttccacgtgttaacctcttgttttgttctagttgtagggactgttgatggagggagaccgccaacaaaaataaagactgatcttaaaaaacccattgttaacctggcttgccatccccgcctccctgtcttggtaaacagccatatctttacttttttctgttttttgattttatgttgtcatgtttctgcctttacgcatttctgaccaagcttatgatttagtatgtagcttatgctgaaggcttgatacgcgcctacaatatccagacatatgctgtacactataccttacaacgtaagatgcgatgctgtattttatattcatatgtttttttgtgattttccacccatcggcttcttaatcgcacaatgtttcagttgctgttgacagtacaattaagctaattggagctggtgcttttgggtttcacccgaccctagagtggatatttgttggtgatagaggtggtactctcctggcatgggatgtatcaactgagaggccaagtatgattggcatgtaagtatccttatagagcgttgagagttggaaaatataactatagtgtcatgggtgtgttgcccattgtttcttttctttccagtactgcttgctactttcatctcagtgctaatgaaatattcattatctgcaaagtcaaacaccaagttcttcaaagcaccagtgaaactagaacagttccttaggatattgtccacattaggacttagttttgaatatatgctgctctgccatatgtattagacacccatctgtgttatgttgaattacatccacatctgatttagtgcatctttgcacatagtgacatgaattttaacctaaaagttctaacataatgcttgcagttccttggcatcaaatggatattgaaaaattgcaacgatgtttttttgtcttagtcaatcatctgcatgcacctttctttgttggtgtctctcaccctctaattacactgttttctgacatagccatctttctgtctattttccatctgaattttgcctttcacttttacttagtacacaggctggttcccatcctatcacatctgtatcctggcttcctacactgcggctgcttgttactatttcaaaggatggagcactccaagtgtggaagacacgagttataataaaccctaacagacaaccaatggaaactcatttctttgagcgt

SEQ ID NO: 190657 - DNA, 306 bp, Zea Mays
tgaggtttgcttacaattactgcacaatattacgaactatcatttataccggtcactacccttaaattacactttcagatggcagaacagagttttaaggaagcactaggtgatggtctttgggtttcaattatggacgggaaagtaggcagttctatgatcaactggagtgtccagaacaaggatcagagcttctttcaccaacttgaaggtgtacctcttgaattacattcaaataaagtaaccacactgtttaattatgcaagattactggaagaactccatgattctgtcagagcaagcatc

SEQ ID NO: 190658 - DNA, 621 bp, Zea Mays
gagcacagacatgggcaagagtaggacccaggccttctctaagcctagaatttatactagcagacctgcctacaagtgcacgaacacatcgtggagagccagcagccaaagcaaatactataggagggtcttcatccttatctaatatatctacattctcttggtaagcaacaatagcttccacaagctctgccgagcctcggcggcatgctaaatgtagggcagtgagcccatctgtattttgtgcttctaagagagaacggattaaactatcgtttctctctgatgcagcttttgcaagtagatccctggtatttgcaaaaggtttagtgcgaaatattatatgatatacatgcaaccatacaagagttgccagagacaaacctaacaccagcagcatctccttcgcatacaagatgatgcaaggcatttggattatcatgaaccatctctaagatggaggttgttggaggttgcatgccattgggcaagttttcatttgcaaaatcactgcataagcaagtaactaggtcaaaaatcagtcggggaaacaatatgcaaatagtttcaagaatggttagctcgaagatatctcaacatgtgctgctacacctccaggta

SEQ ID NO: 190659 - DNA, 309 bp, Zea Mays
ggtcgatgctagcgagtggtggtggtggtgcctgcgttgcgtggtctcgtcggggtttgggcatggcggtcggaaggatgcttattacacctgcatcattgcatgtttgcactgaatgaacaggtgaacatcatgtccctgattgggcctcacaccaccatgtgaacatcacgcacgccgagcgaatctcttctccccttcttaatttaactagtagtactaacagacgacgatgatgatgccatgtttaataagcgataagctccggccggcgacgattctctcgcacgagtggttattgtcgacaag

SEQ ID NO: 190660 - DNA, 420 bp, Zea Mays
ataggagtgcagaggcacacaggtcaggatgtgattgctagtagaagtcaaagtgcagcagcatctgagacgggctcttctttgccatgtgaagatggaaatgcaacggctgaaactattggcagcagcacccatcctgtgcacattggtgtgcaaaaccaagacattgaacaagagcaagttcatgagactggaaagagatacaagaggttgacatctgatgtatggaattactttaccaagaaaaaagagataatagaggagaatgggaagaagcgtgagcaaatttggggttattgcaacttcccaaattgtaagcggcgatatagagcagagggccgccaaggtacaactgcatttaagaatcatttgaggtccgcacacagcatagttcgaggccaacaacaacttaaatttgag

SEQ ID NO: 190661 - DNA, 410 bp, Zea Mays
cctgagctcaatatagtgtgccgtcagatatctccaattattccacacaattatcaacagagcagctatccagttgcagtgttcacttttaccgtaatactacatacatgaaattccttcaatcttctattttacctgttcttaactttatgatatagctccacacctttagcaatcacgtaaaaaaatttcaggtaacaaactcaggacatacagctgctgatgtgactttgctttttacatgggctgtaagtttcagtaaagtttttttaacagatatttcgtaacttctatcataattgaatacttatattttgtatttctttttttctctgaaccttcttgccttatgtttgaacatgcagaactctgttggtggaaaatctgaactcaccggatatcattccaac

SEQ ID NO: 190662 - DNA, 327 bp, Zea Mays
aacgaatcttgctacaatttgcttcggtcatgtttattcatggtatgaacatgcttataatatttgcttatcactattcggttattgtttaattgcaagctacacaatcaatattgtcgaatagtttcaagtaaatgattcatttattagtacaaccaatactcgaacttatgcatcattgagttgggcattattgtgttcttccatgggagcaagctctatagttcaatagacatctttgcactcagtgtttagtatggccaatgaatcctttctaatcatcatgctaagtttatgtccccatccaaagggtaggatggacgttcg

SEQ ID NO: 190663 - DNA, 357 bp, Zea Mays
aaaaaatgttggccacgtcaagactcaattagctcttgctagagaggtcttgcacagattggaagtggcacaggacttgagacagctctcctaagatgaaatttggttgagaattgagctgaataaactttgtctaagacttgcctcctttgaaagaaccattgcaagactaaggtccagatttagattcctaaaggatggggatgggaacacttccttctttcacaacaagcttcctttcgtaagagaataaatactatcaccagactcaaagttggtgagcgggttgtcacttctcaagaggataagcaagatgtttaatatgagttttacaataatctgattggaacctctcag

SEQ ID NO: 190664 - DNA, 316 bp, Zea Mays
ttctcttctctctccccataacccgtcttgtttctttccatttataattcttgtacaaactactggtaactgccggggacgtatgttccttccatgtcagacaccgacatgtggggcaccctgcatacgagcacgaacgctgaaccatcccagaaaaatcgtcggtgcctgtaacaaccgcgtaacaaccgggcatgagccgacagatggcgttacaggtttataaaacccgatccccatgtgccttccgccataaccaggcttgggagctagcgcaaccttgcatggatgattacgctgaagcacagcgacgagt

SEQ ID NO: 190665 - DNA, 721 bp, Zea Mays
tgcaggagaggatattgcacatttagatgaccttattgcagttctttcaaaattgtctaggggaacacgagtgcctctagaatacgtcaaataccctgaccgtcacaggaacaaagtaagatttgagtagctatttatcacaataatcaatgccttatctcctgcacatcccagttcaaaatttgagttcagtttcataaataaactaaccatttttatttacgtgactagtctgtactggtgacaatagatcaacatgaatggtatgcgtcacctcagttatatactcgaaatgatgcaactggcttgtggactggaaaaccagctataccaccagaatctccgtttttagctctagctcatcatgctagtcatgtggacacaaactcaaacgctgtttcatctttatccgaatctagtcctatggatctcaagtgccagtatgattctgagaacctggcagacggatgcatcaaaatgcaaactgatgatgagattgttgtggatggatctcattctaacgaagattctgttattgagaaaaaaaggcgacgtgtggtcgaggagatagctgccgacggaactttaccatcttatggagatctagaggatgtaaaaggtggttctttgaggcatccttctaatgcagatggatctgaacttgctcgaacaatatcaagcaatgcatcattggcagaacaagtaattgaaccagcccttg

SEQ ID NO: 190666 - DNA, 388 bp, Zea Mays
tctcaaggggcgcgcgcggaggtggcctcgagaggcgtgagcggcagcgctggccagacacatgcctgagcagcggcaccccctgatgtgcgtgtgacgacgaggccctcctacctccaactattcttcgagctccaacaagttggatgccgttgtgacagcgtggatcgtccgacgacgacctcctccaatccggtggttttgtggcgttttccaacgacgacctcatctgatccatgtgttatgcatttcatgatatttttatgccgaccactgcaacttttatgcattccatttgaggattttatgatgatgaatatatcgtctctcacgtgactttgatatttctacaggaataacatttatgctacatctgccattattttac

SEQ ID NO: 190667 - DNA, 568 bp, Zea Mays
tcgtgtaatcctacgctgccattcttaagccagggctacataaaaactcacagtagattttagcacccaccaagcaccaacagatagaaagaaagaaaaaaaagtttcccagcctttgacaaacattagaaaacacagcactgtgcacacaccggcacccatttctcttatggcttgtgatgaacagtatgatcaagatcagagctgtgccattgtcatcgtagtactgtgcagcggcgaaatccaaatgttccaactttacatgggtaccgtagcagatattgctttctgatctgatgcaagtgtagtggagtcctggagtggtgaaactgacatgtgggataatagatttggtatatgtgccatgttgctaggaggcaggctcacttccacacactacatacactgtggtggccggtgggatattctgatggaatgttatggaccacaaatgatttgaatgagtatgatgtgtcggtggtcgagccaataggattttctcctttttgtttctttgtttttttcctggctgaaagcgacaggaaacaaaacaagatgtggatttgaa

SEQ ID NO: 190668 - DNA, 298 bp, Zea Mays
catgaattgattgtccccaatcaagagcctctggaaaccgagtcttcaacacatcaatatcttcccaagtagtagcatcatctggtagctcggaccaggccacctgaacttgtaccacaggcttgtgaccccgccgaactaaacgacgatccagcaaccgaacaggatgaacatcccggccagacaggtcgaccaactgagagatgtcagaaaaaactggtgtatacttgggtgtaaatggtttaagctaagacacatgaaacaccggatgaaccaaagccgtagaaggtaaatccag

SEQ ID NO: 190669 - DNA, 347 bp, Zea Mays
ctgccacaaatagtgacaaaatgactgaaggagtagacgttgggaagcagcactagacatcttcgactattaccaccaatggtaattacaagctcattccatcattagttccctaattattcttagtggttaatatgattaaggtgtgctctttacagaggatgatgatgagactatactttttaaagaagatgatgatgacgaagaaggatacctattcgctgggcaaggtacttacgtaatgtttttaatataggatatatgatttaaaagtttctaaagttgtatgtcttatcccttgttctttcaaaacaaatttagatggtgaatctggtgaggatattgag

SEQ ID NO: 190670 - DNA, 465 bp, Zea Mays
aagaacttgtacacgaatttcaaaagcaaggccttgttttgcgtctccaacctgaccaccccaaggcccccatttcacttcggctgggtaatcatgctccaagaagcaagagcagatctgtttgagttcacatcatttcctctccagagacaatgcctccgggaggcatcaatccttttgacagtggaggcatgaatttttagcgtgctcatcaagaaagtcgggagagcagagaaaacagagttaactacctccagtcttccggcctgggagaggagagcagaagtacaggacagtctcccttcaatcctttgaataagaggtagaaaatggcagattctgggttttgacaggcctagaggtacaccaaggtaagtgaaaggcatagaacatgtctggcagtttaaagttctggctagaatctccaatcgcgctgggcagacattgattgggtacatacttgat

SEQ ID NO: 190671 - DNA, 321 bp, Zea Mays
ttttgctgcaggaccagggaagggtatacaattacaatgcatgctcttgatgatttgtcacagcaatccccttcgctccgttattagcgaagacagacgtggcatcctggcaggggtttccttcaggagacgaatggtccagcactaggacacattcacaatttgataaaattggcattacagagccaaggtgatgcacaatgaccgtgttttgccccttcaagcctttgtggctgctcagggaagagcttctagcacagcaatccttcctttttttgttctgtaatgaatgaataaccagattgtctatcaagatctgac

SEQ ID NO: 190672 - DNA, 428 bp, Zea Mays
ctctcttcgactgagttgacttgctgccactagcaaaaggagacacaaattcatcatattgagcatcacagtctgcctcaaatgtgccaaaatcaactccatcaataccatcaacctcagtctcatgattttccacatcataaaattcacctagagcgcatgatgtagatccatccactgcaatatgttcaaacatttgtgtcatgaaatcttcattttctggagggccatatttcagtttcttccaatcaggatgcccgtgcataacaattacaatatttagtactacaccatagatgaaagaaattaaaacaagtacaatataactttaactaatatgttattacctttgtatttttcttccagtattcatcacttgcaatcacagtccttagcttagaatcccatccaagtcctgtatctttgtt

SEQ ID NO: 190673 - DNA, 691 bp, Zea Mays
tcgccatggaggggcgcctctatatcccagccacttcacccctactacgggagatcgtggccactgtacacgatgacggccacgaaggcgtccaccgcaccctgcatcgactacggcgcgactttcattttcccaacatgcgtcgtattgtgcaggaattcgtcagggcgtgcggaacgtgccaaacatacaagtcagatcacctatgtccggttggtctcctacagcccctgccgatcccagatggggtgtggtcggacatcggcatagacttcatcgaagctctgccccgcgtgcaaggcaagacggtcattctcactgtcgtcgaccgtttcagcaagtactgccacttcatcccactggcgcacccatacacggcggagttggtggcgcaagcattctgcgccgaggtggtgaggctgcacggcatcccgcagtccatcgtctcggaccgcgaccccgtcttcacgtcggccttctggagggagctaatggccctgactggaaccaagttgttcatgtcctccgctttccatccgcaatccgacggccagtcggaggcagccaaccgcgtcatcgtgatgtaccttcgctgcttcaccggcgaccgaccccgacagtggctccggtggcttccatgggcggagtacacctacaacactgcctaccagtcctcgctccgcgagacgcc

SEQ ID NO: 190674 - DNA, 404 bp, Zea Mays
gtcagaaatacaagactagccatgtcaaccgtgtaagcaaagaaaaaacttcccaaagctaaggcagtctttctattttacattgacacatgtaatgctctccagatgattgtgagcccagtggcagaatggttgaaaggcaaactaatgaatataatgcagaagggatatgtaaagagggaggataaaagacttcaaactgcccagataaatgcagccctctcggttgcaaagctgtctacagtagttgcaggaactattggaaatttcacctttgggtcaaataatttgagtggcattgccatgactgagaggagagaagacactgacatgaagatgcatgccgcaatcatgtcagctgcagcgctggtggcagcgtcatgtgctgaggtggcgaaatctgc

SEQ ID NO: 190675 - DNA, 352 bp, Zea Mays
cttgctctgcaggtttgcatttttgtcctgatgttgcaaagaaaataccttagcacaaacctaataaccatttttctcaggttagatatcttgatgctcacatcagatggaaggagtttatctctccagatcaaattccttcagatggaaaaagttctgacgctgacttttctgcactcagaaatgctgtactctgtgataaaaaaataatcgacaataagataagatacgcactgaagtttcccaaccaaaagcatcttcctgtccgtctgacaaaaaatatcttggaagcagaaagtgatcaggatgaaattagaaaaatgtggttttctgaaaaccacgtgccattgta

SEQ ID NO: 190676 - DNA, 279 bp, Zea Mays
cggtgaaggatctcgtcgtcgactccgacagcgattggttcctctcagagaaggagttcccggcgtctgcacttggctccggcaacctcaaaacttacaaggccaaggtgctcagggcgatcgaagccatggaggcggcgtccaacctggagccgtcttaccaggaggactcagcgacgacagtgtcgccgagctcggtccggcagcgctcaccggacaccgttcccgatggttctcccaagttccctgaggacgtgtggtctcgcagcccttcgccgg

SEQ ID NO: 190677 - DNA, 361 bp, Zea Mays
gaaagagtaccttgttgaatcaattatttggtaccaattttagggagatggatgcattcagaggaaggtatgtaacatttgctccccccttgattatctttgtttattcattcatatataaataatttattaactaatttcttgtcatttttttatacccattatcacccctaaccttatcatgaaaacacatgctgctgctattatttatttatgttgatagaaaaattgttgctgttctatttttcttattaggagtcaaactactaaaggtatctggatagcacgctgtgttggtgttgagccttgtactgttgtattggatcttgagggtaccgatggaagagagagaggagaggta

SEQ ID NO: 190678 - DNA, 519 bp, Zea Mays
atacactaaacctgctaatttgtgggatctatatgcattttcttgtgatccatccaccattaagcatgattctgagccaaagtggcgtctcttgagggaatactttcgtctttttaggagaagtttaccgctacagggagtcgaggaagtttctttgtgtaatgaatggtggaggctaactagagttaattctagttattcattgtgttcaacttacccctctgaactcattgtaccaagaagcataaggtacttccatgttcttgacaataacatgtggtagttttgttctcttaaacacatttatgaattatgaggaattgacaataacatgtggtaaattgatactaccatttgtctactacattagtgatgaagatttatttcaagcctccccatttcgatcaggcaagcgcttgcctgttatttcatggtgtgaccctggtatgtatcctcaaggttctttgtttcttttgccttagtgaatgtataattttctgtatgttatcttaaggtccc

SEQ ID NO: 190679 - DNA, 278 bp, Zea Mays
gcgtaacagaagcaatgcaataatctaaacctaagggtgcaatttagaggcaatctaaagcggcatctgtaccacagcagctggtgtgatgtactcatgtgcaccaatacttactcctcaatatcatgtatcctagaacctacatggaaatgtaaagcaacaacaagctcataagacctaataaaatgtgatgaatggagtaagtttcgggtctaggatataagctaaagtcggaaattgtctaagaagattgagtcatgaagatccgtgttgcaaag

SEQ ID NO: 190680 - DNA, 833 bp, Zea Mays
ggactgccaacgatatgtgaattggagcgacccaaacgagacgcagctggaggagatccttctcaagagtctgggcaccacctttgacaatgctgtgagtctgatcaccacaatgggctactctgaggcggttgcacgggctgctgttgtgcgggcagctgcgcaatacaactggagggagagccttgcagggtttggagaggcagcagttgaggttctcaagacggaaggggacatgttgccgagggagggtgcctctgttgaagacatgaggaggattgagcaggctgtgcttggtagtatggttatgtgggtaaatgaggctcagccactctgcaccacaggcgatgtaatgttttgcttgcttatgtctgacatgaacgtggcaaatgccagtgccatggactacaatacttcttccctcccatctgttgctgctcaagttattgcccaaccagacgcggggaactatgttactggttcaggttcaaatttatcagtttctattaccaacccacagactggcgttacattccgtggaaaacttaccccaatgccaccgggctcttatggtgctgtaaaagctgattcgtcaatggcaccagcaagcctcaatgtgtcaagtaccaaaccctcggtgccgggcaagactcagtgtgtgataccaaatattgagccaaaagaacaacctgttcctatacatgatcattcagaggaccaaccatttgttgctgctgcgacacaatctgtgaaaaatgacaagccatccccaagcaagagggggggctctaagagggactccttgcatcgacagaagttgacaagctttgata

SEQ ID NO: 190681 - DNA, 387 bp, Zea Mays
ctgggtgtggtctacaaaccatcacagagctggttactaatagggatgtaaatggtatgaatatttcttgatcgactattcaactgaaggaattcacatactaaatggatatttgcatccgaatctggtcattccatccatgccttatccgaatactcaaaattggatatatatgtatgtcgatatccatttacatcttatctgacactacccgtacccaaatctgaatccgagaagaaacccaactatctgtgttcgtatgtgtagatatctgcccgtgtctgatctgtttacacccctggttagtaatcatcgaactagtatggccatagcttgactattgaagcaaaatatttgaagatgatgcgaatggctgaatgaagcact

SEQ ID NO: 190682 - DNA, 281 bp, Zea Mays
aaaactgcggatgctgatgatttgtcgaatggcaaagcctgaggaagtacttattgttgaagacgaaaatggcaatattgtacgtgagacaatgaaagacaacgatgttcttgttcagtacaaggttagaaaaaggattgcccaatatcctagcaccctgcaatttatatgttctgcgcttcataagctttgtaatcttctgactgacgtgaaattgccattattttggtattatcagatcatgagggaaacactgatctatttatctcatcttgatcacg

SEQ ID NO: 190683 - DNA, 481 bp, Zea Mays
gtagacttacgggtgatcgagcagcggtgaactctgcccacgcggcacggcggcaaggggaaggaatctcgccaccgacaagaaattggcgcccaaggaatcgatgctcccgcccaaagagacaaccgacgtgcacgtggaactctggcgaatcacacaggtaccctaggatggtcaaatcctcccagaaatcccgatattgccatgcgtctgaatcaaccatggcggctcccccattgtttccccctccctctcggtgatggtgatggatcgcttgatgcacatcgatgaggagccgagagacatggggtatgcctttatacccccgtgttggtgaggcggctgagccattggggtggttacgccagctggggatttctacggagatcttgcgctcattcggttaagatgacagttactgggcacctaatttgttgccgagaaagcagggggagaaggagggtaagggggcctggcgatg

SEQ ID NO: 190684 - DNA, 465 bp, Zea Mays
cttaaatggagagatagactcataaatgaagattagtggatgatgttgacagtggaatgcatgttagtggggatgaggcttcctgacgtgaataccttgcatgaagaaacggctatcataattgcatgctagtggggttttgtttttgtaagagtatatcgtatagatatagatatatataatctagagacatatcaggttttatttataacagacactgaatcaagtataaccatgataccgcaagcacaccagaaaactggtcacggaattgtgtatagaattcattttgttaaatgtggcaaaagggtgaaaagtataagataccaaaagttaaacagcctggatacaataaaaattaaaggcatatttagaacaataccatttacagctgcctccaagaattgaccagagttcaatgaagagagtgccagatggaccaaaggatgtgatgcgagttcagag

SEQ ID NO: 190685 - DNA, 833 bp, Zea Mays
ttataattggtatcaccattacaactattgttatccacattatggcccatgtcattcaaaggggaaacagacttcttctcttcttgtggagaagatttattacgtactaaatcaatactgcaggctatttctgatagatcttggagcgtgcattgcaattcttcctgccgtgcatggcatcctaccaagtcagttttgacttccttacttacagcatctacaatcccatctactttgccacgatcctctgctattttctccgcttcacaaggtgtgacgtctccattgagtctgcatggacttggtaatgacattgtattgggagaagaatgtatctcttcctgaggatgatgcatatccttcttaccaaaactctgtttattaaagctataatcatcagtttgcaagccattataatttccagcacttaaatttaactgaagttttacatcggagtaagaactgtcgctattcttctctcttagttctgtcccctgagataaatcgcccaaattaagagatgaatttttggaagcagaatctaatacccgatccatgcctgattgacaagcatcgctaagatcgacagggctacatactattgtatcatcttttaggtggacatcagagcctgcccacccataatcatcatgtgagacggtcagcttcctatcataggcgatttgtggtgttttatccatagcatttttcaacttgcagtccatttgcataacaggagggtccatcagcattgctttgccaggatctggtctaccaatcctctatgattgaaaaggcaggtcttccaaaagcagtgcaggaagccaggaact

SEQ ID NO: 190686 - DNA, 496 bp, Zea Mays
gagtatttagagttggtttgtaaccacgttttttttttttgagttttgagtaaccacgtcttaataaaattcagatgttagtagctttttttttgaaccaggtgttagatacttatcaacatagtttgtattagtgcatagttacgtctaactaaaaaaatacgtacaagccctcatagaaaagcacaagtcttatcccttcgtctaaaataaaaacatgtcactgtaaaatttgtcgaacaaagtgacttgaggtaaaataatcataatggtatatttactagaacaagactaataacgcagttggtttttagtctacttatatagtagttatctcttcgctattactatatatggcctagatgtcactattataaagttttatttggtttttatgtcaaagcgggttgtaaacatatagtccgtttctcacctctctcctccacttcagcatatagttgacttaatttgtttattgcatttgcacttagagata

SEQ ID NO: 190687 - DNA, 704 bp, Zea Mays
caagtttccccactgcttccgtccacagtttgttgatatcatggacctgcttcttgggtgggcgtttgtgcaggacctagctgatgcagatcgcagcatgatcattgatagttttccgcagtttcagtggcattggcttgggaatctgcagttttcacttggattactgcccaagttcttggccgatatggaggggcttgtgcatgatctcaacctgggaggcagccataatcctgggaggcttcgttcgctgtttgcttgtttctctacggtactgcagattatgtcttctggtgtggctgagcgaaataacctaagagaacttgtagctgggcctctggaaggtttagctcctcaacttttaaggtgtgcatcagtgatagcctctaaccttggctggtctgagaggatggaagacgcatccaaatgcttggtcttgcttgcagagattctgcaggaaaggtttgctgatttttatgtccattttgtggatgtgttggtccagagcttggaagttgcctcctcggcacagttggcggcagcacttaagactaacctgcaagttctatcactgcaaaatttggggctccatgcagcttctgttggagctttgcttgacttcagttcaattttatctaagtcacgtcttcatccaaaccacagcgtggttgcaaactcagcagctacctacattttttgcttac

SEQ ID NO: 190688 - DNA, 462 bp, Zea Mays
gaagcagcttggttttggtcagatttggagggatattatttgtggtttgttgacctcttcctctactcaagtgatgctgaatgggtttccaggacaacacatcatccaccggagaggacttcggcaaggggatcccctgtctcctttattgtttattcttgccatggatgtcctggtatatatgttttccaaggcagaggaggagggtttactccagcagttatccaacaggaaaagctccatcggatctccttatatgctgatgatgttgccctttttgttcacccatcagcagcagatttatctatcactcttggtattcttcagctttttggggatgcctctgggctgcacaataatgcccagaaatctaatgtcattcctatcagatgctcaatggaggatatggtggaaacccaaggtctgctgccttgtggaatatcttcgttcccttgccgttat

SEQ ID NO: 190689 - DNA, 584 bp, Zea Mays
cagggaacttactttagctataaatgaggtcttggatccatggatttcagcaaagcaaccaaaaaaagagtttgaagcatacttttctcacaattcagcatctaggaatttcctgccaggtactatggtcatgtcctacacagcattttatttacttacttttagttcttaaattttaactttcagctaatcttaatgcatttgaaatattgaactatcaaatttatttcactctcgcatattccttgtagctactaaacactgaacgaaattttgtggacatttgtaacattttccttttcttttgtgagcctcacagaagatggtgggtctgcaaaaagggcaagattgctacctgaccagagtgacgaaaatattcatttgtcagaagacattattgctagtcggaaggaggacatctgttttgaagagttatgtgatggagcatcgtctgttgataatgattctgtgaatcccagagcaggaaatgcaagctggggtctactaaatgaccatctgttagcaagaatctttcattttatgagggcagatttgaaatcacttatttcttctgcagctacctg

SEQ ID NO: 190690 - DNA, 307 bp, Zea Mays
tacagatgagatgcttggtaatgctggtcaggatgatgaccatttcactccgatgggcatgttttgtcttaccaataacacatatattcttgatatttcttgcattgagtccaacatgggtgagagaatggaaagcattcgcaatggcaacagtagttgccttactatgcaggaagaacatttacaggcagaatgtggaggatatcctcatccagattatatatctgttgatatggttgatgaaagatcactgcatgatttgccacatgggttatcacaaaacaatgagcagtatgagatggagcag

SEQ ID NO: 190691 - DNA, 840 bp, Zea Mays
gccgaggctgatggcgccaaagcggggaagaagtggaccttggatggcgaggagtctgacgaggaagaggacaaggaggacggcaagaaggctgaggggaatggtggtgctggtgacatggacgtgggtttgcccagtggaaatggtgatgccaacggtggtgctgagatggaggaggacgaaattgatccgctcgatgccttcatgaattccatggtgctgccagaggttgccaagctggagagtgctgcagtagcaatggatacagcccctgctgcaggtgcagatggcaagaatggtaagagctcaaaggatgtcattagtaatggggataagaaagggtcaaggaaagctacggggagaattatgcaaggggatgattcagactcggactacgatgatgctgatgatgatggggctggagaggatgatgaggatgatgaggaattcataaagcgtgtcaagaagacgaaggctgagaagttggcgatcgttgaccattcgaagattgactaccaaccgttccggaagaatttctatattgaggtgaaggacatcaccaagatgacatccgaggaagtggtagactaccggaagcacttggagctcaaggtgcatgggaaagatgtgcccaagccaataaagacatgggtgcagagtgggctgacaagcaaactccttgataccatcaagaagcttggttttgagaaaccgatgcctatacagacacaggctttgccgatcataatgagtggtcgtgattgtataggcatcgcaaaaactggatctggcaagactctagcatttgtcctcccaatgctgaggcatgttaaagatcag

SEQ ID NO: 190692 - DNA, 354 bp, Zea Mays
ggcgagcagtagggatgatcggagatccacttctggatattgtgtatttgtgggaggtaatctggtttcatggagaagcaagaagcaagttgtagtatctcgatccactgcagaggctgaacatagagcaatggctctagcagtttgtgaaatgatatggttgaagggtctcttgaaggagcttcaagtgttgaagaatgagacaatgttgctccattgtgacaatgtggcagcaatcaacatagcaaataatccagttcagtttgatcgtatgaagcatgtggggattgataagttctttatcaaagagaagattgatagtggggctttgaagttgaagtatgtcaaatctcg

SEQ ID NO: 190693 - DNA, 1491 bp, Zea Mays
aagtgcttgaccttgagaaatgtaacaatgacctggtaagttgtgttctatggcaaatttcattgattcagttattcacatttcaatgcaacatttttttggagaaaaagatgtaaattcttgtttctctaccatagattgagaagtagactaaccaaaagggcaattttgccaccgtaagtctctttttcgttcttactgagtattgatgatttgttttatcatatggataggcttagataacacgtgtcaatgttcgttgtttgtacagagattctaaaatttgcagtaggttagaagacacatattacggttttcaaatagactataagctttgtataagaaacttggttttgttatcaaagcgacgttcgttaaggttcttaagctggtgtttgcataaaatcccagcttatgcaaattggagtttgcatgaatatgtgtgatggattgagtgttattaattgaagggagcaataatagtagatatctcatgggtggaagaattgattgttataatgtagtgttaggaagctaaaagaacattttcataataatggagtgttagagcttgtccatgcatttcactacatgcatcttataccttgtatataccagcagtcgctgaaagcatgttcatatttcttgaagtgtgttgttgaaagttgacctctaaggctgtacaattgtttctgccttaataattttaaggcgaacttcttggtgatactacataaatatgggtttgataataaaaatataagtggctgaaatgtgggatcctcacttcgaaagctattttccaattttgcatgtgttcggtgttagtaagataaaatggtcaaatattttttattgatttgtgtggtagttgtaaggatcagatatttcttgcatgcaaagtacaaatggcaccatgcaaacatttgttagtcttttgctgatcaaaactgtcacatggaatttaaacatcattcctgcaacaccacgacactttgtatactgatggaaatgcaatacatactgtctcactttatgctttaggttcagatatgttcctttgtgcatgtgtgtttttgtgtaccataacttgtaagatacatttatcttttatcctctgacgaatacaattactttttattttctctgcgagcatgatgaattgatgatatcaaactaatgttgagtatttccatattttgggatttgtgcttctgatcctttttggaatcaccaatctttaggatgggataagacgggaagtgcaaactatgagtttgattgatcacccaaatcttcttcgtgcatattgctcatttacaaatgggcaccagctttgggttgtcatgccttacatggctgctggatctgctctccacattatgaaaacttcttttccagaagggtttgatgagccagtcattgctactcttttgcgtgaagttttgaaagctcttgtctacctacattctcaaggacatattcacagag

SEQ ID NO: 190694 - DNA, 1708 bp, Zea Mays
tgctgggatcgactgcctctatatgattcttgattttgtgccaggtcagcagcgagacatttccattagttatatttctacatacaatttttgtttctgttaccaaaggttgttttaatccattgcttctgagtgagattgatgttaaatcagcttcctaggaggattcagtaatgtatcaagtttatcatgtatgagaactagattagtcgcccaacaatactaagattatatctgacaggacagtaattcttagcagttgattcttgcttcacagatatatgttcctttgccaatgtaagacaaatcaatggtaagtgcgctagaacagaagtggtcttttttttttcctggtgcgtgaggttgctccacctcagatgtattcctccctttcatataaggggaaagacaattacccggcccttaatggccataaacaactttatccaacccttaatggctgaaattactgtgccatgcacccactaactcatgacttgatcctacattaacactcagaacaaaaattgacgccctgacctatccccagtacgaaaaaacaggactgaacacacctacatacaagaattgttcaacagccaagctgttgagtgctccccttgcaaatacaagttagcctgaaatttgtgtcaatcaaactttaggtttaagcaatgatatttaaaatgaatttagattgtatggacgaaatcgatatcgatttatttagagagatctgtttttaatacataaatttagttatttctgacaataaattatccttggagcatgggccatctgcaatcaccacaatcgttgcatgtttgatggatcttgcctagttgaatggggttctagagttcataagggaggagttacttttttggtgtttagatggggcttgaggggtttcacatctcttcgcccttgggtttttgtgtgtgtgatctgtttgtgtggtgttgtataggttctaaaccccttttcttctaaatatattgatacacagctctcctgcgtatccgagaaaaaaatgacaaaaaattatcatacaaagctatactttggaaatagtagcaatatccgaaacatttacatctgcacgttcagttagtactgtatactaatcaacatcaagttatcatatacatgaatatgccaagtgcttttgagaattttttcttccattatattttggtacttgcttgatattctagtaccttagtgcctgtcaataatcagtaccagatgatccacgtttttggcatatcactacatgaactagttgagctgttaggaatcttgatctaaacttctaaaattcttataggatgatgggttatgggtagtgtgtgaaggagcaaacatttattgtctgttgcttctatccgtatgggcctatggggtttacatgattaaatctgtgccatgaaaagtatccatatggaaatcctggtttgaaaaaggtgatctttaactattcttcaacccatattgcaggaaacaagcgcgtttttaagaggactgtccctggcctagttggtgctttattcaacattatactacaccttcagagtccacatattttctatagtcagaacctgccacctcaaggtagtgtgttccatccagatgctggagccactgttctaatgtgtgttgaggttatcacttcatttgtgggaagacattcttttcaaattgatgc

SEQ ID NO: 190695 - DNA, 291 bp, Zea Mays
aaaaccaaagtctatcgcgaagactatccgcgcagaagtcgcctaagggtgcagccggactagcacaacaagtgcgcaaaaaccgaagtctatcgcgaagactatccgtgcagaagtcgcctaagggtgcagccggactagcacaacaagtgcgcaaaaaccgaagtctaccgcgaagactatccgcgcagaagtcgcccaagggtgcagccggattagcacaagtgcgaaaaaaccgaagcctaccgcgaaggctatccccgcagaagccgcctaagggcgcagccgaac

SEQ ID NO: 190696 - DNA, 467 bp, Zea Mays
ggttcatggtggggacagctcatcttgctttcacaaacatgactagtagatgccccctggctaccttcgattctagcagctgcaagctgtgcaagactttgtgttttacgaacaacttttgccctacctctagaagtttgcttaacagacttctgtacaggttcaacgttgaaagattcttgtaactttgtccctttcttcacccaccaaatatcctcctcgcctgattgaatcaatggaaacccttggaaaggagtggcgctgtcatccaatttctgccccttggacctcatacaatcctcgcatccacttttggcttccccagtctcaacttgtgtgagcgttgacgttactgattcttgaaagcttgttttgatttcacaaagttttgattccactaggggaggatatgtaaaacccaacagacttgacaaaagagctttaacatcttctacttgttctagcac

SEQ ID NO: 190697 - DNA, 385 bp, Zea Mays
gcaaaaaatcaagatcgtgtggacggaggcaatatgaatgatgggaaaagggaaatgaggtctcatcaaacacaacgtggcgagaggtgatgtctcgattggtgagagaatcaaggcagcgatatcccttgtggttaggagagtagccaaggaaagtgctgagcatggagcgaggagcaagcttgtgggcggttgtggctgaaaggtttgggtaacaagcgcaaccaaagacacgaagatgattgtaccgtggaggagcaccaaaaagagcaacatgggggatggaggtttgaagcgttttggtgggtaggatgtttagcaggtgagttgcgacatgtaacgcttaaaccgagtaggaagggggcatacttccttaaaaagtaag

SEQ ID NO: 190698 - DNA, 467 bp, Zea Mays
gtgagatattgaagagcacttgctagtctgcgaaagttttgagcatcactgactggagcaccatccacatcatgcaacttggcacaactggccacatgagtggaacaaggtttactagcagccatatcagcacgctctagaatatccaacatatatttgacactgctagatggaataatccatcgacatgatgctgaacttgcatccaaagtgtagaaatgtagctagaatagtattgattgatgtcgcggatgatacgctcagcgcagctgttttgcgaggaggtgtagggacaagacatgcgaagataaatgccgtgggtgaggaagaaggtgcgagagctcgcattatcgaactcgcgaccattgtcgcattggagtgcctttatggtgacgccgtactgtgtatgcacaaagtcaatgaaactaagagtgtcgaaggtgtcagatttaaggcgtggggcatcc

SEQ ID NO: 190699 - DNA, 690 bp, Zea Mays
gtgggcctgaagccatctgcagttgaatagagaccgagtactctctgattacatgactgctgtgggtgaaaactccatctctccaagccactaaaatgccccctcttgtcccctgagctgggctgaaaacaaaattactataaccagtaccaagaattgacaaaatatcaaaatcagagatggtgctcattttggtttcttgcaaacagacaagtgatggcatgatgtccaggactagggtcttgacattatctttcctagccctactgttcaatcctctcacattccaaattaggaagttgcactgttccattgagaaagaaaaaccacgaccaaacgaatagacccaagcttatgcgagctcagatgtatcccatccgaacagcgcagccaaggcagcgatgtgctccctggagagtggtgaattgaataagacagcatatttgctagcatcttccagagtgatattgccatgatcatcacagaatcccaatttcttgcagacagaggctgctgcatcggatcctagctcaggtggaaacttggccaccctcctggatctcctaggcctgaaatttcttggtagggtcttctttctgcgtttggggattggcgggggactcagcaaaccattaatggctttagaaatgtgctgactgaattcttgcaagggggtcggggatggcgagc

SEQ ID NO: 190700 - DNA, 508 bp, Zea Mays
cgacttctcagaaagcagcggcggcgaacggcgcgttgtgctcctgaaaaacccttaggtatggattttcagatttggggaaaaagcactttgctgctgcgcaactgtcgcaactatttttgcactctattattttattaaagtagtggggattacatggtcagttctactgctgactgattgtcaataaataaactgaatttctgcatattttcctttaatatatatgctagtagcatactcagccacactctctgacatacacccatagcagcagctacatattctgcctcgcaagacatatacttcttcttgcagattaccattcaaaaaggctgatttcacatccatatggtgcacctgccagttttcttgtgctgctaatgctaataacactctgacagtctctagtctagctactggtgcgaaaacttcatcatagtccacaccttccttatgagcataaccttttgcaataagcctggccttgtgtttaacaacatttcct

SEQ ID NO: 190701 - DNA, 421 bp, Zea Mays
aaggcccatgatggaggtgtagttgcagttgaactttcaagggtgatggggagtgctccacagctcattacaataggggctgataaaactttagccatatgggatactgttactttcaaggtacttatataaatatttgcatgaagttatattatttattatttcaagtagagcttaaagtaacacatttgctgctcaggaaataaggcgcattaagccagtgcctaaacttgcttgtcatagtgttgcatcgtggtgtcatccccgtgcaccaaaccttgatattctaacttgtgtcaaggactcccatatttggtatgtatttctgctctccagagacatattagttgcagatttttctctaatgatgctcattatagcttattgcactgttctatactctattattacagggccatag

SEQ ID NO: 190702 - DNA, 307 bp, Zea Mays
tagactttttatgtataacatctttgtggtgatgttattaattctaatctcttgctaccaaaatgatgtagggggattttcatcactggttggaccttttcaatcattttgattctttctttgagagttatatcaaatcaaggaaagatttgcatcttgaagataattttcttgatgtggatcccccatttcctcgagaagcactacttcaaattctccgtgtatcaaaacttatattggaaaattgtacaaatagacacttctctagtttttttgaggtcagcactttatgcgtgtcctgtttatc

SEQ ID NO: 190703 - DNA, 804 bp, Zea Mays
caggcttcaattgtggagaggctgttaattttgctattggcgattggtttcctcttggttctctggctagcaagcgctatgcacttctgaacagaactccattgcttgcacatgaggagctactttgtcgttctgctgtgcttctatcccaaaagctgttgaactgtgatccaagatccttggacaagttggaacatccatattcccagaattgtgtgaaatcctgctttgtgcggttgatacgattccagcgacgtgctcgtggccttcttgctaaaatgggttctgaaatatgctataagccaaagacatttccaaaatctgtcctgtagcatttgtcggcgtgattgctatatcacacacgtgttgtgtagatgtaactttgatcctgtctgcctacatcatggtaattatgttaattttactgtttctgtatctttatttaattgtttttgggctaattatttcttttaattgggggtacagaacaagaactgcggagctgcccttgtaagtccaatcgcgttgtctatgttagagaggacatactggagctagaggctctatcaagaaaatttgagcaggatgtcagctcgtataaggaaggaagttgcattagcccatgtaaggaggttgagatctctgatactactgatgaacaacttccaaatcttgggattactctggatttcgttaatagtaaagctggtagctcaggctttatgactgttgatggaggaaacagttcttctgcagtatcaattttgacatcttctgtgcatcatgaggcatataagcatacag

SEQ ID NO: 190704 - DNA, 321 bp, Zea Mays
gcccatatgcaaatgctgataatgatgctgctgttgaggatattcgaactcagtgggtggatgaagtgctcaaagccgaaggtcatgaacctcctgctgttaccattttgaccagggttccttcatggaaagttattagagctgttcatggtgaattaagtttgacaatgtaaataaacttcgggcatatggaatacttgaaagttttgtactttatgaatttatctaatatattatctcttctaaactattttcccacagagaagaatcaacaagcccaaatttttggtcagggatttgtctacataaccttgctagaat

SEQ ID NO: 190705 - DNA, 627 bp, Zea Mays
actcagaactgaatcaggcaatacagccatatcacaagcttatctgtgtggatctttctattctagggctattgttgtagcgggtgagagggagggaattccatcagttgatggtgacctgccaaagttctgggcctactggttaagtttacttaatgggaggtctcctcagtggcagtatatatctgagccagtacaaagaagccgtagaaagataaataacatggaacaacaattgaaaaacacagacaaacagttgaaaataactactgaagaaactgatgaagccagagtaaagcgtagaagaattggtgaaatcatggattcatctgcaatagactcacctggcaaaaacaaggacaccatattgccaggaaacaataccccacctagttctcatcaaatatcagttgaagatacatggcaggaactaggtattacatctgtaactgaattgatgtgttttagtttatatgtggatactgcattttgctaacacagttcattatgtagagcgaagcaatcttcatgccacacaaaaaggtctacacgttcaactcaagccagagatttcgaagttatataagttgctgcaactgccggtactgctacacatatttaactcta

SEQ ID NO: 190706 - DNA, 340 bp, Zea Mays
cacaatagagggtttgtatacatccctggaaaagatgtttgggggaaccgtggtttgccctaaagctatctttgttagttcgtcggcaacctcgttgtaatgacacgcgatatggttgagctctagcccaaagaacttgtcctctaggcattggacctctctacagtaggcctccatccttgcatcgtgaaagcttaagttcttcatgacttggtcgatgacgagttgggagtcccctcgaacgttgaggcgcctaactcccagctcaatggcaatgcgtaggccattaaccaaggcttcgtactcaactacgttgttggacgcatcaaagtggaggtgt

SEQ ID NO: 190707 - DNA, 346 bp, Zea Mays
gttaatgaggtgctaacttttacaaggtcttttagtatttcacacttctcattttagccccgctctcttagattactcttgtgtgtggttggttatcaacagccaaagtaatacgagggtcaaatgtggtgtttgtaggccgcataggagctaatagagaaacactacaacaagctgattgtgatattcaggttaattccatttctttttctttccattctccttgaaccattgggtttgtgcactagtcaatggcatggcctttaagacagttatccatgcccctgaaagatgtttaatagtcaacagtaaagcatctgacaacaaacaagaaacctcaccaaat

SEQ ID NO: 190708 - DNA, 647 bp, Zea Mays
tcaaaaaggtggacaagtttcagtggaccacagaggcacatgaagctctagaggcactgaaaaagttcctgactacaccagtactcaagccaccacgccgaatcagccagcagaagatctgttgttatacatctcctgcacaactcacgtggtgagcaccgcgttagtagtcgagcgggtggaggaaggacatacatacccggtgcagcatctggtctacttcatcagcgaagttctcgggcccttaaaaaaatgaagtatccccaagtccagaaactgctatacgtggtacttctaaccgctcgcaagctccgtcactactttgacgaccacaaagtcatagtaggatttccaataggggacattcttcacaacaaagaagctatcggaaggatagccaagtgggcgtgcgagctgggagctcacgacatagagttccggccccgcacggctatcaagactcaggcactggttgacttcgtatctgagtgtactgaacaccaggtcctagacaacctggagactaccgaagtatggagaatgtactttgatgactcgctgaagttgcaaggagcaggtgcaaggattctctttattgctcctggaggtgaacaactcaagtatgcactccaactattgtttccggc

SEQ ID NO: 190709 - DNA, 617 bp, Zea Mays
caacgatagatagccagacaaatggaatccagaatcacgtggtcaaacggtaccaaatcccaactggtatagggtccccaggtcagccttagtcagcattacatcgttcacggttctgtgtcaaagcagagcggttgtaagcgtagcgtgacacgccgctgagggaaaacacgaaaaaggccatatacaataggaaactgcaagatacgtgtgccgtgcttgtgtcgtgcacttttgctgcaaatgtaaaggttagaaggtacatgaagccattccattgatcaggttagcggtcgtaagagaacaaagaattaccccaccattgctccagcagaaaatataaaaacagaagtccaaataaaataccaatgtaatatcgtaatttcattccgagacatgccaaccaccaaagctcatatagaaacaaaggaagcgaacaactgcattccaaacctgaagtcgttttagattttctagattcataagtgtgtgtgtctatcaatctatctatctatctacacacgcatacatctgcatgcttgcgcatctgtgcgtgtagacgtggtgtacatatctaaatacatagctttgctatgcacttaaaaaaaggtcaaaac

SEQ ID NO: 190710 - DNA, 647 bp, Zea Mays
gtaacatatggatctttgaagataccagagtttgaaatggagtggaagaagattatcgaagagcatggacttggaggaaatgagtgcctcagttccctttatgagcaccgccaactctgggcacctgcatatctgagagataaattctgggcagggatgtctatttcacagcgaggggagtctatttcctcgtactatgatgggtttgtgtacccaaaaacttctttgaagcaattttttagtaaatatgagatgatattagagaacaaatacaaaaaggagtggcaagcagatgaagaatcttcccataggtctccattgactgtaacaaaattttacatggaagagcagctggctaaagcctatacaataaacatgttcagaaaatttcaagatgagttgaaagcaacaatgtattgcgatggtatgccaattaaagttgatggccgacttgttacttttgaagtgaaagaatgctcatacatggaagatggaaaggacacagagagcaggacctatgaagtttacttttgtaaagaagaacccaaagttgaaattgagtgtgaatgtggtttcgttcagttcactggcatcctgtgtagacatgcattgtctgtgttgaagttgcaggagatatttgagatccc

SEQ ID NO: 190711 - DNA, 695 bp, Zea Mays
cttgggtgttagaaaatgtctctccaaaattcaggactttctgaaagatggctgctctgaaaaagtaaattatgtggaaatagaagaactagttgctacgaaatgtgccccgtgctgtgagcctagtcttacaaaattgcaggtatgcaaccctgggtacatttgtagcatgtacttggtcttaaaatatactgtgatgttttaatttcccctacccactgcaggcgtatgcagaggaagcgaaattgctgattaatgaagtaaacaatgcactatcatctttcttaacagtaagccccttgttagaatttacagccatacacttctctgcagttgacagaacaaagttattttgcatcctatattcttctgccaactctttcatggaacttttttacaatgtttcttgtcatgttaccttaggtagacaaattggaaacattatactcaagggtttcagaattcccagttaagctaacagaatcatcgactttgttttgggagttatcttctgcaaaggtatatggcgtaaaaatggatcatctctttcatatttttctacattagaggcatactcttcattttatctcacgttcattttaagaaaatagcaagcgtcttaacttttttacatcttattttggctgcagtcctggttgaagaaagcaagtgattgccttgaacagaataaactg

SEQ ID NO: 190712 - DNA, 364 bp, Zea Mays
gttatcctctgcgtctccttcaggaggctcacctgcagtggccactactacaccgactcagcctgctaccattacgtagacctctgtgtctccttcaggaggctcacctgcagcgacctccactacactgacacaacctgctaccattacacaggttgctgctctttgtcgcttctgcggtcaggtttactcccgtcatcggccgactacttctacatcaccagcgcccttgcgccacctgttcctgctggcaccatggctgttccagctgcaccccctgcgtcacctgttcctgctagcgccttggttgttcttgctatcaccaaccggcacgacatgacaactcgagggaagcacggtttcc

SEQ ID NO: 190713 - DNA, 604 bp, Zea Mays
gtcgtaaatgatgatgatgataatgtacaagttggatgcaaaaggaagctgaaatctgatgtgtggcttgaatttgaacaagtaacagttgggggtaaaatgaaagctgaatgcacttggtgtaaaaagctactagttggagatagtagagccggtactaatcacttgcgtggtcatctcatcgtgaaagatggcatgactgttatggaaaagggtgttgaaagaatacgtgatagtgttgggttttggtgtgccacgccaaaaaggcatgaacgttttgaacggacagcaaatcaaatgaatattaaatatggtagaaggataactctagattgtaagacaagatggaattcaacctacgttatgcttagcattgcattagaataccaatcagtttttgatcgacttgcaagtaaagagaagctttgtgctcattttaagccaacaacagatgattgggagtttgctagggagctttgtggtaggctgaaaatattttttgatgcaactgagctattgtcaggcactagttatgtaacagctaatctttttttccccaaaatttgtggaatttatttggccattgataaatggagaactagtg

SEQ ID NO: 190714 - DNA, 540 bp, Zea Mays
cttggcctcccacgagctgtagcacacgtttccatggccaaagagccaatttcatgtatccgacctgccacctacgttttagaccggagaggccgttacgacattttttgccacaagtgagctatagcacacgtttttatggtaacctagaccccaaatccaatccctaaaccctaaccttaaagaccgacactaaaaggttttagtgtccaaaccatagtaaaatgaagtttgagtctccaaaccatagtaagctttcaggcatggtagaattttagtgtccaaaccaaagtacacgttttagtccccggcagcccgtaaggctattttggcctcccgtgacacatgtttttgtcgtcgaacatcgatttcgtgcctcccgaccgccacccatgatttgaccatagagactggtaaggttgttttggcctcccgtgagctataacacacgttttcatggccgagcgaccatttttatgtcagtgttcctccacacgtgtttttgtccccggagcaccttaaagcggttcttggcctccc

SEQ ID NO: 190715 - DNA, 446 bp, Zea Mays
ccacaattggggcatcttcattgtctttaggaagccgatatgcaaccaaacgatctccatctctgattaaggagataacttcagaaggttcatccaagtaccgaataagggaattgttgtagacctacatggcaccaaacagtaaggaaatatgaagggtatgtttaccagcttccaaaataatgattctgagggaataatgaatacctcagcaactagaaggcgctcatcatctctcaacgaacaagcactgcttaacgcattaataagggtcctcgtatctcccgattttggtacactaatagtgtaaggagatggcccactggtcccatcagtactgaagactgttatggtcattgttctcattgttgttgaaggcaggggcaaagacaaatacataaacgggtcaaatgttacagaaactttcttgcagatggggcaaacta

SEQ ID NO: 190716 - DNA, 409 bp, Zea Mays
aatcactgctccctccaatactatttcttaggccggtgcagtttgagaaatttccctcttgttaggcgtcttctaggaaccaaagcaggcattaatggccacatggaaaccaaactgttggctgcaactggacactagcatttttttgtgatgtgctgagtagcaaccacatgcatgtatgcatgcatgatgcatccaaggagtgaatgcagtgaaacaggaatccaacatagggctgtgaccttgcaagtatgagctcacaatactgcgccatttaatgcctcttggtctatggtgtttccgtgatatctggaatttgagcccctgctcctaagaaacggtgctggagggagtaattacctttgccttcacattttatccaaacggtacctgaatggacaaatacgag

SEQ ID NO: 190717 - DNA, 676 bp, Zea Mays
atttgacgactattgtcacagccaccagcctccaatctcttttatcaaagctcaagtctgtggccttttcggtagtgtcttctgtgattttggacctgagtttactgtccttgacgttgatggtgaagatccacatactggtataattgcatccatcagcaacgacactcctgcaattgtatcctgtgttgatgatgagaggcttgagtttcaggacggtgatcttgttgttttctctgaggtccaaggcatgacagaactgaatgatggaaaaccaaggaaggtaaaaaatgctaggccgttttcatttagcgtcgaggaggacacaagtagctatggtgtttacacaaaaggtggtatcgttacacaagtcaaagaaccgaaggttctacgtttcaaggcactaagagatgcaatgagagatcctggtgatttccttctgagcgacttttcgaagtttgaacattcacctgtgcttcatctagcctttgaagctctggataagtttaagaaggagcatgtgcgctatcctaccgccggctgtgagcaggatgctcaaagtttcctgaagtttgctgctgatattaatgaagcatctgttggttctaagctggaaaacattgatgaaaagttgctccgtcatttcgcaagtggttctcgagctgttttgaaccca

SEQ ID NO: 190718 - DNA, 359 bp, Zea Mays
cattactagacgcattgacttggccaaatttcttactagagtacctgtatgtgatgtgttgcattaaaaatctaggggggaagagctttggtagaagccttctagtcgccgaatactataaacttcctgttaccatgaagttgagggtgctgcaaatactctgtgatgatgtcattgaatcagaagaactcaaaactgaactggaaaatcgagtaggctacaatgaggagatggagtatgagatagaatctagtgcatttttggaggctggttcaagatcagtctcaactagagcagcaaaggcctcagcttgcaaaaacacgaatgatttccataatcttctcgaaagtgctccaaat

SEQ ID NO: 190719 - DNA, 1293 bp, Zea Mays
gtggccggggctttggagcagaggtggcctccgtgggatgggttggccgagcggtacaagctcatcggcgccacctccctcgccttcgtcatctgcaacatggacaaggtgacccatcctgtttgtctctatcacgtggacggttccgtcctgggcacttggcacgggatgacaggctggcaggcggctaattgcactgttacgattttgctctacggtattttgagctgctagaattaaaatgactatgaattcgagttgttgacctgctatagttttgctcatggaaaactaggtagtcaatgacatttaccggatattcagtgggaatttgggtggcaactggcaaaacgattgcactgtttttttcctctgggtttcctttagagaactttagctgaagtccactgatgcaatagtctttgtgcttgctctaaggaaacgtgccatatctaactgtcacattttttagggcttattttggaactcatttgcatcactagtacaaacatgtaaccttcactatgtaccaacagggcttttaggcatttccttacgagcatgaaattgtttgaagtaatgaagttgctatttacagtttaatgcactcttcttcatgtgacatatttatttaattctatgaaagcttttatggatgatcggtccatcatcctttcctgagaggaacaactgttcattgcaatattctaattttgcaggttaacttgagtgtcgcaattattccaatgtcacatcaatatggttggaactcatcaactgctggcttagttcagtcctcattcttttggggttatgcattgagtcaactaccaggaggatggctggcaaaattgtttggcggaaggtttgtttatgactttagggtaacaaaatcatcttgaatatgtacgaatacagtgtctatgcttatgaaaatactgatctaatatggcatctgcttgtgaagtaggaattgccaactgctatcctatggttcataagctgaacatatccttatttgtgttacccctttccaggacgaaaatactttatattaccattaaaactaaaaacagattaattctgctcaaacttttactcctacaatacatatagtgtctatttatctatttctttttctgattgtaggaaagtgcttgaggtcggtgttgtgacatggtctttggccactgctataattcctgttgtagcaggttttatgccagggcttgtactatcgaggattctggtaaactacttacgaaaagtctgctcagggttgttggtccgaaa

SEQ ID NO: 190720 - DNA, 411 bp, Zea Mays
gcctactaaaaattgggtgtaccttgtcgaatattgatctcttcgatggataggtgtgccgagaaagggaagtatacatctatgggacgggatcaggcggtatcgataagaatgggactgggccatagttaaaatgtttctggatcgattgaattgaggagcggtgtcatgggtcgttggtcgacactttaaaaggggaagtatacatctatgggacaggaatattatgaatttagtatgttgattctaatgggccgatgatctcgggttgattctatgggtcaagggtcgtgttctaaaatttcaataacaaactaacatcagtgtaatatcatctcattataccattgaaacttaggctatctctatcagattccttatcttatcctctattttaaaccttactctaca

SEQ ID NO: 190721 - DNA, 382 bp, Zea Mays
aaaatttgttggttggtcgagcgaccatttttaagtacgtgttccaccacccgtgttttggtccccagagcaccttaaaattgtccttggcctcccacgagctgtagcacacgtttccgtggccaaagagccaatttcatgtatccgacctgccacctacgttttagaccggagaggccgtaacgacattttttgccgcaagtgagctatagcacacgtttttatgtcaacctagaccccaaatccaatccctaaaccctaaccttaaacaccgacactaaaaggttttagtgtccaaaccatagtaaaatgaagtttgagtctccaaaccatagtaagcttgcaggcatggtagaattttagtgtccaaaccatagtacac

SEQ ID NO: 190722 - DNA, 511 bp, Zea Mays
ttaatggtcagaccctctagtgtacccaacatattccagatgttgaatggtctgttcaagggttcacttgttgttcaacattcaagctgctccctctgcctacttatgatgcaattttgggaatagactggttgacccaatatagtccgatgtatgttgattggaagcacacgtggctgtcctttcctcatggtaaccaatcagtggtgcttcgtggtctgactccattaatgccatcagggtcattgctgcagattcagcttgtatgcactttatatggggaaccattgtgtgctgtcaccgatctgtctattccaccttcagttcaacaactgctatacacatatgcatatttgtttgaagaaccaaaaaccttgcccccgagtcgattttgtgaccactccattcctcttatccaaggtgtcaggccagtcaatattcagccttaccgccttacaccggccctcaaggatgaagttgagtcccaggtgactgacatgttgaacaatgg

SEQ ID NO: 190723 - DNA, 340 bp, Zea Mays
atttggataggcagtgcaagtgggatcaggatatgtgatgctgagacagttaaagttatgatgaagaatcaacagaattgcagtatgattgggaaactggtttcagaagttggactatgggttagcctctcaataacttagttttaaatggtctacgttgacatgtctttgtctaaaattttattggtacttgcattatcaacctaccaagaaataaagtttgttctgttttttctgctcctttgatctctttgctaaaattcatgcggtgatttgtgttccaggccaatcaagaggctgaacagagctatgcaggcgagcatgcattcattatattccc

SEQ ID NO: 190724 - DNA, 934 bp, Zea Mays
tgaagaatggggattttggctttccattggagcccttataggattcattattttgttcaacagtctctacctttgggcccttacatatttaagtcgtaagcactattattttttcttcttatatttgttggaaactttttcataagctgggacttactttaattatatgttttgttcctaccagctagtagtggctccaatgccctagtttcagaaggtgaagatgatgtaaatgaaatagcattgaaagaaagaagcagagatgcaagaagcgaagatgaaatatcccaagttgtatacggggatctaggtgcaaacacatgtagctttcatgtctcaatctcttttagcgtatcttgttacatgtatattagactgctacatcctctaaaacattattttgtttgaaagggtctctagctagctaatttagttaggtagtctaaatagtactctttaggtcctgagttgtactcgtgtgagcgctttttatgggttaaaaatccttttgtttgtcccacccaaaaccacagatctaagattgacatcggtcgtggtcattttcatatgagctacggtgccgctgtgatgggtgaggtagagtttcaatggttttctcgacttgcacgaaaagttttttttcttaatgcaatacctgtggactgccttaccaccacaagtcgagtttttttaacattcttttgtctagtatattggttggacttttcatgttttaattaacatggtattgatgccctctatttcccatgcatggatattgtaagcattaatgttttgctcatatatctttgtttgctatttctgcaggcactaatggagcaacaaacacactagttcagtcacgagtcactttgcctttccagcctctttcactttgctttaaccatgtaaactattacgtcgacatgcctgc

SEQ ID NO: 190725 - DNA, 561 bp, Zea Mays
ttcttgaatgcttccttgtcctaatataggttagttgaggttgagaagatgaaccaacacatgcatcagctgttcttctcaaatttctgtcctgaagagcctgagttgctcctaatgcatcatccacagcttgccaccggtaagatgctgcttgaaccttttgattccagaaggaacaatcttcaaacagaaaacacactgatcaaaatccttctttgttgtgtctggccaccacccaaacttccatcctaggtcctagtctttcacttccggtcatttgctcgtgcactaagatcaggagggagcgctgcaattgccttttcagcaagggttttagagtctccagtggctgataatgctgaagcagggccgaagcacagccactgccgacgacattggactttgagaatatgacctcaacattatgaacgcccccacaaccaccatcaaactctgtacaggtcaaatagaggtacaagtcactgctgggcactcacttaggattagagaagacataattgttagagtggacgcagtgacacactaaccagttcaacccaa

SEQ ID NO: 190726 - DNA, 457 bp, Zea Mays
cgaaggtggcgcggtgaatacgtggctactgccgtggcaagctccccgacgacgatgggacggcccaagagagtcacagtgacacggtagaaagctaggccacgcggcgtaatgccgggaggcggcggttctccggcgagcctatctctccaccgcaaagcagagggggaggcacaggaggggtcaccggagtggagtccagctcacggcggtgaagatccttactgggtgatgcttatctggtgtccacggcgcacgaatcacggcgaacggcaatcaacggcgacgaccaccggcggcgagatcttttgggcgcgggcggtctgatctgtttcagtcgtgacactgtaccatggtgaacgcttcaaagagcaactgacggagcaagttcaagtcacattttctctctattttccttagcaactcatccaaggctctgcatcaaagttgtagtgct

SEQ ID NO: 190727 - DNA, 310 bp, Zea Mays
gcaatttcagaggtcttattggctccttggatctgaaggagattcctttgaatggtagaagatttacttggtcaaatcagagggcggttcccacccttgttaagttggaccatgttttttgcactacctgctgggaggaggctttccctgattgttttctttatagcagtgcctctgaagtttctgaccactgtcctctaatccttaagctcaatgcggatcttagagggaggcgtaggtttcattttgagaacttttggcctaaactcccggattttttggaagaggttgctgcttcctgggatcagcc

SEQ ID NO: 190728 - DNA, 355 bp, Zea Mays
tcgaaggcctaagaccgcccccgttgcaccttcggaggattccagtgatgttgcacctccacccggttcctcttccccagagccggtcagggtgcatgcccctcaaccggttgttcctgatttggtggaagccacacatctctgcattttggaccgtgcggatgcgcttgctagagaagaactgtggttacgacggtgtgctctgttcgtcgttgtcactggttcaagaccgagggtggctgctgagactcttgctgatgaggtgactgctggtttcgggttggatgcgtcgtccttctccgttcatcgttcgtgcctagaagattttgtcttgatcctgaattcggaagagttg

SEQ ID NO: 190729 - DNA, 581 bp, Zea Mays
agaagcagatcgttcttggtctccgcaaaggtgggaaaaggcttcatgcgggtgaggatgggcgtcacacgatcgaagcgagggctcaagccgcggaggaggttgagcacgaggcactcgttggtgatgggggccccgagggtgcgaagagtgtctgccatcgtcttcatctgacggcagtactcgtccacagagagatcgccctgagcaagctgacgaaaggcggtctcgaggtacagaatccgagtctggcggtggccgaggaactgagcctcaagggcaccctagatccggtgagcagtgtcgttcggtacgcgaacgatgtcctgaagttcggccgtgagggtgccatgaatctaggagagcaccacctcgtccatcagaagccaatcctctgacgggtcagagaccgctgagaggacgtggtcggcgagggcgtaccggcggagggtctgcaagacctgatcgcgccaccggggtactgagtggagtctggcgcaaggacgtcggtgacggttgcctggatgttggtgagagccgccgcctgagcatgaagagaagcgcgaagggttgaggccggg

SEQ ID NO: 190730 - DNA, 308 bp, Zea Mays
catttcttaacatgattgttgcggcagttacatttacattgtgtcattctaaaatgccatctatgtaatttatgacctaggtcattttttaacagaaatattcattctaatatgtagtggtgagtgggatagaatcaacctctccgcatctgcgggaaaaggtttgccttggtttatcccttccctggactcactcatgatgagagcatcctgcactgcgtctgcccttgagagcatcctggactcaccacctgttagaagtcataagtgaagtattgtgaaattggtggtctcacatttgggtcaag

SEQ ID NO: 190731 - DNA, 495 bp, Zea Mays
gcccatcgtcggccactccgacacctacatcttcgtggggggcgatgcctaccagttgttttgcgcccttggggccgtcttcatcaccagccgcatggctgacgacgccaggaaaaaccataccagaaccggtgtaccagcccctggcgccgaccctcgatgttgctaccatgtcggcgaccgcagcaccccactccttccccatctacgacggcagcagtgacctctagggtggttcaacggttgcaagcagttcttctggagccagcgcaccctagagtctgacaaggcctggctggcatcgtatcacctcacggaccatgcacatacatggttctggcggctggaacgcgacgagcgtcaggtcacgtggccacagttcaagatcatgtgccaccaacgctttggttccctcgcagcagtggcggcttctattgccacgtttgtcgcgtcctcgtcgccgacaccacccatgtcattaggggcagccatcac

SEQ ID NO: 190732 - DNA, 463 bp, Zea Mays
aatttgatgaaggagaagggagagattgctaaagaaaatcaaagccttgtaaagcagatggaggatcttaaatcaagtacttccacgctgttccttgttccgttgcatcttattctttcccacttgagcaaacttttgaatagtttcatactagttgctgcaaatctaataatatactttagcagctcagaagacaacatctgaaacaacacttgagcaggctattaaagaaaaggatttcaggatacaggttagcacgttttgcttaaatggtacacaaaaatattcttgagcctttaacataaacatatattaacagacattagaaagaactctggaaaaggaaagagatgataacaagaaagagaaggcaaagagtaggaggaatgagaacacaatctttggtgcacttcagaaggtgcaacaggtacattcgttcacaaaagtatggattgaatttgat

SEQ ID NO: 190733 - DNA, 367 bp, Zea Mays
tgatcgtcaggcaatacgtgaagtgcttggtgaatggttacccacgccgacggcgaaagcgtcgggcgacatgcactgtgagtcccgctgagcagagcttatcaggttgtacgcagtacacggtactactgactggccttttccgcgtggacacgaaaaccatgtgtcattgcttgctgtcggctactatccccttggttgaaggaggaatgggtctcactatgcccacgagcgcagcgcagatgggtgcttgttgtaacagttggagtagcaagtgcctagcagagcagtgaaagttcggcgcactgattcatgctttcacagctcggagacagtccagcgctgctcactcattcgttctgtcgcc

SEQ ID NO: 190734 - DNA, 273 bp, Zea Mays
cgcactctcacttggccagaaaatgttcatgcccagtcagatgtcaccgttgtcttgtgctaggtcactatgagaggcatcgtttcaataggcgtgcaaagacgtcgatgcaactgctctagaggcccaaggtacaacacattaatgaggcggtggcatacagtgaaagggtgcaaaccgttttgtaagttgttccgctggcgctagagtgtcccaaggtgcacccggcgaccggtcccacaaaatccaccggcaaaagcgaccttttgcatt

SEQ ID NO: 190735 - DNA, 347 bp, Zea Mays
gtaaagcagtttgaaggcggagggtagctatccaccatcctcggcaaaagtgatggcaaaacaatcgcctcggccatattcccaaaccttaccccccaaaatattagctatatcccacattccccattgaaaagacgtgaatggcatgggacacatgactgaagggaggtctgatgatggtccgcctagcttcaagaggtcatgaggaagtgctaaccttggatacgcagacaatacgaggaagctgaagtacaagtgaaaatcgtgttgaagattcgagaagtgatgctaaacataccctttagtggcaccgttgctggctatcatataacctggtgacctaaagg

SEQ ID NO: 190736 - DNA, 373 bp, Zea Mays
ccgagacaaccgctcgcgatgtcctccctatcgagacagtcgccgggacgtacgcccagccgcctcctccaccgcccacctacagcgtcgagattgtcgtcgtcctcgcgtctgcctacccacccccgttgtgcccttgggcccggatctggcccgacgaacaacgaatccctctcgcgcgcgcagcgccacagtcgtcgatcgcagtggcagccgcctagccagacgattgagccccaccgctgctgccgtccgtggaatggagctgactgccgacgagttgagccgctcgtggaatggaactggcagcctcctcctcctcctccgccgccggctgtggcgacctcgaagtgcacgacgccaatgacgctcc

SEQ ID NO: 190737 - DNA, 524 bp, Zea Mays
aatgatttccacctcttgatcacataacagacaacgctctgggtgattgaggcctttcttggccaacatatccaatgtccaacatttgttatgggaagcggcacttttttttggggggggggggggggcaggacttgcaaatttgtagcaccgaatctctctgtatgaagacgatgctgtattgttttttaggccggtagcttcggacatcaacatggctctggccgttcttcggttgtttggtgcggcttcagggttacaggtcaatatccaaaagagtagtgtattcccaattcgttgtggtgaagaggagcttaattgtcttcaagagcttcttccctgtcccatttcagtttttccgtataagtatctcggattgcctctttcactctggaagcttccaaggtatcagtttcaggccattgttgatcgggtagccattctgttgccgggatggaaagcggatcttatgtcttgggctgatagagccattcatgttcagtttgttttaacagctaagatga

SEQ ID NO: 190738 - DNA, 739 bp, Zea Mays
gagaattaatgggttgtgttttaagtgtggagagaagttcatcccaggtcacaaatgtaaggtggttgtgcaacctcagctgaatgtcatggttgcagaaggtcaggacggaggtcagatcctgcaagatgaggtgctagaattattggaaagggttgagcaccggaatgaggaggaaatgaccttgtctctgaatgccatgaatggtactgacacttcaaagtgtatcaggcttagggcaatggttaagaaccataccattttgcagttgcttgattcagggagctccaatacttttatcagtgagatagctctagctaaaatgggttgtaaggtccaggaaatacaaccattagatgtgaaggtagccaatggacaggctatcaggtgtgaaaagagagctttgcagctggaatggtgctgttgtggaaagactttttgtgctgatgcttatgtgctccctgtcactgcctttgacatgattttgggtatggattggctagagcagcacagtccaatgttatgtgcttgggacaaaaagtgggtggaatttgaggaagacggtgtgcccatcaggttgcaaggggatttggttagaccagagaaggttatttgtgagtctagtggtgatcaagtgtataaatgggaaaaaggaaatgaggtgtgggctgtggcattgatacagaaggtggaggaagggttacagccaaaggtggaggtagttctagctgaagttcaa

SEQ ID NO: 190739 - DNA, 735 bp, Zea Mays
ggcaggtggaataagggtccagaatcagaacatgagtacaggtatatttttttcttttctgtatggttatatctgtgttcattgttgaatctggtggactatttccttgatctggtgaggagcataacttactttgcctaatctgattagtctaatatcttcaattcctggcagatgtggtcgtaatcgtcgcggtgtttatattaattggcttattctgcatgcaacactatgggacagataaagttgggtggctctttgcacctttggtgctcctttggtttattctaatcgggagcgttgggttagtgaacatacgcaaatacaacagttctgttctaaaagcatacaatccagtctacatcttccggtattttagacgaggcaagtctgagatttggacatctcttggaggagtcatgcttagcatcacaggtatctcttggacatctcttggcaattcaactttaacttctgcatcaattgtaagatgaaacagagttaccttatctatatgcctttttctatgcagggactgaagcattgtatgcagatctatgtcacttccctgtattggctattcaggtgagtgttcaaatagaaaaattatgaattatgataatacctcaatggattaatcatgtctatgtccagtttgcgttcaccttagtggtgttcccctgccttctactggcgtacactgggcaggctgcctacatcattgacaacaaggat

SEQ ID NO: 190740 - DNA, 504 bp, Zea Mays
gcttactaaactcggggtgaccactatgccctactaacagagcaatcggcttaagtcggcaatgacttaaggcggtgcgacatgctcacgcttactaaactcggggtgaccactatgccctactaacagagcaatcggcttaagtcggcaatgacttaaggcggtgcgacatgctcacgcttactaaactcggggtgaccactatgccctactaacgaagcaatcggcttaagtcggcaatgacttaaggcggtgcgacatgctcatgcttactaaactcggggtgaccactatgccctactaacggagcaatcagcttaagtcggcaatgacttaaggtggtgcgacatgctcacgcttacttaactcggggtgtccactatgccctactaactgagcggttggtttaagttggcattgacttaaattggcacggcacgcttggcacgtttgcaatcacccatcttagggcaacttctatgccccacgacgaaatttcaaaac

SEQ ID NO: 190741 - DNA, 320 bp, Zea Mays
tgctatccatagctatatgcaccaatatgttaaatatagagcgcgacgcaaaagcgtgcacccgtgcgtccacgtcagctgccaaaaaatcggtcgttagatcctgcttggacggctacggacaactcccatacatgtgaccatccaatacacaaccccacaccggtagcttccagattccaaccgtccaatacacagccctatacctgttgcttctagaattcacccgacgagaccttggaggaggaaaccagacaatatcagcctgatggaggaggaactcaaacgcacggccacaccctcatcgcttgtgtcatctc

SEQ ID NO: 190742 - DNA, 386 bp, Zea Mays
gtcagtttggtttaatctgccatttgccatagctctgattgttttgttccgctacatatcgcttgattatggccttcgtagaaagagcgtaactagaacagatcatgccagtcattcactcgtcaaaacaaaaggtactgaggtaaagaaagtcattcatcagactgaaacggatggaaaaatagattggaggagcaaggttaactcgcctccagttgaagcagcattcgaacagttcacaaggcaccttatctcagaatgggtaacagatctgtggtactcgcgcgtaacacctgacaaggaaggtccagaggaactcatcgatgtagtcaatactgtccttggggagatttcagttcgggcaagaaatgttaaccttatcaatc

SEQ ID NO: 190743 - DNA, 378 bp, Zea Mays
aaatattacactttatcttagccaaatggtcgagaaaggtatgagttgaaaaggagtccgacccctttttttatcgcttgctcggttgttcgtcttcctttagctaacgagatggtactatgtaggagtgctgcgctgcatgtgacttcctgtcgtgtttggcttgggtggtttctcacggcccatttttggtgtaacggttcattggtaggcgagaagcgggagggaggaaccattgttttcagatcgtcgtctgatcgatgctactgggcgatcagccgattagtcgcgattaggcgacgatcagggcgattagtcacccctaatcgtccacctggtcgtcctgtgtatttccaggacacacacacatacacacac

SEQ ID NO: 190744 - DNA, 1022 bp, Zea Mays
cccagctgtatcttattatcatcctttacatgagaaattgccttctcaatggcagtgatttccttctggatatttgacaagatctgttttggctcattcgggttgttctcatcaagcatttctttggttttcttgatatcggtagcaatcttctgaaccctcccttccagcgcggctagtttctcatgtaatttgcttgggtacctgttcatagcagacacgggttttgctgaccctccctccccacctgcagccactttctcaaaaactcctatcctgtctgccaattttaccttttcttcctgcttcctgccctcttcattattcttttgctgtttccttattggatcagggacatcatttgaattcaccacatggacagtgaaaacagggatgacagaagtcttgcctatatcgtcatccttctggatggcacaacattccacagatttggaagcagcctctcctggatcagcctttttggtattcatctccttcatcaatttattgggcccctctttcttcatattgatttcttcagctgcctttacctttgaatcagagccctttatttgcccaccaacatcttcacattgcttcttcatattagtcacgaatgcatttgttttccctttgttctcatcacattgcttcaacacattcacacaaaagctatctcttttcccaccgatctgcttggcctttgcatcaaagctctcccttttcctgccaatctcatcagtctgcttccccttggcatcaaggtcacctcttttcctgctgatctcatccgaccccttcgccttcgcatcaaacctcgcccttctaccagtgtcatcactaccagcgccagcactccctctcctagcctcggaggccctggatccaacaacactaatcgacctcctccctttctctacagaagaagccctgatcccaccactgacgctccgccgcaagcctgcctccaccacgggatccttactgatggaagtcctccccggcagcacgggagccctgag

SEQ ID NO: 190745 - DNA, 312 bp, Zea Mays
ctaaactacaagttacaggggaactggaacctgtactgcttctacacaagttgaaactcaactaaaactcaactaaagccattagaaagtcaaattcagaataggaaaaggtggagctacacctgtgtcaattcatcaaacgatctatgttatctgctagtgctgattctgttcagaatagcagcaaggtgaagatcagcagcaacatctgctcattcatcagttcatgctgcctacaagcctcagcaccaggcctctgtaatttactgccacaacacaagtaatagagtgaacatgtcaaacccagaccat

SEQ ID NO: 190746 - DNA, 305 bp, Zea Mays
gttctcgggcaggatgcactgcaatggctgtgacacctaccttgacactgcatcgatgactggagcgatttcagtcagcgtttcaccgccaacttccaatctctctccgacaaactggcgcagccatgggacctcaaatccatcaaccgccggggggatgagactctccggtcatatctcaaaagatttcagaccatgaggaatcgtatccccgaggtcgtagaagcagcagtgatcgaagacttctaccggggatctaatgactcggccttcgtccacaccatactgcagaaagcgccgactac

SEQ ID NO: 190747 - DNA, 327 bp, Zea Mays
gttgtcttggacattgagcatatgtccacagtatttgtgaataccccatacgaggatatgccaatggcattagtggcggcaacatcgacggtgtcatctgaggcggcatcggcgttggcatctaagacgacatctgaggagtcatatgtgacgtcatttgcggtgtctatggtgaaatctgagatggccatgggccaaatcagcacgacatcgatggcgacatcatttggttgcggggacctatccaagaaccctataacaagagaatcaatttcatgttcacgaattaggactctaacttgataaagttgcaaaagtttacatgtg

SEQ ID NO: 190748 - DNA, 423 bp, Zea Mays
caagtatccacaaatggtgaaaggtggtgtatgttggtaattagaaaatggtcacttcgttagccaatagccaagcttatgccgagatttaaaatatgggcaagttaaattgaaatcatgcttatctaggcgtgtggttaaataataataactttggcttgtgtagtgaggtggtgacatgccgaagtagtcatcgcttcctctatgtttttaagtcgagtcaaaatacggggtactagtagtacgctaggcaggtggtgttccaaatagataaattgagtaatgtggtagttgtcaagcatgatagaggttgagtcacttaggttataaattgatgctcgacatgtgaggtctcctaaaatatggtgttttaagtgacttgtgcgttgtccagtttaagttgagaaaatggttaagaaaaac

SEQ ID NO: 190749 - DNA, 422 bp, Zea Mays
agctcatggtactcaagtgccaattcttgaggatgatgaagatggtcttgatgtgggtgatgagaatgaagacgatgacaattttgtgcttgacgaccttgacatggatgatgaagaagaaacaaacaacagtggtagccgtggtgatgagcaagacaaggatgatgttggtttagatgatttggatgatggttattgagtgcttgagtaacatttgtgtgcctgtggttgtggacattgcattctactttagttgcttttgtgctatgtttgtgattgtggactattagacatctcattccactttgtttgcggttgtcgacttgctattagttgaacttgtgttattgtggtaatgtggttgtggacatgtcattttgcacaatattattatgtgaacttatgttggttgtttggtattt

SEQ ID NO: 190750 - DNA, 1053 bp, Zea Mays
gagattttggtcggaaagcaaactgagaacatttcaactctacagcaagctaatgaagagttacaaaagaacatctacactttgactgagcaatcacaacaggtcaaggtggagatgcaaagtgatttgaaggcaatacaagaagagaagaatgcggtgctatcacaactgaagcagtcagaaacttcagtacaaaatcttgagaatgaggtgatacgactgaaagaggagctttctgtccagctagaaaacaattccaccttggacaagcagtttgaagaagccaggagcaatctgcatgctgaaatttcagagctacgtgcagataagaacacatctctattgaaattacagacgtctcaggattctgtcaggaatcttgagattgtggttgaaaagcaaactgagaacatttcaactctacagcaagctaatgatgagttacagaagaacatctacactttgacggagcaatcacaacgagacaaggcggagatgcaggatgagttgaaggcaatacaagaagataaggatgcagtgctaacacaactgaagcagtcagagacttcagtacaaaatctagaggatgagttgacacgactgaaagaggagctttccgtccagctagaaaacaattccaccttggacaagcagtttgcagaagccaggagcaatctgcatgctgaaatttcagacctacatacagagaaggacacatctctacgggaattacagacgtctcaggcttgtgtcaggaatcttgagattgtggttgaaaagcaaactgagaacatttcaactctacagcaagctaatgatgaattacagaagaatgtctatactttgactgagcaatcacagcaagccaaggtggagatgcaggatgagttgaagtcaatacaagaagagaaggatgcagcgctaacacaactgaagctgtcagagacttcagtacaaaatcttgagaatgaggtgacacgactgaaatgggagttctccgtccagctagaaaacaattccaccttggacaagcagttggaggaggcaatgttg

SEQ ID NO: 190751 - DNA, 622 bp, Zea Mays
gttcctccaacaggagagtggcccggacgtcgtggaacgtcggaaaggggcgaccgaggcgaagatgacggccgatgtcggagaaccggtcgctgaggccgcgcagaacgttgaggaccaacgtccggtcggtgactggttcaccaagatcaccgagggcatctgccatggttttgaaacggcgacagtaatcggagacaggtagatcaccttggacgaagtgccggaactgagcgtcgaggtggagggcgcgagtttcccgattcccgagaaactgattctcgagagtcagccaagtggtgcgggcagtggcgccgcgttccatggccatttcagcaaggtccggggagatggagccggagatccaggacttgacaatgcagtccatgtgtgcccagtcagggaagtgaggcgcaggagtgtcgtcgaggatgtggctgtccagggagtatttgccagtgacgagaaggaactcatcgcgccagcgggtgtagttgttgttggcgaggtcaaggacgacgtgaacgagactccgaatgttttgcacagcgacggcctgggagtggaggttgacgatcgcagcagcctcgtgaaggaggatggcgtcgtggaggcccttgtc

SEQ ID NO: 190752 - DNA, 757 bp, Zea Mays
atagttgtccaatttatccagaaaggcatagctacaatctttataagagaacaacagttatgtgtaaataatttagaatatattcacatcttgggccaagttccgagttaaactgataatcctgttctctagatcctgcgcttccctccctgctgccgcaccatccccaccctgctgtgccgcagcgccaccacctccctgctgcgccgcctcttctccctcctaggtcgccatgaccgacgcagccaccaatcctgcccccgctgtgtttgtcgccccctatgcgacgatcaatgtcaagaatcatatcccagtgactcttgagctggcaaaacccaacttcaaccagtgggcaccattcttcacctctctctgtggcaaattcgctctcctctcgcatattgacggactgcaggaagcccgtcccacagatccttcttggggcatcgccgatgcctgcgttcgcagctggcttctcggctcggctggtcccgacgtcatcggcctcgccgcggctccaaaccagaccgcgcgcgaactctgggtcgccataaagcgcctcttcgaggccaacaaggctccacgcgccatttttctgagccacgagtttcactcgatgactcagggcgactcctccatcaacgactacgctcagcgcatgaaggccaccgccgacgcgctccgcgatgtcggccgcaccatcactgacgcggagctcgtcctcaacctcctccgtggcctcaacccacgcttcgcc

SEQ ID NO: 190753 - DNA, 974 bp, Zea Mays
aatagatggaaaacagcagatccatttcctcccatctgcagaccaaatgaatgttgccctttatgcaggcaaggcaactatcgttttttgggtgatcagtttggcgctgtgcattgtgtgaaatagacatttgcttgcaacatatgcatataaattaaagaggccgagcagctacatttgtttcaaagggcaaaaaaacgttcgtgaccaaacagtccaatacttagcaattctgtgttctagggtgcaggaatgtgcatatacatgttcttgttattatttgtcgtgtccagttttcgctgtatgaactggcctactagttgcttgttttgttgataatgttttatctgcatcacctagcaaatggttgctttgtttttcgatttatgtgatcctcacatgcctttcctcttataaatatatgtagtatgtactgttatgtagaaacactgaatgcctgaataattgtactccatgctttctatttatctgaatgcaaatctggtatactctattgttaacagccagctgaccatgatgccctcagcctagggtacttgtagctatttcaactctgttcttctaatctaaaaaaaactagaccaacctagaaggaacaataggtacttgcatttgtactgcagtatgcaaatcatacatgttattgtgtctccctaaaaatataaacgacattgaatgcaataatccattgaatagagaaaaggtgaccatgaggtctcttgagtcttaacactaggaagtctgaattgtgttcatttgtttaccaacttgaagactgaattaatctcttgttgtttttaatgtgctcttgtttttaaagtcatgtgaataaaataatgacttgcttgaaataagttagcatgctataactaattggccgctaaatttttatgacatcttatacaattctaatactggagaagctccttggatgattctttattggtatttat

SEQ ID NO: 190754 - DNA, 381 bp, Zea Mays
atggcaaacatgtatcttgatgcacaagaagaaggatctacttgtgttggtggtggagatggacatgatcactaaaagagctaggttgtactctttttccctttagggttttgtccccatgtagttgaaatggggttttacctaaaggtttttaacgaggcaaccaatgtaaatagctctttataaagcatggtgatctattttttgatgtctcctgtatgcctgatggtaaacatgtatctattttatgacctgtgtgctgtaatggctggtatggcttgtgtgttgtaatggctggactactggactatatgtctataggtctatttcttatggttgtacatttaatgcttgttttcttgtgtggctatctcaatgtgc

SEQ ID NO: 190755 - DNA, 625 bp, Zea Mays
cctaaacctctcacctgttctagccttcaactcatctccttgcttcggtgtccaggtaacagccctggcaccacctctacccagctacgaactacgtagtcagggacctcctagcctaggggccgaggcccttgacaacttggtatcacgattccggcgatcctcttccaccttcgaccaccactccattgctagcactccttcatctccaagttcatcatcaacgacacccatgactaaccccaccaacgccggcctggccgatgtcatcgcgcagctgaccacgagcctgaccaccctctaggctgaagtgggggagctgcgccgtgagcgtggtaccattccgtctggctcgaggttcactgaacatcagggtgaacaacctccgcgttttcagaagttggatttcccgaaattcgacggcaagtctgatccgctggccttctcaaccggtgcgaatcctattttcatcaacaatggattgccgccgaggaacaggtctggatggcttcatacaatctagaaggaggcggccagatgtggtacatccaggtccagaacgaggaaggaatggcatcatggcgccggttttcagaactcctcaaccttcgttttgggccgccca

SEQ ID NO: 190756 - DNA, 2252 bp, Zea Mays
caatgttgaatgcaggattagctatgcattgcagtgatgcagtcattcactattgttcactgcggctggtagatctcagaaacctggctgcatcatctctcagaggcaatagtcacatgggtggggctactgaaagtcatgcctttagagagaggttagaagcagatgttatgaaagtcctccggcatgcttccctggcactctgcagatgtcatgaaacagatgccttagttggacttcagaagtgggctgcatcaacattctattcttactttgagcaagataatcaactagttcggggcgtatctgatcgcgacaatcgcttctcctggatatcaggattgatctatcaatcccaggggcagtatgaaaaggctgctgcacattattcacatctactgcagtcggaggaagcccttatctccatgaaatctgatggcattcagtacatcatagagcgtgttattgagtgctacacatccctttcagattggaaatgcttagagagttggcttgctgagttacaagtgctccgtgctgtacacgccggcaaacctttttcaggagctctaacaagtgctggcaacgaacttaatgctatccatgcaatggcgtgctttgatgagggggactttcattcagcttggggttatcttgacctgactccaaaaagcagcaatgagctcacccttgatcccaaggttgcacttgagagaagtgaacttatgcttttgcgtggaatgctgcgatgtaatagcaagttagagggcataacagaggagcttcataaggctaaattgatgttggatgaagcactcactgttgtcccactcaatggattgcctcaagctgctgcttgcgctggccagcttcattgcatatttgcattggaagaagccttggggttgacctcccaaaatggacttaatcaatcacaatcaataatggattctttactgaaagcactgcatgatcctgtcgataaaatgcatcaagattgcaacatgtggctaaaggtcttcaaagtgtaccgtaatacacggccatcttctttatccactcttcttctctgtcagaagcttgcaagtctttctagaaagcagagcaattttatgttggctactcgtttaaatcaatacctcatagatcatcctttgaagtcatctgatgagatggacaaggaaatacttgaattgaacattaagtatgaaggtgccttgctgaagcatgcaaatggaaataatgaagaggctctatctgatctgtggtcactggtccgagctagtgttctgtctagagttagttgttcatctggcattggcacttcacattcactggttgctagggcttgtttgaaactctcaacctggatggagcaagcgaactcaagtcctttaaattcgatcattccaatggtagtaaaagatttcagcgattctgatggatttcaagatggggcagagaaacttctatctggtgatagtgtatctgtttcgactttggattatcatgcacttgctcaagaaatcataggcactgctcgaaagatatcctggcaactttgccccactatgggtaaggcttggcttgcttatgcatcctggtgctttgctcatggcagttattctctgtctggaactgattcaaatttgcagaattcactgtcccctgttcttcagtctgaactctccccgagtagatgtcatttaacagatgacgagaaatctgaggtgggtgaaataatcagaagtatctgtgctgatgaacatgcaaatcatgtgggttgtgaatacccaatgacaccagggtgttacaattctgcaccagagcaccccatatctttacttgttgaacaggcaattagtttgatagaaactgcagctggagcaccaggctttgagtcccgcgaaggtgatgatccctctgcagttctagcatcagagctggtggttctttgtaaatgtgattctggaaaggacactgcacctttgattggcaagcttactgaaatatggtggtctttaaggaaaaggagggtatcactcttcggacatgcggcacatgcttattttcagtatctttcccattcatcaactgagcttcaatcttcatatcaccatgatgctttgaaagggaaaacaagaagctacactatgcgtgcgatgctgtatctacttcacataatgttgaactatggggtggaactgaaggaaacacttgaaagtgggctttcaacagttcctttattgcca

SEQ ID NO: 190757 - DNA, 393 bp, Zea Mays
aagtgctctatgtataggtgtgtatatatacatgatgacatttgtattgttgcttggatgctgtcggtgaaaacaatgcaaatattttgtccactattaattaggaaacatgatcatattgcccttttgctaccaataactgtagttatctaccataacaatgcatgctttgacttagtaaacatcatcatatctccttgttcacagggggacagctgaatgtacatactgtacacagcccgtgactcaaacaatatacgtgtaatccaaacgaaacataaaaaagccctagaaatagtggcaacccgctaattcatgtcgttgttgtccagctaaaatttttgaccccacatgcatcgttttctaacctcactcaaatccaacagatgccag

SEQ ID NO: 190758 - DNA, 544 bp, Zea Mays
cgccgagttagcttagggctagagatgggggcgtgttgccgtcgttcctgttgttcgccacggcaaggaagaaggcacctggtgccgttgatctgcgagtggatgtgtgggattcgagcgcgtggtagcgaccccgagccgtcgattggtgagtgaacgactcggacttgatttcgtcgggttaaagtgtaggccgtagatttcgaatcgggcggtcatggttggtttgggttttataaaatttggaccatcagatctcgatctagtggctcatagcgcataccgtttcgagtagcagagatctaatccggggcgtagatttcttatcctacggctgggatgttccgataacctttcagtcgtgtacttatgcaaaagaaaccctatgaaaactgtgaatcaacccgccgtcctcgtctgcggcgctctgtgtcttagggattcttaggccaagccccctgcgtttcggtttaatatatgcgcagtccaagagataaataaaataaggaaaaggaatttagaaattgattttgggtttaaaaat

SEQ ID NO: 190759 - DNA, 329 bp, Zea Mays
cgagtggcggcctccctctgtaaattttgctgttggccccacttacaatgcaacaactggtgaataccaaactatcccaattattgatccggataggtgggaaccgcttccagagataacagatttcattgagcttgaacctgaaaatgaagttatctctgacgatactgattctgagtacaatggcatggatgagtattcaagtgaaggagaacaggatattatgagtggtgattcttcaggtacttcatattcgagtggagaaattgatgcagataaccctgatagtgctcatctccgccgatcaagaagaaagaagaaaaaatctg

SEQ ID NO: 190760 - DNA, 504 bp, Zea Mays
catcactgtaactctgctgaatttggaaaggcaatacaaagaactcggaaggcggcactcagatctgcagaaggagaaggacttggtgcttgatgaagtgatcaagatacaggaacagataaggcttgagaggaaggagcatgaagattgtacacagtcaagcaacattagatttgatgctctacagaagaagattagtctattgctagaagagggcaggagtagagaggtgcagcttggtgaggaggagctcaagattgtcaaagctgagatagagatatttgtcttgcagcagtgtttgaatgacatgacagaagtaaattctgaaatcgcagaacaactgcgaaagaataaagaaatatgcaaggtccaggagggaaaaatctacagcttatcacagcataatcagaaactaactgaagggattgattcagtagtgagagtattgcatctggatcataagtatgaatccttaggccaaatgaagcttgaaatcattgtgca

SEQ ID NO: 190761 - DNA, 672 bp, Zea Mays
tctgttgtcgaggggatttgggtgatagaggggcttaaacagggaggtatgcagagggagcagcagggctgatggagtaaattcagagttagatttagtaaactaaagaggctttattcctctctattgtgcccatccgatgctatggatcgtgacatggatggagataaggatgtcgggtctaacttgggttctagagtttttcccattgaaatatccaattttggactgtctggtgtacataaaaaccttatctgctagttcttgaatgcaatgaactggacatcagaaactctagtggcttcaccctttgataagtatcaaattggtatcaattattctctatccgtaaagtagtgtttacctgcccttcttctgtctgtattcttggacagaagatatttgtgggcagcgagccttatctgtcctagctcctatttgaataactggacaaaactgatattggtactgagaaacaaaccaggttcagtgcctactgtgttgtatctagttgcatgggttgaagcatagatgcagttcatagttaaggctttaaagatctcaccccccccccccattctgaaaatatctcagccctgtgcggttagtgttatccaccagctgaatccttatctgctctcctccccaatctattttctggccagggctgag

SEQ ID NO: 190762 - DNA, 400 bp, Zea Mays
gctgcctattatattgaaggaggaccaagagaggtcaatagtgcagatgagaatacagagaaaacaacacagcagtggtacaataagatacccacttgaaagtaaaacatttcaatatatgtttatctgattatacatgcacattgaaaaaaagaacatttcatgtctgtttacctatcaataggttacaaatacatgtcccatttttaagtataggtttgccacaagcccacaacagaatattctctattttaaggataacagtaacagcaacaccttactatttgaaataagtagaaaatggaaagtaatctttccatgttaatactttgcaaagatatggttagcgtattttacttcctatgaaaatgacttcactgtttatataatattttattag

SEQ ID NO: 190763 - DNA, 359 bp, Zea Mays
cttgcgaatggtatgttcagtcattatgaccgtcctcgtattgctcagctctgtgaaaaggctggattatacttgcgtgccctccaggtcggtaacctttgcattgttttggctgatctcttctctttaatctctgtgttaaaccaatatcgtattttctgatgcagcattattcagagttgcctgatatcaagcgtgtcattgtaaatactcatgccattgagccccaggtttgtggtgttcagttatgttcttgaaatgtatctgttgttttcttgtttattaacaacttccttgcacaggcacttgttgagttctttggcaccctttcaagggagtgggcactagagtgcatgaag

SEQ ID NO: 190764 - DNA, 376 bp, Zea Mays
aagtttaactgctgagtgacctttcatcatcatcaccttgatcttattaagaacaattaacaaatctacaggtttatctaattttcaatggacaataacctttttctcgcggcctgttgtacatctacctagtgcagcttattccatggtggacagcttggcatgaaattgtgtctaaacaatacctggaactaagatatgtgctagtaattctgttctctagaaaatttgcagatggtttctgttaactgtgcagcacctgtgctatttgttggttgtatgtagccttggtgctataatttgcagtcaaatgagtggaaatttgtgagaatgcaatccatactatatgtggatctgtcaaagtgaccggcctgtt

SEQ ID NO: 190765 - DNA, 312 bp, Zea Mays
gtctccatgatatatgggcactacatgtgatgacatcatatttatggaatcagaaaatagccatgattgatcatagaactcttctgttaatcttttggcgggacgggagaggctgacagagaggcttaagaaattaatgaaggttttggacccaagcggaaaaggaaggttttgtagatattttactctgccagagtgtcattgatataacctctcttctattaatgtggctgtgtagaacacagtttaaataacttgcaaccggataaaagataaccatcttgcaatggaacacatcttattataaacaac

SEQ ID NO: 190766 - DNA, 371 bp, Zea Mays
gggagacggaggtggagactgcgatggagggagtgatgggaggctggcgccgagcgtcggcagtgaatagggcggaggcgctggaggggaagggggagaagactaccgcccgaagccggaggtcggacgtgctgtaggagggagatggtggcagtggtggccatggtctggagacggacccgagaccagaggcctccccggcgagcggcggatcggaggcggagagggtggtgggtccgctgctggctgctcagggcctggcgccgtgtgggggaagggaggcgacggacatggggtgttgtggtgggaaacggaggagccgatgaggggtgggaaggagcaagagaggtggtggactggtggttgacgag

SEQ ID NO: 190767 - DNA, 388 bp, Zea Mays
gacgtcaccagtaaccacctcaccggcaccataccgccggacctctgcgccggacggaacctgcagctgctcgtgctcatggacaacggcttcttcggcagcatccccgagtcgctcggcgactgcaagacgctcacgcgcgtccgcctcggcaagaacttcctgaccggccccgtcccggccgggctcttcgaccttccccaggcgaacatgctcgagctcaccgacaacatgctcaccggcgagctcccggacgtgatcgctggagacaagatcggcatgctcatgctggggaacaatcgcatcggagggcgcatccccgccgctatcggcaacctccccgcgctgcagacgctgtccctggagtcgaacaacttctctggcccgc

SEQ ID NO: 190768 - DNA, 703 bp, Zea Mays
tgcagataacaatacaacagcgagaccagtccacagggccggtgcaccagacgcttcgcgaggaagcagtcacccgacggacctgtcgtttgcaaaggaggatccctggacaaacaacgtaaagcagcgggaactgttgctggacgaggttgtaggtagcataacaggaggagctctgagaacctcctcctccgtccttggtatctccctcgtcagcaatacgaaagggaagagaagcgagagggaagggaaggggcacaaccgagacagcctcaggtccggccgtccgtcgccgtccaacgcaaagggtgaaaggaagaacaaaacaaagctcagacagaaggcagccaacatctctgctccttcaggaggtctacagcttccagcgaaaacaacgcctcccagcagtgggaacggcaaggaggagagcgcagcagcagcagcagctgctgctgccaggcatggtggtgatccggcggcgaatgcttcgaatgacgccgaaatgcccgacctggctaacctcgagctgccaggactggacgccgactttggcggctggttgaatctggacgacgacgacgccctccaggacctcgacctgatgggcctcgagatccccatggacgacatcaacgagataaacctcatgatatagccgtacattttccttcgtttctcacagtaacaaccaacagagaaaaag

SEQ ID NO: 190769 - DNA, 284 bp, Zea Mays
agtcaaatccatgttgatgcataaggtgtagggctactcgacaggccgataggctacacattctctcacttaggctatggccagcagatcgtgcatatagcagggtggagtttgaaatgagaggtgagaaggattcgcctagctcagggcttgccggagtagggctactcgacagcggcgtgctgcgcgggtcggatctcctccacctaggcattgtggcgcaccatggccacccgcagtttggcattgtctgacttcgcgtgcaattctgccaaacgccgctt

SEQ ID NO: 190770 - DNA, 329 bp, Zea Mays
ataaaatgcttcatgagatgaggtcttaggagaaaataatggggggggttaggagtttagggtttctaaccttgggatgaaaactgggatgttacagcgcccaaatcaacagaagggattgcaaggaaagtggacgtcgagctcacctcggttgggcgtggaagggccgacgacgcctgtctcagggtgatggcctcgacctcccactgcatcatcgtgaccgcgttgttgatgtctaaatagacgggggatcccaaggtggggtcccagggggtggcgcggaggaggcgccgaggcggttcgagacgtgaagcatgaggacatcgacg

SEQ ID NO: 190771 - DNA, 297 bp, Zea Mays
gtgagttttcttgctcgatccctaggtatttgacgtgttcctctgtctatgttgcttctgactctgaccatgtgctgcttctgaaggttgtgggaactccaagttacatgtgccctgaacttcttgctgacattccatatggttccaagtctgacatatggtccctcggtaagattgtatacatcaattttcagttgcatctattcttctgaacgttgggtgtctgtcatctttggctaaactcctgcaatgtccattctccaggctgctgcatctatgagatggctgctttcaagc

SEQ ID NO: 190772 - DNA, 925 bp, Zea Mays
aaagcaatcggtatccggtacggtttcttcaaagaaattgatgccaagaagaagcgtggtcaggttcttagagctcctcagtatctgaagcgtgtttgttatatttgaaaggctgttgtttgggcaaggcgaatcaggcaagagttgatgacgagcggctaaactaatccaagagttgatgacgaccggcttgttctttcacttgcaacgacttagagtcgggcgacctgcaagatcaaggtgcatggtcgtcgaaggatggcgacggcgtatcctcgttcaggcaaggcgaatcaggcaagcatctatttggaggttggttagttatcccatgtcatcagacatcacgcaggaatcaagtcatccatcaggaagcagccaactctgcctggactaacccagggcaaaggcaaacagcaaactttccaggataagtctctgacttcgttatactttcctgtgtgcaggaggtcttgaagatctggaactgcaggtgcagaatgctattgcagcagttgcagctccacccaaggaaagcaatagtgtcagcagcaacgatcctggtagctcgtcctctgtgatttttccgtctggtccagctgatcaagtccctgttcctgctacctctccagaaattgagccccgttttgcaaaccaaatccctgctgcttcttcggaggttaaggcaccatgcatggcaggtctgttgtttgtaagcgacaggaacgagaggaactttaggttgcctagcccttctgataattgtccatggaacttattcgaatctagccgtagcgcagtcagctttctacaggagtatatgctttccggaatcgtgccactgaagttattcagcatgagatctatggttcttagactgggcatattgctgaataactatagttggtagatggtctcgctacag

SEQ ID NO: 190773 - DNA, 655 bp, Zea Mays
tattgtgactaacatgtgttttacagagtatgtggtaagttcgggcacaatgcatggaattgcgcttccaaaaggtgaaaacaatcccttagatgaaacttgaaatgacgcctgaaaaggcaaatcaaaagatgatggtctatctatcctaagtatcgaaggagctgtgggacacttactatacagttaggacttttattttaactttggttgtactataaagaggggttgtggatgtgtagtttgaccaagagatgtctagtgtagtgtcggtgcatgtactcactcaaaactagtgctaggtgtcactcaatagcccacaaaagaattggaatcgaaatcgatttagaaaaacctgagttagaacaggttgtagctgctctggagcaaggactaagggggaacgatatccttgcgcgagtgctccaatgaggactagtggagagtgtcgactctccgatacctcgggaaaaattagaggagttttctagccctttctctagttttcgcatttacttttgagcacacaccccatgacgacttatggtttgcttagagtttcctagattttgtgatctatctaagtcgttgggtgaagttaggctctcgtttagggtttaatcttttgcaagaaaatttagagaagatcaatgca

SEQ ID NO: 190774 - DNA, 535 bp, Zea Mays
cataggaaagagctagtggatgcaattcaacatggattgtcgatactgaaatctgagaaaatgacctcaggtaatcaaccaaagatgccaacttatggtacacaggtatgacaacttcgtagtgttggctatcttcatgtattgtggatacttggctagattatgaaatgaagtttcatcttatatgcctgcaggtaactgtacaaacagagtctgaacgccagcttgataagattaggaggaaagaggaaagacgtagcaagcgcagtgcagacagtggcaataatgatattggtgttgatgatttttcatcccttcttttggcaagtgaacggaaggaggcatttgatgacgtgattggtagtggagaagggtcagacagttttacagtaacttcccttcctcaaggaaccacaaggaaacacatgaagggttatgaagaagtgaagattccaccaactccaacagcatcactgaaacccaatgagaagctggtaggcatatggtttcatccctcatctcctctgtatatgtg

SEQ ID NO: 190775 - DNA, 502 bp, Zea Mays
cagcacgtgaataataatatgcgacgacgcgcacgactcacaagagtcgctaatagacatcgcgtttatactaaacactaaataggtgttaaataccacatctaagtcgttaagatcacattatcacatatttacaatcgcctaactaaaatcataattttaatccaattgagtactcagtttactgatcgacaatcgaataggaaattaattagcgcaggggaatagacgaggtagacgggggtagacgggagtagatgggggtcgtctaggggtagacgaacggggtcggaggtagacgggcgtcgtctaagggtagacaaacgtcgtctaggggtagacggatgtcgtcgggacctcgacgacacgctgcgcatacgcgaaacaacgcgcgacacgcgtgagtcaacgtgactacgcgtgcgaacaacacgatgacgcgcgaacgatgccgcacgcgaacaacaacgaacaaataattaattaaaagtatttaagctgg

SEQ ID NO: 190776 - DNA, 1613 bp, Zea Mays
cttcacttgctagccttcctgaacttcctaacttggaggtattctgctatcactgacttgatcttagcagttaatttacttattttgacatagattaacatcttccacttgccattcttgttgcaccagttcctttctattgctcaaaacaggctaaagtcagtttgtatggctcgacagcctcgacttcaagtgagtacactgttctattttttttatctttctctccacctttaacatattcaaatcttcaatgctggccttacatcttttgagtctttttgtataggtgttagcagctagcagaaacaaaatatcaactttgaagggatttccacattttccttctctagaggtttgttttctcctttgagtctttgtagtcttgaactctttgaaagaaacatggtaccgagatattaaattgcttgcctcaatctctaggatcaatggggttgtatatttgtacaggcaggagctgcctattacaagagaaaccgtattcggttacagcatcccaactgagtctaagtgtccgtctctaattaaactggacgcatgccgtcctgtttagttttatctttacctctaaccagattcggtttctaatctagcctaagaggatcttggacaactaaggttgttgttgcctatggatagcatattctaacatcacccctcaaacataacttgcacatgttaagaatgaaaaccaacttttcaatagtcagtgccttagtaaagccatctataacttggtcttttatagatataattctgacctccaaaatttcttagctactatgtctcactaaatggaaataaatctcatcatgtttcatatggccatggaactttggatttgctgtaagataggtggctccaatgtcatcacatcagatccttgcaacaggaggataaggaacctttagttctgtgaaagtgactatactcacatcaactttaccatggcattagctatggctttatattcaacttcaatgcttcatctggagactgtgggctctttcgagcactccaagatactagatttctgccaagatatactgcaaagcctcctatttagagtctatcatctaagttacctgcccaatcttcattagagaaggcactcacaatccctgtacctccagcctacgggaattaattaattcctgtcggttgacagcctggccgcagtgaattacctaactcccgtcggcttgtccaaaagccgaccagagttaatttggtcgatgaggatttccctgattcctgttgtgattgggttgcccactaattataatgaaaactaattctgttacttttgaactagtacgatgttatggacgacttgtatgcattaaagggacaattccaactgtttatgaatacatgctaccagtctgttatggggttcaaataattaaaatgtcaagttcttgtagaagaatcatgcgattttatcaataatactgatataacttgatagcctggaaaagtatctcaccctggatattgaactgaccacagcatttgcgtgttgaggagaatccactacttgagatgccacacttggaagctgcttctatcctacttataggtcctacttt

SEQ ID NO: 190777 - DNA, 290 bp, Zea Mays
agagaaaggggtcattcacagattcaatagaaagataactattttttgcagcaagtaaaaagaatcaaggaaagcatatacctttggacatgttggttcttctaacaagtctttctctgaactggaaaggttaacataattcgcgaatttatttaccgctgtcgtaagatagttagaatcctttatgagatacctatggatagatttcttaacggcgacataagcaaatgaattgttattgacagctaatgatttcagatctgttagttgaccaggcttgagatcagggt

SEQ ID NO: 190778 - DNA, 349 bp, Zea Mays
gaactattgtggcctcactgttccctgcccttcgcaccggcgacgtggccgtatggccgtcatcggagtcgccgtgcttcaccgcggttgtgccacgctccaagcttctcaccacgtcgtcctagccacaccagctcaccaatagccgccgtagctcctcaaccggtgatcaccggaggaagcgccacggtgaaagccatatcttccacgcgccagtaccattgttctctccgaccgccagcacatcccggtaaaattgggcgccaccgccgttagaggctataaattgccaccaccatccgctcctttaggtagttacgcaaccagtgaagcaactcgtgcttcgaat

SEQ ID NO: 190779 - DNA, 421 bp, Zea Mays
cacgcagtgggtccgaacctactgcaaggaaagcaccggacccccgtacatgatgaactgacctccgagatgagtctcggacccttctgagtggggtccgtactactcaccgccggatcctgggattctggggcagagaatacccggaccctgctcaggaaggggtccgagggcgacatgtgaccagactcagcttggtgcgaacctatccacacaacgttcctattccctggctaggcgaagacctggtgcagccaagcgacctactatgcatgacgtgagcttgcgggatgggcctgacgtaagaccactgggccacgctgcccttgcatttattgtggagaagacgcgccacctgactaccccactgacaggcgatgtgccccttcggcatttaatgcgccctgtccactcaattggc

SEQ ID NO: 190780 - DNA, 460 bp, Zea Mays
cctttaattccacgttctgcgatcctgaaatgttgtggtgctttgagttatcaacgtatgggagagtgcatagggctcatgattttgcagtttcaaatcgccatcttcagtttccccaacagcactcaagtcaagttgtaaatagagctaatactttagctactaataacaggttagagagctacgaaactcggtagtataccacccaatggctatcttggttattctgtgttttgctaggaagaacaagaacatcagcagccatcaccatgaacttacactagctcagcgcctcgacttgcgtgggccgccacatagtcttcctgacgcagagcagcccctgcccctgcttggacacggtcatcctcacctcccagtgcaacgatctcgcaatgctctggacctccttgaccgtcgccatgtcgtcgcggacgatgagcttcccctccggcctcaggac

SEQ ID NO: 190781 - DNA, 322 bp, Zea Mays
gcgcgggcgcctaggggtcggcgatggcggccgcggcggggcggtggaatgtgaggagatgcgggtatgtacggagcgacacggaggacaggaacagcaacgcatttggcgaggctgacgtcatgctgaccgccggcgcaaggatggagtaggtggctgcagcgggtgtggccgtggtggagttgggagaggggggcacaaaagataagagggagtgggcggagggataggaagggtagccggatggattggctgttggtagaagatcggatggctgtcaacaaagagactgacgtggacacgctggttggcccgttttgcg

SEQ ID NO: 190782 - DNA, 1475 bp, Zea Mays
tcgtctacttcccccaaggccacagcgagcaggtgaacccacccacctcccctttctcggagcctgcccgccttacccgtgctgcgattcatcattcacggcggctccttcctcctcattggctgcctcttttgccatattttttttgtaaatttttttcccgtatggtctgacttgtccatgtgccgcgacttttttaaaaatgctttctagttgccaattcctgctttgatgctgtgcataggaatatcttaattcgaaataacggggccctttggggtcttgacagatgacagggccaagattggttcctgtcgaattttaaattgctaaaagtatcagggacgtgacttgatttgctgttctccatttagtttgtgtggtgctgccagtgccagttgacaggatccttttctgtttagggtgatcatcactattttgatgcacatatttttacaacaaaaaaaaagtgtgcaaaatctgtatcatatgcagttgggagcaatgggcccactccccccccccccccacacccccactccccttgtttcatgggtttctggtgtgctgcaccattcccctgcttgctgtttggtggatgcaggagccaagtacgactgagttttagcttttatagctgacgctttcagtaacctctgtcacgaatctcatggatttggtgccaaagaagtttgattcgagcaagtttagaccttgttcggttgcatgtgttgcatggatggaggattaaatctcttcctatttaatttttaaataggaagggatttaatctctccgatccgaatgcaaccgaacaaggccggcctcaggggtggtggtaggatgatcacatgctcggttctggaagagattctctggctgaatgcgagtgctgggaggtgcccaacttcggtttttcctttccttttcgctcgatggaagaaaacggaagcttttcagttatgattggctgatggcttcagcgcacatggtggttgtagtagctctgtgatgcaatgcatctgtgtcatgtgctgtcgaatcccaacgactttcggtcacacctttctcatttggcttctacagtagatgttagtttcgcactgtgctggtgttcagggattttcggccagatttacaacagtagttactggttctacactgtgcagcttacaggggctgtgtttgaggttgagtatgagatttagagttggctcttactgtaggttgcagcttctatgcaaaaggatgttgacggacatgttccaagctacccaaatcttccgtcgaagttgatttgccttctgcacaatgtcactttacatgtaatgttcagctgtgcccccattttaattgtcttctgtttgatcatttattaatttatatactaaaaggatttgttctgggggctttcgtaggcggatccagaaacagatgaagtgtatgcacaaatgactcttttgccagttacttca

SEQ ID NO: 190783 - DNA, 568 bp, Zea Mays
ggaagcagtgctttcaagctacgtttctatcccaacttagaagtacaaaatattgcacaagaatgggttaaagagagccggaggctgttctatctaagaactgccaacaatgtcacaaataacatctataagggaaacactcctctatggactggaatggtacaaaatgaactctctgaagattgcaggggtttgaactacacttatttgaataatttgagggaacgcgtatcgtccaaatcaattgtaaatagacatggtaataaccgagaactgatcgggcatagtacgataaatcagcatgtgaaatcagtgccagctccagtacgtgttgttaatgatagtgtcaagtgtttcagcatgcctagagcctctaaggtggagattccttggcctgcctattcaccagcggaggatcctttgcttgataaatctaatacagaggtaattttggagcttgaggataaagttcatgatggtgatgacaaaaagaaaaaaactgttgtaaaaaaggtggtttcacctttcccaactaaagcggccttctctgaggaatctttgaaagcac

SEQ ID NO: 190784 - DNA, 486 bp, Zea Mays
aagaaaccaaacatggccttagttagctgagattctccctgagatctctgtaactatcgcaacaaaccaggccaacatccgggcatccgtcgataccacttccccctctcgggtcgactcgaccccctctgctcaggatagacaactgcctcaccatatacggtcccagccgtgttcgtttacaacagcaactgtggcgtcaccgggatctttgtagctaccaactagggtggttgggtgtggaccgagccctccccttggtgttgaactccattgcgctatgcaactgaggctgcgacacccccttgccatagcagcccatcgcaaggctgctccatcgcgctatataaccaaggttgctccatcgcgagaacgcaccaacaccagagagctcaccgaggcggagagagagagagaaccatcgccgtagcagccagagttcctccaccccgaggtcaacgaggggttagggtgattcaccaggat

SEQ ID NO: 190785 - DNA, 458 bp, Zea Mays
ttttcgttttctttccacgcgagaagtatcttcatcatgataagctattatttcagatgatacaggtgggttttcaaatgcagcaacctgagaaatatcaaactgtccttcaacaggaacagaactaaggttgctattagactgagtcatctcataatctgttggtgctgctggaaacacttggggcctgctggacggaggcaacaggctagaaccagatgtgtgaccttgaaaagcataactaggcgcagcctcctcagatccatggagaagttgtgatcctgatgtgatagaaggtatcctagcatttgaaacttccactggagtgtcatagtagtgagatcgggttgccctctcatatgtatcacttggttgctcaggaaggaactgatactcatgaacagcccgtgatccaacatgaggttgaactatggctgaattaccaactggtgattttc

SEQ ID NO: 190786 - DNA, 292 bp, Zea Mays
tcaagctagggttatgcgctggtgtaggtggcgcgtggggtcaaaattcaaattagtgggaatgacaattggttgtggctggtaaatattctttcttgcgtgtcccgtttgtgctaggctgcaaattttgttctggagaggagaaccatttcgtcttgtggattcccccaattgtttggtttcctaggaaagggcccatctttcaggcaaatgagacggctttcagtttcgtggctctttcctatgtgtgcaggcttcggttgttggttgtggcatgttttgtttggtgctt

SEQ ID NO: 190787 - DNA, 315 bp, Zea Mays
acttttcatccacgatcataaacatacgcatttagactacaacatcccgaacgggtgcgagaacactagtttctagtttaaccccaggattattcccttaatcaatttaactactcaatcggcatcgaccgacttaaccttcatctcgacggtccgagcaccataattcgagaacgtctacctagacatctagcatcacatgcagagtctactacttcacgttgcaaatcatacagatccacaaggtgacaataataacacacaagcaatcgacctttctctacgaccttcagttaggtcaccaaccgacgacat

SEQ ID NO: 190788 - DNA, 306 bp, Zea Mays
tatcaagtttgggtgacaagagacaggcagagctgcagaaacatgaaagaaggacaccattgaagactgatcagggcaaagcaatcgattctggccaacaggaggttttaaggttgcaagggaaaaggggtgttttaaggatattgccaaagaatgataaggtgaccagggatactggtgatggtaagattctgtcaaggcaaactgaggtggatgaggagactggtaatggcaggattccaacaaagcgaggtgttttaaagctcctgccgaagaacaatggtgctgtgatggagagtaatgaat

SEQ ID NO: 190789 - DNA, 379 bp, Zea Mays
ggttgaactctcaatgaaaggtggcaatttactgataggaactattttggggtcactagaaattgaagaccagtattactatccagggagtcctgtgccaaggttcttggcaaggtcttttattaatagcatgcaaactcaagaactcccgtctcttagccgaaagaacagtgcaggacctagaaacaccccattgatgaaaaatgacagtgaggaaaactttttcgaagcatcagatgattttgatgaatttgaaacacctatgcatcaaaagaggactatatcagactattttagcacccagaaatttttgcctactagcgttccttccctacagccgccaacatttaagcgcattcctgatttgataccagatact

SEQ ID NO: 190790 - DNA, 345 bp, Zea Mays
gggtatccactcagttcggtcgcaccatccggagtgtccagtgtgacaacgagcgcgagttctataacaatgtgtccagtgactttttcctctctcgcgacgtccacctctgtatgtcgtgcccctacacgtctcctcggaacggtagggctgagcgcatgatttgcacagcgaacgatgtcatgcgctctctgctctttcaggcttcccttcctactcacttctgggctgaggccctcaccactgccacctacctcctcaattgtcttcccaccaaggtggttgcccaccccactccttacttcgctcttttcgacatccacccctcctatgatcatcttcgtg

SEQ ID NO: 190791 - DNA, 480 bp, Zea Mays
ccaagacaatggcagagcgggaagcattcctggaggatgtacgccatcgcctggagcaggctcaggctgtgcagaaacggttctatgacaacaaacaccgggcggtggcctacaacgtgggggactgggtcctgttgcgtctccgcaatcggccggtggcgtccatgtccctggcacagaaggggaagctgcagcccagattctttgggccctattgcatcacggaaatcatcaatgacgtcgcggttcgcctagctcttccaccaaaggccaagattcatgatgtgttccatgtggggctcttgaagaaatgggtgggcgcaccaccaacctctaccccggagcttcctgagctgctccatggaaaggtgatacccgagccggaacgggtggtgcgtttccgcctcgcgagggggataaaagaggtcctggtgcgttggaagggtcagccagcatcagctgcaacttgggaagactggg

SEQ ID NO: 190792 - DNA, 502 bp, Zea Mays
atataatgaaagtatacctttactgcagcaaaaatatgcttcatagatgtctcactaatgtctgtccatttcttcactctcaccggggtaatagtaggatcacggacgattctaccaatgtgtcgtgcaaatgatgtgccaagagcacggttgttgtagaacatcactttaatcttttgtcctggtttaagtttagcaagattcttacatttgtttttgccacgaccccttttctcttcagttatatcaactggaacatttatatatactttcatcaataagttgtgtcccatacaaaaaaaagagaaaaaaatgcagaacgtgtgaaattatatttgtatcataccagtttttgcagcatccatattattgttctgaatatgtgccctgcaagagtccctccgctcttcattatcagcacttgtgtaggtatccatattattattctgaatatgtgccctgcaagtgtccctctcctcttcattattagctctggttaagg

SEQ ID NO: 190793 - DNA, 325 bp, Zea Mays
cttctcacggacgaagtggatgtcaatctcgatgtgcttggtacggcggtgatggaccgggttggctgtcatgtagacggcgctgatgttgtcacagtaaacgactatggcgaccttcaaggaaagatgaagttcctgaaggagttgtcgaagccaacagcattctgcgaccacatgagcaacaaccctgtactcggcctctgcactggaccgtgacacggtggtttgccgtttggaggaccaggaaatcaaattgtcgccgaggaagacacagaagcctgatgtggagcgacgggagtctgggcacccagcccagtcaacatcg

SEQ ID NO: 190794 - DNA, 477 bp, Zea Mays
ggcctatcccctgatatatacttcaactcttcaagctgcattgtgctcttagagcgaatgctcgttaaggcatgtagcgagatcactggtgctgggtcttcaggagtgggatcggtctccatagatcttcctcaaaatcagtgtcctcgagatagaacaaccgagggcagcgatgtccctggacatactgctcgtcacaattgtaatagagcccttgccgacgacgcttagccatctcacccgaagtaaggcgcttgaatgtccatggtggtgcaactgttgtgacactgttgatgatgttggctgtttgactggaacatgcattgatggccgctgaggaggtttcatggctttattggaagttgatgtttgatggttgtcgaatgattatcttcgttcataagctcttgccaggctcaaggcatgattgaggtcccatggcgccatgagttctacatcaatcttaatacgttctgg

SEQ ID NO: 190795 - DNA, 391 bp, Zea Mays
ttcatttttaccatctacttgtttcattgagtaaagatattaacatattatgatgtcatgtactgtctcatttaactcatgtgggtgataatttacatttccttttccagactaaactaaaatttggttgttggatcatgagttcatgactacctcatcatacatttgaagcttctcttatatcatttcatggatttagatgtgtgccataaccaattctttattattcatctgataggattcaaggcttttaggtgaattgcatgtttctctgctgaaatctgttataaaagatattgaggatgttgcccggactccttcagttgctttaggtgtaaatcagagcagttctgctaatcctggaggtggtcacccacaaattgttgaaggg

SEQ ID NO: 190796 - DNA, 375 bp, Zea Mays
aataatctaacacttgtgacatattcatggttttgacttatgtgattttattttattgctatttcattttcaaaccgaaatatctatgaatgcgccaaaggtaaacttgtcctgtttagtaggttgcaaaatcaaaaatattgtttcaataaccatgtgtagttgaccaaattttacaagaacactcttggacttcactctattctgatcaagttgaagaaacacttaaatgagtttgagtgctaaataacttcaatgctcaatttatttcattcggtcatatttcatgcaaatttgatccccctaatctcaaagaaagctagaaagcagaggacagcggctcgtgctctacctccaagacctcctgctgcgtca

SEQ ID NO: 190797 - DNA, 632 bp, Zea Mays
cgagggtcgtgcatgtgaaggcagatctgctgtactgcatatgcaatgtttggccgagtgaaagtgagatactgaagtgccccggcaaggctgcaaaaatctgtaggatcagccactggatccccaacgatgctggaaagctttggattaagatcaactggagtggagcaggacttgcacttagtcttcccagcgcggtcaagaatgtcaatcatgtactgctgttgggaaaggaataatccacttggtgtgcgctgaacctgcatccccaggaaatgatggagttcaccaagatccttcattgagaattccttctggagggatgtgatggtgcgtcgtagaagactggtggaagaagctgtcaaaacaatatcatccacatatagcagcagatataccatatcatcaccgcggcgaaaaacaaataaggaggcatcacacttggtttctacaaaccccagcgagagcagaaacgtggcaaaccgactgtaccaagcccgtggggcctagttcaaaccgtatagagatcggtttagtctgcaaacgaagtctgggtgagcagcatcagcaaaaccagagggctgagagcagtatactgtttctgacaaagtcccatgaaggaaggcgttctt

SEQ ID NO: 190798 - DNA, 1123 bp, Zea Mays
gaaattgctaaagagcttctccatcgctgggaaattgaaagagatgaaagggctcttgctgatgatgaggagtggctgagacggaagttgaagcttcattgtcttggtttggcctcgctggtcagaaccatcgcccgtctgcgttctcggattttgtatattcaggagggtgatgccaacacctccttttttcatcagcaggctagatacagaaaaaagaagaatttcattcctaagctgcacgttggtgatcaggtggtcacctcccaagaagataaacagaaggctgtttctgatttttatgagaacattttgggtagggctgaggagaggagctacactcttgacttggatgagttggccatccacaatcatgatttatctgctttagatgctccatttcttgaggaggaggtgtgggctgtggtaaaagatttgcctccggataaggccccggggccggatggtttcacaggtcgattttataaatcctgctggaatattattaaagatgatgtgttgaggtctttggatgtcatccagcgtggtcatgtttccaaattccgcctgcttaacacggcttatatctccttactgcctaaaaagatggatgctgttgaagttaaggatttccggcctataagtttgattcatagttttgccaaattggtagctaagctcatggctactcggctggcccctttgcttccctcactggtttctgtgaaccagagtgcctttgtgagagggaggaggattcatgacaattttatgcttgtccaacaaattgtgaagttgctgcataagaagaaagaaccacatatccttcttaagttggacatctccaaggcttttgactctgtttcttggtcgttccttttggaggttttaaggaaattgggatttggtcagcgttggcgggatctcctctgtttattgctgtctacttcttccactcagattttagtcaatggagagcctggggacatcattattcatcgtcgcggtctcagacagggagatcctctttctccaatgctctttatccttgtcatggatactctgaactctttaatcaactatgccacttcgttgggtttgcttcaacctattgctgttcagc

SEQ ID NO: 190799 - DNA, 353 bp, Zea Mays
gttatcgcaggtgaaggaatccaagggcattgaacgatgcctgaggagggagcgggtattcaatccgtctttgagcaataaccagaagaacattttgtgtttaggttgacatttagatttccataaccaagagaagagagggtgcgactgttgggtgccaatcaagtgagcatagaccttctgagatgaaaacagattggaagagccactgcaacgccaaatatcattgtgatcatgcaattggaaattagcaagaatgtcatgaaaagaaagaagatggccaaacgcttcagcagataggggagtgtggaacaattcattcggggaagccaaccgagcttgatgaatgttaa

SEQ ID NO: 190800 - DNA, 382 bp, Zea Mays
aagctttgtgttagccagccaattaacgctgaaacaagcacattaaaggccttattatcaactgaaccctcttgttacctgccgatcaatattcttagcaccgtcctgcagatcagccacattactgcagctctccttggcctcaacctctgccttcactggaggcgcagaggggtgtgccccctcgagcaggaggacggccctcctgatcccattgagcctcgcgtccctgggcacttcgttcatcacggcgaagggttctccgccctcatctctgaccctgaacccgacggcctccaagagctccatcccgccttccctgtccgccaccgcctctttgatccgcgggttgctcagcctcacccgcctgaacttgtcgttc

SEQ ID NO: 190801 - DNA, 328 bp, Zea Mays
gcctctatgcaattccctactactgtcgggacgacgggttcaattgtagaaaagggtaggggctaaactgcatactatccgggttgaaggggtatccatgtacgagggccgatgataaatctgtggtcagaattagattctcattgtaacgaaccataacgctataacgaccgtcagatcaaggtcagactatccggatcacaggcgcggagggactcgaccagagttgcacatcaaccaatctacgaccctgatcgggtcggatcaacgcggcaatccggttctaatccacaccgtctatcaccggatcaatgacttgacactaatc

SEQ ID NO: 190802 - DNA, 332 bp, Zea Mays
tgtgtggtataaattcttcaattttagagaatactagggctgtctccaggaatcttagtcgcaaaagtgactgtgggagtggcagtgtttccagtactgttgatgtactcattccagaagttattcaggtctatctgccagtttctatattgtttgtcataatagttttcaaaaatcaagctatcatcgtctgacatactgttgttttgtgtatcagtcaactggcaaggttctaattttggaatatatggatgggattcgtttaaatgataatgattcattggaagcatatggtgttgacaagcaaaaactggtcgaagagataacccgtg

SEQ ID NO: 190803 - DNA, 611 bp, Zea Mays
agctttgataagccacttggtagatacctccgggacgacttatttgatgaggtacatcccattttcatcttgagtatgtgctgccatgttggacttctcataatatatagttttgtaaacctaatggttaacacttttcatatattcatcaggcatatcgctgtcagtcatgcaaagagccatcagaatcacatattaggcgttatactcaccagcatggtagcttaacaattagtgttcggaggcttcaatctcgaaagttgcctggtgagcgtgacggaaggatatggatgtggcacaggtgcctcaagtgcaaacctaaggatggtgttccacctgccacacggaggataatcatgtcagatgctgcctggggtctgtcgcttgggaaattcctagagctaagtttctcaaaccatgcttctgccaaccgagttgcaagctgtggacattcactccagagggactgccttcgtttttatgggtacgtgtctgctatattctttacagtatcatattgttctgtgctccagtgagatctcaacaattcaaatacaactccaggtatggaaacatggtggcattcttcagatattctcctgttgacattc

SEQ ID NO: 190804 - DNA, 2501 bp, Zea Mays
ttgtgttacctattgagaagcgttggtgaggtatttgcagttacagaactctagtactgactttggtgttttcatattttattgcaacatttattaaaaaggacctgtccaattactttgtgtaaagaacacaatgggtaacaatgtgacatgggcagctgaaatcgaggacctagattggtggggcccaataaggtcaatattgtatgcacacattgggttttgggaggatacatgataggatataattcttacttaccttaaatacactatacacttctttaagtaacaatcaggatgcttgactttatgaagactttgccaaaatgaggccctaaaagagatggttgactttacgaagaccttgccaaaattgggaggaacctagctgccttgacttgaaaaaagttaccatcatagcttccaggattcgacaccatatttctccagacccctgcatgattttccaaatctatttgactagaagacaatattgatgagcttagtgttaataatcctgtgagaccaggcgctgggtcggactgggtccagtcaccgagggggtgggagacgttgagctggcccctggaaggggggtggaagccggcgaggggctggtggagaaggggttggggaggcgggcgcggttgggagctgaggagtccatgaacctagccattctaatagagacaaaacccaaaagtccaaggtatgttattgggagattgcctagaagacagttcaacatgtttgcaattcttactttatcctcctgtgtgtatcaaaaaatagactttgctcctgtgtaagtttattttgggaccagttgccattcaaaacaataaagaagttttggatttctgattgagctgcaatttccatctatcatcatcgtgtcatcagcgtatggaagaatgcctactatgtgtacatgacgtacagatttctccaacatcaccactgagggcatcagcaactaggttgaagaaaagcataggggagaaagaatctctgaagattttgaaaaaagggcttcggctaccattaaaatgaatgtagactttacccccataacagtatccattacgatgtttatccaagtttcagggaaacctttgccctcatgacctttttttttctcgaacacgcaagagagctgcatatcattatattaagaagagaataaggtccaaaatagaccaaaacagtccaatacaaactaaaggcacctcatggtagccagaaaacaccatacaaaaagggatccattaagaactaaaaagactactcaagcctgggcctggagccaagaggagggagaggtttttagcccctgccaattcccaaagcactctctcctcatctagccttttaaaagcaagcgctaagcttggagagtgtctgtcaaaaacacagccatttatgtggttccaaattgtccaaaaaccaagaataatcaaagaattcagcccctttgcagctaaaccctgcacattatcagctatcttccgccaccattccattgcgttcccctagtgtctgtcaaaaacacagccatttgctgtggagcaaggctttgaaggctaacttgcccaagcaaagtgaaccagaattctcttgtaaagacacatccaactagaagatgatcaatggtttcaggttctcgatcacaaaaagggcaacattcagggtgatccaaccctcttttatgcagccgatccgctgtccagcacctcctaagagcagcccaccacacaaaaaaatttacattttggtggagcccaagagggccaaattctttcccaaagatcaaaaagggttgagccaaaaaattgaccctcataggctgccttggctgacacagattatcttccaagtcttgctgcagcacaacagtttgtaagacgtcccagagggtaaggaaatcagaaatgactcccactgttatgactggacgccactataggcgtcgtggagcagctggcgacagcccagcctaggcggccaacagtagttagagaagatttaggagataagatttgatctcttaagataaggattatgagggaccgtctctagcccagtttcctgttccagtttttgttactactcaaggcctgaaacctccttggtttcagcaaatttgttaaaattatcaaactgcttgactaggatctgttttcttcttttctgttctctcctaggccatgggccatatgggtcattgtagactagaagtctagaactatgtactgtacatgtattactacaattgacattatgttcactctggaaatattgaaatcttttctggtcaacattttcactaatgctatgtatacatggcatgtactgttctgcaggttccagctgaattcaaggatgttcttgataacacagttgttgcagcattgtctcattcttctgctcatgtatgttgtgcacacaatttctgttatagcacatgctgttgaaccattatacttgttcagcaaatacat

SEQ ID NO: 190805 - DNA, 1134 bp, Zea Mays
ttacgtcttagtcgacatatccttgaggaaacttcaaaagggcgagtatgtttcattattttcacatgctcatggataataacaaattattatgtggaaaattgaatgttccacatgcttcagttttcacttggataccatgtaagttctagcttcgttagttttctacagattgctgttattgatcctatgaaaaagcgggctgcaagatctggtcagggtgtcccacttggtggtattgggtatatcttcttctctttgcgtaatatgtgtttcctgtaaatattgagtgtatattcatcaaacttttatgttaaaaggtctaccaggaaacttatgttcaccagatttaccgtgctcttactgcttgatactgtaaagagcttgcgaattccctatgcatcactttgttgctaaacatgtctgcatatcatttggtagttcaagtgtcatgaagaaagaataagcatattatatttactttattgtttttaaatgaagctacctacattaattctcacctgccatattaaacactacattggtaaatcaaggttgctctcagcaactcagccatctgttttattatttcccctttcggtagtggtgccactgtgccaggggtatcaccacactgaaatatgcaggagtgtgtgccctactgggcagaaggttgatataaataacagtttcaagtagtgcacacactaaaaatgttttcctcttgttcgatgaagcttgttgccatatttatgtattttcctgattgttggaaatgtagtgcaggaagtattggaagaagctacaaaggcgatttccaacgttggcaattgtttccaggatcttgtgaagataatgctgtattggcaaatcaattttctgtaagtttctagttttctccattatttatttctggctgataattttcttttgtgtctgacgattcttggaatttgagatactcttttctaatgcaatctcacttgtactggcttaatgtcctgaggtgctgatgcacccttgtcagacttcgagtgtataagaaattgaaagacagtactttaattaatgaactatggtgtattgtgatgcttctcaagctcttatctgctggattaacacatgcattagctg

SEQ ID NO: 190806 - DNA, 439 bp, Zea Mays
catcctacaaaacacgaccctggcctcttcaaccagtccacactttgcatacatgttcatcagagaattgcacacaaacacagtggagcagcaaccaaacttaattgattgagcatgcacgtgctgcccaagatcaaccataccctggctcgccaccattgagagaacactcgaaaatgtgaacggattgggccagaccccctcagcacgcatcctgaagaagagtgacataacatccaataacactccagcctggatgtacccagtgagcaacgatgtccaggtgacaacattcctcttgagcattccctcaaacaccttcctgccgtccagaacactgtgccagttcatgtacatgtcaacaagagacgtgccgaccctgatgtcgccatgatcatgtccacacctgacgcacagggcatgcagctgcttccccagt

SEQ ID NO: 190807 - DNA, 321 bp, Zea Mays
cttgaagttcttgaacgtgcaggtatgatagactgtaagccatgttctactcctgtcgacatgaatggcaagctttctggtactgacgggccaccggttgatgatccgactcactatcggggtcttgctggcgcactgcaatatatcactttcactcggcctgacatttcctatgttgttcagcaagtttgtttacacatgcatgatcctcgggaaccacattatacgttgatcaaacgtattcttcgctatctgcatgggacattggatcatggcttacatcttcgccccacagatgtttctgctttggttgcctactct

SEQ ID NO: 190808 - DNA, 846 bp, Zea Mays
cgagtgtgaacagttgcgcggtccgatgaagactgggaattgaaacgccgcttctgcagacctctggaattctggtcactttcttcattcttacgctctggatctggtggcgtcggcgaaaaatggagaggaggaagcacttccggcgagttcccggggcgggaaataaggattgaaattgggtaaaccaccgtgcgtggggggagacgggtcgtcgccaatcaggaccgaaggttcctccacgtgaagatccaataatgaaggcaggtcttcaggattatcacaccaaacactcaatttgaacgtagacagatcagaaccgccaacagagtcaaggtgcagttcatgaacaaggcaatgtccaacgagaagctgctcggctgtatgcaaaccccacaaatgaaacggaagtccgcggagctcaatatcaagccgatgaggcagcgtccctcccccattagccatgaattgacgggaccacctcttgatgtgcatccgaagaggaggaacgtagaatgactgacctccactgagccaccgatcagccatctccacgttgggaagcaaggcgatgaaggtgttcggtgcaacccggcgaaggtcgagcgcattaccctcaagatcaaatctcgaagcgagcgcatcggagacctccgcggcacagccagaacgccccatgcccacaacggagatgacaatagcgctctgcaggtcatcctcagcctgggcaatcctcctagaacgtttgaagaagcagcgccggtacgggggagggggcagagaaatggcgcgaacagcctccggtgggggttggggtagcacatcgggagggacgctggtgtccac

SEQ ID NO: 190809 - DNA, 366 bp, Zea Mays
caacgagcacagaggatgcaggtagaggactcgacggggacgcgacggtgtcggcccacgcgggagcggcgagagtggggtggtggtcagggaatcccagtggggaggattaggtgcgctgctacggctgttggtgcgcagggaagcccaaccgagaggggtggatgtacatcgctgctgctgcggggagccctcgacagggaggagaccgaccgctgagaagagacccaaggtggggagaaggccggctgcagcggtgttggcgacgctggctgggaccgcggctgcaggggctaggtcgtccgcgtcgatggttgcaggggctagggcgcctgtgtccggtgtcgtggcgacggcgcgctcggc

SEQ ID NO: 190810 - DNA, 288 bp, Zea Mays
acgacttgcaacctgtcatgcttgcgcgctcaataatatcttccgtgtatgtgcgttgggggagaaagaggctgtctgggcgtcactcgacggagatccccaagaagtggtgtaacagcccaagatccttcatggcaaactcacgatgaagagccacaatcgtttgctgaaggagcgaagtggtggaggcagttaggacgatgtcgtgcacatagagcagcaaatatatggtccctgtctgatggaggatgaacaacgacgtgttggacttggcctaagtgaaccctg

SEQ ID NO: 190811 - DNA, 2067 bp, Zea Mays
cttctatcttcaaaaaagacatgtcttcatgatgatgtgcttcacatactatctatgcatatggatccaatactaccacttcctcgacctaggatgttatcagttaaaaatttcttagttctttcagacttaatgctgttccttgttttattctcagactcctagaatttactatttttttttctgtgcctaggttctttatcatgtgctaagcactgttcctgcctatcaaccttcagttgggcctatgctgaatgagctatgcctaggtctaagaggccatgagttagcacaggttgttattttgtagtctgttctccagcttatcctattttattttatctagtgctatgtattcttacctcttccttttttcaggctcttgtcggtgtatatgcaaaagaactgcatgttaggcttgcctgcttaactgctataaaatgtgttcctgtgcactctgtgcaacgagatttgcaggtgtcaacaagcctctggattgctgctcatgatccggagaaggtttgtaagataacatccctgtgaacttgacttggaactcctctatttttttacgttactcatgtgggagcttccagcactggttctgccctttttagtgaaatatgttgaacttttttcattctagagcaggaaatgatgtttattttcttgctcttcggctcatgtaccttctctaggtggttgctgaattagcagaggaattatgggaccgctttggttttgatgccatcactgattactctggtattttcaatgcactttcccataaaaattacaatgttcgtgctgcatctgctgaggctctggctgcggcattggatgaaaatcaagacaaaatgcaagtaagtcgcctacaatgcaaattttctgttctgtatttgcaccccttctgctactatatagatgctcaagggttttgcaagacgagcaaaggcacatttaaacaccgacattagtttaattattactattgggatgggatgttgttttactcttcgtgaagacatttgaactggacatggacccactgaactaagatggcatgtagggacaaagaggtaatagcacatctcaaaatcatagaatgacatccatttaaaagctggaagatataatgccgtgtatttgggtacggtcttgtgtttctactgtatctttaatttcacattcaaataaaacttgaatagaaccacgttgatcggagattttttttgccaatttggagtaatttctttttattgcgggtgtcatattatttcaggatgcactttctacccttttctctctgtacattcgtgatattggcactagtgttgaatttggagatgcacactggctcggaaggcagggtattgcattagcactccactctatcgctgacgttttggcctctaaagatcttcctgttgtcatgacatttctcatctcacgcgccctggtcagtagtttgctttgtttatgtggatcttaacattgcagtgccacttatatttaacttttaatgcttctcatggtgaacttacaggctgatccaaacgtcgatgttcgtggtagaatgattaatgctggcatccttattattgacaggcatggaaaggaaaatgttcctttgctatttcctatttttgagagctacttgaataaaagggcaagtactactttcctattaataattgtactaatataattcaatatactacattcctattaataaatttattaatatattattgtggctctttgttttcttatttgctatgtaatccatatataacaggcatcagatgagaaaacatatgatcttgtgagggaaggtgttgttatttttactggtgctctggcgaaacatctatcaaaggtgtagatggatactgaactatcttttatttacaagatacattcacagtactaaatatagcatttgtaacaggatgatcccaaagttcacagtgtcattgaaaagttgttagatgtccttaacaccccatcagaggcagttcaacgtgctgtctcagattgtttgtccccacttatggtatccaaaca

SEQ ID NO: 190812 - DNA, 623 bp, Zea Mays
gtaattagaaaatagtcacgacgttagccaatagtcaagcttatgtcgaaatttaaaaatatgggcaattcgagttgaaattatgcttatctaggcatgtggattaataagaataattggaggaacagtcattcaaattggtcattccaattaagaataattttgcgtgtgagttgaggtggtgacatgccaaagtagtcactgcttccctatgtttataagtcgagtcaatacccattaggcgttcattaattttcacgtcgcacatagtgtatggttgcactcgtgacaaggaggtgtaggtcttactcaattagaagtttggatggatgtgataagtagattggaagtgtgggtttgttgagcactgtgttgctggacgtgtatgtcgaagtacgctgtagtagtaattgcgttaacttgaacaagagtctcaagtgcatgccgtgctatggttgtatctgaggtagtaaattataagagttgcacgatatgaggttcgatcgatgtagttaatatggattggactgtaaagaggtggtgacatctcgaagtagtcatcgccttctctccgattaagtcgaggtcatgtgtgatgacgctatttacgtggtgaatgtgtt

SEQ ID NO: 190813 - DNA, 333 bp, Zea Mays
aagaaaggctcaatcttgtacaatcttgtaaaacctctgattgatgaaggtattgccaccgtgctgctgtaagttggggagaatcgatgcctatctgccaaaaccatggtggttggtgcttagttcatggcctgggctgtcacatttgagggcactgacaattaggtctacaatgggttatggaacactgattttacatttgaaatttgtagtcttgacctctcgaggaaggctaagcatcacagctttgtaggccaattttgctacttaggaggtgaatggaggaactttccatctggatcttacatagtagcttctgatactctaacggac

SEQ ID NO: 190814 - DNA, 406 bp, Zea Mays
caaggcgaccttctcgcagacgaagtacatgtcgagctcaatatgcttattgcgacaatgatgcactaggttgaccggagatgtgaagttcccgtattagttgtcgtaaccagcagtacttgatgatggcatgggcgatgacacggagctctgcctcgacactagagcaggaggcacccgtttgacgttttgagtaccaagagatgagattatcacaaaggtagacacaataaccggaggtagaacaccgggaatcaggacaaccagcctagtccgcatctgtgtaagcagtcaaggtttggacttggccgtaccgaggtgaaggtcgtaggacaacgtgcctgtgatgtacctgaggatacacttgatcaacacaagatggggctcatgagggtcatgcataaaa

SEQ ID NO: 190815 - DNA, 406 bp, Zea Mays
ttcctacccacgccacgcgtgtgttcttggcagccacccaatccccgcctcgcgaaatcagacgccaaatccccttatcttatcatcaaatcgatcgccaacgggcatgatctgatggctccctcatcatagcctctgctgctgcaccgcagcaaaatggccctggtttagtttagtcctcaagatcccgcctttctggtgctctgtttggctagtgtcgtgccgccgcgcgaggacccggagattcgattccggtccggtgtatctctaggctgcttggtttgggttaggatttagtgggcagggttgtgcagctggtgtctcgtggaggaagaatttcgtgggaggattttgaccgggtttgggcaaagagcgcgccgttcgggaggaggtgattctcgcgtgg

SEQ ID NO: 190816 - DNA, 386 bp, Zea Mays
gctgctatactgtggggatcttttttctgctaccctaacatgaaaggtgtacatcaagatagtttgtcactgctgaggaagttaatcatcaactttgatcggttgcttgaagtgggagaaggtgattttacttgaagatttctttatattactatcactgcagttggtttttctaaatggcataaattcaaaggatttacatgcagggaacatgaatggtcttccaatgactacctggagaggtctacttggtgcagcattgtcatcgtaccacaaactactgttggtcaacaccagcagaaattcagaatttagttttttcttatcgcttgccaagagtcacagtacatgcccacaagtactgtctgctgtagctgaatatttgg

SEQ ID NO: 190817 - DNA, 272 bp, Zea Mays
gctagtctgaagcagttcccgaacttgatgctcgatttcgtctttatgatatggggaatatttgtaaggtctggaattcactggaatggactccagaatgattggtatagcatgatcataggctcgaacaggaggcaactggactggctctccaaacacatcctgaaattcagttaacagaatctgaactggcgatgggacttgttgggaagtatccgatattgtggcgcctaagaccgcaagcgcccagatctcatttcctttcccccact

SEQ ID NO: 190818 - DNA, 498 bp, Zea Mays
tcagtgtaacaggcgcccaccttaaactccagatcttggtgatggccatcataaaaccgcctagcatgttcctggccctgtaggagtctgtctccgacctccgcgagaaagcagtcccgttcgtgaaacatttcttctatagttggtgtagctgctgctccttgctggtatgggatgagtggaggggggtctctgtcatagaccactttaaacggggttgtcttcagggctaagtgataagaggtattgtagcaatattcagcccaagcaatccagtcaacccaggccctcggacgatcccctgtgatgcagcgcagatacatggcgatagttttattgaccacttcggattgcccatcagtctgtggatgaaaggctgtgctcatccttagtttgacgccggctagcttgaaaaggtccctccaaatgtgtcccgtgaacactgggtctcagtcactgactatagagcttgggaacccatgcagtcggacaatctca

SEQ ID NO: 190819 - DNA, 1538 bp, Zea Mays
gctttgagtcggaggatgacgaggatgatgaagaggaggaggacgaggagaagaaggggaggaagaggctgatccggaccgtgccatccgtcgactggttcgacgtcgaggggaacgaggtctccgtcgcgcagcagctcgacgactccgaggtgaggggggggggggggggggggggggggcacgggtgttgtttctgttgcgtgatcgagatgaatttcctgtgctcgtgcgcttacaatggcctgggtcacgtgctgatttgcttatttagagaagatgaacttctggattcgtagttaatgatcaggtgggaagggaaatctgcataaattgaccttttggctaagattgagcgcagtgcaacggcacaatcacacatgcacgccaatttactcctccaacctgaagttatatcacaaagatttacatgtagttgattaaaacaacgcagatagtcttgctagagacaacattggtttggtccatacaaagttgagtacatatgtgaaagcagctaacgaattgtaaaagcaagctgggcaacatcaaaactgaacttacagacacgtagtgtaaatgttcaataatgttccaggtgggttttctgcaatatcatcagctaattcttttttcaaaagaaaacagtagccattgtttcaaacacctgtacttaacaatgatttatttgactatatatcttcaaatgaacctgaattatgatatcaactccctcaatttgaaatatatcacaaacacaataaattctgtgggataccagatacatgtgaaattcctttttggacgcttcaggaaattaggtttggtgtacatggttacttcctaatatgttcctgtttgctgaagaatgtttgcaactgttgatcatgtttcactcattatctttcatatggtttagttatttcatttacatgtgcaggagtttgattttggcaggacaatgtttcttgctcttcagactcttgctgtggtgtttggagatattggaattggtccattgtatacatttgatgtcatgtttaacaagtaccctattcttggagaggaggatgtccttggagcactctcactagttctgtatactcttatattgatgccattagtgaagtatgttttggttgtcctttgggccaatgatgacggtgaaggtatatgggaggttgtgaattgagttaatcagattcaggctttttccgcaaaagtgtgtcagaggcttacatcttccattggttccatgattctgcaggtggtctatttgccttgtattctttgatttgtagaaatgcaaaagtgtgtctcattccaaaccaagtacagtctgagaagaggatgtcaagttttcgactcaagcttccaacaccagagcttgagagatccataaaagtaaaagagaaacttgaatcgtcactactgttgaagaaggtgcttctaggcttagtcttgtttgggacttctatgtttatatccaatggagttatcacaccagcaatgtcaggtttgctttttttcattctctc

SEQ ID NO: 190820 - DNA, 641 bp, Zea Mays
cagtagcattcacttttgtgtgacaatgccataatgctacatattgctttggtgctttctctttttcacacaaagatcaatctaacctgccatattatgcttacatcattaaacttcattatttcagtaacagtttgttgagtggtctttgcaacggtccatatcaatcagttgatcctgctgctgtgctggtgtctagttctagtgctgttggtgataagtctggttcaacagccttggctgatcttacaggtggtcttccattcaaagatgtagtcgctactatagatccaaattcactgcaaccattgaaaccagcaccaccatcagatcctgtggttgtatcttttctcaactctcacagccttggtgacgttggtgcttccagacaaactattggaatcaagaagacatcagtagaacataaggtggggcgtgatgtatcaacagacaaaggtatatactagaattcgcctgggctatttcactgtagtttaagtaaactttaagatattttttatgaacttttcctccttatatgtactgttaggctcctccgaacaatctgtgcaatcttcatttcgacgatcctctgctagtagaccatcttccagctacaacagtcattcagaacaatccca

SEQ ID NO: 190821 - DNA, 284 bp, Zea Mays
gaggaaggtgagccagtacaggggcgtgcggtccaatttttgggtaaatttctgggtcttcatcgtgtattttatggttcgttgatgggtttcctgatggttgatgcacgcctgcttggtggaggcgggaatggtgatcgatgattcgttgggtgggtggggggactggctgacagctgacagctgactgtgtattgtggtttggatggcaggtttagcgtcagtaatagctaggattagggttcaggcgatgctaagattttggggcgccaattgcagaatca

SEQ ID NO: 190822 - DNA, 408 bp, Zea Mays
tgacactgcatttgagaagcaaagttcgttatttgctcttgcaatttcagatatagttctaattaacatgtgagtcaccctatatgatatttgtgatgacttcccttatggacttatttgttgaacctttagttttcacacttactacagactttttgttatcactatgtgtatgtgtataggtggtgccatgatattggccgtgagcaagctgccaataaaccactcctaaagacagtatttcaggtaccgatgttaaatttctgtcttccaggctacctttatgcacagctgatatacatagtcctgatcatctgatgtgttacttggacatctgagtttgtaggtcatgatgcgtttgtttagtcctcggaagacaacactgctatttgttatacgtgataaaac

SEQ ID NO: 190823 - DNA, 479 bp, Zea Mays
gacagtggataagacgaagaggttggccaaggtgtatcaggagatttcagagaagaatagaatgaagcatcaaaaggggctggctctgaaaactcaggttacaggagtaaggggagataatagggcaggaacattgtatcctgagttgagcaaggagaggcagttgagagactacagaagagcaaatgggttgtgttttatctgtggtgataaatttgaaccaggccatcaagcaaaatgtcccaagaggttggtaactcaactgcataatctgacagtggaagatatgggtatgattttgactgatgaagtgttgcagaagttggagcatgaggagaagtgagtggaggagttacatcaattatcctggaatgctatcagtgcacagaatgtgatggatgcatgagggtccaagctctgattcaggatcagatgttggtcatgttgattgattctggtagttctgcaacctttatcag

SEQ ID NO: 190824 - DNA, 408 bp, Zea Mays
cgtgggccgaatacacctacaacacggctttccaatcgtcgctccgggagacgccgttccgcttggtctatggccgcgacccgccctccatccgctcttatgagcctggtgagacacgtgtggcagctgtggcacaggagatggaggaccgcacgacttttctcgccgacgtccgctaccgcctcgaacaggcctaggcggtccaaaagcgtgtctatgatcagcaccatcgtccggtggagtaccaagttggggactgggcactactacgactccggcagcgcccgacagcatcactaccacggacctctaccggcaagctcaagcctcggttcgttggactgtatcgcgtcctggagatcatcaacgccgtggctgtccggctcgagcttccgccaggggcccgcc

SEQ ID NO: 190825 - DNA, 660 bp, Zea Mays
tgggcgcggggttggcgccgggtccccgcggatgcgctgcgcagggggaggctgtggtggtgtccagctacgggcagggccgcctctcgctcaagccctacgactggacctacctgcgcggtgagacagtttcagggttctataatctcggttttggctttcttacgttctccttcttcggcaaagtttcgtccatgttataccttttgtttggtgtaggtggatgttagttttttccggggggtttgcacgatttttttatttcgttttttgtgataggatcataggaatcgtggtgatgaaactagctgttgtggaatttcaccgaaaacgcgacacacgtgtcgcggaattctatttgcttaacagttcggtaggttctgtttagtttcggcctttcagatgctactttcccgcagctgtggaattttggtttagttttggtgttccgttctgacacgtctttgctacaactgaatactactgtactgatttgtctcatccgtggaaattctatttcattcattccttttttctggatcgatcttttaatactctacttcctgtacgaacagttgagctcccgccgtcgttctcttctgtcaccatggatttcgctgctgacatagaccttgtaagtgaaagattctgtcatctcgg

SEQ ID NO: 190826 - DNA, 1125 bp, Zea Mays
tcgggctgttctgagcatcgccgcttcccgttcctggccgattcgccagctggacgtgaagaacgccttccttcacggtcaccttgaggagacagtctactgtcagcagccgcctggcttcgtcgatccagcggctcctgaccatgtttgtcttcttcagcgctccctctacggcctgaagcaggcaccgcgagcttggtaccagcggttcgcctcgtacattcgtcaactcgggttcactgcttccgtctccgacgtctcactctttgtgtacaaagagggtggggacatggcctacttgctgttgtacgtcgacgacatcatcctcaccgcctcttcgtcaactcttctccagcgcatcatcgacaggctccactccgagttcgccatgacagatcttggggatctccaccacttcctcaacatctccgtcgagcgcctccccaccgggatcttcctgtcccagcgacagtacgccgtcgaccttcttcagcgtgcaggcatggccgagtgtcactccacgacgacccctgtcgacactcatgccaagctctccgcgactgctggtgctccagtcgccgacccttccatgtacaggagcatcgtcggtgctctccagtacatcacgctgactcgacctgatttggcatacgcggttcagcaggtgtgccttttcatgcatgacccgcgcgagccacatctggccttgctcaaacggatcttgcgctacttgaagggcacgctttcctccggtcttcacctgggcgtcggccacatccagtctctcaccgcttactcggatgcggactgggctgggtgtcctgactcccgtcgctccacttcgggctactgcgtctacctcggcgataacctcatctcttggtcctccaagagacagactaccgtctcccggtccagcgcggaggctgagtaccgggcagtggcccacgctgttgctgagtgctgctggctgcggcagcttcttgcggaactccatgtgtcgattacttctgcgacggtcgtctactgcgacaacgtgagtgctgtctacatggcagccaatcccgttcaccaccgccgcaccaaacacatcgagatcgatattcacttcgtccgtgagaaggt

SEQ ID NO: 190827 - DNA, 335 bp, Zea Mays
cctgtacggctcagctcagccgagctgagatcacgatgatgcgccggtgacgagcattgccggatatgattgcctacccggctaccgatgcgtttatatcgcgtgccatatgcgtacgtgcgtgcgtatgcctgtatcaccgtaggtgtgcgtcgtcatcgtgggatccgagtacaccgcaactccgaattatcaattgacaggggcggcggcacatgtccatttcaaggctgtgtcactgcgttctccctcacttctcgttctaatccggagagggatagccatcgttactcgttaggtcgtgacaactccctatcgcagtgtctgcttttgga

SEQ ID NO: 190828 - DNA, 272 bp, Zea Mays
gccaactagtcgatctggtattctggtcgacgactaatcacgactagtcgactgctcggtagctatatgactaggttcgactagacaacttgaaaacattgttaactcgaccgagcgacctacaaagcctcaactagacccaggctgccaaggtgttttgctccagcgatgacccaacatcctaattcatttaggctgtccacagcagatcgtgtaaaattgggggtttgcacttagattataggagatgtaataggatagcttctggagac

SEQ ID NO: 190829 - DNA, 392 bp, Zea Mays
gtagagcgcagatcgaatggtctttttcttcagcggtgtatttactctctggatcattgatcgtgcgggtatagccggttgtaaaccctgctctacacccgttgatcttcagtccaagctgtctgccggctctggtccagcagttcaggatgctactcagttccggagtttggccggtgctcttcagtacttgtcgttcactcgtcttgacattgcctatgccattcagcaagtctgtctccatatgcatgacccctagaaaccacatatgactactctgaagtgtatcattcgttaccttcaggggactgctgaccatggtcttctccttcgtcgttcctcatctgtcaccgagcttgtggtatatactgatgcagattgggcgggttgtc

SEQ ID NO: 190830 - DNA, 303 bp, Zea Mays
tgggatgctctttcatgatcttcttctcatcgcggcccgtggaagagccttccagctctcttcgacctctgatggtactgaaagtccccttgtggctggtggtggcgtcaagagtaatcgatagagaccggaggcactcatgcaggttagtgacagccttaagcagtgtgtccttgtccttgacattgataaccaccccgagctttctcagctgccatagccttccgatgccttccaagtctttgtcactcttcaccctgacattggatagcacctccatgtctgacattttgtcgatcttcc

SEQ ID NO: 190831 - DNA, 392 bp, Zea Mays
cacccacatagcattggaaaccctgtaagtggtaaaatattccatgcattgatccaaccatactacaggatcaccccctgaaaacctgggaaaaggtaacttgggtaaaccctgataatgtggatccaaagactgtctgtcttctccctgcatcctccctgaatcacctttgaaagctctaccaccctccacctccttctgatgacgacctctcgtatacagagacccactatgctgcacctccaatgatggtgaaccagaaccccagaagattcacctaattccttccccaactgttccaacctcatctgtgctactacccttccagtctcctccaatttaagacccaaatcatttctctccttcgcagcctgttcagcaactgatgccgc

SEQ ID NO: 190832 - DNA, 945 bp, Zea Mays
gtatttgccttatgttgcttgacatcttatttgaaggggttgataagatggaaagcaccgaagtccaaactggacgctgattccagatagtaacaccaggaacattctggaggtttactgttcaaagatacacaccataagctgggtgtcaatcgtaacactgtgaatttgctggaggtattgtagtgaaatgcaccatatattttatttcgtcaatctgaattagttgttaaaacatcttatgcataccagtctaccgcagagattacatacttctggttgtgcaatggtaatgactgatgagttccacttgggatgacatatggctgctgctgttttttctctctcgcacacacaagagacttacacatatattaaggaaaaaaggtgtttagaacccgtacatgcccaacatactcacaagctttacattgaacacacactcgtctttagaaacaaaaaaacacatcaccttgacctagagataacggcctctagttggcgcaagggcagctaggtgattcataccttgggccccggccatgctacatatggctgttgcgtgctcaattaatagttcaatataatgttatttctcaattctcaaaagcattttaggttgctctgattgaattctttactccatgcactctatttgtttgtagtttgtctacaatttatcttagctaactgactaacataatacagagaacatgagaattaaggaggttgatgtgggagtggtggcaatatttgacggtcataatggagctgaggctagtgagatggcttctaagctttttctggattacttcttgctccatgtttattttcttctcgatggcatacactctctgcggttcagaaaatctactgggaaactgacatatagggaagttactatttttaacaatgtatttaatctgtacaagcatggccaatccg

SEQ ID NO: 190833 - DNA, 471 bp, Zea Mays
ctcgatccgaatcacccgctggtatcttttggggcgtgtctccggaccactagccgacacttatcgaaaggagctcgaaccccagctcggattatctgataacaactcaacggaaatgtcttgctcgtcacccattgagggtagcatgacgtgttcctccttcctccttgcggagcggcgacgaaggggcgtacgaaccaaaagtcaagacacacctcgatcgacctcttgccccgtgcaaaggctcgggggctatcctcgtaaaactacgctgaaggttccaacaggttgggcgaagatcaaattgaacctattaagagcaaaagcccccaaaggaatcaactagtcattcgaggcctcaggggctacacccatcggaaaccaaacgtcctactcctcaagaaaatgtggcacgcccacgagcaagcagcagagcctccaaacaagtactgaagtactgccttggaaggc

SEQ ID NO: 190834 - DNA, 1499 bp, Zea Mays
ttgtggtaatctttcaccgctagctatcataaatatagctggcatgttagcaggctgggcggatttcaatatgaatgactgggagtacgtaagcaagtgttgtacatcaacagcaaatcttactaccgaggaggcgacggagagatttctgaaccttatgtacaacaagcttccagccaaattgaagacgtgcctgctctatctcagtatgtatccagagggctgtgtcatcggaaaggatgatttggtgagacaatgggcagctgaaggtattttcagtcaagtggtggaaccaaaaggtagagaacatgaagtgggttttatttattttgatgagctcctgaaaagaggattgatccagcctgtagatacagactacaatgatcaagtgttgtcatgtatagttcatcaagtggtactggaatttattacaaagaaatcaatgcaggaaaacttcatcactgtcgtggattatcgtgaaacagggacagtgcttgatgataataaggttcatcgactgtctgccaggtttgaaggtgccaaaagtgcacagataccgcggagcttcagagtacgccaagttcggtcctttatgttttctggattcattaaatctttaccttcccttctcaagtattgccttgtccgagttctgattcttcatgtttggagtgatgatcaaggcaagactgtggttctagacctttctccagttggtaatatgcttcatgtaaggtacctgaaggtggtaagcaacatgatagtcaaactcccactcattattcgaggcctgcgacacttagagacactcgaggtggatgcagaagaagtcgctgttccactggatgttttcatcttgaagagcctgttgcatctccgacttccgagcaaggcttatcagcctgattcagatattcaaaggattgatttaacaaatacatttcctttaagatttctgcccttcgtcagagcgttgtcaatgctagggcggtttctcctctcccatggccatcggattcgccatttgacatcacttcaaagtcttggctactttgacctaagcacttgctccagatatactgtgtggcaacttggcaagctgaccaatttgagggatcttcatctaacctgctctgcagttcgttccaggcatcgaattagcaacatccaatgccttgcctctgttctggggaaatgcaccagcctcgaatctctaactatccgtggcgaagcatcttcaaaccagagcatttcttttgatggcttaagcagcttgtcttctccaccgtacaacctcgtgagctttgtgctgtccccgaggattttcaaaatggcgaagctcccaaagtggattgggcaactcagcaggctcagtacgctaaagattgctgttggcgagctgtcaagtgaagatgttgacatcctcaaaggactctctgccctcactgctctttctctctacgttcggagaaaccctaagaaaggaagctggatcctat

SEQ ID NO: 190835 - DNA, 561 bp, Zea Mays
aaggtatgttaactatactcgtgtgtcactcatctttaaagtaatgcttttcttatgtgctcttgggttagtttgtagattgcagcatacttgcacacaaagagaataataatcatcaaagcattgacactctaggttattatgtttctgtgttatgttattgaaagacgaaaattataacaaatgtgccccaatagtgagttgagctctcatcattcaacctataatatatacacctaagagctttgttactttcaactttaaggcgcatcagctcagaccggtcatcaacatgattctaatccaagttcagaagttttagatgcaagggaacgtaagagaattcgagaacagattcgatttgcaactctaacaagggaacaaagggcattgcgtaatactaaaccatgtcaaaagagtgcaagggaaaactatagtagaagacaacaagaaatgctagctcaagactcgatcgccattgagaatccgaagtttacgccggagcttgtgtggagttcagcagattctcaacctcctactgtgtctctatctagctccaag

SEQ ID NO: 190836 - DNA, 430 bp, Zea Mays
ggggcctaaatatatagagtaatagacaagaagaaaggaaaaggaaacaattggcagcacataaactagctacagcaaccaggtaacattttgaatggttaattatggggcaactcaaaatgtggacatgtggttaccagatcacaacacctgaggaagttaccactgaactgtgtgtattcagatctatacacccttgttttaatgttattttttcaactttcacttttagacatgcaagtaataattaagacagtggcattggagttgtcacctctacaagtactattaaatattaatacacatggaatgatgtgcagagctatatttcatctactagcacaaaaagggattgccacttgccaccttgtcctaaaaatccatttaatagggttcttgtaaaactctatttagtctggtatactcaggc

SEQ ID NO: 190837 - DNA, 504 bp, Zea Mays
attggatttaatgacagtgacatagggggcgatgtcgatcgtaggaagagcacctttggcatggtcttcttgctaggttcttgccccatctcttggcagtcgcagaagtagcagattgtagctccacttgtgaggccgagtacattgctggagcagttgcagcctgtcaaagagtctgactgggacggttgctgagtgagatcactggacaggtagtgccgccactggttctcaggatcgacaacaagtcggccattgaattggccaaaaatcccgtccttcacagccgcaacaagcacataaatatcaagtttcacctcatcagggactgcgtggaaaagggtcaggtcatcctggagcaaattggaacgggacaacaactcgcaaatgtgttcaccaatccactgggaaagatcaactttgagaaactcaagacccaggtgggcatagtggagattaaacaagagcacccacattaaggggaagagatgttagaattaatgt

SEQ ID NO: 190838 - DNA, 846 bp, Zea Mays
gcaatatggagtatttgcagcctaccatttggcacttgaaacatcattccttgtggatgaaggtgcaactcttccagaactccctttgaagtcgccaattattgtagcttttccagacaaaccttccagtgctgatagatctatctcgacaatacctatcataccaatccctagtgcttcaccgccaaacagttgcctgcaagcatttggcttgcaaaatgatgatctgacatttgatggcactaaacgaatggaacaaacagcattgggagttccttatgaacaaacagcatctgttcagatcaatagccaaaatggacatattaccggttttctggatatggtccctcaatcatctgttggtcccttgtttcagcagtcggacattcactgtcctgatggtactggaggtgtgaacagaaaaatgaatttacaaggcagcctacctggaaccactagaaatgtgttggttaatgactttagccatagtgtatctactgctcatccgacaaatttggtgtcagctaagggtgacggttcacttgccaagaatcctgagattggtgacaagatagcagataagccggctgcccctctcaacgtacagatttctcatgacgatgagagcataaagaataattcagttgcaaaaacagatgaaattccagcatctccagcagaaaatcagagtatattagtttctttatcctctcgttgcgtttggaaagagagtctgtgtgagcggccacaccttcttcgcataaaatattatggtaactttgacagacctttaggcaggtttttgcgtgaccagctatttgatcaggttagactgagctcttccac

SEQ ID NO: 190839 - DNA, 418 bp, Zea Mays
aacctaggagccagatcactcactctttgacccaagagccatttgtctatccagaacagagtgcgggctccattccccacatctgaaatcaagacagtggagaaaaaagcttttgccttttttggaacttggataggaaataacaatcatatgacactgaattttgaacggattattgcaaataagtctttgattaagttgcataaaaagggaaggacacaaacatatttcaaatttggtgcaaaggtcaagggaagtacccccaaaagaacattccatgtttctaacaaaatatcaagggaatctatgccccaggtttcctcttcactctggttattcagaaccgacttgacagcttctgacgtcaaagcagaaagcagattaactgtaccatagggcctacaaagtgcaagcatgt

SEQ ID NO: 190840 - DNA, 296 bp, Zea Mays
agagaatgaaagcgagccatggcgacgaggcagtgagcactgagctgaggatctagctggggcacagcagccatcggagttcaaagagcttctatgactccagacaatccaggccaaatcatggatttttactgttcttgggttcatggatccaaccatcagaacccatttccactttgtctaatcgacgaaaggcccttggtgtcagctagtatttgaactttaagatcagctaacctgttgtgcttgcttgctaataacagtaactattaattgctaattgcacatattctccg

SEQ ID NO: 190841 - DNA, 498 bp, Zea Mays
gaagtgcatgtgtgctgatccacgataactgtaacctgcgcaaaaaaaatagtaccattgtgagcttccctaatttcatcaacaatcgaaagtacaaacaatgtgtgctaaaacaatactcacaacgatagtgggagacccgacattttgtagccttgcattgattctccatggacaatcacctcctttgcaataacctcgatatctccaaggtgagcttgactcaattcctaactcaaactcattattaatcgcatactgcctcatagccagtctgaattctttcatatccttgtacaaactaccaatgttcattatcggattagatcggttgcaaacaaatacccgttcttgtggtacgcaatcagtacagggcaatgcagctgtttcatcatcaaattcatcgcttcggcggacaccagatggtctactggtaaaagcatcttgcctttgagtagtttcacgttcatcttctgctagcaatcctaaccgatcaaa

SEQ ID NO: 190842 - DNA, 318 bp, Zea Mays
gttgcaatgatgctcatgtcgcattggaagttgctcccggagccttagctaaggcacctttgccttcggtcaccgggcctactcaatcttctgttaaaggtgccttttcgcattctgacgaggtcaactattcggctcccatccctgaaagcgtttcgcccagccttccactggctatagttactaggtcgtttgctatacccggttgcaggcgccttttcgattctaacgctggctactcctctcttaatgttgttgagaaaactctttcgtcttcattctctcgctctcaacaatgttgcggtttctccctgctgc

SEQ ID NO: 190843 - DNA, 452 bp, Zea Mays
aaaacagagaaatactccaaacaattgttcaaccataccataggatctccttcagcgtacttcggaaagggtaacttcggtaatggaggatgatagggttctccatgtggacgcggttcgacctgtcccccttgcatgccccccattggccctcgctgttgttccattcgttcttgccttggtctgacagcaggacgaactggtgcatgttgatgttgttctcttgtcgtgtttgcatcagatgtctcaccgagatccttgcccatctgttccagccgcagttgcgctatcaacttctctgtttcctccatcttttggcccatctgcaccctctcggtcgccgcgcgctccgccatcgaagcagccaactccgaccgaaccatcaactgttgttgggcgcgttccacttccttgagccgagcgcaaaccgcctccagagtctccatcatccg

SEQ ID NO: 190844 - DNA, 513 bp, Zea Mays
cggctcgccttccaagcccgatctcactcccgacggatgatgccgcccgaccccactcccttcctggtgccccgtcttccttgtcgtcgccgtgatgctagctcgccttgcaagcccgatctcactcccgacggatgatgccgcccgaccccactcccttcctggtgccctgtcttccttgtcgttgctgtgatgccggctcgccttgcaagcccgatctcactcccgacggatgatgttgcccgaccccactcccttcatggtgccccgtcctccttgtcatcgccgtgatgccggcttgccttgcaagcccgatctcactcccaacggatgatgctgcccgaccccactcccttcatggtgccccatcctccttgtcatcgccgtgatgccggctcgccttgcaagcccgatcttactcccgacggatgatgctgcccgaccccactcccttcatggtgccccgtcctccttgtcatcgccgtgatgctggctcgccttgcaagcccgatc

SEQ ID NO: 190845 - DNA, 446 bp, Zea Mays
gtgccctcgtcttttttttgttgatgaagtaatctggcagtctattgtaccatcatgaagttgtccggaatgaaacgacctttaataaaagcgcacttccttagggagactaaatcatgtaacttttgggacaatctattagccatcagtttggtgacaagtttagcaatactgtgcactaaacttataagtcgaaaatcttttacctctttggcaccttccttcttaggtatgagagttacataagctgtatttagcctaccaaattgcccaaatttcctgctcgaaattgcagaaattacagccatcaaatcctctctgatgattggccagcacactttataaaacctttctgtgtacccatctggtcctggcgccttatctgatggtaactgctttataatttcaaaaacctccttttcagacattggtgcatccaaatcagc

SEQ ID NO: 190846 - DNA, 274 bp, Zea Mays
ttatgatgacgacgtctaccattacctctcataccttgtcgattacgtgcaaagcgttgtggcagcggtgcataaacatcgttgtcatcgttgtcgtcgtccacaggagagtgagatggggctggagttgttggtgggggacgagcctccagtacgtccatgcgtgtaacaagtttatcaactcgtcgatcaagctgctcataggatgtcgtcgcagagtcctggtatttttaaaagcttcagtcatcgcgcgcatcatctccttcaattccag

SEQ ID NO: 190847 - DNA, 390 bp, Zea Mays
agccatggtgccatcacgacacaataattgattgccactgattccagcaaggttctaataaatcttgtagatgcaacctcgctttgcctgccgccgccagtcttccgcctccgccacacacaaatgtccagtttctttgctgtagctgtagctttggtgctctcatctctcatccatggaaccacgatggccacagcgagcagcgaagagagcttcttccagaagtgcccagcgtccaggtgcagcgaaggagggccagagatccggttcccgttccgccttgcgaccagccctctgtcatgcggtgcgcccggcatggagctggtgtgctccaaagcagacaccgtcctggttcacccaaaccttggcttgtgtaaggtaactgccatc

SEQ ID NO: 190848 - DNA, 425 bp, Zea Mays
ctagagtgtactgcaatgagacttttagttcggtggtcaaactggtgactgtctgcatggttctctccctagctctctctctcgagactggcagatacatcaagttgacttcaaaaataccttcctatatgccacgctcagtgagaaagtctactgcaaccaacctacttggtttgtcgattcatctcagcgtgacctggtgtgctgcctcaataagtctctttacgaacttaagaaggcaccgcaggcctagtatagtcagtttgcctcatatctgctctccctaggatttactaaggccaagtccgatacatcgttgttcatcttttgctgaggcacctatgtggtatacttgttgctatatgttgatgatactgtcctcataacttccaaagccaagcttctgtagtgcaccattgtggggg

SEQ ID NO: 190849 - DNA, 277 bp, Zea Mays
cggtcgtggcatctttggccgcacactcagacatctggaccgcccccaatgtgcaccttcacaacctccatcgctcctctcaccgccagaacgccctacaggctgccccgactatccctgcttcagttcctatggccagccaccacacattggacatcgtccctgccacttgtgcgccgacctctgctgctaatgcaaccatgtgggctccaccctcctcaccgaccttaaccgtagcattcaccactaccaaggtcgatgtggtcgctactcggga

SEQ ID NO: 190850 - DNA, 383 bp, Zea Mays
aagaatcctaaggctcagtgaataactacacaggactgcgggttggttttctaataacccaaggtctcttatgcaaaagcgatcgacgaaggggtatccacggatctcagccgcccgatccacttcctacggttcagattaggtttaggtttaaatgaagcggtatgcagtcctgatccttggatcagagatcgacggtctctactccatctaaccgagaccatcccgcatccatcggattctcgatctacggtcacggttggatgcagtcgaaacggtatgaggatctaatccaatccgtccaaaacgcatccaacggccaggcgtctttctcccctacccagccgcacagccggcggcgcgcgagtacaggcgcggcggcg

SEQ ID NO: 190851 - DNA, 305 bp, Zea Mays
cgctctggcacgatcgtcgccgtgcgacaggctgctggccaaacgcgcgcgcgatagccgaggggaggaggacgtagaggaggggtaagccggctgcggaattcaccatgaccaataacttcctcacgacgataaagagcctgaagctgatcgagggttgcaaagccgcacaattatacgccttaagctccgttggggcagcctccacgtccggctcgggggatgccggagggagcagcaacggcaagccccagcctcctccgccgccaaagaccatctcgatgcggtccggatcgctgtactac

SEQ ID NO: 190852 - DNA, 279 bp, Zea Mays
atcacacacaacagcagggacaggcggtacacagataagtgataatagtgcttgaatagtgctcaaaagtaccttacaaaaagcaaaagtattacatctgccttcaattggagtcctagctcatctctactctgcaggaatggactactcttcaccaatagggtcacgttggaagctagctccgggcggcctcaccagtggcgacaaccacctctacaccgagcaactcgtcagcggtgatggccgcctcaatgcgtgcgccatcacaaagaggtcctt

SEQ ID NO: 190853 - DNA, 486 bp, Zea Mays
gaagtaattggttctctgtctatgcctattggacgaggagcaaccatgttgaaacgagctccttctatgaggatgattcagcatgtttctgatgtcaaacgggtgctaacatgtcctcttacaaagaaggtaacaagctcttgctcgtcagtttggaagatatttggaattcatgttgcattctttgttgactgatgttcagcccatactgatcaaaaagcacattttcatcttgtagggtcagatacctaattttgaggacaggaaaaaaggtggtgttttagtactctcaagctgttatgtggaacgttctactcattcatatttccagaggttgaaagacagtataaacaatgtggagagcgacttctgtataggacttagcccagatggtccatgggaaagttttactgcagctttgccagtgaccgtccttccaaaatcgcttaataataaccgttttgcatttgaggtcactatgaggaa

SEQ ID NO: 190854 - DNA, 311 bp, Zea Mays
agaaggacacaattcacctccaattaccggaatcaatgtcagacatccacaatgtgttccatgtattccagctccaaaaacgcatataagtgctagaaacccatatcatagaatagccaatccagaagatctgcagtctcgagaaaaacgactgaaaatcttggacctagccgttcacaaaacccggaacttagaggtaagggtctataatgtttagtggggctaagaaggtgaagaagaagcaacctaggaaagtgaggactcaatgaggaaggaatactcttatcttttctcagacccatcctgaatct

SEQ ID NO: 190855 - DNA, 360 bp, Zea Mays
ccaaacgacaatggaagatcctctctagcaattaatcggacaagttcagtgcgtgcaacttcactagagtactcccaacgcaacagagaaccatctggattgtacttaagtatagactgagtgccagtgcgctctttcttaaccttacaactatccttgtgcctaagcaagtgcccagtcccagcagatgatttagcagagaattgttgtttgcagtgatgacaaatggcatgagttcttaccctcttaccattctcaaagttgaacacctgttcaaagtcctcccagactggagaactggaggccctcttcctcgttcgcccctggttatccgtgcttgcctcggtacgggtcgcactg

SEQ ID NO: 190856 - DNA, 666 bp, Zea Mays
atgacattggttccatcacttatggagataatactacctaccctggcggaaaaactttctgatggctgtaacccacttaagatcctaatatttagtggggaagttctgtctgtatcgctgtggaagagagtctatgaatttctgccagaggctactatcataaatctgtatggaacaacagaggtgattatgcttaatatcactactaatgaaatagatttttgcagtatcatcttgttaggcttatgaccaggagtgctttggtaatttgtttgttttacaacattcattaaccattaaatccccctacatttacaaagctgtgggattttggacaagatacttccaattccaagtagacttagtctgatatgagaacatgtctagattgaccaagtcaatcggtaataattttttttattaaaaacactagtatctatatttcatgaaatttattttcatagttctattagagtacatgttctctgtatcataccatcatattgcatgagcaattttaagattttgcagattcacttctatttcaggtttccggtgactgtgcattctttgattgcaaaaaattgcctacaattttggagcaagaagaactaaacagtgtaccaattgggtttcctatttcaaattgtgaggtttctcttgtca

SEQ ID NO: 190857 - DNA, 335 bp, Zea Mays
caaaagctagtttaatatggttaccacataaattatggagttaacaaaaccgttattgttatttttatttgaatttcacacatatattttataattgaaatcaagtcgcatgaatttatacggtattaaccacatacactagagggagcatacaaaatttagttagtcttataccttacgacaggcgacgagcagagcgaggatggagcagggaacgggcgattgcggggtcgttgggtgagctcgagcgcagcgatgatgaactgtgacgacgtcatggcttcgcgaataatgctccggtgtgggaaattcacgaatagcagggcaccatggtg

SEQ ID NO: 190858 - DNA, 437 bp, Zea Mays
aagccataccatagagctcatccaagaattcatccataatgggaacagggaacttggtcttggccgtgattgcattgaggtgacaataatccacacaaaagcggtaagtgctatctttcttgcgaaccagaatcacaaaggaagcaaagtgactcttcttgtgctggataagacctgactccaacatttctgccacttgtttttcaatctctatcttaagcgcagggcatagcgatacagatgcatctgaactgggcgagcctctggaatcaggggaatgtggtgatcgtagtcacgtgtgggagggagtcccttgggcaaatcaaacaccgaagaatatttgtccagtaatgcttgcaactcagctagaagattgtggataagtgtttgttccttgtttgacaggtcactgatactgcataactgaacaaaagcac

SEQ ID NO: 190859 - DNA, 400 bp, Zea Mays
tgttgttgttgaccttttagttactataggttgagattgagccaagaagctaaaaacattaggattaaataaaccaattatttaaagagaaactctggatatatatggaccttccaaagtgttttgaagtcagtaccaagtattaatacaagttgcataaaatagagctgcctgctttgcctgctcctccaccagccgttgcctctcctcctcttctcgtatcatcctctcctgttcctcttcttgctttcgagcaacttctctggccctttcctgttcttccattacccgttgtctctactgctcctgtaccctcaagatcctatcaagctctgcctcaaacgactcccttgctgggtcatgaaaatcagctggtttagctgcttcttttttcttcttt

SEQ ID NO: 190860 - DNA, 481 bp, Zea Mays
tctctttgtactgctgagccgtcaggtgaatttcctttgccatattcgcgtcacaatagttcccctgacgcttttggtacaccgtgacggccctcaatcgtgctttatacatcataccctttacagctctatttgctgagccattgaatacctcacgcacatatgaatcatccaaggtataggggtcgcacacgcgaaattggccctgcaaatttgaagatcaccagagacttacaaatgcaaaatctgaattcaatttgaatatcacaagggacttacccaaaacaaatcccacactttgcttgtgtgtgtcccgtcgttcccgtacgacttgagatcccaatgagcccagtaatgagcagctatctcttgaccgccctctgtcaccatcgccgggtaggcgaatcgcaaacaaatccccaactctgtgaggattggtgtgcgatgccctgttccgtcccaactaacctccttccacgcc

SEQ ID NO: 190861 - DNA, 295 bp, Zea Mays
cgacgagctgattgctgattatgtggattgccttatgtctctggacaccaacacccggcctgtccacagcgatggtctcatcctcggtgctccaggcgggggaggagggacggtcgatgccggaactgagccagatgccatgagagatatcccctcatccgaggaccccaatgagcccgtgctcggcatgacgtttgagtccgatgaggccgccaaggcattctacaacgactatgccaggcggcttggcttccccttccgcgtcggcaggtctcggcggtcgaagggcacagag

SEQ ID NO: 190862 - DNA, 307 bp, Zea Mays
atcgattcacgatgagacagagaagggtggtggagatttctcaacaagaggaaaggatggacgaccagtggaccattggtggcgaggacatcgatgctttggggatggagaggaagacgatgctcctcctcctcggttgttgtataggtggtaatcgtgtttgtcgaggactcctcgcttcgggaaacatccatgtgcataaccaaggggaaactgacgaggtataatgtgaagggaaactggtgtgcgatgcgagcgaaggtgcacgaatgtggcggggaaatgtggaggatgaagcaacagttgg

SEQ ID NO: 190863 - DNA, 379 bp, Zea Mays
gttctcgtagcacctcacatcacttataatcttctttctgttcgtcggttcaccaccgacaattcttgttccattgagtatgaccctctaggttttctgtgaaggatctggccactaggacccctcttgcccgctgtgacagctcggggcccctctacaccttcggccttcatccaccggtgcgtctccattgtccgtcctggtctccaccacctcctccatcacttggcatcgtcgtcttggccatccaggacccgacgtcatgggcaaactcaccagtagcttagatttttaatgtagtaggggacattttgaggatctctgtcatacttgtcagctaggccgacatactcgtctcccattcactacttctagagct

SEQ ID NO: 190864 - DNA, 422 bp, Zea Mays
ggaactggatgttaagatctacagcggcctgatcgatacgttcggcaagtatggacagctagcggacgcacgcaggatgtttgataaaatgcgcgccgaaggcgtcaggccagacatatcgacttggaatgctttgattcaatggcattgtcgggttgggaacatgaaacgcgctctgcggttcttcacatccatgcaggaggaagggatgtacccggacccaaagatatttgttatgatcatcagccggttgggggaacaagggaagtgggatgagattaagaagttgtttgatggcatgaacaatcgaggtttcaaggagagtggcgcagtgtacgcaatattggttgacatttacgggcagtatggccattttcgtgatgcacaggactgtatagctgctcttagagctgagaatacac

SEQ ID NO: 190865 - DNA, 361 bp, Zea Mays
tcttcatttatcttaagtacttgatagccatacttcacagcctgtttatcagcacacttcaggaaatactcgcgaccttcatttcctaaccctggtattcataaagatgaaagccaattttaacacaataagaacaatgtaatgacaaaaaaatgtattcatgtaataagtcatccaacaatcagattggtctgattgttccttgaaaatgaccaataattgtactcgtgctcatgacaaacccatacattgatgtcgtaactatattaacattcgtgaccaacagaaacataacgctctaaccaagttgagaaccgggtgcattagtaacagcgatcattctcatgtgatctgcgactag

SEQ ID NO: 190866 - DNA, 355 bp, Zea Mays
tgggactgtccgttttgcctcaaccctagggaggaagttttaagggatggtggagtaatgctgtatgcatggcatcaaaggaactaaagaaaggactcaacgctcttttttgtaatggtatgggagatttggatgcaccggaatgcttgtgtgtttgaaagcgtcagtctggaggccctggtggttcttctaaacatcaccaatgaaggatcgctgtggtgtgcggctggagccaaggaccttcggttcttgttaaggggatgttggatagacttggttagccctgtccggcctggtggttccctggtcaagtagtttttgtgtcttttctgtaataggtccttttatgtttgcc

SEQ ID NO: 190867 - DNA, 599 bp, Zea Mays
cgaccccaactccacctcagcgtgcccccgactgacaattcatgttccattgagtttgaccttactggtttttctgtgaaggatctagccaccaggacccctctcgctcgatgtgacagcaccgggcccctctacacgatccgcccttcatccaccggcgcgtccccacctcccgtcttggtctccgccaccacctccaccacttggcatcgtcgtctcggccacctaggacctggcgtcatgaccaagctttccagtagtctagattcttctcgtagtaggagacattttgagggcctctgtcatgcttgttagttaggcccacatactcgtctcccgtttcctacttcgtcttctcgggctgagcaggcttttgacctggttcattgtgatctttggcctaccctgtaatcagtctttctggatacaaatattatttggtgattttggacgattattcccattttctttggacttttcccctgcgattgaagtctgacactttcaccactctcacacactcccgattcgtgccctgcagtgcgacaacggtcgtgagttcgacaacgcctcccggtccttctttctcaccaatggtg

SEQ ID NO: 190868 - DNA, 420 bp, Zea Mays
gagattgaatgaacatgatggacgactatatatcagtcagttatcatataccaattgctcatcaccttggcaaaatatacagagcggagctttttgcttggctgcgtaactccgtttcacatttaatctatagatagatagatggattgaccagtatggagtgcagcggcgtttggatttcagacacacaaatatcgagtccccacaaacgactccggctgctgaatggctgtgtcactgtgtgacatagctgacacacatcccctaacacggcccagaagcgaacctgacctcggcctgtttatattcttttatacaagcaaaaagcccaatacgttagcccgcccatggtatatctatagtatgttaacttttttatatataagatgatgtgaacctcactgacactgagccatgcat

SEQ ID NO: 190869 - DNA, 766 bp, Zea Mays
cctgcccggccgggcccaatcaaccgaagtggacttgcattgtcctccccgtacacacatctcaccagctagccagagagcttcacccgaacgcagatggtttttctcgtcggtcccatcggcatcactcacggacacacatacagctgagctgcaccgcttaccgccggatcgaatgcgcgtgcacgtttggaagggtctcactctcaccgcctgggggatgattccattccattccgtcgccagcaggccaggcacccgccattatccggacaggtaggcggatacgtctcgacgcgaccgccaactaactgccgcaccgacctcacttgtatgtactgtttggcgtctggacacgagtcatgactcatgaggtggagctgtgggtactcggagattgttgagctggtttctgcctatgaataagcggtggcctgcaggctgcagtggtgcgcggacagtgcgtacgtcggccaggacaggcaaatatctctccggatacacccgctgtaatgtgcccgcgcccgaaaacgatggatctcgtccccaatatgtgtactcctcctacacgggcagatcaatcatgccggctccggactagaggcactgcgaactgcgatagatgccggcaaccacgtacgtgtgcgtaacgttgcctccctggccagtgaccacccaggcacccaccacttgtatgctgccacctgccatgaatgaaagactagactgggggatccaatcgagccggtgctagtgtcggtcacgg

SEQ ID NO: 190870 - DNA, 352 bp, Zea Mays
ggaacccccctcccccacccaaaaataaataaaaatgattgggctgtgattatagatgggtgaaaagggcacggatacgaataaaaatgattgagatgtgattatagatgggtgaaaacgacacggatacgaataaataattattttaatccgattcaggatcgaatacgaatagttagaaacgagatgaatgtagatacaaggaccgaatatttattcaggtagataagtgacgaatacggatattatttggtcagatacatgtggatgctggatacttagataatgcatggattacatattgttcactaaaattcagttcacatgtaagacagttacgctgtgagcattg

SEQ ID NO: 190871 - DNA, 325 bp, Zea Mays
caaaaccaagattagacctttagtcttggtctagagaatctagactaaaggctctgaggctaaaaaatgttcatgcccatgtggctcgtgagacttggacccaagaccaattactaaatatagggaaattagaaaaattaattaaactctacgatatctatatcctatcttaatagtataattgaggagctccatatatcgaggttgaatacacacacatctttgtggaatactagagtgcttgaataatctaacatgacttcaattataacatctatagaaaatggttggtctagaaaatggtaagagcaaaggttgatcgggc

SEQ ID NO: 190872 - DNA, 400 bp, Zea Mays
gccgaatccggcggggagcgcgccccggagggagttgttgtagagctcgagctgggtgaggctggtgagcctggcgatctccggcgggatctcgccggtgaggtcgttgtcggagagctcaaggtcgacgaggttgaccaggtcgccgatctccggcgggatggcgcctccgatcttggcggcggacatgtagagcacggtgaggttggtgagcttcgtgacctcgggcgggaacgcggcggtgggcgcgaggaacgggttgtcgccgagcgcgagcagggtgaggcccggcgtgtatgcgagcgagcgccacgggaacgcgccgtcgaagcagttggacgagacgttgagactgcgcagcccggccagcggcgagaggtccggcacggcgcccgtgaag

SEQ ID NO: 190873 - DNA, 644 bp, Zea Mays
atccacttggtgaagtactcgacggcgacgaaggtgaatttgaggttcccttgagccgtaggtagtggtccgacaatatctagcccccagcgttgaagtggccatgtgtgggcgatcagcttggtgaactgcgaagggttgctcgagcggggggagaacttctggcatgcttcgcaagacctcgtgactcgattcacggtacagattatcgcgggccagtaaaatccttgacagattaccttagcagcgagggccctgggtcctgagtgggacccacaagttccgttgtggacttcacgaaggatttgaatgccttcggtttcggtcacgcattttagcatgggctgattgatcccctttttgtatagctggcccccgactagtacaaagtcccggcttcggtgcttgaggcgtttggcctcattgacgtcacttgggtggtaatatccttgcaaaaacagggttattggggcccgccaatcttcagtcatgatgaggttgatgatgcgatggccttcggcgtcgttagttacttgtaaaccctctgggttgcggacggctggtgtgccaatgacgtggtagaacacgtcggagggcaaggtcttgcctctggccgttgccttagccaatgcgtcggcctcttc

SEQ ID NO: 190874 - DNA, 389 bp, Zea Mays
caagaaggaactggttgcgccacggaggttagagaggcgctcgcctcaaggtttgaccttgatgcagatgcgctccgcctacgtcgtgctgcgccaggttcttttattgtcctcttcccttcggaggagctggctgggcaggtgtttagtggaggaccgtcgctctttgtccctccattgaggttgcatattaagagatggactaggcaggcttttgcttcgggaggcagtgtcttgtcttccctcattgacgtcgagctccgtggtatccctgctcacctttggggactggagacagcggaggttttgcttggtccatactgcctggttcagggactgcacccggattctatcagcggggaggacttgtcggtcatcaggttgagtgc

SEQ ID NO: 190875 - DNA, 384 bp, Zea Mays
gtaagtctcgaggatcacgttggtaggctcgatttcatcagaaatggtcaccgtcgatgggtctaggcgacggatggctggcgctcgccggggttagaccgtggaccggagtttgtgaatgtaagaaaagcgaagggcctttgtgcaactgtcagtgagtgggggaaatagtgcttagacctcttattcagctaaccaaatctgcaggggtctccatgcaaaatgcgcagtgcggatgcgagcggcctgtgcggggggcgttttccctgtgttgatggaccgagcccgttggtttcggctcgtcactgtttaatctttttccttttcttttacctgacaaatagtaaattacactagaaaatgtaggaaaatgataaaatagtg

SEQ ID NO: 190876 - DNA, 724 bp, Zea Mays
cttctggcttactttgatgtgagaatttcctgagttgtcgataagagattcttgagaatacaatatacttggtgctttacttgtttcattaattaatactatgttgacttgtttgaccccttgaagatttctgatggagccgcagaagacatccgttcattagtcaaagaaaggtacataaattcctctctgaacaagctgctaagtttctctgatgccaattaatcttcttccacattgaacttgtaatcatatcatttctaacttcctaagtgatttagttatactagtggaaattttttggattcactcgtatttgtttgaaacttattagatgaatcgacaactgaagacacattattcaagattttaactgaatcatttaactctttaactggtctggactcttaatgtactttgatgacaaggtaagagggtgcaagttgttgatcatccattttaagttgctgattgacgatctttgactccagttttgagagaacaatattttgtgattctaggacttggtgtcatgatctatatatgaatatggtttctggcacatattcctcttgttaattagtattttcttcagatacggccagaagtacgttttagaggacactaggaagtatttaaagaaggtgaaaaatgctcaagaagcccacgaagcaattaggcccaccagtataaggaggttgccatgtaatgactctccctgtgt

SEQ ID NO: 190877 - DNA, 354 bp, Zea Mays
tcccgattctccggctacctcctcccttatctccttgcgcgtgacgcgcccacgactcctcgtcgtcctcttgtgatctggtccccatctcgctgccgcctcctcccgacttaccaaactccaacacgccatgcgaccatgcgctcatgcatagcatagatatagctgtagccaagctgcccaagcacgagcaccactcgtcttctccgaccttccagctctagctctgatccgagccgaaacagccatccaagacgcccgcggccgccgtgagcgggtgaccctctgcgctgcgctgcgtcaccacccaaatggatgacatcgccagcgaggcgcccgtgggggcgttcgcca

SEQ ID NO: 190878 - DNA, 397 bp, Zea Mays
ggcgagccacaggacgcgagcagatgcaccacgctcggagattgtatcagcgaggttgtcggtgatggagccgttgagccaagacagaacaacgacgttcatgcgagtccagtcgggcgagtggtggacaacatcggaaagcacgtggcagtccagagagaatttggtgagggttaggaggaaggactcacaccaccgagagtagaaggtagagttgacgtcgaggaggagtgggacgagggcccggatgttctgcacggcgacggcttgagcgtgcagattgagaagagcaaccgcttcgtgttggagaagagcaaccgcttcgtgttggagaagagcggcagaaagctgggcgacggagtcagcaccagtgccgtcggaggtgatgtcattgatg

SEQ ID NO: 190879 - DNA, 4424 bp, Zea Mays
tgcatgtccaggtgttgtaccgtttcttagaatttttcagcaactttgattgggagaaattttgtttgagcttgtggggcccagttcctattagttcacttccggatatgactggtaattcatatgtatagctttgttttgatagatcaatggttcattgagacatgtgcgttttgatcattcatgttacatcatgcagcgatccccccacggatggacagtggtgagttgttgctgaacaagtccttcctcgatacttgtagttctgcatatggagttgtgcctcacacccaggagaaccagggtcaaccatttgtttcaaaacattttaatgttattgatcctttacgtacaaacaacaatcttggaagaagtgtcagtaaaggtaactataaagtaggaacatcctttaagattgaccttaccggtgaattgaacagagtaaatgttctttggtagtttggcttcacttatttccacacaattgattgcgtgttgttttttatttaatgatttctactgtcattctgtggtatttgtaatgctaggtgattatatcatgcactgtatatgtgataatcgattactagtttgctacctcaatgtttggttgttccagtttttttgcttttgtttggggattttttgtggcagtattcttttgctgtcacagtagctgtttgattgttagcataattatgaaactatattttgaaatttaatcaacttttgttatgacatattttctattagcagaagtatctggtcaaaactcaaaagtccacataattgcaactttcgagcttgtggcctggtggaatgtcgctattctccagatatacacatatacattttctagtaaaccaacctaatactggcaataagaatttcattcttttcttatgctgcaacatgtcctctgtagctatagtttactttgttctctggtctattctgttctatctagctatgacaagatgtcgggtacttaaaatagcaatctcatgttgacgcatgtatgttgggtgaaccctccgtgttcattttagcatggcctcatcttaggtttggtacggttttattttgctgttacaaactattgtaatttcattgctttcaagtatagaaattcggttcgtccgtggcggaaaaaatgtcgaagctatatgttctaccagtccttgttccaggttaatcattatgagtatatcatttgaatgttgtgtcagaggaggtattgctgcagaattaggtgcatatattcatgtgtaggggagtatatatatgatcgtagaggtgggcggctagggaaaccctatgcgccaatgagctagacccaacctcacgcacgagattggtcgggcccaatatatataaaccctaatacacatataggcaacaattagtattctaacacccccgcagtcaaaaatctagtcacaagagatgttgagctagatcgaagctccgaaaacatcgttgaggggaggccattcgtgaaaatattggcaaattgtgatgatgttgacaacaccctcctaacgcacaacgcacaaatccagcatgcccatcattgcttcattggcgagcatgacaacatgctaggctgcgtgccagcgtctgcctcctccggatgttggtttgtgcgacgacgaccgactttcccagtttccctaccctattctcggtgcggcaacagagactaagcgaccagcttgagttatgatctagtttactaattgtattatgtgtatgttcaattatatgctatgaaactacttctataggacatcgattcgctcgacgatgctatatggtgctgaatgttggtcgacaaaaaggcgacatgtccaacaactgagtgtagcagagatgcgcatgttacattggtttggtcggcacacaagaagggatagagtccgaaacgtagatattcaggatagccgatagggtcgtggtggcaccaattgaggagaaattgattcaacatcggttgagatggtttggacatgtctaaaggagacctcttgaggcgccggtgcgtagagggattttggagcgggtcgataatgtaaaaagaggtaggggtcgacctaaaataacttgggacaagggagttaagagagcttaaggagtggaatatctccaaggaattagctaaggataggtgctcttggagactagcaatcaatgtgcccgaaccatgatctttgccttttttcccttaactctaccgtctttcttttaccctttcggtttttttctatccttgtttcttgtgggtttcatctctagcctaccccaacttgctatgttgttgttgttgtatgaaactacttctatgtgatactataatcaactatacatgccaaaaggctactaagataggttttaaaccgatttttttgtgttctagtaaaatttgaatgcccattctctaaatccagggcacgtccctgctggatggaggtgcagaaggtggcgttgagatggagggtgtgggtctcatgattcctgagagagcgagctagaggtggcacgtcgtgccattgtgctctgctccctaatgatccaacacaactcaggggagatggtgctggagatctagcagatgatgatgatgtccatccgatcgcaacatgaatcagtgtttgacggagggttagacaagacgcggccgacgagggtgttccgtgtgagagcaagtagcacctgatcataccagcaggattaattgtcggaggaggatgatcgtcaccaacaatcagacgccgggaacatcggttgcatggctgtggagattggcgatggtggcaacctcgtaagttgcaagacgtcctgtggggacgccctagggtgggggccggtggtcgtggggtgttgtaggcccaaaccttatcgggtggcgacagcctttgcttgagggagcagcagcggcctttctcctattcgagaagggtggctgcctagacgtgagcgtgtgctttggcagcctttttttggcaacctgagctgtgacgagcatgtcgtcgatcttcttgtggaaggccacaacctcatcaacatgggcatggggcacgatcctcgacagttgacgaggtccttgccatgggtgcagaggtggggtgaaatgcgtgtgcgttgctgtggcgacacagcacaagggtggcagcgtccctagaggggtggttgccaggggaggagcagaaatgagattggacttggatgctaagttagaggcagttttgcgacagaaatagatgcatctattatgtgttcgggaacacatatatagtcgtagaggtgggtggctagggaaacactaggcaccaatgggctggtcccagcctcatgcaggagatgggccaggcccaatatgtataaatcataatacacatatctgcagcaattagtattctaacattgtgatccaatcttgttagtgccaacttgacaaaaatcttttggcctaaataatctctgctcagccagcaattttaagctccgtgcatccctccttggtagatttcattaactagaaatttcttgtctaattggtatgaggtccaaacaagccttaaacaactaggtgcacttacttcattttgggtttgttacaatttatgtcaatactgacagcatcttgtaaggatgtgacccatagtagattctccttgagcagttttgtgattgtcacacttacactagtagagaacagatctttgattcaacacattagtcatagctagagttgggcccatgactaatgtgagcattagttctgggtccaagtttcatgtgcattggacgacctttagtccggtgggctaaagggtctacattagtcttggttggtgttaccaacctggattaaagagctttgagccattagttccggttgataacatcaacctagactaaaagggtcattcacgaattagttcaaaaggaaagtatcccattcccatccaaagtcacatgtgctgtaagatcttgggtgagtcccatgaatcgcatgggtgggagtttgtgccaattttttttaaggccttgcagagacgcagaccctttagtccctgttcaggcatccgggactaacagaccatgccctttagtcccagatccctagtcctggttggaaatcaggactatagccagtttttgtactggtgttatattcactcttgcatgtatattggccttttgagtatgctaattaagggcagcatacttgattatttaatacttaaatatgacaattcttccttgtgctctttacatgcaaaagaactcttgtcattactttgtcttcttatccttttgttgctaactacgtccagtcttttaagaagatgcgttcagtgaaaagttgcggttttgcaggaaatttctttagaatacgcagtgcttttgcgtatggggcg

SEQ ID NO: 190880 - DNA, 358 bp, Zea Mays
gaagagcatcgacaaggttgcaataggcagtgggtcattagggcaccgtcaccggagaacttgacctgtgtgtccaacagggtcacacaaggtttgaagtgtagcatgctagcacgctcgaggatatctagggtgcattgttgtcgctggagaaagagaccatccgagcgatgctcaacaacaatctctataaaagggtgaagaggacccaaatatttcatggcaaactcatcctgaagaacggtgatgatctggtgtaggaggcccgtagaggagttagtgagaacaatgccatcaacatagaggaggaggtgcactgttattgtcacgctggtagatgaacaaagatgtgtccgac

SEQ ID NO: 190881 - DNA, 429 bp, Zea Mays
tagctccagctcggccaccctcctgctgctcgccatggccgtcgtgccctggaccttgctccagctcacctcgtccctctccgccctctgccatggaattcgctcggcgcccttagccttcgaccacggagcttgctggtcctccctgccctgagctcgtcccatggcgcttggaccgcgccccttgttatagtaagcccagaattagtgtttatttcttagcaagtagattagcacacaatcaccttccaggtattgtgatttacttaccaatttctactgcatgtaattcctttataaagagatagagaacaaccagaaaatgcagtctgattgacagcaccaaatccatcgtctcctctgtatctgcttctcgtgtgtcatcatcctcgccggagttctaacatttggtaccagagccagttctcc

SEQ ID NO: 190882 - DNA, 369 bp, Zea Mays
gcgcgacggtgcacggcctcggccatagcatgctcggtgagcccccaagtcgaacaggttgtgggcatggcgaagttggtgttgctgtgcgcgagttgagacagcgcagcgccgccgctaccatggacggagttgtatgagccatattcgatgccggtggcgatgagctcaccggcgtggtggttgtcgagcaacgccttgtccgagtgggaggtgacgaacgcctcgtcggggtcggagtcgcgcaggttcgaagagatatcgccgtcagcatcacaaccctcgaagagcccgccccagttgtcggcgacgacagatggcgctgcatagtactccttgccgtcatcgaagcacccgccccagttgtcg

SEQ ID NO: 190883 - DNA, 290 bp, Zea Mays
gactacaaatgggtcaactaggctcattgcatctttgccaatgattaatagcggaggatgtcatcatcattcccaccttctcaaaatgggaaccagatgatgcactcaacctaggtggggtttgccgaggcccaacaaattagggttgtctagactccaacagttcattatgaacaccaacttaaggagaggtccaatcgccccaaaaatactagtccaatgggggaatggtggttgacccttttaagatggtttcctcctcccaaattaagcgagatggtataattcag

SEQ ID NO: 190884 - DNA, 312 bp, Zea Mays
gtggatatagatttttctattacagtagcgaagagttagagatggttgttatacatttgggatcgaggtgaaagttggatgtggtcatggacagtgtcaacgtcatctcgatgattgacatacctccttcctgttgcatctcccctcctcctttagtcgtcgaaccatgaggagggacatcggtgctcaccagcatagattcgttagggtctaccggtaccatatgatgaagttgggtatgcttgaaaggtctcttatgggttttggtgttttggatgacaacacaattaaaggtctgacctgtgtgtcaag

SEQ ID NO: 190885 - DNA, 415 bp, Zea Mays
aagccctatgaagaactactagtacaatgctcatatattgtgatggcgtacaaatcgtcctcatgctccccgatacagagtcactgtgggtgatggtcgtggcgttgcctccatccctggacctcagcctggcgttgttcatgggcctaatggcggtcgtgacaccaacgttgctgcagttcttgccgcccaagagcgataagcggacctgcttgtcgtcgttgtccgtggtgttcgctggttctgtctgtcgtgcagcaacttggatcccaactgtcatgcccatagcaaggttcaatcaacgtggttaataggataggcaacgcaacaaagcatcgacaagcattgattttattaaatgaatcacaattgttattctcaatcaaggcttaaagttcagaaatgtgaaaagtgg

SEQ ID NO: 190886 - DNA, 571 bp, Zea Mays
attcgtagaattcggcagaaatcaaatatgatgtcttcatttagagattctcgtgcaaatcctaaaggaaaccttcttactagccatataagtagtactgatttcactgaagacggtgcatccattcagtctccgagctcaaaaaaattattggttgggagtagtcaatctctgcgacccttagaatcccaaaagaatgagggagatggtaaatctagtgatagcattccacccataccagctcaatcaaacaagatggctgaaaagatatttgagcagcttaatataatagctccatcgccaaaacaacaacagtctgttactctgaatgctagtaactctatgtcaaagaaacctgtttttcaagatgctgggtcaagcagtatgtataaccaatctagttccctgaagtttcaagatttggatggtgcaaatggaccccatgatacaaacttgaatggttccctgctgaagaaagacaagctaaatataataaaagacggatcgccaaaagctgccttttctgatagacctgcccttttggggaactcggtttctgcttctaaatcat

SEQ ID NO: 190887 - DNA, 292 bp, Zea Mays
acctgtaatagagcagcgatcagtgtgatcactcgcccaagtggcatcagagtaggcatgaagcctaagagggctattacaatcatagaataagcctcgagatgtggttcaccgtatcttaatacacgaagcaagtgaccataatggactgaagtaggagcagagacaaactgactcagaatatgaacagcatgtgcaatatccgatcgagtgatagtgagatagactagactgccaactatatgtcgatatatggatggatcatgtagtggggaaccgtcattcatacaaa

SEQ ID NO: 190888 - DNA, 999 bp, Zea Mays
gtgaggaagacccatactatagaaagaaagttgattcatatcaaattctggaggacttctctccggtcaatggaggggaccgtagagagggggaggatgatagtggtcgaggtggtgatgaggttagtggtgatgaggttagtggtgatgaggctagtggtgatgaggctagtggagcttcaggaggggtgattgttggaggtatgatttcaccagaagtggagaaagggataactacgcagatattgagtgatgatgaaagtagtggggatcatgatgatccaactattgatattcaggaggagacagaggatgatgaggcagtgattgttgggtcaatcccatgtcctatggcagggaagttgaatgagaaacaaggggagcaacatgattgttccattggggcaaaggtgaatgacaaacagggggagcaacctatagtatattatcgaaagcggacgaagaagcagggggagcaaccacaacctggatgtgttgaagctccagtcccatatctctcttcagactcctctccagacccagctggtaatgtctctccaatccatatttctcccattcctgaacatgaagaattacctcttgcgcaaagaagagttcctagattaaatgctgggaaacctccttctcgttattgttatgaacatgacattgctaagtatgtctcatactctagtgtctctcctgcatatagaactttcattgcatctctacaaacaatatctattccgaaggattggaggtgtgccaaacaggatccaaagtggaaggatgccatgaaggaagagctgcttgccctgcagaagaacaagacatgggaacttgttcaccttcctgaaggaaagaaggcggtggggtgcaagtgggtcttcacagtaaagcagactcctgaaggaaagattgacaggtacaaagcaagactggtggcgaagggatatagtcagacatatgggatcgactatgatgagacctttgcacctg

SEQ ID NO: 190889 - DNA, 386 bp, Zea Mays
ggggtgttacagccttcccccctaaaagaaatctcgtcccgagatttaaaaatctagacttagtaacggaaaaggaaacacgtcactgacttatttcctaatttctcttacaaggcaggggaggtgttctgtttcgcttaaccatgagttaaccacgatgtcgctcgacatttgcactcgtctccgatgctgcgaacttccaatgatgactcggcgataaatctctttttgtgtgttttactcaagatgttgcatctaatttgctttggataatgtttatccaattttccatttcttgttcaacagactcacatgggaaatcatgatggtaccatctcatcacgaaacacaaccagaaactatggtaccagcgtgtgccaagtcat

SEQ ID NO: 190890 - DNA, 273 bp, Zea Mays
ccgccgccctgtcatgcggtcgggagcaggaagacgcatggagtccattgatctggtgatcagcggtggctatagaatgatgaagtggatgagcccctaaccgttgatcccaagtgtgtggccacgattagatatcaggttatgctgtgtcgtttcttaaatcaggaccgtagattagtgatcgagcggtcaggagtgaaagcgggatttacactcggactgatctaatcctatgcgttggctgtcgatccaacggctccgtttaacccatac

SEQ ID NO: 190891 - DNA, 318 bp, Zea Mays
ctagcttctttgtccccttggcctaaacgattcttatctccatcaccccacgtatacagcttcttagacaccacattcatgcctgtctgaacagaggcctccacaattgctgcagaatgccagactccgcatgcaactttgacagttctaaatccattcaaggcttccacttcttttgggtacgcagcgctttcacggtttccatgcccaagagcaccgaattttccgtcaccaaatgtgtaaagtcttccagttgatgtgatcagagctgaatgccacgagccacatgcaacagacagtacctgaagcccctccaag

SEQ ID NO: 190892 - DNA, 665 bp, Zea Mays
catcgtctgaggcggattctatcacattgatggctcgacgctattgggttgggttagcctggcatgcatggcaggatctagcgtctgcaaccaaggaaggagagcaacgggaaactgtgacccgatcttgcaagcactggatacatctggccgccgtgatgacctcggcctttcctccatcggcgtggaagcagcaccggagcagggaaaccaggtcgggacaacatcgccggacggcgaccctgctcacaggatgaagaggaccttagtaagctgctcgccaacaaagcaaagctgaggaggaacaccggaccggcggaccccgacgaggaggagaaccggcggcggtgcgaggtggacagacagatccggggcggcggagaacggatcgcgaccggggtgagaacaagccaggccacaaccgcccgcaaaggaacgaacaatccggcgtcgaaggcagagcgatcaatggcttctgctgagggtgacatgacaggtctcctctatctctatgtggtcactggtcagcgcagagccacacgagcaaccaagtacacgataaactgcgaattgacccggcgtcggtgctggtgcggttcatccgtgctttagtcgcgccccatgcccgtgcacgtcaagcgttcgtcttaatgcctgtgaggcac

SEQ ID NO: 190893 - DNA, 484 bp, Zea Mays
caaacattgtcccttctcagcctggttgacgacatgcaacttaaccaaacaatcaatcctgtatgtttacaatctagtctcagtgagcctggttgatcacatgcgagccaggctgagttaagaaaccaattacgcccttaggtactatatgtactatataatatatatacagctcaattgatggattattcctccatacattttgtctgaaagttttatttgacattcctatagtcaggccatagtctaaattgatttaacccttttaaatagtcatcttgtgcctacggtagatcatattcacccaatattgttcttgatcagcacacaaggtagccagtgttctgcttgcctcttggctccagctaacaaagaacatgattttgctgatggaattatattcttcctgatattcagttaaaaggaggcactgtaagctaaaaccatttgattatacgtgtaccgtgatttgaccatagcaatt

SEQ ID NO: 190894 - DNA, 505 bp, Zea Mays
atctgtatcatggttgacacaagcacctttgagcaatcaaggctgctatgttgttaaccttgctcttagaggacatggaaatggactcgaatatgtgaaatggactgctgacgaagggcgatgatgctcaaccttttcggagtcgcacgccattgagcaaccaaggcagctgcgtgtctggtagcctatttaataatccctttttgtttgtggttctgcctaggatggtcacctggatggatatatgacaaccaggacagttccactcacaataggatgagtagattgggcagaaagagaagggagggcctgatttctatgattgagcaaaggagatgctgagctgagcccctttcgtatggtttatgcagcggtgctttatggctctgttttttgtttcataccgcgcttgagtggctaagattgttctgctttccattacagagcttctgcactctaccatcttctgagctgatgatacctgggatattctttgacgtttgct

SEQ ID NO: 190895 - DNA, 291 bp, Zea Mays
aagaaaatggcttgcttaacagaacgggccgccttacgcttgtctctttggttctctctgccatgccaacctatcatcttaccatattccccttggcggcatgggcaaataagaaaattgacaaaattaggaggcctttcctacagaaaggggaggaaaatgcgaatggaggatattgtctgtttaattggcgaacggtcacccgcccgaaggatcttggagcattaggcgtacccgacctagagaggttcggccgtgcaactcttacttgatggttgtggcaggattggg

SEQ ID NO: 190896 - DNA, 407 bp, Zea Mays
aaaatccttgatgggtgattaggagagtatagatatctagacgcttattatgtgggttgatgaatggataggttgggataaccaggattatggtaataagagactccatgtacagtggatcttgtttcgtctagcgatccaacttgatctttgaagacttgagttgatgctttttctcccttgacgtggttggtcttctttggccctcaattctagagttgccatccgagttaaggacatgtggctaagtatatataattaggatagccagggtacacgaggtaggtgggtttgaacaaagttttactttgcttttgtgatatctagattagacaacctatgatgtaggttaggttgttgtttacggacgagttagtccaaggtattaatttagggtaagatatgtt

SEQ ID NO: 190897 - DNA, 2288 bp, Zea Mays
taacatctctccccgtctcttcaaacaattcgatgaatgttcgggtagaggtctttgaagttgtgcagtagctcccaagtagcgtcatcggtggtcataccctgccactgtaccagcacatgccaagcgccatgatgtaaatgggcgagtagcacactctctggagtaggcaacaaccgaccatcctaaatagtggcccttgtggtggggtcatcagagggtccccctaagctctacatggaacacgtcattgacgtgtgccttctggaagctaaaggctgtaggccacctgcccaacacgctccaactcctgaacggggcctgcatagcgaggaccaagcttacccttggactagggctctagtgagtgcgtcgggcaatggagacggcgaagccacacctagtcgcccaccctgaacttgagctcacgatgttggtcgtcataggaagttaggaacacttggtgtactgctgggcttggataagcgccgatgaacctccatgaggaaggcatcgctgtcacgtaggatggagcccaccacctccatttgagtagcctctgccatgtgtggtaaaaaaggggacatgggatggccaacaccgcctggaaggggatggcgcggagcgtcgtgtgggatgaggtattgcagcaatattctacccacggaagctagtcgacccatgcacgtagtcggttccttgtggcatagcggaggtacatgactatcatcttgttgatgacctctaattggccatgtggtcgcttgggatatagaagtcctcgcgcaggtactgaagggtcttttaggtcccttcgtggttagtggaatgggacagtgcagccacctggtggtccaaatcgtgctatgtcgacatgaagatgcgcttgacgtggaggacatcgtcggtggttaccagatcggggcaagaggtgccttgggggccagcatgtgagatgtcaataggtgccttaggggtcgatgcttgagggtgtctcgggggctaatgtttcgggtgcctcgagggctggggcaagaggtgccctaggggtcggcgcacgaggtgccttgggggccaacgtgcggggtgccctgggacctaaggtgctctactgcattggggtcgcgaaaaaaaggtggcccatgaactagttcgtgaggtgctctgaggtccgacacacgagcgctatttggctgagccgagtgacaaatgagggcgttgaaacgcgcctggtagttctgtactatggtggtgaaagagagttgtgccaattcgaagaggcaattagtacggatggtcgggtcgaagcgtagtttgcagagctctgtgaagcgctcctaggaaggcatgccctcatcctgttcaagggtgtagtaccacgttcgcggtccgtcgtgtaggtggtataatgcgagccaaacacgatcagatgtgagcgtgtgttgcccttaaaaaaactgctcacaatgagtcatcataggaggtgaaatcgtgcttgtcgaatttggtggccgcaccaagggttactagtggcagcgctggagcggggttggtggtgtcgagaagttgggcagcagttacagtgatggtgggaaatcgataaggttgatgggaatgaatgagtcaacaggggttgggtggcgggcagcgtggtggtgggggtatggtggtggtggataagtaaatatgaagtgccgtcgtgttgtccctcggcacctcgtaggaaaagccttgggccatggcacccgctgatgaggatgcctgatggctctccacggtggccagccgcgagagaacgaccacctgctgcatgttgaggttggccatctgctgggcagcctcagagagggcctttgccatggtgtcaagggagaatggtggcactccttgcagtgccggctgaacgacctgttgtgttggtggagacgaagtcttggtgtcaatcgctgtagtagcgtcggaacctgacatctccgatactagattcataggatccttgatcctatcttggttgcgaagtgtgtaggaatgcgagattggaggccgcagtcaggaatttctgacttcggaaaggcgccgtggtggcgtgggtgtagaacaacggcacgacagtgagcgagggagagagggaacacggagggtaggcccttgaggcccaacaagatgtttgccttgcttccttcatctggttacatcactcctatatttatagtccctagaggactttgttccaaagcaaactagaggaggaatccttatagatttagactcccctttcctaacacact

SEQ ID NO: 190898 - DNA, 948 bp, Zea Mays
atcccttccacttgtagaagtaacagagttctgtttagattctgtttgtgatggagaaaaaaacgacaaatctgtggatgcaccacgaagcagattgcgcctgggagatgatggagcaaaaagactagatgtcaacaatggttgaaaaggttttttctttagcaccaatcgagatgaatctgttgtatctgtatttgcattcatggaagttgaagcatggtttattgtcaagctagattcttctggtagaatgttcacacaagacatattagaagagtggctcctggagtcaattcccgccccttgttctgcagtgccattactactgcaagcatgaagctgatcgatatttttcttggcagaacttagccccgaagaagtgcttgaacagtgaagatatggtattcctgataatgaaagttcaaacccattattctcatctgtgggctcagtcacttctgaatttgtgtctctgatggtaaggttttcttcgttgctgctttcttcttgttcaatcactatgccattgtcataagcagcatattcatcttgcacactgtgtccctcatcctgtttgcaaaaaatattaagttgttttgtatcctcagtttctgccaatgcaatgctttctgaatcatggactgtctcatctaattcagtttccatcatactcccgtctactacctgtttgagagttgtaacttcagatatgatgacctctttgatcatctgtatgtccttaggactattagtttctaatataatcacctccttaaccaacacattatcaatctgacccaaatcttgattggaacccatccttgtatcctgcttggaactacccttttcaaacatgtaatcatccactttataagtagactttgaaataccactatctgcgtctccatctattgtagctgccaaagttgacttaacaactgcagtttc

SEQ ID NO: 190899 - DNA, 439 bp, Zea Mays
accgttcagcgcctgaagacttcattattatcatgcaaaatgagcaagcggcgttgcgtgtcttcaacaacggagctgttctcaactccccttctggttctttcaagttcatcaagtggtcaaagcttgcacacgctgaagcggtttccctcccttccttcgtgacagtgagtttcgagggaatcccgctgcacgcatggagtctggaaactgcaagaagtttgttgcgagtgcactgcacggctctggagcttcatcctgacactgctgctcgtttggacttctcttccttcagggttcttggttggtgccggcatccagagctcattccggcggctgttgatctcttgattccggagccggctcagagttttgaagtgggtaccactgtgaagcatcttcttgcttattgggtgacggcctcggtgtctctgatctc

SEQ ID NO: 190900 - DNA, 286 bp, Zea Mays
gggaattcctcaccgtcgttgggcctccgccgcgggactgcgccatcgcgtggcctgggaattcttcgccgcgaatcgaggtaatcggtgtaccatcttcttcgcttttcactggtcgaggtgtagggtagttgagtttggggattagagctccgaggcgtggaattaacggtagtccggcgatgttccgccgtgttgggcggcggcgccgctgttctggcgtcgggagaaggaagatgggcgatggccgttggatcgtgaatgtgcggcccagattagcttaggc

SEQ ID NO: 190901 - DNA, 285 bp, Zea Mays
tctgaaccgcccgatttcatccaacgacccacgatcgatcccgaagggagtattatctgtgcgttcacgatcgttggccatcaatctaatggtttagattaggtgcacgaaggtatacgttccggttggatcctatccatcggatgaagatctaacggactcgggtcgactcccccaaccctttccttcttccctaggcaccacggattgaacacggcggccagggaatccaccacgtcggagcaccatctccggcgtgaaattaccccgcgcaccgaactcatc

SEQ ID NO: 190902 - DNA, 884 bp, Zea Mays
catgtcagccaaggagtcggacatccccttcagcttgtagcagtaatcaccaacaaagaggtcatcctggacaaaggtgtggaaggtggcgttgagttagaggatgcaggtcacaattcataagaaactggttctcgagagtgagccagaggtggtgtgccgtgccattgctccctggccatccgacatatattgggggagatggtgctgaagatcacggagatgacaacgtagtccattcgatcccagcatgaatcgatgtctaacagagggctagacaatatgtggtcgatggggcctggacaaggaggttgacgatagcagcctcataggctacaacaaggtcatcctatgggggtgccctaaggtgggggtcaacggccatgtggtgttgtaggcccaaaccctattgaacgatggtgacctcctactcgagggcggcgacgacagccttctcgtttgagaagggtggctgcctagatgcgagcacgtgtgttggcagcctccttttccacagtctgaatagcggcaagcatgtcgtcgatcctcttgcgaaggtcgtgacctcagcgcgggcgtacacctcgacagtcgatgagatccctaccatgagtgcaggaggtgggaggagatgtttgtgtgttgctatggtgacgcgaaacaagggtggcggtggccccaaagggtggctgccctagagaggcagcagccatgggaggagcagaagcgagattagattcgtgataccatgttagagaaggtattgctgtagaattagatacatctatttatgtgtacgggagtacatatatagtcctagaggtaagtgactagggaaaccctaggcgccaataggttcaacccaatctcatgcagaaaatgga

SEQ ID NO: 190903 - DNA, 1605 bp, Zea Mays
ggtaaacatgtccaccaccacaagaatagaatcgaatcgttgagattttggtaacccttcgatgaagtccattgaaatagtatgccatgctgtgggtggcacaggaagtggttgtaggaggcccggagaacgtgaccggtcaggtttagcctgttgacaagtgacacaggaagcaacccaggaatgaacgaatgacttcatgccgcgccaagcaaatgactgtttgatttttttgtaggttactgggacaccggaatgacctcccacagggctgtggtggaaagcagtgaccagggtatgtttgagggaatcatctgtaccaatccagattctgttcttatagcgtaacagtccgtcacaaaaggagaagtgaggaatagaagagccatccactgccaatttggccaacaattcttgacagtaatcatcatgcatataagaagcagccacagattcagcccattgaggaacaacagcggtgaccgcagcacaactggcatcgtgggaagctcgacgggaaagagcatctgcgaccctattatcggtgcccttcttgtacatgactgagtactggaggcccaggagccgtgtaaacaccttttgttgccagtgagtatgtaagcgctgctcattgaggtggattaagctgcgctgatctgtatgaatgacgaaagaagagtgttgtaagtatgacctccagtgatctacagccatgagaatcgccaagtattccttttcatatgttgaaaggccgcgggttttgggtccaagagccttgctgatgtatgccaatggatgcccatcttgcattaaaacagcccctacaccctgatcacaagcatcggtttccaaaacgaaaggtttcgagaagttcggcaaggacaacacaggtgcttgactcagactagttttgaggcactgaaatgctgtgtcatggtcagaggtccaccaaaatgcagaattctttttgagtaaattggtcagtggtttggagatgatgccaaagtgaggcacaaactttcggtagtaacctgctaagccaaggaagctccgtaactcctttgcattagacggtttaggccaattgaccaccgcagtaattttactcggatcggtttgcacaccttctttgctgatgacatggccaaggtatgagatggagcgagttgcaaatgtgcatttggatagtttgacttgccatttatccttctgtaacagggacaacaccactgacaattgctgcaggtgatcctcaagggaagagctgtacaccaagatgtcatcgaaaaagacaagagcaaacttgcgaagaactggagataaagtggtgttcattgcgctttggaatgttgcaggagctccagtcaacccgaatgccataactttgaattcatagtgtccactatgggtctggaaggctgttttaaattcttcaccttcttggagtaaaatctggtggaatccagctctcaaatctagactagagaaccagctggcaccatacaattcatctaggaactcatcaatgattggtaccgggtatttacgcttgaccgtgagggcattcaagtgccggaaatcaacacaaaatctccatgattcatc

SEQ ID NO: 190904 - DNA, 678 bp, Zea Mays
catgtttgctgccaatcttctcatcttgaagattgtcacccgatttgtcgtcgttggctcgttcactcatgcacatcagtagggagagtgtgcattcctccatcggaggcatggtatttcatctcctctgctttggcctccgatggtttcttctcctcggagggtgtcgtctctagcttgtccttctctacgaactcgggtttcttctctatccgcccactaggacgtggttcctctcgcccccgtcagtcgtcttcctgccagctagccagccatcctcccgctcgttcgttgctcgcccgacggcagtactcccgcccgcttgttggccagcacaccagcctgaatcttcttctgcccgcctgcagaccatacgactgcatgccagccatactgctcactcttatatgatctgtaaaaaaactactttcgccgcttattcctctacgctcctgtcgtcaattattgttgctcagctatggcaccatcttcgtcttcaccaaacgggggtgccccattacaagttgtctgctcatctttgatggcaccaattatcgtgtttgggttcctcacatgtggtgacatatgcaaggtcttcgtctatggaattttctttcatgtggtgacatgcaaggtcttcgtctatggaattttctttctcgcgagcttccctgtcct

SEQ ID NO: 190905 - DNA, 315 bp, Zea Mays
ttcgggaagctcccactactttttgttaggacaagactcacccccatgccgtgtcatgccattgccacccatccttgggagctgcagctgcctatataataccaacagtgccgaagcaagaacatccaccctgcaccaccaccaccgggcaccagcgtcgtcgaagctgctcactccatcgccgctccaagctgtgagtccgagcatcagcacaagaagatgcgctatccagctcgtccgagaaatctccgcgctcttctgtccatcgctctgctgctcgcttgtgctctgcagcagcggccggcctcagctacc

SEQ ID NO: 190906 - DNA, 690 bp, Zea Mays
aacaagcttggcccaacttcctcaagaattgagcgtggtgcaagaggagctcaaatgtttggcattgatatgtgtgggagactattcttaggaacttgcaactatttgctggtgtaagttcttgcaaattaatcatgtaatacattgggtttattaatttactaatgtttgtttcctttgtatttgttccatctaatactgcaggatcgaaacagcttcagatgcagagtcttatgcaagatattacaatcagtatgatgttgccaaggtcctccaaagccttgctgtctcagatgcatatgtggacatatgcaagcaaataaaggactactggaaacatttacttggtataattcataacgagagatcaacaacaggtaaagaagttggtgcgaaagtagcacttcctcaaacaaacgcgcagcagaaatttgtggctaatcagagcgcaatgtgctcagtcgaatgcctggaggaacaaaaatgcaagtcaagcttaggtgttgtcactgagaaaaatgctgaagttttcaagcaaactgtgtcagctcagaacaacatacataatgcacacagaaatggagcttttggaccatctgtggtatcctcagtttctcatcagaatggatccattgtaacaggtgggtctaacatagcacaggcgcagccagctcagagtattttccatcc

SEQ ID NO: 190907 - DNA, 591 bp, Zea Mays
aattttggaatcctattcctcctgttcttcctattccaactgaacatggtaagttccaaatattaattgatttatttgttttgattgtacctatttttcatgttcaattctattaacaacacatttcatggagagttttgtattttttctaatcttgtcatagtttgcgaggcatatgtttcttttaaacatccctttacagagacatccatcatgtttcctgcagcttagttttgctttcatgatatccacgttcgtagcgaaggcagcatcagctactactgttggatttgcaatattcattattgggttcttgactcaggtaatattttgttaatcgtcatcttatgtatccagtattattttttgcagaaaatatgacaaacttttgttcttcctgtgcagcttgttaccacctttgggttcccttattcgtctgactacaaaaagttgtaccggacattgtggtctttatttcctcctgatttatttgccaaagccctcaacattctaggcaaggcaacagccactcctgaggataaaggttttagctggaatcagcgtggggagtgcccatcttttgagactgac

SEQ ID NO: 190908 - DNA, 313 bp, Zea Mays
ttagtagtcgagcggacggagaaaggacacacatacccggtgcaacatctagtttacttcatcagcgaagtcctcgggccctcaaagataaggtatcctcaagtccagaagctgctgtacgcggtacttctaaccgctcgcaagctccgacactactttgacgaccacaaagtcatagtagtcacaggatttccgataggggatattcttcacagcaaataagctattggaaggatagccaaatgggcatgcgagttgggagctcacgacatagagttccggccccgcacgacaataaagactcaggcgctgg

SEQ ID NO: 190909 - DNA, 393 bp, Zea Mays
cctgcacgatgtttttcatgttagtctcctcaaaaggtttgtgggcacaccacccacgacgcccccggcactaccgtccattcaccatgaggcggctcagcctactccagagcgcgcctcccacacaagactatcccgtggcgttcgtcaagtactgatccagtggcaaagtgaaccggcagcttcggctacttgggaggatcttgaagatttccaggagcgctacccatctttccagctcgaggacgagctgctcgtcaaaggaggcagatgtgggggcggcagtacagccggcgccaaagacgccaagaagaggccagcacaggtggccagggcgccaagggacaggaggtgaccgaagggccagaagtttgaaagtctagatcattatgg

SEQ ID NO: 190910 - DNA, 1167 bp, Zea Mays
gccatacgtattgaaaatgtttctgttgtttcaaagattcatcaaacatacagaatcggctatcttaaggtcaggctcttcataattgttagctacagtaacttctatactccttgatatatgttaatatagtccttttacttagcctcttctatggcatgacattttttgggtgcatttgcaggatgttatactaccacgaatactggatgatgccactctagcaagtctgaacacaatgatacactcaaataatgcttcggttagtgtttctgcggttccgcctcaccccagtattggtatccttaaattgtttcccatgtgttacttatgatataatgatctgctgcaggttatttccctgctaaaggatgacacactctttattagacgactatttgccaggatgaggtcatcagatatttcaatggaatcaaaacgagaattggtgagaaggctttgttcttgttagtatcttcgctttttaactcaccattgtaaattattagttagcatcatcatagtgcaattgagttaggtagttgaaggataataaggcgagactgcccattgctgttggcattgatgcaaatgataatctaggactgaaaatgttactatcttcatgatttttgttgatttgttttgatgttaattttctaacaagagacagctggattaacagggctttgtttaagatctgtattatttttccttgaatgaattatataatttgctaaatttgattattacctgagtttagttgttctttataggaccttggatgtttaggttttgcttgccttgagggaattcaggttaatgctacacaaaagtttcatcacataaaaaatgccactcaatatctcccagacttttgtatgtggcttgcgcattttgggcccacctcatttctaatggaattgctcaagattttgtcacatgcatttgctatcacagagactctcttgtctttatgattagttaatctgaagcttgcttgctttgccattctgtttgtcttgcaattactggaacctggattgaaagtggaattccttggatctcgtttgttgaccctgctaaaatgtttctggtatttccaggttctgttcttgcatgaattttgcacacttagtaagagtctaccacttgttcagcaactgc

SEQ ID NO: 190911 - DNA, 280 bp, Zea Mays
aaaactagggggctcttaagcaaaactcacacgcgaaggggtacagggtaacctcggccatcagatcagagatcagcggcccagattagatcgtgcaggcgcgcgcggacgcggctgacaagcggggctagggcatcagtgggtcagggcgggctgaccaacttggcccagaggtagagatgcgggggagggggaagagagagaggcggttggatctagatcggagggctgggattagatctgctctggttatatctaaaccgcccgatctcggacggac

SEQ ID NO: 190912 - DNA, 854 bp, Zea Mays
accaacttcgccgtgagaatgaagatggtgtctcaattttgttttatcttcaaaagatatatgaagatgattggggaaactttttagaacgtatgcagagggatggaatgactgatgacagtgaaatttgggctgggaaatatcaggaactccgactctgggcctcgtatagaggacagaccttagcacggactgttaggggaatgatgtactaccacagagctctcaagatgcttgcttttcttgataccgcctccgaggtagacatcacagagggtactaaacatcttgcatcctttggttcagttaggcatgagaatgatgtgtatcccatgaatggtggtttccggcggcaaccacaaaggaggttagacagaggaaccagtactgtaagccaactgtttaaaggtcaggaagatggtgctgctctcatgaagtacacctacgttgtcacttgccagatatatggaaagcagaaaattgctaaagatcaacgcgcagaagatattttaactctaatgaagaaaaatgaggcacttcgtgttgcttatgttgacgaggtccatcaacgaggctatactgaatactattctgtcctggtaaagtttgaccagagcttacagagggaggttgagatataccggattaggttaccaggtgaactgaagcttggggaaggaaaacctgaaaaccagaaccatgccatcatattcacaagaggtgatgcagttcagacgattgacatgaaccaggataatttttttgaagaggccctcaaaatgcgtaacctgttagagcagtacaactattatcatgggagcagaaaaccaacacttctgggagttagggaacat

SEQ ID NO: 190913 - DNA, 350 bp, Zea Mays
ggcagatctggcgtgacatcatttgtgggttgttagcctcttcttcgacgagaattttattaaatggtgttcccggggactacattgctcaccagcggggtcttcggtagggggaccctttatctccaatgcttttcatcttagtcatggacactctcaacttgctaatctagagggcctctgatgaagggctgcttcactctctttccacgaacagtttgcagcaccgtttctctttgtacgcggatgatgcggtggttttcctcaagccggtgccctcagacataattctgattttggaaatccttaggatttttggggatgcgttcggtctaaagaccaatgttcag

SEQ ID NO: 190914 - DNA, 485 bp, Zea Mays
atctacggtattatcacagtgttcgctgttcagatagaccccccgactatctattggataaatatgaactgcagaagaactgaatttatcgagttgattggacaaataaatcaaaatcgcaagcttttagtagaagagtgaaggtagccgcgacggagatctgaatgtcaccgtcgcaacctcccccaaacatccttccagagcagaatcttcgaacgcaacagaaatggtcaaaggtttcctaaaacttcactcccaacaaaattgccttgtagcgtgggctttaaacactcgaaatcacccgaacaaaatccactgtttgctcagaaagtagctgcaaaggtagtaaattctcaggcttccgctaccggtaccatccctctctctaaccgcaagatcccaaacgcgaaacaaatcaatctccccagcacgattcgacctgaagcacacccgtaacactctaattgggggggtcctgctcctgc

SEQ ID NO: 190915 - DNA, 615 bp, Zea Mays
agttgaatccgtctagtcgacgactgcctgcctgaggagacgaaccagcttgccgatcgccgtacctactgtcgaagaagttccggaggtagcaaggccatctagcactcgatcggcgccctcggcggcggcggccgactgccggggctgcacaatggctagatcgttcaacatttgtccgcagatcgaccccttggtggtcacgcgcgtccccggcgtggccctcgacatgctgttcctcgtaatcatccaagcgcttgccgtcatcctcctcgccaagttcatccacctcttcctccaacgctacaaccagccgagcgcagtctctcagatcctcgtacgtacgcgcgtgacgccccatcccaatccgcggttaacttccagacgctccatctgaaactggcgtgcatggcgatctgctttaatgatttcaggccggagttgcggtgggcggcatgggcctgcgcaacgccatcctgcacgtggacgtggacgacgtcgaggacatgtacggcggctacatcaccttggcgcgcgtcgtgtacatgttcctcgtcggcctcgacctggacctcgccgcgctgcggaactccacgcgccggtgcgtcgccctgg

SEQ ID NO: 190916 - DNA, 1573 bp, Zea Mays
cggtctccgagatcgcggccgccttccttggcgcctcggtgagtccgtgtcctttcctcccgtgccccacatcggttctaggtttttctgcaatacaatggtcactcttatgtgctctgtatgtaactatttactggtcaatgtgtatggtgtttgccattgtaggtggaggtgggtgaagaggaggctctggtatgctcaggttcactggtcgcagaagcagttcggtgtgagttgcgctccatgatgcttgaccatgggtggaggtgtctgggagagaatatttacgtggactcgaagtttgatcagaatgatgggaggactgatctgtgcgctgtgaacgtggtacaatgtttgtggcatttttgcccctttttatgcattcattgttgcatgttaatttctgtgcaaagaaatgtcatgtggctgctccagaattggaaatgagcattcaaatctggatgttggggtgttcagtcgaattggttggtgaagtaaaatgggttagaaatggttagttatgcagcgtgcatgattttaacactgaaccgcatgcaacagttgcacaatcacagtttagtttgtgctccaacacatttggttagctcaatgtgcctaaagcttgagctaatgaacttatagtaaagtaacataggctgttcagaaatatcaatagtcactgaagttcaaaatctcagcaatcatatcatttggatttgattattagattaatccctagaactcaatagttctcttcataactatgtgtacactctgactcacaaaataaataacactatgcgtgcactctggtgcctagtcatgatcctgatcctgaagttgccatccaattccagttgagcattgacatgcggatgctctaatcttctcttgcgaagcaattgcgatgctgtgatgctcgatagatatataaaaggcatttgtggttcagatacaaaggtttcttaatgtttttagtggaaaaatagttttagaaatatgagtctagaaggaaaatgaaatgcctccaatggaggtcacatagccttcacttgtttgttgcattcctctttggatagactacttctaccttctgttactctctactatgaagtataagcttttgatgttatatttctggatgttacattgattagttattatatttgtggtgggactgctgcaggaagttcgattagggagaaatgatgattttgaatttattgtctcacctgatgcatttcggtacactatgcataaggtatccttgaattcccatttcccacttctttctgcagaaaagaaaatagtttctgttaacaagttctgtatttctgttgttgctagaattctgatgttgctagttccagtatggtggaaacatttcatcacagcaatgaagtagttttggatacctctaacattctaacatcatgtacaactctgcctgcacttcaggagggccgtgtgattggtaatttggaattttcattttgattacaatgcagtaattcatttcaaaatgattttcccttcttttgcaggatatagcaagatgctcccctcagaacag

SEQ ID NO: 190917 - DNA, 643 bp, Zea Mays
accgacgacccgtgccagtaaccatcgggtggacatacctagggtcctagtggagggcaacagggtgatacattggcagctcgtcatgagagggagtcggtgcatcagcccaaccacaccgctagtagatgtgaatgggatttacgaatcgtgacaaggaggtcccctcagcaaacagcggtggggccacacatgccagcgcgagggatgctggctccgcatttggtggcacaagcgacactggagccacgcatggttgtgcgggagacgatgaagccatgcatggttgcaggagacgacagagccatgcatggcagtgcgggagactccagagccacacttggtagcacgagagactctagtactcatcgcagcgcaggggatgctggatctacatgagggggcacgtgcgacgctagagccgtgcatggttgtgcgggagacgacaaagccatgcatggtggcgtgggaatgacattatcgtatggtagcgcatgagactctagggtcggtgggggtagcatagggggcatcagggatgtgtgtagcgtggtgggggaccaaccatgggtgcaatagggggcaccatagagtcagcctcgagaatggtgttcaacttaagagggagaggcagtggaaggag

SEQ ID NO: 190918 - DNA, 400 bp, Zea Mays
atcggcccttgtcttgcaagatgatgagttaatagtaagttggtttgcaggaataattcatcgttggataagatggttttctgaagttgacaatttcaaggaacttcagcttatgtttgtggaatgtgtcagaaaatcctgcatcaggacactatctgcgaagtataggatgtatgaaaggctcacagaaaagcggtttgaacttgatgatcatggcattccaatggttgaggattttgaggcaataattaaacctttagaatctagttattctgtggcttctactgatgaagctttggtgtatggcatttctgctagcggtgtagttgtgctaacactgtcaagagttagagtccctactcgacaatttaactgctttgttatgggctgccaatctgcg

SEQ ID NO: 190919 - DNA, 329 bp, Zea Mays
ttgggatataattcttgcttacccctttcaggtccggttagaggattataaagcctctcggccacacatgcatggagctaatcgctccttaattctaggcacacgcatggagctgaccgctccttaatcctaggcatgcaaactaacctttcaactaacatgggttgattgctccttaattctaggcatgcagcaaaccttccactaacttatcaatttcccaatcttatccactggaacctgcggctattgcctcttgggcgtgttcagcgcgctcacgcgcacgccgtatgtcacgggtacgccgttgcctgacgtaggggcggccg

SEQ ID NO: 190920 - DNA, 513 bp, Zea Mays
cccggcaacgagtcctctccaaactctcagccacctcggccacatcctttgcccccgcggcaccgctacctcaacttgggcgtcacactcgtttacccttctcttcttcaatgacccgcactactcgccccttcgacctcatctgctgcaacctttagacatcccctattcctagcatctccggtctccggtactatctggtcatccggatgacttctctcactacttgtagacttttcccgtacgccgtaagtccgacaccttcactagtctttctcacttctttgcatgggtgttgactcagtttggtcacaccatcagggctattcagtgtgataatggacgagagtttgataactctatgtctcgcaccttctttctctacgtgtgcaactgcgaatgtcatgtcctcacacctcccctcaggatggtctagtcaagcacatgattcacaccaccaccatcatgacactgcctcctcttccaggtttctcttcccacccggaaatgggc

SEQ ID NO: 190921 - DNA, 663 bp, Zea Mays
cttttccccacagagtgagttttctcaagacacttctgatacagattcgatgagcacaagtattagtaggatgtataccttcaggttagggacttcgagcccattagatagtcctatcaaacaattgggagtaggagacacaagtcctccctcaaggaagggttgccattctcctagatatccttggaattcttgccggggatcagatgatgttgattctagctttatgagttcacctcggcatgatgatgaagagaggaaatatgatgtgcaaccaattgattttgagagtagacacatctggtatcctccaccacctcaggatgaaaatggtacttttcaatatgatgaggatgatgacaatgatgtttgtgatgggaaggtctttggacatattaaccatgattattgtgacggcgaagatgatgatgatgtgttagggatcaaaggaaaacatagtatatctcacaaagagttcttgaggagtgctttacatgggcatttcagggctctcgtctcacaattgctcgaaggacatggcattgatcctgtggatggctggccagacatagtatcctcattagcttggcaagcagctacctttgtcaggccagacacgagcaaaggtggtagcatggatcccacagactatgtcaaagtcaa

SEQ ID NO: 190922 - DNA, 288 bp, Zea Mays
ttttgagtcctatttttgcaaagccaatgttacggatggagaagtgcgaagcacattgtttggagtcccaaaaatccaattttctccttcaacgactccctcacagccggcctcctcagagcaggctctcatgccaacaccgccttcgctccgctccactccacttcatgtgtcccagccatccttggcgtgggatcaagcaggactggttgctgccctcaactagttttctttcgagaacccttagctgtgggtgatggactccgagccatatgacgtctgatgatg

SEQ ID NO: 190923 - DNA, 394 bp, Zea Mays
ggattgggggaaatgcgaaattgaagctctctggtggaggatttgaggtgcggacgggtgcgctagctgcttgaatacataacgaagtcgatggtgcactcgatttatagactccgggggcggtggctctcaatttgatcacgacgtgctggcagccggagatagggaagaacacggtggttgtaaccgtggcgttcacaggtgcaatggcgcaaggataatactcctaagggtgccacgattactaccgcatggtaacaagatagggcgtggcgcaatcgaggtcaccggcgcttccacggctacaccggtagtccggccacgttgccatggctaaaagcacggtgataatctccaatccgtgatcttatccattcccctccgtgagatcttt

SEQ ID NO: 190924 - DNA, 381 bp, Zea Mays
agccctcatggggatttatggtattcatattgagataaagccaatcattttatttctcgttgctcatttgataattcacacaaatattgtttccatttttactgttcatgtatggatgttatgtgactgtttacagttggtttcaacttaagttctatattttttgtccactcatggagtagtttcctatttgttgagacatgtagctagaacattttgtcgtggatgtgtaattggtggaccaaattttaaacggtgctggatatggaactcctctccctagtgtgacccctaacattctttgtaattattcattctgtggttatttatatgtaaatgttgcttttatttggctgatgcttcaattgttcttacagggct

SEQ ID NO: 190925 - DNA, 447 bp, Zea Mays
cttatcttaaaaagattttatctcatcttaatagatctaactaatctcaaaagattctatttcatcttatcctaataagcatacttatccaccctagtttaacaaccatgatctaatgtaaattaattagatcttatctagtcaaactagtcacaccaatctaacctagatctgatctaatctaaagtgacttatcaaacatgttagataatactaatgaaatagtttagactctactcctatagaacatgtcttaacttagttcaccttgcactaaattaagaatgacagatcgacttagccatatgcaactaccttaaccatccgatagttgcataacccctcaattttaacctagcaagtgattctaacctacctgcaccatataatccatcctactcacatatatcctaaccatatgtccttaactcggatggcaactccaag

SEQ ID NO: 190926 - DNA, 376 bp, Zea Mays
tggtgtctggccgcacggtccaccagaatcctaagcttaacccggaaatgaactagggagcacgatggaagactcgagcacggaggaattgctcaccggttaacatcgatgcgcggagtccgatactcgacgtgggacggcgttgggcggatcgcttgctccggctaggaattgccgatggcagggtggtcgatttcccccatcgcacacaagagcgcgcgtcggtgatgcgacaaagcctcctagctcgcgcttcaggcttctacggtggtgaacccgtggtccgacagtggcggccgacgcagacttggtgtcgccatatctctagtggtgtctggcgaggggttggagagaaaggaaggagaggaaggggtaa

SEQ ID NO: 190927 - DNA, 830 bp, Zea Mays
ctttatggtgctcttggcggctctcttcttgcataccgcattgcagattttctaggttaattaaaaatctacaccttttttaattgtccttatcatttgtttgataaggatgtgcacaacaatcatctttgatgcaggaaggaggatagaattggtcacagcagctgcattatatatccttggtgctttagtcactggatttgcccctaattttgtagcactaatcataggtcgtgtcctgtatgggattggtattggtttggtgagtatctgcaggtacagatgtttttttatttccttttttctaaaatgatcccaggtaattgttatcaaacgaatctaattgagaactgcatatagaaaacgattttctggggacatttagctatacattcactcaagctaaggaacataacattcactgatataaacttataatgccatgatgtccgattgcagttttctgatatttatatgttagtcatttgctgaagtgtgtaacatcaaaagctagttggctgatgtagtttgatgggcatgttctgttataactaattatagtataagtagatataaaacatgcttgcacttgatatttcttatattttgatgatgcgttgaataaacatattgctgttggtttgaaatatattgtttcctaagttatttaatataactttctgctttaatttctgaggtagttggcacaaggttgttttgtatgttgcactttacggtggcatgcttttgctaacttaatatccactggcatccaaaatgtccaatggtctatgcttcgttaaaaagggaatgatatgtctcgatgaaac

SEQ ID NO: 190928 - DNA, 396 bp, Zea Mays
ccatccgcccaggcgatgtccgcgactgacgacttccaggacaaggccgtcgacgagtggtaaggggactcgactgctccctccaaaccccgatccttctcgtttccgctttctcctttacgagttatatatgaccgacggcggtccgccgtttgtttggttgcagttgctcttgctgctacgattgctgctccagcatcctggacttcctgtgctgctcgtcctgatcgatcgatgcctgccctttcgacggccccgtggaatttctcagggaaccggaggccttaccgtggcccactgatcttggattctagatgccgtgggattcgtgtgttctttaggtccttcggtgacgatgtttgtaatccggattcgaatcatcggtaacagtaaagg

SEQ ID NO: 190929 - DNA, 729 bp, Zea Mays
gggtcaaatctcagatgaggtatggaatgtcatccagtcaaatgaaactgatatacagggaactgtgaaagccgtctacaataggatactgaaccctgaaaaggtctctgagccttctcccaagaagctgaagcagagaggcaaagaggaacaagttctgcccacaaagacagcaactagcgttgcagtcgaggcggaagatgatgatccagaggagccaccaggatttggtttcaacaatacacagcgtaatgatattggagcaacaaagccacagatgagtttggaaaatggtaatgaagggaagccaaatggaggcgagccagctactatcagcaatccaggggatgaggaggaagatcctgaagtgccccctggatttggttaatggaattcactaacttcagtggaatgcagctgtttctttcttagcaatatatacaagaagggaaatgtttaatcttctgttgacaggaagagtaatgcaagctcatgtctgcgacagttgaaacccgtgtaatgatggttacttctatccagccccaggataccctttctgtgatagtggcaaatatgttgggtgctaacagtctgacaacgagttccaggcacgaagttttcgaagaagctggacatattatgagaggtcctctaaattatggagatgtttagttctttattccaagaggcacgtatgaaaaacatatgctatataaaatcccttgtgag

SEQ ID NO: 190930 - DNA, 497 bp, Zea Mays
ggaaggttgcccggaaatcctcgaaatcctcccaggtcgcagacgtcactggttcaccgtgccactgtatcaaaatttgccgaatgccgcgagccaggcgacccgccaagacacgggaaggtgtggacaccactgcgccgttgagtgtggccgggagcgcaggtggttccgttggtggcgccccaacgaacttcttaaggatgcccacatggaagacgtcgtggattttggcgtcggatggaagctgtaggcgtacggccgcctcgttgatgatctccttgacacggtaggggccgacataacggggcttcaacttgcctgtggtggaacgtggcagggatgccgatggtcgttgacggagacgaagaagggcccagtcaccgacgttgtagacgacctgcctgtgatgttgatcgtaggcgcgtttctgggatacttgcgcctgatggagacggtagcgaacgtcgtcgaggaaggcggcccgttcgtccatctcc

SEQ ID NO: 190931 - DNA, 651 bp, Zea Mays
cgctgcgacccgcatcggtagcgaccgtgcccgcaagaccacactacagacacttcgcaaggagtgggagaacctggccttcaagccatgtgaggatgttgatgactttgctcttcgcctcaacactgttgcagaagatggtgcagttcggcgacgacatctatgatgaggagagaggcattgagaagctcttccgttgcatccccgagaagtataagcagatcgctcgctcaatcgagtctcctagacctctccacgatgacgatcgaagaagcgattggtcgtctcaaggtcgtcgacggcgacgaaccacatgccctctctgggcctattaccatcggcgggaagctacatttcactcgggagtagtgggaggactgccagggtgacaagaagggggagtcctcctcgacaccgcgccgcaaacgtggcaaggcgcgcggaggcgcctaggccggggtgcgaggacaagctgagggtggtgcccgcggaggcgcccaaggcggcgccgtcggcaacaagaagccgacacgagatgacagctgtcacaactgtggcaagcttggccactggctagggaatgtcggcagccacgacgcggccaggccaacgccgcacaggcggaggtggaggaggaagctttgctcttag

SEQ ID NO: 190932 - DNA, 383 bp, Zea Mays
gcttacttcagcgataaggccgactaatcacgattagtcggatgacttttaaaccttggtgggctctctccttgtcagtcgatgaggtccctgccatgggtgtatgagggagaggagatgcttgtgcgttgctgcggtgacgcgacacaaggggagaggagatgacaacgtccctattgggacgtctgccctagagaggcggcggctctagaggggtggtgtccacgggaggagcataagcgatattaggcacatgataccatgttagaggaggtattgccacacaattagattgtattgcattgagccccataggctgattatatagtgcacagaactaacaccctacgttagtaggcaatgcggtattaattcatatctac

SEQ ID NO: 190933 - DNA, 313 bp, Zea Mays
ccacttcccgtcgatgcctgtcctggtagcttttcattgtcacctgtgactgaatcaatcggtcaggaatatccgccaagaattcgtcgcgtgcctgtagttgtttgtcaacagcagccacctgtgatgttcctggatgatagggcagaagagcaggaggttctcggccatataccaccttaaatggagagcatcagagagcagtctggtaggaggtgttgtagtagaatttggcccatggaagccatttaagccactctcttggtctatcccctgctaggcaccgaagatacatggtgataattcgatttac

SEQ ID NO: 190934 - DNA, 1307 bp, Zea Mays
tagaaatggaggaggatcactcggtgatactaatatctgaaggtgctattaaaagcatcaaacttagcctctctaccggagaagagatagtgagttctacaaacctggtgtttttaccagtaattccagcataccgagatgccttttctccaatgatgacttaaatgtttttttatttctgaagtgcacatactccataaacgagtgcccagtgacccatcctagccagcttggaaatccgttccttgggttgccacttgaagctgggaagtgtgaatcctgtggtgcctctgaaaatgacaaatgcgaaggtacacaatgtttttttgttcataacactttcatacagtgtgctctagagatcagcttagcgaggacaccttttcctttcgttaacaattaagtttctctgcttatgtaggccattttgggtacattgaactacctgtacccatataccatccatgtcatgtcactgaactgaggcaactattgagcttgatatgtctgaagtgccttcgaatcaagaaagggaaggtacttgtaaaccggaactgcataaccttacttcgttgtttttctatacttaatttcctgatttgtttgaaccttatgtgtttttacactgatgcttaaccttgggttgctatttatgaaatctttttcacctttgcaggtgaaacaaagtaatggaaaaggaaacgcggcaccaactttgtgctcttattgcagggtacacaccagcattcttcttttttgttctggcttgaagtaagagtaaatagataccttggactagttactggtatatgtagggatatggaagtaaatgcccacgctaaaataaagtatatcagtgtttcaaattgaaccactttcctctgtggtctgaatgattgacgagttgttatttaagaggctgaagacataacaggatatactgattcagtgccttagggaggtactatttcacactgaaatttattcaaatgcagctaatctggttatatatccttcataagtaacttcagtatagttgacaaatatagcatacacattgaagtcagtcatatgtccttgttgattagtggatggctttcatacagtaatcttgcttgctgctggtctggtgccagtgcttacactaaacctgtgttggctggatgagtgtccactaatgtttcctgaccatcccagaacttgttgtttataggatattccagccctgtctttgaaggaaatcaagacaacagatggtgcaattcgtttagagttgagagcacctcataataaacacatgacagaac

SEQ ID NO: 190935 - DNA, 363 bp, Zea Mays
gccgacttcggcattgcaaggctgcttcccggcgatgacacttccgtggtttcgaggaacatgcagggaacgattggttacatggcaccaggtacgtgactgtctctgcagcttcatactgtctcatcacgtacgtgtgcttcatgcatatgcggtcactaacgatgtctctgtttgtttacttcgccgtgaactgacattaattactacagagtacgcttcaaccggtaaagcgtcaaggaagagcgacgttttcagctacggggtaatgcttctcgaagtcgtcactgggaagaagcccaccgacgccatgttcagcgaggagctaagcctgagagagtgggtcaggcaggctattccatc

SEQ ID NO: 190936 - DNA, 300 bp, Zea Mays
ctcgtcacttataccactttgtttctctcttaggactctggcgtagtatctagagaatttactgacatcagccctgatcttgtcccatctgctgctaagtgctctgttaagtctacaaggaaattcccccctttgttcattgtaccttttttcaattctggcccaaagaccctccctcctttgtccagtatgcacaatagggtcactacttatttgcaaccatgtagtacaaaggagtatgtcttctggtgctgtaaagttttgttccttggatttcttttgcttttgaacaggaggtgc

SEQ ID NO: 190937 - DNA, 717 bp, Zea Mays
ctgcatacatgtagatatgaattgtaccatattgccaactaacgtagggtgttaatcctatggactatataatcagcacatgggctcaatgcaatataatgtaattctatagcaatatcccctctaacatggtatcacaagtctgtcttgcttctgcttttcccctagctgctgaccctctaggggcacaacctctctagactccagggtagctggccccctaaggtcgccacctcccttgcgtcacattgctgcagcaatgcataagcatctcctccggaacccatggtagggacctcatcgactgtcgaggagcgctcccgcgccgaggaagccacaatcttccgcaagaagattgatgacatgctcaccgcagtccgcagcttaggttgtggaaaaggattttgccaagcatgcctcacgtccagacaaccacccttctcgaggagaaggccgccaccacccagcagggtttaggcttacaacctccacggccgccaatccccataataggatgaccccactgcagactatgaggttgtcgtcgttgccaatctccacgtctaggcagttgctgttccgacgctcgattgttggtaacgattgtccttaagtcccttgataattacgcctgttggtgtgattaggtgttgttgttatgcagtacaccctcgttgatcatgtcttgtctgacccttcgtcagacaccgattcatg

SEQ ID NO: 190938 - DNA, 753 bp, Zea Mays
tctcagactcatggctacatgctgaaacactcttcactgtttcttttcataatttgacattgccacaggtgaatcgaacaatcgctcactgatgctcgttaatgcttattttgattattgtatactgaatgctgcacccattgcccatgcagacacaaataacacacacagaactcttggacttgaagcctcttccactgagtgctcttggcaacaaaacgtatgaggatctgtacagattttcccatttcaacccgatacaaactcaggtgcctttggaacccagttatctaccgttccattgccaatgccattatctgcattatagggattgtaattaaacttttaaagctattccaaccattgttttttgttttgcaactgttccaggcattatcagttctttttgcatagtggtgagttgtttgtgggaactgggaaacatgtattcttgattgaacataaattggagaatcaagtaaaaattaccaaatgctaaacaatttgcatccatttttttgaagttcacatgatgctttttgtatgcatctcttgttgtataatgcccaaacacacctagtaccattgctgaattgtttgctcatttgtatgtaaactattaaatttctactttcttcctttaggcttttcatgttctttatcacactgataacaatgtactcttgggagctccaactgggagtggcaaaacaatttcggcagaacttgcaatgctccatcttttcagtacac

SEQ ID NO: 190939 - DNA, 394 bp, Zea Mays
gtcgtttgatatatctttgccatacaagaccggacattgcttatgcagtaagtgtggtgagtaggtatatgcatgatcctagaacagggcatatgaagatagtttatcaaatcctgagatacctgaagggaacccctggcaagggattgtggtttagaccaaatcaacatatgaatttggaggggtattgtgatgcagactgggcaagcagtagggatgatcggagatccacttctggattttgtgtatttgtgggaggtaatctggtttcatggagaagcaagaagcaagttgtggtatctcggtccactgcagaggctgaacatagagcaatggctctagtagtgtgtgaaatgatatggttgaagggtctcttgaaggagcttcaagtgtt

SEQ ID NO: 190940 - DNA, 448 bp, Zea Mays
ggtaacttaattggttatagtgaatcaggtattggtctcaaggtgttttccgtttcttagaaactgaagtatgtagtacggatttatagtttgatagtgtcagcatcaggggaatgccataaaaggaaggggtggagcagtgtagaggggggtgggtatggtaaggcagtctgaagctatgaggatcagaacaagatagacaaaatgtgaactaggaaccaattaaactagaactacactagaacaaaaaagagaaggtagagctagttgattatcagctcacttgatatctaagcttgtaaccttcttcacttgatgtttgtctatccatcatacacaaagaggacgtagggtattaactattaagcatcttgcggcgtgaacctccgcaaatcacttgtgtgctggtagctaggtagtacctactacctaggatcaacgtgcctcc

SEQ ID NO: 190941 - DNA, 321 bp, Zea Mays
actccctattacggttcactgcgatgtggtaatgctcctaggcacgtggcgcaggtacgaagatggcgaactccggcgaggacatctcggttagtcgtacaagtgggtacaatgaatagttcagtggttgggtccaagctcatccagcgccaagatcttttatccaacgtcattatccgcgtgttaccaggcacgaatcgtagcaccggcgagcatcgtggcgcggggtcatcggcgacgagatacactgcatctactgatctttgtcaggcactgtaccatcagaacccccatcacagtgcctgacagagcgatttgcag

SEQ ID NO: 190942 - DNA, 306 bp, Zea Mays
tactgaggcccaacttgtcacattagagtttttatttgccattcagctgccagctcgtcctcgccgtcacgcgttccggtgttcaggcttgtcaatcggctgttgctctccattgaccctccgcaccgtaaagctgtgtgatgtgccctttcactctgagaaggtatcaagaagacttgggtgtgttgtgactagtgtcctcttgctgcggtcaggcgcatctgtaactgcgtgggcgccgtctgcagtgacgggacttctccagctctccaactgtgctagcctcgatgtgctactctagtatcc

SEQ ID NO: 190943 - DNA, 519 bp, Zea Mays
tttctgattttgtcaatggcatcccaggcccaggaagggaaatcgatagccattgccaaatagaccatcataccagtcaaaacatgcttaacctggatccttctacccgctcttgtcaataaatccgccttccagttagggagctgccttgcaattttatccacaaaaggttgtacttggtctttagtaaacttgactagggagagaggaagaccaagatactgacaggaaaacactgacagcgcacaaggcagcacattttgagtaaccgtaatatcctccacagagcattggatatgatagacattggacttgctttcattattctgatggcccgaggaggcaccaaacaaatgtaaaatctccaaagctgcaaggatatcatccgccaccgggtgcaggaataatgccacatcgtcagcatacatagagacccggtgcaatctctaagatggtgacaaaggttgtaaaagacctgcatcttctgctctagcaaataacaaacccagaatgtccatg

SEQ ID NO: 190944 - DNA, 339 bp, Zea Mays
cgtccttctgttagcaattcttcttggaattgacttgtatagactgggggcaatatcagagattcgagtgccatgcagccatctatcattccagaacaaggtgtttgaaccatccccaaccttagaaataagggccatagagaaaaaagccctagctttgtttgggacatgtatgggaaggcttgcccaaggccgccccaaatctgttttctgcagccacaaccatctcatgcggagagcccaacaaagctctgggagactagagattcccaagcctcccagttgaaggggtcgacacaatagtctcgagttcgaaacctggcagaggctttatttgtg

SEQ ID NO: 190945 - DNA, 298 bp, Zea Mays
atgcggatgacacactactgataatggaagcttgccctagacaactattttttctcagagccgttctgaactcttttgcaacttcgacgtggttgaaggtgaactacaacaaatcaagtatgtacccccatcaatgtcagtcctgctaaaatggcgatccttgcaggaaccctcaactgtcagataggttcaatgccctttacctatcttggtgttcctcttggtctatcaaagcctaaaatctgccactttttaccgctcattcataggattcaaaagagattatcatgcacctctg

SEQ ID NO: 190946 - DNA, 567 bp, Zea Mays
tcagtttgtcacactaaacacccccggatggtgcaattgaactgagtcaatgcccatgcgaagaagtgagattgggtggtgaacgtgtcagacttacgagggggtgggtgggtggggaggtccacaggtagtgagagaagccatccaggatggccagatagtactggtaaccgaaaatgctcggtgccagggatgtccaaaggtcatagtggacgatatcaaaggggcgagcagttctggacatggaagaggggaagggtaagcgagtatggttgacaagcatggcaaggcgacacagcatccgcgggggcaggggatggccgaggtgcccgagagtctggagaggacgtcgtgaccggggtggctaagacgacaatgccaagtggaggtagaggcagcagcgacgtgggcgtagggcgtggcaacacaggatggggtaggtggggcgggaaaccgaataggatatatggggctggagctgtcgcatcgggcgaccacgacacaagtggtaagatctcgtatggtgagcccccatggatcgaactccatggaacaatggttgtcaat

SEQ ID NO: 190947 - DNA, 378 bp, Zea Mays
catcattgccctttgctgctgggtttgcaggatttggaaagaggaaaagggagatcccattttcagtctttttggacaaaagtggatggttttcaggaggctgtggcgcaggcttgggggtctgtttctgcagggccttgccctcttatcactttggccaagaagttgcagacaactgctaggggactgcagaaatggagtgacaaaatagttgggtgtgtcaagctgcagttggagatggctcgagaattgttgcaccagcttgaaatggccaggacaggagggctctcttgtgctttcttctctaccgcgaacgattgttcggttgagatctaagatcacttggctcaaagaaatgatgctaatacttcttttttt

SEQ ID NO: 190948 - DNA, 282 bp, Zea Mays
cgcgcggcggacgaccagggattcctcgccgtcgctgcacttccaccgtggaatcgcccctcgtcgtggccagcgttgttccgaccgccattctcggtgagcttactccccttcgcctcgtactgttgtcccctccgcgaagcattgctcggaacgaagaatagccttagggatcgttgagcgtgcggggtccggtgatggcgccgccgcggatggatagcgccgccgcgctctcccgtcgggatggggggagaactttgccaccttcggttcgacgatgaa

SEQ ID NO: 190949 - DNA, 368 bp, Zea Mays
tcgcccgattactgtttcctggtcgtcctggctagggttttgttattgggccattttcaacccatctacagtatactttagactaccctctcctctcctctgtaatacctagccgccaaacagtgcactacgtctcctactctcctctcttgctagctcgactgttccagcccttattcacacttggtcgccggtggctgccccttcagacctacagctcaccgacggctacatcatcagcggctacaccaccctgccccttcccatgctcgcctgctacagtctccacatgcggagactgtcttaaggttcaccagctgcagtctccaccctgccccttcccaagctccagcagacctgcaccattg

SEQ ID NO: 190950 - DNA, 382 bp, Zea Mays
tttgaaacaaagaggaagtcctcgtggttcaacccatgctgattacttaaagcatgcatatgccctttcaagaaaactagcaaggtactaatatggcttccaacaagtgcatattttgatatatttttcttgttcttgtctgatgaggggaattatcatcactatttttgtcatttttttgtacttcagacactggagaatatttgtgaagtccaggaagacaacatttgctttggctcaagcttatgatgccttggggattaatgagaagtctgtgaaaaatatgccttttgaaaaattagccatgtcaatggaatctcctgtagttcttcggagcacgaaggcattactcgaccgattggagaaacgccttgtcatttct

SEQ ID NO: 190951 - DNA, 275 bp, Zea Mays
ccgcgactggggatgggtctgcggccgcggtaaaaatcttccgcgatgtggtgctaaaaccctgaagtggcgctgctcggttaatcggcaatcaccggacgctcgccgtggctctgcccgcgcaggtgagctcgccagcgcgtttacagctcagtgaacctcatcgatctccggccatctgcctataaattgagcccgagcactggttcttcaccacatcacacacacgagcgcttgtgcaatcgactcaatcccaccggagaactcagacagac

SEQ ID NO: 190952 - DNA, 389 bp, Zea Mays
aggatcttgccaccaggacccttctcgctcggtgtgacagccccgggcctctctacacacttcgcctgcctgcttccactacaccgacctctgccccgcctgttcttgcagccgtcgcctcttttgtgacttggcatcgtcgtcttggtcaccccggtcgtgatgtgatgtctaagctctccagcagcacctccgtttccggttgtaggggatcttttgagcacctctgtcatgcttgtcagttaggtcgccatgttaggctcccattccccatctccccttctagagcagcaggcatttttgatctgatacactgtgatgtatggacatcccctgtaatcagcatttctggctataagtattatttacttattcttgatgacttctcg

SEQ ID NO: 190953 - DNA, 638 bp, Zea Mays
ttggtgtaacacgaccaattggatgttcattcaattcctgaaccaagttagatataggatgcttttctttttcatctttgtcaagaggtttatcatttgttgcatcaattgctttgtcttgaggaatattgatggaaatacgatcctctgcaaacttctgtgaagagcaaataacactaaggttggaggaacatggcctatcagcaccaatacaaggctcattttgatctcgaaactttatgtcaattatattgcatcatcaatactgttgtcattacattctgggcttatattcctttcagtaatcttgggttccctactagtagagctagatggatttgcacaactagcagagaccatatccaatggactataaggtgatgaaccaagattaagtgaacaaacttgaagtggagcatgacaaactgtatcagatgcatgttctgttaccaactgctgatgatcctcatccaaagcacatgacatggattgctgagaaccattagtcgaattgctttccattaacatttttctatggtgccaaagcagtactgaaggtgcagttgtcatgtccagaaaactttgagtgaatttacaccggtcatccaaacaacaaatggcaggtttgatatctgaat

SEQ ID NO: 190954 - DNA, 485 bp, Zea Mays
cagcatacaaagactgcaacatgtaagcagcgtcaggaagtggtaaaacatcagaggcacaaagcattcgaccctcaacaggcaaagcagatactgtttcccgtagagctcgggaggctctagaagctgttccaaaggtactgggaagggatagctgtgcagctgaacctttctgcacagccagcagagatgacatggctgtagcggatgaatctgacattataagagcaccagcagaatagaacgcagactcaactttcaaagctaggtcctcaggatgaactctgccagctgcagaaacagcaccaaatgtaagcccgccaccaacccccagaggtggggacggcctagtagcaacaatttttaaacaggtgggcctccgcagaccactgttcaatccaactgaagaaccaatcccacctgatgtagtgaggaataatctcttcccatctgataaaacaacaacagcatggagccatttcgat

SEQ ID NO: 190955 - DNA, 512 bp, Zea Mays
acatttagcttagtgtaaggagccttgtttctagtggtaccaccacccggtatactaagaagactcaatgaacgcccttgattctctgggtgctgagctcttacccctgaatctgcatgtctcccattgtgttcatgaccaccaggtatacgtgaataatgaagaacttggacttcattatctttttcaatatagaaaatctctcacggccttgtttggcttgacatttagttgaactgttttgttgtcatctgctttagggaatctgattgcaccatatccatttttgttaggccattgagatcaagttctactacctccatcagcttcttttccaaagggcgaacaactcttctgtttagcttctgaacatccttttttgggtcctgttagtgtccacaggagacactggtttatgcaaatgttcattttcaacagacacatcaggttgttgcttcctcgaattcttatcaattgtatggtgtgcgttagcaacagaacgaatatctttt

SEQ ID NO: 190956 - DNA, 573 bp, Zea Mays
ttttaactttccgtgaggcagtcattgagtttttgaagatggatgatgtcgacacactgcttcaaaatgatctaaatagaggaacagctgacatttcagcacatcatagtactaccgcagtcttaaccggtcccattggtggattctcagggaaactcaatttaagcatcccatggaataagggttgcttgagctttgagaaaattgatgcagatgtatcagttgattcattagaattacgtttacaattcagcagcatccggtggatcatgaatgtatgggattctctccaaagaaagccagtagacgaacagagttgtgttcataatattgcagatatctctattagtgcttcgagctctgcctactgtccacctgcttcaagctctttgaagccatgttcagattctgtgatagccagtgactacatggcacagagcacattttctcaaaacaggcaggataaagttcaggattctttccttacaagcgcacacgtgataacagactggatggagcctgttgctcgtaaggatctgtgtgaccctgattcagattgtgatgaaaggtttg

SEQ ID NO: 190957 - DNA, 1164 bp, Zea Mays
ggcggcgaagtagcacgaggaaggggtccaataaaaaaaaaaatcgccaccggcggcgacggcgaggcggcatcagcggatacagcagcgggagccgcggcaggggacaggcgttgccgatcgatcggcctggcctggcgcggcagaggtcaaaagcgaaaaggaggagccgcaggaatttcttggcaccgaggcgcacgcaaggaatccagcgagtgagggatgggacggcagttttcggattcttcctgctgagtcctaggaactcacgcgcacgagcgtggtcaggagggagaggcttacgcggacgcggcggcgctggttttgatgaggaaagctggagcaaaaggtatttgcaatcctagatcttagaaatctgagtacattccgcggctgctgctttgccgagtcggcgctgccccgacgtcccgatttggcgggggttgtggttcggccgccacagccgccacggagatcacgctgggttcctctgtttctttatgcggcgttgatgaagaatagtttcttgccggtcggacttcagatctgctttgcctcagggattctggactgctgagcgcggatttctcctcaggtgaactatcgggtttcagctgctcttcgtcgtctctactggtccgctggaaagaggtgttcatcggaaattctacccgattccagatctacctgttttgctggaaccagttgtttccaaaaggagagaaattggtgctctctagtgcggaggccgatggctgacggcaagaggctgttaacttgatttggcaaggagctgttgtggtagttcgtcagtactgggttcaactcagacagagggaccttggttttggtttagcttctggctttcattgcacgctgcaggataagattgcttgtttgtatgcgctgggctggaacctggaattcggaacttctttctgaattgtactgggagggttcaagtattgactgatgatgggtgaccagtggtggtggcatggctgcggaggcgttctgtagtttttttacctcttgcttatgtgcatgctatgtggactgatgctattattcttcaaacagtaccataagctttggtggtgtggtgctgaataccaaccttatgttgtttttgttttccagagggatcaattggatccaagggtg

SEQ ID NO: 190958 - DNA, 420 bp, Zea Mays
cgggaatcgtcgacggcggatcagttctaatagtctggcggcggcacgcggtgtggatgagaggactcggcttcttgcggagcaggccatttggagtagagataggggcgcccagtatgtagggccaggggtatggtcaacaggggcgagtgcgccatgcacggcggccgttggacggtcaaccgaagcgagcttgaagcgggcgagcgagatctccgtggggaggatagacctgacggtcgtggcccacatggcagtggtgttgagtccgagcgcacatgagaggggatgagggaatgagccacggcccaagctgtcggcagagctgggcggaaggcctgccctgcgggccccatctgtaaatggcacaaggcattgcgtcgctctccgttgacagtcctgcccgcggaggcccaccag

SEQ ID NO: 190959 - DNA, 330 bp, Zea Mays
tctatcactcttggcattcttcagctttttgggatgcctctgggctgcacaataatgcccagaaatctaatgtcattcctatcagatgctcaatggaagatatggtggaaacccaaggtctgctgccttgtggaatatcttcgttcccctgccgttatttgggtcttcctttatccttgcacaagctgtctaggcagcacctccagccgtttattgataaaattgctgaccagctatcaaattggaaggcagacttattaacgaaggcagggagaagaaccctagttcagcatgttcttaccagcatgacggtttatatggcaatggcag

SEQ ID NO: 190960 - DNA, 485 bp, Zea Mays
agaagctgcaccatgttcaccagatatgccacctccaggctttgagaattgtaagtcatcgtggctaccactaccaactcttcaacccatagctgaaaccacgcatgtgttgcacgacgtggctcccaccaagtcaatggtagtgggacttatggaaaaggcatgctcagtgctggcattggagcggacagatgtgaagatagactcggagcagagcctattgccgccattggagagtgaaactgagagttcattgcaagggccactgccaaggtcaccttcttccatgatgaaagccattccctgttcaccagatactgcacctccagggtttgaaaatttaaagttcacacagttacagcctccctgtccacctctggtgcagactgcacatgttttgcaaaattcagccaataatgaggccatgcctgtgatatcaaaggaagctcctcagccattgcctgcattggatgcaacggatttag

SEQ ID NO: 190961 - DNA, 652 bp, Zea Mays
ggaagccaccggtgggggtggcagcgccatacgagtacctgaaaaagaagacacggacgacagtccaaaaggagctgtaaccgggttagagtgatcatcgaggaagtcgaaggtcgctggtgtgggtggattggaatcctcagaaaagggaaacgaggtttcatcaaaaaccacatgatgggagatgatggtacgattggactggcgatcaaagcataggtagcctttgtggtggggagaatagccaagaaagacacaaagggttgagcgaggagataatttatgtggagtggtggcagaaagattggggtagcatttgtagcaaaaaacacgaaggtgctcataggatgggttgtggttgaagagagcaaagtgtggtgtagaaagtgcaagtgttttggtgggtaatatgttgagaagatattgttaatggagtcgcaacccaaaagctggggggaacactagactgaatgagggtgcgaatgatattgttaatggagcggataacacgttcaaccttaccattttgagctgaagtgtaggggcaagacatacacacatgaagttgcgagcttgaaggttgtcaaatttgcgaccattgtcgcactggatgccctggatggtgacactgaactgcgtacgaacgtaggca

SEQ ID NO: 190962 - DNA, 794 bp, Zea Mays
cgggcaactacacggcggccagcacctaccaggacaacctcagccagctcgcggcaagccttcccaagaaagcctcttcgaacacgagtcccctcttcgccacgggtaccgcgggtgcagtgccggacctggtgtacgctcttgcactctgccgtggggacatcaacgcctccgcctgcaaggactgcgtcaccataggcttcgaggacgcgcagcagctctgcgcgttcaacaaggaagccaccgtgtactacgatagctgcctcgtcagcttctccaacgaagacttcctgtcgactaccgtcaacggcaacgagaacgaggtcaccgtcctcatggacgcccagaacttcacggagagcgcggactacatcaggctcctcttgttcactctgctgaacgacacgtccgagtccgcgatcaacagcatcaggaggttcacgaccgcgcggatggacattagctccctgccgacgatttactgcgctgtgcagtgcacgcctgacctcaccgccgacgagtgcgccgcctgtttgcaagacttcccgcaggtgacgctccagtacctcgacgggcagcgaggaggtcgacttctcggggtgcggtgtaacatgaggtacgagatctacaaattttaccaaggggaccccatgcttcgtattatctctttggcttcggcagtgccaacgatcggtaaaacccctcccggaacaccagtcacggtgtatccgcagcctccacctgcagcgccaccagcgccgcagatgataaccacgcctatcgcagcacaagaa

SEQ ID NO: 190963 - DNA, 794 bp, Zea Mays
gccaaggaggagatggacaaggaggtggctttcaacaggaagcgggccgaggggaaggacggagggaagcgcggcagcatggagctcaagacccgcaggctcaaccccgtcaacaccacatgctacgtgcaggtgagggcatcactgacttgtggattctttctgcttggcgccattttacgtcaactttctgattcaaatcactagtatacctagtttggggtttattcgaggagagattggaccatgtgtgcaattataaataccgtggattagtagttccagaggccacatttgcgtctgttagcctaacattgctaggcatgaaccagatacaatcccaaactgttctcatgggaagagtagaggtagcatacaaagaatccaaagccaaaccataggccatctagtatttaacttattttttggtaaacaactatcattatttaaacgtattctgttgaatggtgcagaatttacaacaaagatacatcatcgacacactcagtcaataataaccataaaaatccaccctaatctctgagattatattgtaataatgtgtaaaatatgcactcaataaccccagctgctggcctggccttatgcagctgtcccattggtgaatcactgcattggttgaaccaaataattagtgtgggggcaatttcttcccttgaactagttcatgagtgcaggaactgttgttcttttggttttcattcaatctcactcccctttgttattcctgcgcagatacttggtacaggaatggacacacaggacacttcacc

SEQ ID NO: 190964 - DNA, 310 bp, Zea Mays
attctacgcagttggaaagcaatatccgtggagtagcattttctgcaagttggttgaagccaatagacgattggcctttggaatctcctggtccatcaacgggcgcatctcgtcctgcacaataccaaaaacgtggggttggtggaaggcgtggcagaagacgttcggttgcatctgaatctggtactgctactgctactgatgaggacaacagctggacttggtggactggaggaaatatttcaaaacgtactttgcagaggggggctcttctacattcaaccagaagaaaagctgctcgccaaggtat

SEQ ID NO: 190965 - DNA, 1189 bp, Zea Mays
ggaaagttatggattttgtcacagcaaggaaccttgttatagagagtagcatcatgtcaaggttagtacttcggttatttcatggattacagatcatagtgaactgaatgaatggtaaagtcaaatctaaccaatttttacagattttatacatcttttcttcgttgtctacatttggttcttgtggatcccaaaggaccactttcagggcatgtaagtataaaataaaactttagtcctctcatttaaacaaattttctacatgtttttttttctgattgtaacaatgtccataaaacttcaaggttgcagggtttgtagcaaatctgcagatatttttcgtatatgggctgaggtcatcttcacctcctacactagctccaaaagaaactagaacagattcaaaacccagagcttcacgtggacgatatagaccacctcatttgaggaacaaggagagaagagagaatgattcactggaaggtcaaaattcagatagtgagtattcttggtatgatatgagctcatcagactcagacctgagtgatagtgatggttatgcaaaaagtggagaccgcttccggagttcgaaggctagattagctgccattctttgtatacaggtatgtagcttcacatatgccttgaattgtgtctccattcttagttctgatacatcagttagtcaaattttccttatgtatctgtacagtttaggttgacttgtatagtggacttaaatatcatgggatatgtgtccttcatagttaacttttaggatggtctttttttgaatatgaagcgatggtggtaccctttaagaggtatctactgatttcagaaggcaaattgtctgacctattagataacctggcaacttaactccactatggaaattcaaaaaacttatcatttgatttttattttacaaattaaattaagttgtggagctcaaaaaatgattatttggcatctgcatgagctaatgaagatatttaagttctgctcattgatgtcattttctttttgaagttatgccatgtgggatatcaaatatcgaatgcaacatcaaatatttcaacatgctcatactgctgaagtaaccatctcactatcctgttcccacctcttttaggatatctgccatgctgatccaaagttacttacttcacaatggccagtacttttg

SEQ ID NO: 190966 - DNA, 378 bp, Zea Mays
ccgtcgccctcaacttctcgctcaaggttctttcccttccccaatccgcaccccaccccaccccactgccgtccttttatctattccgttcgttcgttcgcatttacagctgccattcccttgaggtggtatagagggcactgcatcatatgcaaatattattaggttcgtggttcagctccttgtttcgtatatgcgcttggttcagtttatgatatcagcctgtggggaaggtatttaggaaggcagtcggttgcttggtttaggactgtgcgggtcggggtcgggcatcgagtactttccgtgtttatgcttgcaggttgcggcgtgtggtgtggatgcaagaatatcaggtccctccatttggttctgtcgatc

SEQ ID NO: 190967 - DNA, 2587 bp, Zea Mays
gttgccatttgtcctgagaacaggtaattggctgttgccacttgctttaattaccaacaatcaacggtgggctttgtgtatctagtctgctgctgttatgtatactacgtaacaagaaattgtaaacgaagtgaacaacttataattgaatgaagagacaaagggttgatcatcaggaaagatctagttgatcttactgttgctggcatgtgtaaaaaatgcttaagctacctatccacacaactaaacctatctggaagtttgctgcccttgtttgacaactgtggaggttaaatcttaatttgctacaaagtttcttgcgcttggttgcgcaacagaaagtggtgggataactaaaacacaactgtactgatttttttcactaaaaggtccaatctagtgtcaccaaatcctttctggatctcttgtttgttgccttattatacgtgtcaattagtctaccactctaccatcattttcattatgaagcattttcacagtacaatgtcaccaaccagcatacccaaacaccttgaatcccatctgttcttccattttctaggagagctacctgtttaatgtgtttttgtgtggcagtgacacctcatcaacaatacttctgtttcggcacgatccagactggaaacaagcaccattcttgtctgacactcaagaggtcaacaaggtaatctctttgtcatcaggagctcttgatacagattgccttgagctattatctgaacagccaagaatactgttttgcttagatcagccaaatgaaaagaacatgcatgatcaggttgattcttctaaaccagtttccaatggaaacacacatgggggaagcacctttagacaatctcagcaaagggaaaacgtttgtaattcattgatggcagttcctccctgccatgtagttgcaaagaagtactccaggtctgttgctactgctctgagtctgggatctgattctgatattttgcacaacggtgacaagcttccaaaaaggaattctagaaagagaggaaaacagtgcaagcgaacaatccgcaaaaggctgaatttggcatcagaaaccatttttgaagagagtacttatggtgcttctcctgcggaggtagttccgaccaatttactggttgataagttgtcagagaccacatcctctgctagctcattggttaaaactgatggtcggtacaaggaggaccatgtggaatgtggtattatgttgaatttagctacattgggaactgatgagatggatggttctggatgtgctggttcatcttataatgatgcaggagggagattaagctccagttgtgtttcttacttgaatgacaaatccaatacgacagattcttcagaatttgacggatccaccttcactgaacatggcttgggagaagaaagcaatagctaccagaagttaacatgcccctatgtttataatcccagttatgcaaccatggattccatctttagtaggtggaacagcgacaacagtgggaactacagtgtcgatgttgaggctaggttaaccgtcaaagacgaaaatagacatgatcattcgaaactgggggcttccacagggcggagtaatgtgaggatggaatgccagttgatagggtcatgttttagtgctactcatgctgaagacacaaacgatcctctagggatcagatcatactcctctaaggatgttactgatagttgtagccatactgaaatggttcagtgcagcagcaagtcctttcattttaaatcagggaggaggaacataaaatcaagtaaaacaccaagctatgttgatttgactgcgtctaacagagtgagaggttctaataggcacaagaacaatggaaaagatagttcagcagtgtggcagaaagtagaaaggaatgacaagatggtatctaaagcaggccatccgagcgatacacctgttcatgataagggtgcaaatgaagttggtaagaagggtgtacaggaagatccaacaagaattcgggcaaaacataatccgaataagaaagtgtgcaaacagaagccttcaaatggagcagttgaattggagcctgccaaaggagaagatgcattgaactcatgccatacattttctggacctttctacacgaagcaagcaccctttctacgccagcaaagaaactctttttcgaaacaaggttctcagtcattgaaaaactactgtgctcctaggaatggtatccccaaggtggcaaaggattacttgcagcaagaagaattacctatgttggtgctagttcatgccaagaacaccagtgataaatcaagctcatattcaagttcagctgatgaagttggtctaactggagtcagcaacaactatccaactgagggaaatgagagttcacaacctgatattgaggtagcagcgtcagtatcttgcaacttggttccagatttggctccacaagctgcttctgatgatttccacatatcagatcctcactctttacgtcctgaaaacaagggtgcatccaacagtcggagctccaataacttgtgcacagatccttttgctgcagaagcaaaggaagct

SEQ ID NO: 190968 - DNA, 319 bp, Zea Mays
cctcaatcatcccacttctttctttgccctcttcggcaccacgacttcctatacgcacctctgcgtctttcattgtgtctgctatcctaacagctccgccaccgctccccacaaactttcgcccaatccactcgctgcattttcctcgggtactcctctgaccacagggggtccagatgcctcgatcttctcacccattgcatcatcatctctcaacatgttttcattgaggatgcttttccccttgaaggctcatccccacctcccgacatcaactctctccttcatgttgatctcgtcgacgtacttcctattcccc

SEQ ID NO: 190969 - DNA, 575 bp, Zea Mays
ccggcttttgccttgcccacaccagccctctgggacagcgacctggtcagctgcggcgaggtcctggaccccgcttcgccgcccgtgttagccccggcatgaaaagcaaccccagggacgacgctctcaaggaacgagaaagactgcagctgctcgtccagccgctttgccggcgcagctgactctcgggacaccggtggcttctccaactccaacgacgcccctggctcatgatcggcgacctggttccggccaagcgcggtgtcgctcggtgacttgtctacagctgagaccttcgagcagagaccccccatcccctttcccaagacgaataccctgatccccacgccgtccttttccaatttcttgccgccgtcgcagcccgtgatccccacctcgtcctattccaattccttgccgccgtcgcagcaagtgacagagtccatccaataatgtttgggctctatgggcaagaaataaaagaaggaaccgatcaagtccggatggatctgcgaaccagctttagtgtacgggggtaggagaggagggcaacgactccgggagaaaattcgggg

SEQ ID NO: 190970 - DNA, 560 bp, Zea Mays
gcctaatactacacaaccagccacctcttgcctttctcttctctgatgaagccttgtcagttgggcacaggcctgacatctgccccctctggagaagttgcttgtccccaagcaagagcgtcgggaaagcgttgcttgaccacataaaagtcctcccaggtagctgaatcttcaggaagaccactccactgtaccaaaacttggggcactgcccgatgacccttcttcaccaatcgacgatccaacactgccacaggaagcaaattgcgagtagcaaaatccacagagcaaggcaagtcggaaaagacaggcgtatgatttggaataaacggtttcagctgggacacgtgaaaaactggatgaacttgagtagcagcaggtagatccagcttataggcaacctcacccactttctcaagcacccgatagggaccatagaatttcagagctagcttggggcaaggacggttgacaacagaacgctgtgcatagggttgtagtttcagcaagaccatctcacccacttgaaaatgtctttcagttcgaccccgatcagcttg

SEQ ID NO: 190971 - DNA, 453 bp, Zea Mays
gtcgaagcgtcaggaatccggatgcaaagactggatcggaaatcctcaaatagctgaattggcaggcctttagtcatgatatcagcgaattgatacttggacggcacatggagaacttggacctcaccgagagccaccttctcacggacgaagtggatgtcaatctcgatgtgcttggtacgacggtgatggaccgggttggctgtcatgtagatggcgctgatgttgtcacagtaaacgactatggcgaccttcaagggaagatgaagttcctgaaggagttgtcgaagccaacagcattctgcgaccacatgagcaacagccctgtactcggcctccgcactggaccgtgacacggtggtttgccgtttggaggaccaggaaatcaaattgtcgccgaggaagacacagaagcctgatgtggagcgacgggagtctgggcacccagcccag

SEQ ID NO: 190972 - DNA, 281 bp, Zea Mays
tacatgatgaaattccagcccttctaatttgtcctccagctttcggacggctgtgcaatacttgcccatagagtcattcgagcaatcccattctttatttatctgacttatgaccaccagtgaatctccgtataccatcagtctcttaatgcccagtgatatggcaatgttcagtccatgaatcaaagcttcatactctgctgcattattggacgctgagaataacagctgaagggcatatttgagttgttcacctccaggcacgatgaagaggattcctg

SEQ ID NO: 190973 - DNA, 383 bp, Zea Mays
aggtcgccgactatctcggtgcctgggctcgccacgccgtgcgggacctcagcctcagcccgccaaggaagaagcctgcaaaaggcaacaacagttcagatgttcaagccgcggccaatcccaacaaccgggctgctcaacagcaacaggaaattgggagcaataagcccgtggactctactctgcaacagcagccttttgcatttgatccatctgcagtcgatgatgcaaatggaaggccgcttggcatgttgcagtttgacgaggatgacaatggatccaaggatgcagggaccggtgctcaggccacgctggagagactggtgtccaagcacaggcatcggcgtgaccctgatggccccccgtttgaaggcaggttttcc

SEQ ID NO: 190974 - DNA, 528 bp, Zea Mays
ctgggacagtccagttgaagagagccgcaagagctttaacttgcagatcagtcagccgctcaccgaaaaccttggcatagttatcgagaacctccagggacagcgattcagatggatccccaccaagaaggccgagctcattagcaatcctccattttcctttcaaaacttgtgctggggccattaccttttcaacatctgctccagccaagcgcctgctccgccgaggtagagccccctcacaaggtgccctggggcgacgctgccgcttctgcttctgcggcccacacaggacccgagcggccggcctggacattctagcgatgaaatcagcagtggtcgctgactgagcagccgagagaggggattgtgaagcagcagcccctctgcgcttccttctgaaatatttgatgggggaacacggccacctactgagccctgccccaacagccttcatggacggcttcaacacagtccccacacgggtagcgatggcagggccactcgggagggatgaagatgcactca

SEQ ID NO: 190975 - DNA, 705 bp, Zea Mays
tagaaggaatatttggctattatcactgccgtggaccactggcgtcactacttgcagctgtgggagtttcacatttatacagatcatcgtagtcttgcgcagctggatgagcacaggctacacaccccatggcagaagaagatgttcacaagattgttggggctgcagtaccgcattattttcaagaagggagtggatatcagtgcggctgatgcgctgtcccgacaccaagctgtgacttcttcgtgcttagctatatcttcttgcactcccaagtggatatctgatgtagcagcatcatatgaacaggattctgaagcatctgctcttattgcaaagctcgccattgattcaatagtagtgcaacattttacctggtaggatggccttcttcgctacaaacaccgcatctgggtgggtcagtcacctgacttgcatactcgtttgattgcagccatgcattcgtctacaattggaggtcattcgggaattccggtaacatacgctcgtgtgaagcaactgtttgcctagaagggtttaaaagctgatgttaagacgtttgtcacaaactgtctgacctgtcagcaagccaaggcagatcgtgctcgtttaccgggcttgttacaaccattgcctgttcccacatcgttatggcaaatgattactatggatttcattgaagctcttccttgttcccagtcatat

SEQ ID NO: 190976 - DNA, 414 bp, Zea Mays
gaggtactggatggtcccagtgaggctccgataggttgtcatgttgctgactggggtgtcgatgtcgtcggagaccttcgcctggttgtcgacaagcatggagcaaggcttgcattcggatatgccagctcattcgaggtgtcgacggtgtattgtcgctggtggagaaaggggccctacggacgacgctctacggtgacccctaggaaatggtggagagggcccaagtccttcatcgcaaagtcttgttgcagggaggcggtcgttcgataaaggagggctgggctggacgccatgagtacgatggcgtcgatgtagagtagtaggtagacggtgtcagtgccatgtcggaggacgaataggaacatgtctgacttggcctcgacgaatcccaacgagaccaagtagaaggcg

SEQ ID NO: 190977 - DNA, 287 bp, Zea Mays
actgctctgggccgccagattagaagtctacggttcagattggactataccattttatgaatccatatgcatccatggccataggatcaaggatccacggcccaaaactttcgtaaatcgaaggggtacgcgatctaatctcgactgtcaacacagggatcaacgacggggatcggattcagtcaaaccactacccgacccaatccgagccgtcactggagaatccaacggtccgcgccccatcttctaatctcggccgcatagctagatccaacggccgcgagcac

SEQ ID NO: 190978 - DNA, 1113 bp, Zea Mays
ttttatggcaagcttggatattgaaagtaatcttgacaaggtacgaggaatgttatcattgtgtttgttcttacaatacccttgtggttaaaaatagcattcgaggttttgtgtgcatccaacctaataaattttgagtgctagaagttttggacaaatgattattttaatgatcgtagtgtccacctttataaatagaagctttctttgtaaacaaattaataccatgtgagaatggtgttcctaaaccaaatttgccttctcctgaagatgtagtcagaatcctagagaatagtttgttcttgatgatttaaacatgcaaaaaaataacaacacttgcttttgcaaaggttgtaaagattcatgtggactacacatgcgcacattttatttgtaggtggaaatgcattgtaaaattatagatgaataaaaagatattgaacactagtttggacgaaatgtgaaaatcatgtggcaacaactgacttggcatcattgtataacataccatgcttgtgtcttaataaaattagattttgcatggatgttgtatgttgcattctatcattgaaaggataatgcatgcttgtgtttgtatgttcacgtcttcatgcgaataggttactctaccattcatcatagtccacggtggtgatgatgctgtaactgaccccacagtaagtgaggcactatatacaatagccacgagcaaggacaagacactaaagttgtaccctgggatgtgccatgctttgacttcaggagaacccgaggaaaacatagatattgtgtttgcagacatcatcaaatggttgaatgacagggtatcatcaatttcctatcttggatccaacagcggtttacagttacaagaacaatgttgatagctcacaaaaatcaatgggtgtgtgtacgagaagatgacatccatctgtcgataggtggaacaatcaatggtgtcgacatatgtaagattctctactggcacatgacactagcaaggtagttatttttgtctattaaataaaaatgaatatactaggtgtaaaccaatatatcgatgtaaatcaatacaaatatatagatgtaagaatcttttagaaatagggaagg

SEQ ID NO: 190979 - DNA, 430 bp, Zea Mays
agtcgcggcatgccaggaggtgccagggtgacggtggcgcagaaggagggcgccatagatgaagatagtgatgcagtcgaggcagtcgtagaggaagtagccgatgtcgaggacgatgctgtgaaaccgtcatggacgaggcgtgctccaggtttgctacgcgtcgtagacgaatgcacatgccggtgttgccagtaccacacgtactaggtagaaggccccaaccaattgttagcgtttgaagagaccagcagagaagaccttcacgacggttgttgtgcggtatggcgagagtgccatcgcagctcacggttgtcagagcgcagtagatgaagtagttgaggatgagatggcgacactggcaacaaggttgtgctggaagaaggcgtagatgtaggcgtggcgacacatcaaggatcctgaagtttac

SEQ ID NO: 190980 - DNA, 299 bp, Zea Mays
agattgtgttgcatggttgtgcttcttcacagcatactgatgttcttctgcttattacaccggtggattcttcagattatgctgttaacttaggcattatttcatcaacttgtgttgaaggtattatcctgcaaatcttcaatacaacaagtgtgccttatgatgtggtgtttctattggctttgtcgatgagatgtgttgaatggaaaccagggtcaccaccaatgcaactaggagttagtggtgacattgctggtatacgaccaacgccatggccatcctatgatgatgatgaggtt

SEQ ID NO: 190981 - DNA, 407 bp, Zea Mays
atttaagaatgttgatttcacgtccatatgatgcacttcccacccaaccctcatgtgatgcaagtgcaataagcaacctcactgaatcaagcctggctactagagcaaatacctcatcatagtcaataccatgttgttgtgcatatccctttactaccagtcgtgccttgtgtttggatactgcaccttgctcatcccttttcaccttatatacccatttgagaccgattgccttgcgccctagaggagatatgcaagtgtccaggtctggttatcttcaattgatttcatctcctccatgactgctttcctccagctcggactcctttctgcttcaccaaaggagactggttcatcagcacttactgcatgtaactcctcatctagcagcctccttgttgcataac

SEQ ID NO: 190982 - DNA, 293 bp, Zea Mays
gccaaggaagaccaagtaggaggcgaagtgactgtaccaggcccgaggcacgtacttgaggccatataaatagcagttaagcttacacaccatacttaggcgagtggagtcgatgaagcgacaggcaaactgcagcacactgtcttagtcagagtgttgtgaaggcattcttgaggttcagctggtggatcgcccagtcccgggagaggccgagtgagtggatagtctgaacggtggcgatctttaccacgaggctaaaggtcttgtcgtagtccattaaggattccgagtga

SEQ ID NO: 190983 - DNA, 284 bp, Zea Mays
gagaacgaagacagagagaaagaaccaagctgtgccatcgccggtgggctcgtcgttgtcgctgccccagtgccgtgccgtgaagctccatctgtccgtggagaagttattgtggcctcgccgcgttgaaccggcgcctggggctcgggatttcttcaccggagaccgcgaacccactgtcctctgtggccatcctctccgcatactccttctctggtgagtcctcatcccccgcattcgctattgtctcctctacgcgtagctcggtttaatcgacgttttgg

SEQ ID NO: 190984 - DNA, 1082 bp, Zea Mays
cgccggcctccatacttggtttgcaaaccatcgcatggccgtggatggggagcacgctcgtgtggcaggcgagtgatcgaaccatgggcacgtaacaaaagcaaggaagccagcgagtgaagaaggacggaagatgtcaaacccgccgccaaagaaggcgatccggaatcccggcggcggcgctggggggccggcgggcggcccgcgggggccggcggggaacacggtgaagttcgcgcggcggacatcgagcgggcggtacgtgagtctgtcccgggaggacatcgacatggagggcgagctggcggcggattacaccaactacacggtgcagatcccgcccacgcccgacaaccaaccgatgatggacccggcgtccgtggccatgaaggccgaggagcagtacgtctccaactcgctcttcaccggcgggttcaacagcgtcacgcgcgcccacctcatggacaaggtcatcgagtccgaggtgacgcacccgcagatggccggctccaagggctcccgctgcgccatgcccgcctgcgacggcaaggtcatgcgcaatgagcgcggcgaggacatcgacccctgcgagtgcagattcaagatctgccgcgactgctacctggacgcacagaaggaaggctgcctctgcccggggtgcaaggagcactacaagatcggcgagtacgccgacgacgaccccaacgacgcgtcctcggggaagcactacctgccagggccgggcggcggcatgatgaacaacagcaagtctctgctggcgcggaaccagaacggcgagttcgaccataatcggtggctcttcgagagctccggcacctacggctacggcaacgcgttctggcccaagggcggcatgtacgacgacgacctggacgacgagggcggccccggcggcggtggaggcgacggtatgctcccggagcagaagccgttcaagccgctgacccgcaagatacccatgccgacgtccatcatcagcccctaccggatcttcatcgtcatccggatgttcgtgctcatcttctacctcacgtggcgcgtccgcaaccccaacatggagg

SEQ ID NO: 190985 - DNA, 355 bp, Zea Mays
cttaaccatgtccttgtatcccctaaactcatcaagaacctgatttctgttcgctagtttaacattgataatgactgttccattgagtttgacccatctggttgctctgtgaaggatctgttgtcttagaacgtgatcgtcatgtgcaatagcttcggtccgctctaccccttgcgctttcctgctgctcacttcgtcgcatgatccacatcatcactttgacatcgtcgtctcggtcatcttggtcacgagactctttccaagctcgcatctgtcatcctcgtttgtaataaagatgcaagctgattccccctatgtcatgcctgccagttaggccgccatactcgtcttcatt

SEQ ID NO: 190986 - DNA, 1023 bp, Zea Mays
gccaagaggttgttaaagctcagttgtttgagcctcagtttgaacatgtgattgacacaatcacattaactgttgctgaatccatgtcactagagccatcatcaccagttctcgtgactgttggtgttttggtgaagtttaaactcaaggtattccgacagaaagttgctcaaggtaccttctctaacagatcaagttctgtcattatttgacattgaattctctgaacaatgaaactaacctaactgtgttcactgatgaaactgcattatggtctcctgttatatgctatatatcagagaagaaacacaatagatgaataattaacacaaaacacattgtattcatattcagggaaaaatgaatcttttttatgtcatcagagctaaaatatccagttttagattctgttttatggtatgacatattattttatctcattgctatatcttttctacctgtgttttctttagtgcatctggtgctgaaagctaaccgatcctctccatttctaccttttcactagtggttaaattaccatcacaatatcatcgctggtatgcgacaaactcttctgtggcccaagtggattccttgggtatcttgcatgcattgagtctagggtttactaaggtggttgttgaagacacaagagtttctggtcatgaacaagtatcatctctacatgttgttattccacggacacttttcctttatctggtccctattatggatgattctgcccatcttcatgggattacaaacattccatcctcaaaagtatggtatgtttatcctggaagaaaatacatggtccttgccaaagcttttgcagagggatttgatgctagggaaatatatattacagaggtactattcatatgatgaatttgattacttgttctcttactatatgttacttatatctgatatgcagatactacagatgtcatttgatatgtaggaaaattcttggaaattatttcaaggttgatttgtggatgacgtgtagaactacaagca

SEQ ID NO: 190987 - DNA, 605 bp, Zea Mays
attaaatcccatctctgccccaaagacacccacccacctacatcctagggtaaagctaagaacgctcgccagacttggggcctgcttgtcaaaagctgaaacaaacagattacagaccaactgttgaggtgaattttgaggaaataaactacgagaggagatttttctggcttttggtgtgctgagaagctaaaaatctattacaaaagtcaatagaaaaaattattacaaaagtcaatagcaaaaaggcaacgaccagaagctagaagccaaaagcaagaaaactaacttttgagccaaaagctgcagctcaaacaaacagggtatagcgaccaactcacttaacacaactagattgcagtgtaagtgtccttagaagcaaatcctggactgctgccccagccaagcgctgaacgtcgagagtcggggcagccagcccaatccgcatcggaatacgcggtgagggactggcaactcacttaacacaactagattgcagtgtaagtgtccttagaagcaaatcctggactgctgccccagccaaacgctgaacgtcgagagtcggggcagccagcccaatccgcatcggaatacgcggtgaggga

SEQ ID NO: 190988 - DNA, 315 bp, Zea Mays
ctttaaaattgtgagaagcgttgacagtagtttacaggctgcattgtcccttcaattgcagaacgagcaacgttgaaaaacacatgcagtacaggaaaaaagagcctgtcagacaacctgtaggccaccccagccaggcaagcctgagcaaggaacgatcctctacagcaaccagagcaagcagtagagctgaactcatagccgttaatcacgctctggcccacaggtcatgtctcatcaaccaggcttaagtgcttgcctccttattaatcaaggatgcaacggtacgatcctatagaacagatcctgttcaag

SEQ ID NO: 190989 - DNA, 335 bp, Zea Mays
tccccatccccatcttccaccctcccttgctcactcatccacacaccccacgcttgcaatttgcaattcccttgtttggggtaacaagccaagcaagcaaacctcctgctggctgctgtccaacagcaacatgcaacaacccaagcaaatcaaagcttcaccatcaccatcaccgccgaggtcaggtcacctcagctttgctcagctccctagccagcagtaactgcccagtggaagtgcagagtggcctgtgagtactggcagtacaaatcacctcatctccagtcctgcccggctcgcctgccatgcagtccggctacggcggcgtgtccgag

SEQ ID NO: 190990 - DNA, 354 bp, Zea Mays
gaggaggagccgagatccctactcctggcgtgtgtgaaggagcctggcggttgggaaaatggcagagaggaagagaagggatgttggcggctggggggtagatgaataaaagccaatttgcaaggggaggcacttctatttatagaaaatggctagggttttagggctggttgcttattggagaagcaagagttgcttctagactaaggaacatgaaaatatccctagatttgattggcgattcatttgtgagaaaaactcgaacaggtgtgaccatcgaaaaaataaaccagtgtctagatgacaggcgactgagtgcttaatttggatcgagaattcggtttttggcgtcac

SEQ ID NO: 190991 - DNA, 1621 bp, Zea Mays
ttgtcggtggagccaccatatttctttttaacagcaaaaggcagcttaaaacaggaagacagaagctgcggctgtggcccacaaaggaggcagatggaggagtccccaccacaactcctggcaaggtaacactcagatctacttttcttgaactcaggattcatctgttttagtcctctcccagctaatctctcacttcgtttttacttattacttcaaggtggacttaccttttttctatgtaacttataggttcctaggaatgagaggggtgagatagaacgtttggaaaggcttgttaacaagtatgagagagggcagatacaacatgttgattggcttgatcgtcttgccttcagtgctatggacaaagctatggaaaaagagtgtgagaggaaggccaatttgtaccctagtctggttgttgaattgtgcagtttcgaacatagaattgtcttccaggttaacattactgaccttgttatacatatatgttatggcactgagctatttttttcctataactcactatgcagctacatgattcttttacctgtaaaattgatctcgctttgttttggtgcacaaggtgatcattgtgtattaagaatggtcaatggtcttctgctactttcatacttggaggaattcacattttgatgttgttgagtcatataatatttatctgaacatgacttctcctgcttgcaagttatagaaagtgtaattttatcttcaccagagaaatgctgagtgttacttgtccatgcaggaatctggagcaaatttttatacaccggccccagtatcattatcaaatgaactggttactgtatgggaccctgaacttggaagaaccaatccatctgagcacaagcagttaaagcttgctaggagcttgactcgtgggatagttgatagagatctaaaaccaagctcaaatgagagaaagtaagtgaagacacattattttttcttttcttcttttcccctctgtcaacttatatctttcacaaggaattttctggcttctagtttcatgctgtcatgaacttgtgagacaaccgcattcatatgtcagctgactgaattagaagatgttggaagcagaattctgccgttcatgttaatagtttgcacattggtggttttctatctgattggttttgtccttactttgtaggttactacaaacaattattaagtttcctcctacacgcaccttggaagtggatgagaagcaattggtgtggaagtttcgtttctctttgatgtctgagaagaaagctctaacgaaatttgtccgctcagtggattggagtgataaccaagttagtaaaagaaattcctatgtgaacgttctgtttttgttttgtaacttcatatttggttttgctggtctaagtgatggacataaaagtgtactgcaaacctgcaattagtttatttgatgtcaaatattttcgtcatgtcaaattcttttattatattctggaaggaatctagtgttttgattttttcgtcatgagctgttacgtaaatgtaataatgctatgcaggaagctaagcaagctgttgagttgattggaaagtgggaaatgattgatgtggctgatgcact

SEQ ID NO: 190992 - DNA, 328 bp, Zea Mays
ccctgtaaagaagaacatatgaaaacaaatgcccgttggaaacttgcagccagatctggtgttgagaacagccgaatcccatatgccggagatgagaacgatctaagtagagctacgctacatgcggagattagccgagctcaagaagattagttgatccatcttagttgagaatatgggattcgcatgagaatagccagaacctaggggcaagcacaagtagatgttatccatcacgctagcagagctgcagtgattagcaccaacatgtaaatgccctaagatgtcaagtaacacatataattaacttgagtagaaaatacccacg

SEQ ID NO: 190993 - DNA, 548 bp, Zea Mays
tgctgtcgtcattctctggtctccaggtccactccaacgcgttgacacacggtaatccggcccttcagtttaatttgcatctccctcccaacacaacacttaataagatttgatttgggacgacgacgataggtgaggtggtgctactgtcgtgcatcgtgctggtgtgcctcttcaccctgcagcactggggcacgcgccgcgtggccttcctgttcgcgcccgtggtcgtcctttggctgctcttgctcgcggcactcggcatctacaacatcgccgtctggaacccgaggatcctgcgcgcgctctctccctactacgtcgtcaggttcttccagcgcaccggcaaagacggctggatctcgctgggaggagtgctactctccatgactggcaccgaagctatgtatgcagatcttggccacttcactgctgcatccataagggtacgtatgattagttgtctgtttgccatgacatgcatgagaattaattaatcgtgcctgttaattaatcgaacagatcgcgttcgtgggcctcatctaccc

SEQ ID NO: 190994 - DNA, 595 bp, Zea Mays
cttcattctggccaaaagggtaagggaaagaaacaaactgacagtgcagccaaaaaggctgtgttgctgagtggacctcctggtatcggtaagactacaactgctaaagttgttagtcagatgcttggtttgcaggccattgaggtattagtctttccactatttattccccatttttacttggcaggcctgaattcaaacaatattttttttgtgataggtaaatgcgagtgatagccgtggtaaggcagactccaagatcgagaagggtgttggggggagtacatcaaattctatcaaagagcttatcaacaacgcgactctgaattatagtgacaatcggttggtgttgcagcatgaatcatgaacttttttgactttgtattttgattattatatattaagtgggcaacaattccataggttaaaacatcccaaagctgtactagttatggatgaagttgatggtatgtctgctggagatagaggtggtgttgctgatcttattgctagcatcaagatatccaagatccctattatctgcatttgtaatgaccgttatagtcagaaattgaagaatcttgtgaattactgc

SEQ ID NO: 190995 - DNA, 417 bp, Zea Mays
ttccgcctccctcgtggcttccgattgggtgggaatgggattgctcccgactgttccgttccatgctcgcatgactggtttggggtgatttagggtgagatgtgcctgtgcctgttggagtttgcggctgtgcagtgtccaaggcgcgatcctgttattatgtgtagttttgcacgatgagaaccaagttacctgttgttgtttcccatggtcaacctataataaactatgtcgtgatttaatcgaccaacgttctcttccctgtatataagcaaaacgctcgggatagtgttctgttgcattcgcgctgggagctcactactagttctgatggattggttctcagatgatttatgacgaaagctggcacacgttagcttgtttacatcactttgaatggatcgttagcatgtatct

SEQ ID NO: 190996 - DNA, 282 bp, Zea Mays
acgacgacgacgacagctgcctgcagcagctcctgtactgtactgtacgcacacaggttcgacgaaacgagcggcgagagggagggagcgcgtggcgtggcaggcagggcgtcttgttggatcagggacatgaccacgcactgaccagatggacaacaacaaggacaggtacagacacagtggcaaagatgccggcaggcgggcaggaggaggactggagctggaggagtacactacactagtgcgccccgtagaatctccttgccctgtccgctgtcctcc

SEQ ID NO: 190997 - DNA, 584 bp, Zea Mays
cgtcgtcgtccacgctgaagatgagcctgacgagccagttgcaggaactttgttatgatgctgaggactatctggagatggcgcagcactcccgtggtggctgctcctggcagatcagttgggtccggagcaaggcgacgaggcagcgccccgctctaatcagcgcaaaagatctctccggcctcatctcccgtgtgaatccggcgaaagaaatagcccaagcgtacatcaagtctgctagttcaagaaccaccaccaaagagaatggccctaggccacaagaagagcctgcaaaaagcagtagtcgccgtgccgtctattctgatgatactctacagcctgacagccatgacgagcagctagtcaggttgctggctttggaaagtgatcagcagctcaagacggtggcaatccttggcctgcctggcgttgggaagacaacacttgccagaagactgtaccactgctatgaagggaggttccattgcggggctttccttcgggcgtcccgtaacctgcaggataccaccaggcttctcgccaccatgctatccaagattaagggccaacaagggtgccgctac

SEQ ID NO: 190998 - DNA, 374 bp, Zea Mays
gctttttcaaagtcatctccaatacaaatgatagtgtcatcaacatattgtaaaattatgagaccattagggataatgtgactgcataaaccagtaagaacattattctcttgtgccttaataaggattcttgccaaactgttagcaacaaagttaaagagaataggtgagagagggtcaccctgtctcactcccttatgacttttaatataattaccaactttgtcattgatcttaactctgacagtgccatcactgacaactttctccatccaattcatccatttttcacagaaacctcttttctctaaacagtgaaacataaagttccaattgactttatcataagctttctcaaaatctagttttagaaa

SEQ ID NO: 190999 - DNA, 749 bp, Zea Mays
ctttgcagaagagaccccgagtttctgactaactgaaaacgagcttcttcactgttcctgtgtgtcgctgaccgattacaaaaagacccctgcacttctacctattcacgattggaagtccacgacgacgctcgcgcacagccgtgctccggcgagcatctacgccggccgattacggcaatggcagggttctccgagcaatggacacaaaattagcactaccccgagcatttcccccaacataatttcactaatggtcacaaggtttggtctagccacggcgaccgtggacaaggcagaccgatgagtgcgtttccgacgattcatggcggtctagttcgatttaacgggtcggtgagcatcaagagcaagcaaggatgttgaaacaaggaaaccgagggtgagattggacctgaatcgggctgaccacggcgaggtgttcttcgcggtgttcttcaacggttttggggaaatcccaaattcacgtgctctggtgggggtttcgggatgccggtgggtgcagtaggtgcttggatgcatggcggagctgggggtacggtcaattcatagcgcccgcgggcggtggtgctcaatttggccgagccgtgttggcggccggagataaagaagaaggcggcgcggtgaatacgtggctaacgccgtggcaagctcaccggcgacgattagatggcccaagggagtcacggcgacacggtagaaaagctaggccacgcggcggaggaccgtcg

SEQ ID NO: 191000 - DNA, 304 bp, Zea Mays
ggaagaggtggcgtcttccgcgccacggggctcttactgtcgtgtatctggtgctaatgtgcatgatgcgcagtagtacacgcatgtgtatgggaccccctcgcagactactcctggttgggcgctgtcagcaggcagggagttgctccgcaacctgccaagctctatggcctcaccgagggccatggggcaatgttgtgaagacatcgaccgcctcctcagcgtggctcaaaccgctcctagctcagctagaactgggccataactatgtcgatgtcaacatgaggattcaacatccgtgcgg

SEQ ID NO: 191001 - DNA, 292 bp, Zea Mays
gagaaataaaaaggctttttataaatgagagaagacgtcgagtagagctttggattaatgggactgtcaaatctagcctaatgttgccaaggattaatccaaactttatcggaagtgaagaggtagctgtacaacactgtaaatttccatcctttgtcttggtagcttcattttgtttcttttgatcagtgtgaaactttttatcgtgcaggatcctacatgcattatttgtcgacagtatctgtatctttcagcagtctcctgtaactgtaggctgtcttcttatgtttgc

SEQ ID NO: 191002 - DNA, 281 bp, Zea Mays
ttggaacagctctatcatggctcatgagtacggtgtcagttgccttcgaattcccattgtcgataccagatcgatggctaatgcatatagaaatataaaggggacaaattatgattatatctttcttggcattgaagcgtgtcctgactggtcattgggtacttcggcaataatcagggcataccaaaggagagctctattggaagttttgttgttctctcggtattcagagcaaagctaatttattcaaaactaacaaacctgtcaaacgtgaaaaatgt

SEQ ID NO: 191003 - DNA, 383 bp, Zea Mays
gttcgagaaaaaaatgattaaaatagtgtccatataggaacagcttattttgcaaacagttgcttcatgcactgatgcatgtggttcaatcaatgtatgcagctcaggttctttaaaaatgcaagcaaacattactaacatcaagtgaaaatcacattaaacatttgcatacagttgccaatgaaataaagaggcattgataataactgaaatggcatgctaatgtacctgcatggcccctgcaccgagaacaagttggcaagtcctagtgttgaaaagcttcaatatttccacaacacgttggaccacctccaaagatagtgatggtaaacatttactgatgtcaacatattcagataacatcttcaacagtatcaaaccgc

SEQ ID NO: 191004 - DNA, 466 bp, Zea Mays
gtcaaattcaaggagctgtggtttccagattcagtggccatggcgttcttccagtcgctcccagatcaatctagggctctaatagccgcagcccgagtaaacaatgggcttctggttacgcaccctcacacatcaatttgattgctgcagctttatgctgtaggctgtagccattttttctcttcaatcaatgtagccagttcgctgcagcttattccgaaacggcttctgctacagtattttgtctctgaattacagctgcagcagtctgaacagctgtcttaaagccgcagcgaacaggctagttgaggcctggtgatgagatctccctctgctgctattgctgcatggctgtgatgacaaaaaggttatttggttgattatgattacttaatgccatataaggatcaaaacgtgatgaccttatttgtgcgtgtctgagccgatgcaatgcagagtccatgtt

SEQ ID NO: 191005 - DNA, 277 bp, Zea Mays
catagaggcccgaccgcggagagtgggtggtccgcggcggattcagtcaccgacgagaaattcaccgagccctggccgcccacggccccggaattccacacggcgacgtccgcaaaccttgacaaagctttcccgagcgcacgttttgccctaaatggacggtaatcaccgagggccgattacggcggtggtgctcggctttccctcccccttctcattgtttctcttgcggtggcttagaaatctgcagacgagcaggaaagagggtcacagcgtg

SEQ ID NO: 191006 - DNA, 632 bp, Zea Mays
gttattcaagactatatagaagaagaagaaaaaccatctttatatttaagataaaatgaacatctcccgttggaagacagtctaccagagcgacatctcaactctacctggtctcgatccctagcacgtactagcaataatggatcaataaccgtagctataatttacttcatcacgtgacaatgatgcttagctctgcctagctgcctacaatcgctagctgctagtgctacactatcttccgggttctgacttttcccagtcgttgttgccatcgtcacacaatctcccctttttttaatcttcaagagtcgacaaaacttgacactaaccacattttttttgtacattttgttttatgtttaccttataataaaaaggggataaacagaggacttccaattccaccagcatcactgtaccatgcatgccgtctgggcgcggctatataatactacttaaaatagaaaaaaaagaaactgaggggcatgaatgaaataaaaaatgaacaacctcttccatgtgacaacgtgagacccatctgcgcatccatggcctctcgccctctccggctctccccccacacacatggccgcccccagccagatccaaaccattattcatcacaccac

SEQ ID NO: 191007 - DNA, 1310 bp, Zea Mays
tggtgtactggttgtgaatttggtggttgctcattgataacaggatgatggtggaggaggaccagatctcgttcccgtcggacgcgcacatggccgacggtgtggaggattatgcccatcaaatcgctgagatgattgggttgcggaatgaattcaatttcaatgaggctggggtgagttattgccatatgttcagtttaacctatgctattactagtaattacctatttgacttccaaatctagtgaaggcatacccagaagccagaactagctgaagtatgcaactgaaccaatgatatttctgtcaacgaggtgtcattcacccattcttttggcacaaaacctaattattaaaagagtcactcgctcttggtagtgctctttgtcaacacaacaccctacgaatttgctggcttctgccaaaattttctgtccactttgttttttttttcttttcaggattcaggacacctgtactttatagtggttccataagtaacccttgtgatttccgttgagcattttctttgggttcgatgttttttaaagtatttaaaatttctacttcattattttcgataaattcatggcacagttttaagcacataattgttttttttaaaaaataagtagcaggagctctgctattcatataagatcggagaagggtttcaaaaacataggtaggttaagcacataattgttgatcagttattttggggcaaatattctatttatttgggaaacagtatttcatttcattcataagttgtttccctgtctgatttatcgtttaaaatgacccttcacatcatgatttgttattcagcaacacttgtctgtcgtggtctttccacttggcggtactttagaaatcttgcatgttgagtgggctggctggaaagtgccggtctatttctacttaatttgacttgggaaactctgcatgcccaatgtgctggaaagtgtatatcagagcttactactgtgcctgcaaaagtatgttggcaggaccttaggatctccactacgatatattattaaagcacagttgtttttaaagatcatcatacaaaatacatctggacatactatgtagatcactttatgctctgattggctgaagtaagactttgggtaattgttatgtttacaggaactcttatttctgatggtgtttcttgctatgccattttcaggttaggacagtccttgacatagaatgtggatttggtacctttggggcgcatctttttgagagagatctcttgaccatgtgcattgctaactatgaagcatcaggtagcc

SEQ ID NO: 191008 - DNA, 985 bp, Zea Mays
gccgcatcccaagctgtcgagctccaaaaatccactgcctctgtgctatggtctccacaactttggcacttagaaaaacaacagcgagaatataacctcttttgagtccatattgcctctctcctccaaggaatttcaccaaatcattaatcagtgagggtccgacataggatgcgctggcacttaaaattgcaaatcctgcattgataattgctttccgtcctataaatagaaacattgctctatagatcgataaagtacttaaaccatgcctgtgttcaacatcacctatgatctttttaaatgaatcagaaagaaactcagcagcgtctttgccatcaacatctggcacctcattcttctctagaggtttcttgtatccgatagaaaagacggggttcatccaggagaaggtgacaagttcaagaatatttgctcttccatatgggcatggccgtttgacttctgcctgctgtcccacagatggattcaatagtgcctctgttacgctgctgtctgtgaatctgattcctgttttccccctgactgaaattgcaaacagataagtgcaaacaacaagcatgcacatatcgatccattcttcaaatcctatatcttcatgggttgccaaaattgacctgagatcaaatacaacgatggcaactgattgtagaaagctaaatatccaccatgtccgaattacctttggaatttttgtagattttgctttctgaaaactgaatactgctagtgacaatattatccacgatagcacctgcaaaccttcacaaataataaagggtggatacttgcaatcacttattctttcatgtaactgtagaaatactgccctcagaacatgacttcctagtataagcaggcaacaagctttgcatgctttgtatgagatgtccagctttatatctgtaatcttgtgttcctgatgttgtttattgctttcaggagctgaacccttcagtctctg

SEQ ID NO: 191009 - DNA, 320 bp, Zea Mays
tgcctcctcgaatcgatctccccttctcttcttgcacgttgcatcgaggattcccgataattcggcctctgcaaaatttgatgccgctaccataatattaattgatatagaggttcaggttcgcaatgatgcatgcctgccacccatcattcttctggttgcacagtgatagttgaatttgtttcatttctaatcgttctcttcatactgcaacttagaatatgtgctcaaacctggaatcgcacggtgctagttgctgctgctccttcagataatatgaatgctcagtgatgctaatttagaatatgcgtaacttagaa

SEQ ID NO: 191010 - DNA, 287 bp, Zea Mays
atcaagacagacccaataaagcgaggggataacttccctttgactttaaatctcctcatacctcggatcggtgacaccttttagatacacgtgatcattctccttaaactctaatagtcttctttgggtatcaacatagcttttctgtcttgactgcgcagttctcaagttctcccgtatcaagcgtacttgttcttctgcctcttgtataatttttggcccaaagaactgcctttcaccagtttgattccaatataaaggagtcctgcattttctgccatataaag

SEQ ID NO: 191011 - DNA, 358 bp, Zea Mays
tgtttgccaggacaactgtatgcttttttggaaggaacatggcagagagcagaaatgcttaaaatgtgggaagtcgaggtacgtggagcttgtaaatgaagatggggagaaggtggtgacaaaggttgcacataaacagcttcggtacacgcctctcactcctagagtgaaacatttgtttctctcaaggaagaccgctatgcacatgaggtggcataaagattgtacagacagacaagatgggtaaatggtgcacccgtcagatggtgatgcatgtaaggctcttgacaactttgatccagattttgccagcgatgcaagaaacgttcgtatcggcttggcaactgatggtttcatg

SEQ ID NO: 191012 - DNA, 531 bp, Zea Mays
gatggagttaagacaagactcacgaaatggcgaaatggagaaaacaatcacgagtaaggtaggtaaggttccaacagaatggttgaagtaaaataaaatattaccgagggaagttatatggaaacgatgagatcattaaggatgtgaggaatggaacgatcgctcatggatcatgaagaaacaaaggtggtcaagagtatgtaaactgaaatgttaaacaaacattggggtacaaaggtaagcatttatataaaaagtaagagtatgcaagattacgaaggtgcgagcataccaagaccaagggagtacgaattgccgaaagatagcaacttaacaacagaataggaaagggtctcaaaagacaggatgatcatggacatataaactgaagtgtttaagtaggcagtagaaattcagaggtaagtacttgaaacaagagtattaaaggaatacaagcatgtcaataccaaaggactagagtttgccagatagtagcaatttaatgaagaaagagaaaagaatcccaaaaag

SEQ ID NO: 191013 - DNA, 505 bp, Zea Mays
gaaagccctatataccatattttgtctgagtatggtatgactgtattggactaccctggccactatgagggatgtccactcctcaccatggaaatgatccactgcatcttgaagtccagcgaaagctggctttctttgggtcagcataacttactgctaatgcactgtcaacgagggagctggcctattctggctttcatgttagctgctcttctaatatacctggggcattattccgacgaggagaaagtgctggatatggtctacaagcaatcgtctttggagcttttggagatgatttcacctctgaatcccatgccttctcaaatgagatatttgcgctatatctcgacgaggaatgtcatgcctgagtggcctccagctgatagagccctcacattagattgtgttattttgaggatggttccaaattttcatggccaaggtggtttccgtccaatattcaggatatacggcccggatcatctcatgccccctgatcaga

SEQ ID NO: 191014 - DNA, 360 bp, Zea Mays
tggaaagatagacctattgaaccacgtacgccaagtcatggtggatcagtgttaggtactgaagggtactaacaagactcttgtagttgtcggaggcatcaacgacggagcaccatccaaagttgagagtttgtcttgagtgtccatagatgtgctggagtcacactggccatgcctgcatgctaaatcatgcgcatactatctctgagacaggattaggccatcagaggagcgcaagatggagatgctgaggaagtggtgcaaggtgccaaggtcagtcacgatgaactccaagtgcagaaggcccatgatgtgctgaagaagagtcgtcgaggggacggtgaggacgatgtcatcaat

SEQ ID NO: 191015 - DNA, 324 bp, Zea Mays
ctcgatatcgtcatattgtgggtactcttgtttatctcaccatcaccagacctgatattgctcatattgttcatatgttgagccaatttgtatccacaccaacctcagttcattatggtcatttgcttcgtgtgcttcaatatttacgcgggacacgatccagatgtttactctatgcttctgatagcccacttcagctacatgtgtattctgatgccacttgggcaagtgatcctgttgaccgttgttctactacaggttactgtattcttcttggatcctctcctattgcttggaaatccaagaagcaagcgatcatatctc

SEQ ID NO: 191016 - DNA, 916 bp, Zea Mays
agatgctccatggcctgtggcactcagccatgctctatgggagcgctcccattgcacatcttttgcagcgctagacctacacaacacccttctctgttcgcgatgactggctgagttccatcgctgcaactgttacatctttatagccatgcattgtctttcattgttgtaaccaagttcattggtggccgattgcttttctaatattttagtgtaactcgttattccttaaagcgacttatccatctctttccttttatattcatcttttgtaaattattgatgacaatcctgaagtttatgtagatttatcagaaagagtccaagtggagagtcttcttgtgtttgcatctatttgttccaagtgcgcttcctctgacaataatagcttggatgaaagcatctgtgtgcagcttctactaggttttccttccattattctaccacttgctcatgtcaacaaggtacgaatatgcaccctggcccccaatactttttgtgtctgataatatgtgagctagctcctcttgttctgcttacaaatcttctatctagatattgaacatgtttattgtcttatatatgttgtaggatataagggcatctgcaattaagtgtattgaggggttatctttggtgtggcagcgcttgagcacttctgtaccaagaaatggtctgttagccttattttcattttttttccaactggaccagttcggtgttgatatttattatctgatctaacatatacaggaaacaacaccaaattacctcaatgtttgtcatctccaacttttggtagtttccttgaattgttggttaaccaaaagaccatgatctgctcggacgcaaaatttcttcctgcatatatttcatctatgctgagcccatgtaaagatattctggttcccgagaa

SEQ ID NO: 191017 - DNA, 542 bp, Zea Mays
ctcggcggccagcggctttatctcaccgcgtggtcatcttcaatctccaacggtggagctctcttggctatctccctccatggcgactctctctctgccgtgagctctctgccgtgctctctctctgccgtgagctctctgccgtgctccctactgccgttcaccatggtcgtgcctctgctcgccgtgaagctttatcatctccagcagctcacctcacctagccgtcgtggcccctctgctcgagctcctccctcgccgtagccccagatcgccaaaccatggctgcagcccaccggactgcgccctgacttttccttgagtcggccgttgtttccccgcgagcttcgctggccgtgctgcatcttccccggccgtaggcatccgagcccctggcttcccatggagctcgcccctattcttcgttccagcacgcatcccatgaccgctgaactccctgccgaggtccctgttctccatggcgccggatccactgcaagctcgccaactcgcccttcttctctaccggcgctccagctcgc

SEQ ID NO: 191018 - DNA, 1301 bp, Zea Mays
gtttattctgttgcaagactccttggtgatttggttgcatatcgtgcttctgggacaggacatttggagctcttagcaggttggctctttgacgctgctttcatataaaaaatctcagtgtttgcctgtttttcccttttaattcatttgacttgcaattagtcaacaaacattatgcagtttgttgtataacggtcaacagtcaacacatgtagctatgttaggacttcatgcacacagatatcaacaagtaatttctattaggtttaaagttcaggtgttcgacatacaaatcacatcacttgattcaccagtgtgtgatatgtttattgctacctcaaaaaagaatacaatgacaaaaatgctactatgattggatctgtgtgtccaccctccttttttgccttctaatttgtcaatatattttcccctactatttgcaagatccttcgattttatccatggatgattaactccaatgtgactggaattatgttgtgttcctttgtgtaaaacatatgattttgcgaatctatgtattatgtttcaattgaattgtttttggttattattggtgtatgtagaggtactgaatatctcctatattgtacatgttgtagggcttgctctattgcagaagcacgggaatttatctgaattgcagactgaccttgtggaggcatcccatgagcttatgcaagaagctgctttcctccatccatttgcggaagcatgttatacggttagatactgatgctgttggttgggacatcatttctgctcctgccagcctactgtggttgcaactgacatgattgtactgcagggaccacttcttgattttggacgaaatcctatcctgtttccctgtgcatgggtttatagacaaggtgtgttaactccatgggcacgcagaaggtatgtaataagctctgatgcttctattacatgctaattttttagagttttatgtttacggttcgaacattagcccatttggccatttcagcttggtgtctgtctttaaactggccaaatcaattaagctaaccttcagtattgtttctgcttaatcttccctgtagtgaagttgaatcttgttacattttcaatctaaaaccattctgtcctcgtgacatgttgatctgcattgtttgtcctattaatgaccagagtaagatcaacgcactgagaaaaggtagaataccgtattgatgttttgctatgtaacgactacatattaatttttgtgcagacgccctgcacttgatggtgataattggtggcgaggccatgctgca

SEQ ID NO: 191019 - DNA, 517 bp, Zea Mays
agttataactaacttccatgcccaggcggcgggtgtctacaacatccactctccggttcccatcctcgacccagctttctccacttgcgcccattagtgtcacttcatcctccattcctcctcactgtccagcgctacgccctatagatgaccatgtcctcaccaacgctgcatccctcactatcccatcctggtggcagatgaatagtgtggtcctctcgtagatccttggggaccgtcactgttgagttgtaggatgttggcatggtggcactgcccgttaggcttgggttgccatcgaggagcagttcctcgacaaccgtgaggctcgtgctctccaccttgatgttgcttttcgaactttctgcaagggaacctctctgtcaccgaatactgtcgtcaaatgaagcgcatggcagcctccctctctgacctcgaggagcccgtcttctgtcttcaatcacatgctcgtcctcaacctcctctgcggcctcaacaagcgctatgatcacttcct

SEQ ID NO: 191020 - DNA, 458 bp, Zea Mays
tttcaatctcatccttgtgaaaaggtgagtatctataaggtttagaattcacaggaactgctccaggtaacagaggtatatgatggtcaaattctctgacaggaggtaactgagtaggaatagataacaggtctgcgaactccatcagcaaagcctgaatatcttcatgctgaacagtgctgttattctccttaacctcctctagcagaaccatgacccacacttcatgacctttgagccatttctgcacttgcagaactgacacattctgaatggaagtattgttcccagcaccatctccatacaacttcacccgttggccagcatccttaaactgtaatactttatcaatccaatcacactccataggactgtgctccatcaaccattcataaccaagtatggcatcaaatacccccaaaggtaacaccctcatatcagtatgatagaaatgtcca

SEQ ID NO: 191021 - DNA, 325 bp, Zea Mays
tgtcatcagatcaaaatacgttcatgttttgctaaatcaagacatgagtttttttgatacatatggtaacaacggagatattgttagtcaagtgctcagtgatgtattgctcattcagtcagctataagcgagaaagtaagcctaaatagtgaagtaaccatctgttcctctggaattatgatcttcagagtgaacctcatcacttttagggtcttgtaacaactgtgtttctttgtaggtggggaactacatacataatatggctacatttgttggtggtctcattgttggccttctgaattgttggcaaatagcacttctaac

SEQ ID NO: 191022 - DNA, 375 bp, Zea Mays
aaaaatcataagccgacttggaagaataagaacccgaagaggatggtgtccaaatgtgttgatctggagtatcaggttgacctcccaaacaaggtcccaaatctggaagaattccgagaaagcacttggggaaaattccccctgatatcaagaacccagtctcacataacagcttcctggactacctgtgtcctcactgcttttctattaacagcaggaaacaagttaggagccaaatctgcaattctcctaccatctaaccaacgttctgtccaaaatttggtgcttgttccattgcccactgacacatgaaagatgatattgatgtctgtactgtatgccttattcttcaactagcatatagcctgtgccaac

SEQ ID NO: 191023 - DNA, 323 bp, Zea Mays
attttctgggaagtgcaggggtgttggtgcaaaagatcctaagacacatatcactctgcgcagaggaccgcgggttgaatctctaaacctataaggggttttctgcaaggtggatacgcgaaagggtatcggccgagcacggccgttagatccgcaatcgtcggtccagattagaccgaggtacacttgaacccgagatcgcccacatacgttggatcccaatcctacggtccacggcacactatccatccccttcccccacggccgcacgattatttatcaatggctacgattgatgaaccgaacggaggcctcaagatcta

SEQ ID NO: 191024 - DNA, 1093 bp, Zea Mays
ctctcgtccacggccacaggctagccggccttgagcgcctgtgacggcgcaggttctggggttgcaacacgcccctccgcccttccggcgcatctgctgaattccactctcctcttgcccgccggcgtcgcctcttttctttgctatcgtcggcctcggaccccaaagacgacaacagcaggagggcagcgcacctgtgaaagcggcgcctctcttgccgttaaatttccgcgtcgcctggcttctcttccgcactctgctttcaagcccctctgccatgaccgtgcccaccaaagacgacagccaaaggtagctcgcctcctccaccacgaaccgccccgacatctccaaaccctcacctcttcttcctttttttttgcttcgtgcagcggcacggtggccgacacagtgccattaccgacataccgttcgttagcagcgccggtgaggaagcctgtcgacaagttcgcgctcctcccggccttcctcaaggtcagcatgacgttttcattcagcagaagctgctgcctgttgatttattatccaacaattttgtcacactcacttttaatgctccctgcattcacgggcctatccagtagttttcgtgtgttaacccgattattaccatgtggtttgttacagtcacaccttagtgcatgatttataaactgttagccgcagattagctccttgcttgttctatacttgcttgggttatcttgtatctatttctaatttacgactcattttgttcattggtcactcctatcaactcatgcacttgtttttatgcgccaatggattttcaattttaagctcttgccttgatttagtttttttctttgatggatgtaaacaacaggttagagggcttgtgaaggagcacatcgactcatttaactactttgtcaacaaaggaatcaagaagatcgttgaggcaaacaaccgaattgaagcgcgcaacgatccatccatttaccttaggtatgcttgtcaatttgtgtaatatgtattctaactattgttaaatatctattttgttgtcacattgcaggtaccttggtgtgcatgttggcatgccctcggtaca

SEQ ID NO: 191025 - DNA, 521 bp, Zea Mays
cggatgatgccgatgaactgaagatattgcatcttaatgttccagttaagtgttaacttctttgcctttgatttatttgagaggttaaaatgctgcagcctctgttgtttgatgatgcatttttatgacaatatatattttttgaagtagatttcatacatttcccagaactggccagttctacatgtggtggcaagcaatgatgggatgtacttggcagttgctggctctcacggactagtgctatatgatttgcgaaataaaaggtggcgtttttttggtgatgttacacaagagcaaaagatccaatgcaaaggcctattgtggatgagaaaaattgttattgtgtgcaactatgttgaatcgtcaaacacgtgagttttcacttctataccatctttcttgctattcctatcctgtaactgacttggccctgtttggtggagctctggtcggctttagctctggctcctccgtgtgttgaagcaaggagctgttttcttatctcttctcaaaatgag

SEQ ID NO: 191026 - DNA, 726 bp, Zea Mays
gatttttacacgcaggaagaattcgtagacggaataccacagaactggtggtgcgaagacaccagggacaaggaagctgttctcagaataaatataacaggcagcagctcaaccgaaaccaagacgcacaccatcaacgtccaacatcgctgcccaccatcatcggcgccaccgccgatgatgaaccaaccggtagccaccgtgcctccgagcaatgtccttgccagcgaggggcactcgaagcgctcctccaagaagagccagtccaagcaccgggaacagcaacaacagcagcaggattacccgcagtttgggagctcggaggtacatgacctgtgccgcatgcggtgcccttgagacctgtacaagctactcctacatcacttcaaaggagtatggatactgaagttgtgtctatgaggtgggaattacgagttttaggtttctcacatcgaatccaagtcccggagggccccgcagaagggagagagaagcctgggagaggagttgctccggctctgtacatatgcttcactcgatcagctgcctctcatgtagcccaagcaaagagtctagagtcctgagatgacagtgctaataacttgttgttttattcttgttccttgttaagggctgttgtctagatagttgaagccaaggatatttgaacaatgcttgatgtaatatgttccatagaattaccttaggtttgttctctcttcacgc

SEQ ID NO: 191027 - DNA, 660 bp, Zea Mays
ttcgcttggagctccccttccgcgctgctccccttccgctccaacttcacgcgactatccgcccagagcactatgtccagcttcgtctccgctatggattccgcgctgcaggaggttgggcgacgcgtagaggctggcctctcgtgcggttgcttcacctccagcattgccaccaagcaggaggttcaaaactctggtatccggcaaggggcgtatggtgcggccgtagactctgtctacacgagggatgccttccatagcaaaacatttcttgactacatctcagcactgggaaagaaaccactggcgggtgctgatcttcttgtccttgctaccgtaaaagcacagctgagggccttgaatcgctcaaggggctcaagggacctccctgagtttgagatgtttgagggcactgatgagattacagaaatgacacacacagatggagatgatacattgagtcgagggaaaaagtcaaagcgcatgaagagttcatcgaagaagaaaactgacatttccaagcatttagatggactcaaaactggttctgttgctgacagcagaacattggccaagaaggcagtaggtgatgctttgagtgagagaaaatctggacgcacactgagatccacgagtaagaaggaagatgctttagagggt

SEQ ID NO: 191028 - DNA, 366 bp, Zea Mays
atttggagagcacttgtagaaaataagtgcaaggtcttctcctggatcccaattaagggaaaactactaatggaagataacatggaaaaaagggttggctgcacgaggaacactatgttctctgcaacgggcctttggagacccggctgcacccatgcttttgctacccatttgataaggcagcttggaatcaaatccttgcttgagagcactttgacagagtgacagaccattgggacagcaacaggctgacccctcaaagatcatatagtggtgggaaattgcctcaagtaaggtgtattgtagtgaatgaagatggttgagtggcatggtgatttatatattctggaacctctagaaagagaa

SEQ ID NO: 191029 - DNA, 373 bp, Zea Mays
gggaaatttgatgtgtgtgtgactagttttgaaatggcaatcaaagaaaaatctgcgttgaggcgcttcagctggcgctacataatcattgatgaagctcaccggataaaaaatgaaaattctcttctatcaaagactatgaggatttacaacactaattatcgtctcctcatcacaggcactccactccaggtaggcttctcttgccactatttgtttttatataatgcgtgcacctggaacaatgatttaggtaccacttcagtaaccgtgttgtgccatatttattttttggtttaatctgatcctagtctgatttgctgctacatggcagaataatctccatgagctctgggctctcctcaatttcttg

SEQ ID NO: 191030 - DNA, 412 bp, Zea Mays
gtcttaaaagcggtacagggcggaacccatacaggcgactgaacccagagacttccccgccaaccacccaaagaagcactccatcacgcgagcttggtcttctcctccggtgacttccctttctcacctccgactgggacgagctcctcctcgccggccacgatccccttggtgtgcttcgcgagcccaaccaccgtcgcgcccaccgcctccaggacgtcgcccactaccgtcgtgttctcgtcgccgccaccctgcatcacagctgagccgtcagctacgcatgcacacgcttgcccaaattaaaccagcagtcgcgacgtcgaagaccaccatggcgtgcacgtacgtaccttcgccttcgtcgtcgaagcgccaccgccggtcttgacggtccctgacgctctctctt

SEQ ID NO: 191031 - DNA, 413 bp, Zea Mays
tgtggccaagtgttggtttgtgatctcccttgctggtgaattcctggagaccctccgccacagaagaagaagtccctatctaaagcttatcgtatatacaaaattaaagtacttctgatttattatagtataattatttgctcgtgcaaagacaatttggtcatttgttctctctcttaagcttagttcttgtcaacaattaggccttatggatgaagcattgtcaatctgcccgtcaaatgagtcttctctttgttttcatgatacaagagttcagttagacatgtcaatctgcaagtactgaggtaatgatatggttcaataaattgaggacctgcgcaaacaacactcaataacaatattgttcttctatgctcattatttgttctcatatcctccttttcttgttttct

SEQ ID NO: 191032 - DNA, 286 bp, Zea Mays
tgcaattatggtttacagaaggagcttctgtcgtctctcgcagacatggtatttacagagtctgcttgcatgcgagatgccaaggcgatgcaaatgcttcttgatggctgcagaaggtgttactgggtaattcaggaaccggattcaatcgataactttgcatttactggaacaaagcgatctttgggggaagtgaatgctctagtggatgaacttttggttgttattgaactactgctaggagcagcatcttcaacagcagcagcagatgatgtccgctgtttga

SEQ ID NO: 191033 - DNA, 437 bp, Zea Mays
gactgaaagtttcatcaaaatcaatactagggtgcggtgagaaaccgcggagaacccatcttgccttgtacctttcaagtgagccgtcggcgtgaaatttgtgtttgaagatccacttgccagaaacaacattggtagattggggacgaggaaccaggtcccatgtgtgattatccagtaaggcaaaaaactcttcctccatagcctgacgccaatttggatcagcaagcgcagtacgataactccgtggtacaggagacagagctgctacatgaaacaaggcggactggcgaaagcccgacttggcgcgggtggtcatacgatgatgattgaccacatgggagatcggaaccgccccacggcgaaggcgagttggaggtggtggagacccagacgcagctgcagaagtagccggtgcagtccgtcgggagtagacg

SEQ ID NO: 191034 - DNA, 328 bp, Zea Mays
ctcaatggaacaagaattgttgatggtgaaccgacgaacaaaaatgagattatgggtgatatgtggggctacgagaacgtcgttgagatagaacggcccagggagaaccgaggcacctactgaggtgaccgacagagtggtattgtttccaacgacgatcgaggaggggtgagaggaatggatgggatgggaccgagagagcatgcctgtagtgggagtggtgtggtaagaggcaccagagtcgatcacctagtcgaaggggggtggggtcatcgccatggtgttgaaggcggtggcaagggaggcatggtctcatcctccagccagc

SEQ ID NO: 191035 - DNA, 342 bp, Zea Mays
gtgcgttcctgaaaggatttcgccttcctggtgaggcgcagaagatagatcgcataatggaaaagtttgctgagcggtaggtttatatgtatttatagaactcaacacatttttctttatgatttccgccagtgaccctcagacactgatatgattatttgcaggtactgtgctgataatcctgagcttttcaaaaatgcagatactgcttatgttcttgcttatgctgttataatgttgaatactgatgcacataatccaatggtgtggcctaagatgtcaaaatcagattttgttcgtatgaacactgcaagtgatgcagaagaatgtgtcccaaatgag

SEQ ID NO: 191036 - DNA, 331 bp, Zea Mays
agatgcagaaatgcttgttgctctttatgctgtagacatttggggcaggcatttcagtcaggctcctagaagaacattggtcgaatctggtattcaatgggttcagagaacgttggagattagtaacgactgtttcgacatgtttcgcatgcgaagaactgtttttagacgattgcatgacacgttggtacaaaattatggtctgcttccaagccggggtgtcagtactatggaagctcttggcatattcttgtgggcatgtggggtttcacaatcatttagatagatcaggaataaatttggtcactcattggaaacaattagtcgcaag

SEQ ID NO: 191037 - DNA, 3327 bp, Zea Mays
attattgttggagaatactttccggcttgtatatagtatggttagaccagaaaaggagaagtctgctgagaaggatagatgctacaaggttcccaacactaaggatctaaagttggatggatatcaagatgtgctttgcagctatattagcaatcctcatactgcatttgtccggagatatgcaaggaggctcttccttcatttatgtggcagcaagactcactattacagtgtgagggattcgtggcaatgttcccatgaagttaagaaacttaataagatcataaacaagtctgggggtttcagaaatcctgtgccttacgagagaagtgtcaagctcataaaatgtttatctactctttgtgatgtggctacggcaagaccaaaaaattggcaaaagttctgtttgaagcacatggatcttcttccatttctcatggacaatgtttatcatttcagtgaagagtgtgttattcagactctcaagcttctaaatctggctttctattcaggaaaagatgctaatcataatgcacaaaaagcagagactactgatctaggaggttctacgaggactagctcacagtctccagatatgaaaaagaaccggaaggctgatgatggttctgaaggttcctcagaaaagtcgtgcatggacatggaacaggttgtagagatgttcagtgataaggaaggtgacatgttgaaaaactttatcaacatattcttactagaatggaactcagcaggtgtccgtcatgaggctaaatgtgttctatttggagtgtggtaccatgcaaaaaaccgacttagggagacaatgctatcgattctgctacagaaggtaatacatcttcctttatatggacaaaacattgttgagtacactgacctcatcacctgtttacttgggaaagtgaacgacttcagtgcaaagcagaatcactctgaacttgtgaataaatgtttgacatctgaggtcataagctgcatctttgacacactccattctcagaatgagctattggcaaatcatccaaattcacgtatatacaacacattgagttgcttagtggagtttgatggctattacttagagagtgagccttgtgttacctgcagctgccctgatgttccgtattcaaggacgaagcttgaaaccctcaagtctgagacaaaatttactgacaacagaattataataaaatgcactggaagctttactatacagtcagttacaatgaacgtttatgatgctcgtaagtctaaatcggtcaaagtacttaacctgtattacaacaacaggcctgtgactgacttatcagaattgaagaataattggactctttggaagcgtgctaagagctgccatcttacatttaatcagacagaattgaaggttgaatttcccattccgattacagcatgcaatttcatgattgaacttgattcattttatgagaatcttcaagcttcttcccttgagtcactgcaatgcccacggtgtagcaggtctgtcactgataaacatggcatatgtagtaattgccatgaaaatgcatatcagtgccggcagtgtagaaatattaactatgaaaatcttgactcttttctctgcaatgagtgtggatacagcaaatatggtcgttttgaattccacttcatggcaaaacctagtttttcatttgacaacatggaaaatgatgatgacatgagaaaaggattggcagcaatagagtcagagtcagaaaatgctcataggcggtaccagcaactgatgggatttaaaaagcctctcatcaaacttgtgtcaagcataggtgaacaggaggtagactcgcagcagaaggatgctgtccagcagatgatggtgtccttgcctgggcccacatgcaaggtaaatcgcaagattgcacttcttggtgttctatatggtgaaaaatgcaaagccgcttttgattctgtgagcaaaagtgttcagacattgcaagggctccgccgtgttttaatgacatatctacaccaaaaaagttctagtgacaccaatgcattaccagcattttcaataccaaggtctccaaatagttgttatgggtgtagcaccacgtttgttacacaatgcttagagttattacaagtgctttcaaaacatgaaaactgcaggaagcagcttataagtgctggagttttgtcagagttatttgaaaacaacattcatcagggccctaggacagcacgcactcttgctagggctgtgctatcttcgttttctgaaagtgatgaagatgcagttcatgaattgaacaacttgattcagaagaaagtgatgtattgccttgagcaccatcgttccatggacattgcacaatcaacacgagaagacttactgctgctatcagagacttgtgctcttgtggatgagttttgggaggcacgattacgtgtcacctttcaactgttgttctcttctattaaggttggagcaaaacatcctgcaatttcggaacatattattcttccttgtttgaggataatttctcaggcttgcacgcctccaaaatctgattgtggggacaaagagtcaggtttgggagtatctagcttgacgttgcactctaagaatgatgatacaactggtaacacagcatctaataaccccaatactaagattcagtcagatatatctggaaaaatttatgatggaagtcgaagagaccaggatattccacttttgagctattctgaatgggagggcggtgcgtcatatttagatttcgtccggaggcagtacaaagtatcccaggcagtgaaaggatctgctcagaagacacgccatgattcatataagtctgactatctggttctcaaatatggactcagatggaagcgtcgtgcatgtttgaagtcaagtaagagtgacttctcaaaatttgccttgggctactgggtatcagacttgatcttgagttcgtgttcccagtcaataagatctgagatttgcactctcataagcttgctatgcccatctaactctcctagacaatttcagttattgaacttgctcatgtcactacttcctcgaacactctcagctggtgaaagtgcagcagagtactttgagttactagggacaatgattgattcagagtcttctcgtctattcctaactgttcgtggttgtttgacaacattatgttctttgataacaaaagaagtgtccaatgttgaatcacaggagagaagcctaagcattgatatctcacagggattcattctccataagcttgttgagctcctgaacaagtttcttgaagttcccaatatcag

SEQ ID NO: 191038 - DNA, 345 bp, Zea Mays
ggaggtttgagtcactcctctttaagtggaggaccatgaattaaacaacaagactctgaatgctcagttctcttatacctcactctctaaatttgaaagagtcatttgctatgttattcctcacctcccacgatgaccttgaccacaattccgacgatgcatattctttttgagtgataacgagctcgagaggcgggtcaaggacaagctaaacgttgtaccaagaacctcttcattaccatcatcaatccctgtaatgttagctctaatagtattttcatcttcaacatcagaagcactaacatacccaccatcaccagtagcaatgtatgctcgtttgctggg

SEQ ID NO: 191039 - DNA, 273 bp, Zea Mays
gccttatatatccgaccgtggggcactacatgtgtgtatgataacgatgtattcctaagtaatagtgaaccgactgaacttatcttcctacgatcttgccgacttatcctcatttggttccgatgtctagggtggtcgcgcgggagaatcggattggagctgtgggtaacgctcaaaaccccacgagccgccttggcccgcgtttgctcattccctgcgtcggcccattctgcgagcagtcctcccctggcccacgaagggatggacttgcga

SEQ ID NO: 191040 - DNA, 398 bp, Zea Mays
cacagatggagcaggaaggcaattcggtgttaggcgtatgtgtgaggcaggctatggtgcagagaaatgaaagacagcacgtagagagggccagttgcaagatgtcagtcaaaacagatgagggaaggggaaaaagcgcaagggaaaatctgagtttgagaagaaatgggggaatgaaagcaactcattttgttgcagatggttgtcaatggctcgccactggtcagacactagagcagaggcaactgggtggcggcacagctgttgtgcacctatgcagaggaaacagatgagggaaggggaaaaagcgcaagggaaaaactgagtttgagaataaatgagggaaggaaagcaactcattttgttgtagatggttgtcaatggctcgccactggtca

SEQ ID NO: 191041 - DNA, 691 bp, Zea Mays
gtattatggccctcaagcaaatttcaataacaccaatgttagagatcctcattttgttggaggtcctggaatactaaatcaattcccaaatcagaatgacaggtttcaccctggacatcctcaaaacagaccaggcaaacatgaaacggtcccaagggagcagctggaatctgataagctacatgtctttcaccaagaacaccctgggagtttgcatgataatccagatcgtctaggaggttcccgtgaatttgaaaggaatgtgcagccagcaccgccacttcttccacatcctgatggaaaacagactgatatgaacatgagggcagatacaagggacacctttagtgagactgaaagaaccgtggtacttacaaaatcggtgcctaaccagagaggttcggttggtatagaccatttgtctgtttatgaaaacacacgatcccatcacagagaaacttgtgatggcactctgcgcaagaagttcaaggaggatagctcagttgtacttgaccagcatcctgtcattaagaagaatgcagctttaatagagaaaattgagagtttgaacaacaaagccagaaatgtctatgcacagaatctcccagaaccagcttcatccaaggaattcaagaagcataaaaaaactactgatgtttcatctaatgatgtcatcagtacgacatgcaca

SEQ ID NO: 191042 - DNA, 473 bp, Zea Mays
ggtctcaaaaagccacctgaatgtgtctattgtttcatcccgaagaagtgcttggccaaaggacacatttttcaaattattgctgcaacccacaaacatggccaacgacatatgcttgctgttagtcttgtgtgttgtgtcaaatgtgactacatccccaaaatccttgtattctgcacgctgacttgcatgacaccaaaaaaatgctccgaagcacctttgtttttggttcaaaatccacatcccagtaaaagtattcattgtgttctttgcactccctgaaaaattggaacagtttatccatgtccccatccctctcctcccttgcttgctcagctttcctgtaccataaaagaaaaaacaagtaaatctgctgttgtcaatatatcgcataaagatatgatgtcagtttttttatgacctacttgttatggacatctttctccgtgaacgaccagttttgatggcctcca

SEQ ID NO: 191043 - DNA, 333 bp, Zea Mays
ctcgaaagaggttgaggaggccaacatggaagacatcgtgtatgtgggctctcggtggaagacgaaggcggacaactactttgttgatgacttccatcacctgatcggttcgtagaagcgcatactcagcttgtcggtggttgcctgtggcagggataggggggtacggtgccgaacccgcaaccagacccaatcgcctaccttgtaggacaactttcgatcgtagtgtgccttgtaggatgcttgggcctgctccagtctgtaccacgcgtccttaagcatctcatcgtgttcagtcattgtcttggccaccgcttctacacgcgtttctcc

SEQ ID NO: 191044 - DNA, 318 bp, Zea Mays
cgagctcgagttcgtgcagggagaagaaatccggtccaagaacagagtggaatgcaagaaaggcggcaacttttacccctccaatcgaaagaaaacccccacctcctcctcaatagcaccaaaaccagcgccggaatcaagaaccgctcggcgctacaaaccaccagaaaaacggcgtgctttcgccgcaaatcgaggcaagaccctggtgctccgctgcagcagctgcgattcgagggagtggggactccgagttggatcggcgtggagcagcagatgagaaccggagtgggaagaaatgcgacaacttggtggctg

SEQ ID NO: 191045 - DNA, 400 bp, Zea Mays
gtttgacccttcgttggacaccggtttgtgctgggatcgaatggacatcatctgttggatctccgacaccatctctctaggttgtgtcaggtggctagggagcgcaatggcacgacatgccatctttggctcactctcaagaatcagtttcttgggaatcgtgagatcgacaccctctagctcgacactaacttccacaccttcatccagggcgacctactcgtgggtgactactgttgcaagatgaagatgtttgactttcttgccgacttgggcgcccccgtcaacaaatggatcctcatcctcaatattctttgaggcctaaacaagaagtttgagtgcattggggccatcatccgacgctactccccctgttgcaagctaaggaaatggcagactc

SEQ ID NO: 191046 - DNA, 354 bp, Zea Mays
ccggcctcgctttccaacgagtgaccggccgagcagggatctcaaccacactccacaccggccagccatgcaagtggcggtcgccgagcgcgctgctgatagcggatagccctctgctaggtgcaaacgactagctagcacatgtccgggaaggcgccccacgcgtacgtacgtcttgctaatcaggcagctagctacctgaacagtcttgtcgttacactgttcgtcagagtttgccggaatgatatgggtactgtacatgactactcgctagcagtagcaagtacgccaccccggtcgatcagccgtcgacgtcgtcgtcgtcgtcatcgtccgcgccggtgtttgtttagc

SEQ ID NO: 191047 - DNA, 493 bp, Zea Mays
ggccctaaaggtacattcaattgagctgtggcttttaatgtgagttgtggattataaataagtttatatgagatatgcttagtgagaaggtgaaagtcatttgattcaacaaccgtggttttcgaataaactatgctcagtgtaactcacttgcgaatgaacccaacatgtgatccacttccttcctctcgcttatgagaagacattgtttgttagactcacacattcatcttcttcctctcatcgtactaaggcagatacctcaccaaaactgaggccaccactagtcatgctcgcgtcagccatcggataacacccacacatcggtcatgtgccattgtggtggccaaggttgtgcctgaatgttggccgcgcatcgccatcgtatctaggagtgatggagtgggaaggggagacatgtcctcatatgaggcgcgtcatcactggagtcgcgcccgcacagggccaactagaaagaaaaactttaagcctg

SEQ ID NO: 191048 - DNA, 427 bp, Zea Mays
tttgtctgcagtatttggaatactatcgaggtttgtgtttgcaccattaactgtactgaccttcctcgcctacaagtactggaaaacaaggatatccattgacgcagtcgagaagtttctccagatgcaacaagctcttagcccagcaaggtatgcctacactgacatcaccgcaatcacaggacacttcagagagaagctgggccaaggaggctacggatccgtgtacagaggcgtgcttccaggtgacgtcagcgttgctgtcaaaatgctgagcaactcgctgtgcaacggagatgaattcatcagcgaagtgtccaccatcggaagcatccaccatgtcaacgtggtgcgtctggtggggttctgttcggaagaaaccaagagggcgctcatctacgagtacatgcctcgtggatctctcgat

SEQ ID NO: 191049 - DNA, 327 bp, Zea Mays
gttgcatcccatagatcagttagagacctgtatctcaatggtggatgttgtgaactttgagtgctcggggtctgaggactgttgttagtagctgcactggaacttgacccctgtaatcccccctataacacttgtggtgttactgttatttgtggtgtcactggtgtgtgaggtgagggtggacaattttgtgcaccccctgaatcttcaacacttccacctgaaacacctggctgctgcaacacctgaccaggcacagtgtactgaaactggaattcacaaggaccagattctgtcagcttgctgaacattttcatcactgtccca

SEQ ID NO: 191050 - DNA, 1960 bp, Zea Mays
tgtaaatacaagcaacaccctggctggcacggttcaaaccaagctttctctacccaagtcctgcgccggccgccgcttcttctccttgcatccggttcaggatttccagcggcctcgactcccgatccggtctccgtaggagcgtcggtatcctcgtgtctccggcagtctttcgaacctcggttggtcccgattggcgagaaacccccgcgtcgaattggcggccaaggggcgcgggacgcatcattcgattcttggcggctgcttgcctgcttgtgcttgagcgcttaacagaacttcgcgagctgggctttctctaggtggaaaggtgagcgattcgacgacttctttaaccgattttgcgctttactgttattttagccttgtttggccggctcttttgccccttttccccctttcgctttattctgcgcaatatttgtttcacccttttgctttcctcccccctcccctccccccctctccctgtccggttttaaagacgcggagagattgtaaagtctaaatcttgcattcacttggggaattggataggtagggagtggataggctttgtcggtaggtcctttttccggggagaattcgcctgagttccttggaataaaagaagatttgcgatccttaagcctcacgttccttgatctgctggtgtggaagttgatcttgatcatgttcccgttcgtcgtcttcatgggtacgctccagggttccttctctgttttcttgtgttcaccttgatggctactggtgcgaattttgagtttcttaaatgtttcatggttcctttttttaaccactggggccatgtcgcaattggtgtatcatcacggcgtgtattgtgctgaattgggtgcgggtttgctatctaatatttgcgcatggttttgttgttgcgtgaaaagattggtctttgatgtgattgttgtggttagccatcagaatcaggaaatggataataatcttctgttatgtttgatgattgttagacaatttgatttggagatggggccggaaatgatagagcaggatggatggtaggaaaaggaaggggaaattcaggaattctctcaggcgtatggctatggagtgcctgtgctctggtgagcagttgaaggcgtcagatgagaccatgcggtcatctgattctacgatcacaaaggatttctcggccagtgggtactcttctcggaatggagagattgagcagtaccttgataatggcaacatagaggaagccgagttgtcgctccgggagggcatttgcctaaattatgaggtaagttgttttcttttgtgaaacagattttgttatggcaccaagaacagctgaaatatatgctgaatgtgactaggaaatgccaccaattcagctagtatgattcctagttaagtcaatcttgggtttcttttgtcaattttacttccttgtgaagatttttgtacgtaactaaaatcaacctgcgtgctgaatgtatttttttctgcagttagttgaataaatatatggttattatctttttcttcactaaaattagttcactacctcctacctagcagtttatccaagctagccttttctgtaccagtataagtatttcaagggaaattctttcttatttcaagagaagacttaccatttttattactgccattctctttcttcgatttcgttagatgccagaatgtcatctgtttaagttctatatttcagcattacatttggacctagctgtttctagctcgactgacagcacatgctaaacaggaagcaagggcattgctaggaaggctagaatatcaacggggtcatgtagaggcagcactccgtgtctttgatgggatagacatatctgcattagttcctaagatgaaaatctcaattgctagaaaaacagaccgtcggaagactcattcacagtgggattccccaccaatgccc

SEQ ID NO: 191051 - DNA, 317 bp, Zea Mays
ccggaagatgcaggaatttggtacctgtcaggccttcaagttatctctgccagaataggagctgccggtattgatcaagccagcagagaagccgcgaaatctaggttgctggacgccattcttagcaaccatccaaagcctcctcctatcagaaacgtgcaaatggtggactgggttattcatggcgacacagaggagtgttcaaccggtgtgatgatacgtaaagatgaaagcagccgtgagcatactaggtcatttttaagtcagttcccgttcagaagacgacccctgcttccctccatattcacaaggcgtgg

SEQ ID NO: 191052 - DNA, 759 bp, Zea Mays
gcgggaagcagatcatcgtgcggcgctgtgcggacaggagcacgcctgtgacctgtggccgcccttgtgaacagatgctgccttgcaaaaggcatcgctgcgagaaggtttgccacactggttcttgcggggattgcgctgttctcatctctgtgcgttgcttctgccggaataagaatgagacattgctatgtggagacttgatggaaaagggggagctgtctgaggaggacggggtgttttcttgcaatgaggtatgtggccgcacgcttgcctgtggcaaccatgcttgcaaggatatgtgccacccagggccttgtggggagtgtgagctcatgccgtggaaggtcagtacatgtcattgcggcaagaccaggctgctggagaggagggcgagctgcttggacacaatccccacctgtgataagatatgcgataagaaactgccatgtggggtgcacaagtgcaaggtcaattgccatgagggagaatgcccaccttgtttggtgctcgttgagcagaagtgccgttgtggctcatcaggtcagatggtggagtgtcacaagttctcaatggaagagtttcgctgcaagaagccttgtggcctcaagaagaactgtgggagacatcggtgcagtgagatctgttgtccactgtctaggaaagttgcacaccttgaaggtggcaactgggatcctcatctctgccagatatcatgtggcaagaagctccgatgtgggcagcatgcatgccagctac

SEQ ID NO: 191053 - DNA, 392 bp, Zea Mays
acttccagagattgatcttatctcaaagctgtggaaagatgtggaatcatggcaaacccgttgtcaattatatctccaagacttccctgatctaaaggtggcttttcctccttttttctttcttctattatgtatttttgggatgattttagatgttctgttcctctattgtgaatgttccaggagctggagggttttctccttgctgcggatggtgccaactttagcattccagagctgaacattcttaagcaacattactcaaattgttgctcttgggtgagtcgtgctaagaacatactcagaaaactttatgctacgagtgactatcacaatgctgttgaggagttgacaggcattctgaaggaagcagaattactaggagtaaaagg

SEQ ID NO: 191054 - DNA, 287 bp, Zea Mays
gcacgatactagccgtcgagaggaacatggcgaagctaggggagaaggtctcaccgggagcgaaggtggggacgaggtcggacacggtgttgggcgaatcgctggcgttgaagtccctccggtgagaaactgtgtagcctccggtccacaatcccaccaggcaaggccatgacagacatcctggtggccttatttatccgcacggcccatccccgagggatctacatcgacgagccagagtcttccccatggcgaacatcattctcacacttccacccatggcggtc

SEQ ID NO: 191055 - DNA, 450 bp, Zea Mays
tggagcggcagtgcaacgccatgattgaccaggggatcgtgcgacgcagcgactccccattctcatcgcccgtgctcctggtcaagaagcccgatggctcgtggcgcttctgcgtcgactaccgggccctgaacgccctcaccatcaaagacgcgttccccatcccggtcgtggaggagcttctcgacgagctccacggcgccaaattcttcaccaaactggatctacggtcgggctatcaccaggtccggatgcggccagaagacgtgcacaagaccgcgttccgcacacacgatggcttgtacgagttcctcgtgatggcgttcgggctctgcaacgcccccgccacgttccaggcactgatgaatgacgtgctccggccattcctccgaaggttcgtcctggtattctttgatgacatcctaatttacagcagcacgtgggccgatc

SEQ ID NO: 191056 - DNA, 1176 bp, Zea Mays
tcatgatctgggcccaccagtcaggagaagaggcgtgaatatgccatgttaccacatgttctcagacatgttccatgcctaggcagaggcccagtactgacgcgtggccaagtgcgcctgacctaagtcgtcggcctgacgtaagctatcgggcagagcccaacgtaaggctctgatatggggcccactaatatgggggatggatgggatgcttacttgcccatgtcagtggcaggtggcgtacttccccgcattaaatgcgtgcgacgcgtctagtctgcagcatatggtatccactatttccccacacgtttccaaggcaagggcattgactcaatgcgtcgctttggcacccttcattatgacctccattattcctcgtgcattactaaggaatgaagagacaggcaaaggagactgaacaacactgcccattgcacccctatgcatgacagcatatcaggctacgtctcaacctacaccaagttctgtgtttgggacaaggtaacaggataaggacgccaggagatcacacaacagccaagaggagatacgagctcaagaagatctagcaccaccagtcctatccaaacacctcacacttcatattgtaatgattcatgggcccacctgccggggcccagctcccttgtagcaagcccccttggactataaaagggagtgcacttgcattgtagcaggagaagcgacacacacacagactctcgactctcaagcaatacaactcataatggttgtagggtattatgctccagtggcccaaaccactctaatccttatgttcttgtgttcatccaagcggtcaggaaaatccctaagcctcctcctcatcttaggatcagggcgggtgcactcctccacccgaccggaggatttctcgtgtgacatttggtgcaccaggtagagggtcaggatcatgagcctaacaccttgattgatataacatccctcttacccactggcgagcatggtcggggcaagtccgctggcatttggcacaagatggagaagtgacgcctcaagaggttcgtcgtcgatctcaaacgatgtctcagcaagtgtgcaaccgccaccaaatggagagttgtgggaacctcacccatggcaggaggagctactgcggccatcctcccggtagtctccaccatgtctaag

SEQ ID NO: 191057 - DNA, 440 bp, Zea Mays
cctttcgccgcgcccgtgcacaaacccgcgccgtcgaagctggccccttgcctcggagtcttgaacgcaaactcggaggatcgcctcgctactctgcgccgtcaccgcccacctcctcgttcttcaatctgctccctgtttgccgtgcagtggagaccagttatccgatttcccttgtcggtaagacgaagaaccctagcccgctgtcacgagtttgtgtggggaattggggttttgccccgaacggaacccgaattttcatctctttttctctcatcagttggtcgcagatttctccaagaaatctggggacgctgataggaggccgtacagaacgcagcggcagcaatggtgatgtcggagtcggacgacgacgacgacgagccccagctcaacgcggtggagagctactacttcgttgactccacgaacgacaacga

SEQ ID NO: 191058 - DNA, 1586 bp, Zea Mays
ctgatcctctcccgagtcccgacccgtcatcgccgccgccattgtcccgccgcgcagggtttagggttcagtagcggcggcaccagtttttctcctcatcaagggagtcgcggccaccgccaacgagacaagctgtcggcgatgtcgtctatcgcatcgcagctgaaggccatcaagtcggcgctcggcgctgcgccggagccggctcggcggcccgtcacccggccgtctgtgctcttcgacgccaaagaggccgccgacatcgacctccgggccatcctgcccattgccctctctggttcgtaccactaactaccgacctgatcggttcgagcatgctgatgctttattagttgcgctcttctagagtagccactagccagcatttcatgaaggacaacttggttgtattttccgctaaaccgagcgttctagaattttgtttggttcgtttgattcttattttagctcccatttaatataatatctaaatcagctttctcggaattccctctggattttgctgctatttgcaggttgatcccatccgtctacatagtacacctagttgtttatgcttgtgcaattatgcatgcgattttatgaaacttcactaatagctcaaattgaatgaagtttttaaaaacaaaaccaatttagttttgcatatgaggtatttcattcgaagagcttctcttcctctacggtacctgaatcaaattgcttttcagggttggagcaccttaccagcgtagacgagagatttgcaaaatacagcaacactctgttcagggagactagccttgaggtgaaccgcgaacagttgactcccaaggagaacgacaaactcaacaagtctatctccacctaccttcgccttctagctggctatttgcatcttccctctgccctcaagacccttgaataccttatccgcagatacctgtatgaatttagctcagctaattttgccgatggccctacgagctctagcttattctcttgtttctggtgggaaccttcatgtagggtgcatgtatacaattcggatgagttgctgctgagcgcactgccataccatgatacacatgcgtttgttcggatcgtgcagttggtcaacttagggtgagtgtggctctggtctggatagatacttattttctccatttgtcttcaatatcaacttgtgctggttgatgtgctttcaggaatagtaactgggcatttcttggcggtgtcaagtcctcaggtgcaccgccacccaggagtgttctagtgcaacagtgcatccgtgataaggctgtgctggagaccctatgcaactatgtaacgccgaaattaataatccttttaacagtaggattctgtcatgatttttgatatttttttgttgataattcattttactttcaggctacaccaacaaaggaattcagtcactcgaagacagtcgtctgcttttgcactgctgtgattgttgagtgtttgggtgctgtccctaagcttgacacagatgtagtgcagagggtgttgggatttgtgtttgactctcttaatcctgcagtgacgcgagaccaggaatataa

SEQ ID NO: 191059 - DNA, 296 bp, Zea Mays
ggagtagggtgcgagaatcacaggatatgccactggcactcagggcccacacgagcacggtgtttggactttggataggtctaggagataactgtgtccatgacatttgggtccaccactcggtagagtgtaaggagttactactctacaaagcgtcaaagcgggacgcaaacacacgcagttctatatcgtgtgcaagatgttcccatcaatggacgaagctgcctcttagaccaacagtcacatgtcaatcaatagcgaccaactgtcggatgtccacctgtctctatagcgac

SEQ ID NO: 191060 - DNA, 1470 bp, Zea Mays
gtaaaggccatgctcaacctcattggggccgatggcgattcgttcagcaagaaggcagagctctatttcaaaagccggccagagctcatcaatcacgtggaggagatgttcagatcctatcaggcccttgccgacagatatgaccggatatccagtgagctgcacaaggccaaccacaccattgccaccgtgtttccggatcaggtgcagttctcaatggaagagggggatagtgaggggttttctaaggcaataggtgggattgatctcagcaacttcaagttccctgcactggaaggcttgtccgtgggctcaggctcacagagcgcaaacaggggcaccagtccggtccccaagaggggggcccaggcacaccggaaggtcacccccaacatgaccaaggagaaggcacaggaggagatagacaagctgcagaaacagatcctggcattacagactgagaaagagttcttgaagacctcttacgacagcgcactaggaaagtatctagacattgagaaacaggtggcccaattgcaggatgaggtctgcaatttgcaggatgctttcagcaccggtgtagccattgaagacaatgaagctcgggcattgatggctgcacaagccattatgtcatgtgaggatacgttggtgaatttacaggaccagaaaaacaaattgactgaagaggcggaggtggagctccgacgagccaatgaggcaattgaaaagctgaaaaccttcaagaacgaatgtggactgcctcatgtgcaaatggatgggcatgatcaccatgaaatagaactggtccatgcactgcccttcgaggattctgatgattctgcgctgaatggaagcaggcttgacctccaggaaatatgtcaaagagtcaaagaaataattgaatcttaccctgagctatcagttgcggaattagcagataaagttgaccgacttgtggaaaaggtgatcagccttgaacttgccactacttcacagaatgctcagatcgatagaatgaagactgagatagatggccttcacgagcgcctgcatgctttggagcaagacaaggtggctttggttgttgattctagtaacttggctgacgggttgaggaaagttgaagaaatgctgcaagaagtacaacaaatttggaagtccgtacaaaatggtttcgagaacatttgtaaacaaatgactgaagccgcccatgaactaactgaattcgtcgaaacattacatgctcctgagcaagaaagcagtgacttcgtggattcatcgcgagactccaaacacgatacttctctggaagattactcgggactaacaagtctgtctgtgcaaaacgagccatccaaatctttacatgacactacaaatgaaactgataaacatgaagaaaccttagaagatcaagcccaaaaagagctagttccaaaagaatctgaagttgagggtaagattcta

SEQ ID NO: 191061 - DNA, 689 bp, Zea Mays
ttcgacatggccaaggccagcttcgacctcaactactccgccaagcgcaccagcgtcgcgtcctccgacttcagcgacatctacggcggcggccacggggcgctcgaccgagtctctactgctcatcagcagcctcggcactccatcttcggcgggcctggcagggagagcaagaaggcggaggacgaagcggacgccgtgacggcggagctcggggccaccatgcacatgcgctacggcgccgccgcaggacggacgcgcgggagggagttcgaggcggtgtgatcgagcgcgcgcatgggaacgagggggtcgatcgatcgagaagaagcaaattaaatgcccttctcagctcgattcgtgattcgtgaatgtgatttgcgcgtgtgctgtaggtacgtacgtgtaagtagcctcagtttcgtcctcctcatcctccttttatatgtttggaaacaggatgcctcatatcatagcattctacttcctgcatggtacactgtagttcaaggcttcatgtatatatagttgtattatacatacatgtaacatgtatataggctgcctacgcacatacatgcgcacatgagttgtgtcacgatcacaggtagtcctgataggattttggtagagatttcagcgagaacaagtgaagaatgggatttcggaggatctatccttcagccaag

SEQ ID NO: 191062 - DNA, 373 bp, Zea Mays
catgaaagtaatattgtcagtattggcaggaacacacaaatattcatcgaaaatataacacgcagattattcaaacataggaaacatatgtgctatttgcatggacttaccaattgtcagcagttgaggacatctttatacacaatattcttggtgctcttccctgtgggatctaattccttctttggcctagccagaattctagtagtttgtcttgacacgcccctcgacaatgccacataaagttgtccatgcgagaacacaggctctggcaggtagatgccaacatttgggatggtttgcccctgtgctttatttatggtcatagcaaaactcaagcggatagggaattgtttcctcttcaacttaaacg

SEQ ID NO: 191063 - DNA, 541 bp, Zea Mays
gaagctgcctataaattggagcctcgaccagtgccgctaggtaattgtgcgtccagagaacccacgcgcagctccgattacttcccacagctctccaatttcacgttcgccccaaattcactttccgccaccgcaaggaactgctcactacggccagccgtacttcggtcagtccaaccctccctctccctcgtttaagctttcccagatgccttcaatgcttgctgacccgtccaattagactagaggtccactgaccattgggaacgcatgaatctttggtttatccgcgcgctcaccgtggccagaccgtattagttcaccaaatgtgcaattaacttaggggaatcgatggttggggtgtgaattcggtttcgaccgaagaagggcgtcagtcctttccccaatcgaccggcctgctagctcaccggagctcctccgtgcgctgccgtcgttgaggacttcaccgtgcgaaggaatagaaaccgaagggctattttgtaatctgtcagcgacacggcgaaacagtaaaggaacttat

SEQ ID NO: 191064 - DNA, 360 bp, Zea Mays
ctggtgatgattatagagtgtcagtcctttggtgtgtgaagaagtggattcaggtaccatctcatctcaccatttagcgaagtacgaaatttggaccttcggttgtagatttactccacccatgtcctctgacataaaattcggaacttgtcaggctgttcctcttcagtttctgcatgctcttttaacatatctcggtgactctgtggaccatggcagtggatcttctggtctcaaatcaccattagcttcacgcccttcttccttcccagggattggtgttccttctgaagcccttgtgagatggcacatgcgccttgaatattttgcttatgaaaccttgcaggacctacgaattgg

SEQ ID NO: 191065 - DNA, 734 bp, Zea Mays
ggttatgggatgccgaaagaaaaggctgtattggcattggcaaaggccatctgggagctgttggttctgttgccttctcaaagaaaacaaataacttttttgttagtggcagcaggtttgctcttcagtttctctgtgatctttgtttgcctgaagtgacaccaaatttgatattctaaaatattactatctttttgttagtgatcgaaccatcaaggtatggacctgggacgatgcacttggtgatgctgaggatgaagtccctcttaaagcaaaggctgttgtagctgcacatgataaagatattaattctctggcaatttcacctaatgatggccttgtttgcagtggttctgaggtatgattgtagcatgatacttcattccaaattataggtcactttggttttgtcttaaagtcaagtttctctaactttgagcatgtttattgaaaaattcattacatctacaacattaaatttcattaaatccaccataaatgtcttagtgcattttttctattatatatgctatttttttttttcataaaaacttggtcagaatttataattttggcttaggacagagctaaagtgacctatagtttggaaaggagggtgtagttcttttagatgtgacatgtctttttatctggtttacattatatattatcatctttattttgtaggaccgaactgcttgcatatggaagctccctaacctagtgttatctgt

SEQ ID NO: 191066 - DNA, 319 bp, Zea Mays
ataaaatcacaggcatggcaacttaagctcagatcattcaagaaatgaagggggaaaggggaggggaaggaatggcgtctgttataccgaacaacaacaggaagaaggacgaagcgccgagaggaagcagctacaaggcgtgaggaagcagcaatccggatgccctgtcaagaaattaaaaggggattagaaaccctaggtcgcgaaatagaacaaaaaacgaagctccaaacctacaaagcacgaatccaccacagatctgaaaagagaagaagaaatagggggaggatgggaggaactcggcaccagtcaccggcgg

SEQ ID NO: 191067 - DNA, 325 bp, Zea Mays
aatgtcgtccgcacgcttctcttccaagccagcatccctcccactttctgggctgctgctctcggtactgccacatatcttctaaatatctttcccacaaagacacttgcttccagcacaccccacttcgccttacttggcaaacacccctcgtacgaacatcttcgtgttttcggctgcaagtgctaccctaatctcacccccactgcaccccacaaactatctcctcgctccaccctatgcgtcttccttgggtattctccccaccacaaaggatacctctgccttgatcgtctctctcaccgcatcatcatctctcgccatg

SEQ ID NO: 191068 - DNA, 381 bp, Zea Mays
acccgatcgacgaggagggcccgactacgacggagagcggcggcgggacgacggcgagctcgcgggcgacgctgagcggcaacaggttcaaggaccgcacgtccatcgaggacttcgagatcatcaagcccatcagccgcggcgccttcggccgcgtgttcctggccaagaagagggtgaccggcgacctgttcgccatcaaggtgctccggaaggcggacatgatccggaagaacgcggtggagagcatcctggcggagcgcgacatcctcatctccgcgcgcaaccccttcgtggtccgcttcttctactccttcacgtgcagggagaacctgtacctggtcatggagtacctcaacgggggagacctctactccctgc

SEQ ID NO: 191069 - DNA, 700 bp, Zea Mays
tgcatacacaagcttactctgccttcccatatccatatagcttgtgatctgcagtagctgccaccggacagagctgcagctataaatatttcacaaatcatagcggatgctgcataggccctcagtattttgcttgttggctgattggaaagttaaccctatctcaggacatcccttttgcctggaagtgatagtttagcctagctagacctagactaccattcgctagcttttgagttggaatggaggccttgggcagtgctgttggtggtgatggtgccaccacctgaagagctgcactcagaaatgaagcctatatgtttcttcttacctaatgttaattaggatatgtgttgtctgtagatataattggggttcttgtttatagagtcgtgttctttagccattggagaatgggatcattttttcaaggattacgtgatgaatcctatacttctgtgccgttggttggtcctccgcacagttaactgaaatgttattggctgactggagttattgtgatattgacatcctatggtgccagttccatgggttagatttgttagatatgcggtcttattattggagttattgtgatatgacatcctgtttcagtttgttttcatgggtttatgttgttagttgctatttgtcccctttccttctgttattagagttcagttctcacttttcaacaaag

SEQ ID NO: 191070 - DNA, 500 bp, Zea Mays
gccatcagcggcaaagcgggagtcttgagaacggtgtccggcaagaacccaaaataaagaagagctggactgaggacgacgatagaggtaggtctctaaaatgtcaagaagggacgaggtgtagggggcacataataaactgaaggaaggtactaacccagtttctgtggagaggacaacagcgtcggccactatgtcgctgcagtgctgaagcgtacgcagccgtggggtgctgggttcaccgacgaggatcagacaaaggatgcatcccctgctcgctgtagttgcgcgtgggtccgcacggagccaggggccaccatagcagcggcagaccggctcgaaggtgaaggtggatcgatcccatgcggctcccatacggtggaagaagcacgattgggtcgaagcagggaaatagtggcagccaacggcgaccatgccgcttcctgttcagatctggagaccgtgcgcagctgttgggtcgcctctctgttcagatctgg

SEQ ID NO: 191071 - DNA, 1091 bp, Zea Mays
gtcatctcgtgaggagcccatgcctttccatagaatccgcttgcctcgtctccagaaggcaagacacaagtcttccagatcccaaagggttggccccagggtgcgcagaaactggactccgaggataatatcgaaggagtccagtggaatggcatatgcttccattaggaagtcctcgaggccgatagtcatgctaatgctgtttgggaacctgcagcaggagaccttgtcaccgtttgccaccgtagcatggagaccttggctgggattgtactccagtttaagagtgcttgcagtgcctaagttgataaagttgtgagtagaacccgtgtccagtagtgctgtgagagcatgtcctctgatagatacctccagctgcattgtgccctcagattgaataccagtcaaagcatgcagtgatatcactggttctggttcctcaagatcggtctccatggcttccccctcaaaatcagtgacctctagatagaacagttaagggcatcggtgtcctttgacatactactcgccacaattgtaacagagcccctgacgtcgacgctcgaccatctcagccggtgtcagcttcttgaatggtcattgcggcgctgtactaactgctgttggaatttgtggctgtagtgccgggacaggtactgatgggcgctggggctgtcgcagagccttgctaggtgttgctgttggatggatgtccagggcctgggatctcctttcatatgctcgcgctaagctcagcgcttgattaaggtctcgtggcgccataagctccacatcgatcttgattcgatccggtagtcctgcagtgaatagttgcacctgctgctcctgggagagaggtgctgtttgggctagcagatcccaaaatctttcctgataatcatccactgtcgtgcgaaagggtaatcgtgccagttcacccaatggattgctgcgaagtggcggtccaaacctttgctggcacagctgtttgaaatgagaccatgataatggtggtgcatcacgctggagctgtccataccaggttcgggcgacccctgtcatgtgatatgaggccagccagaccttctctt

SEQ ID NO: 191072 - DNA, 1096 bp, Zea Mays
gttgaatcagatgctccacgttacgtccacccttgagctcgatggcagaaggaagcagtagccataggaggagtgcattctcccctgggctggctgtgttattatctggcgatgaagctaagattagctcccagaagtcgcacctggtgtcctatcatgacgaaattgggcaccaggctgttgagaggacgatagagcacatctttgatctccctcacaagtcagtggtccggcctcctggaccagttgacacaggcttcgtgcactcagtggtgaggaatcaagctagaaaatttgatcttgactgggaaaactgcattcggggataccatcgcagcgtcttcattgtggacaaaggtgctgggcagaggaaggtggttcttgatgattcgagcatttgtggtagcttcaggaatgtccggggaccttcacttgttgagagttccgcccctttcagcagtgccagggctaatgcttgtgtgtggaaaggcaaatggatgtatgaggtgacccttgagacgtctggagttcagcagcttggatgggctactctctcttgtcctttcactgatcagaaaggtgttggtgatgctgatgattcatattcctttgatggccggagggtgactaagtggaacaatgacccaaagccatatggccagccatgggcagtaggtgatgtcatcggttgctgcatcaacttggatgcaggagaaatttccttttacaggaacgggacttctcttggtgttgcatttgatggaattcgcagcgtggaacctaagaagggatattatgctgcagtatccctctcggaaggagagcgttgtcatcttaatttcggctcacatccattcaggtatcctgttgatgggtttgatccattagaggcgccaccacgctcttggtcgtttgtcacataccttcttagatgcctgttccggttgctagaagttcacaacctggagaaatctgaatcagcatacttcgagaaactgaggagggtgaaaaaatttgcaccactacaagaactctttggacccatttcagaagggatctgtgcagaaattttcagtgctattgaagcaagccaggg

SEQ ID NO: 191073 - DNA, 472 bp, Zea Mays
ggagcattgtgctcaggaattcagtaagtcagtatcccttaagcaagttaaagttctaagcaaggtggggctgcaggctttatcccccgggattgctgacattgttttccaggattggtggggtgggggggggggtggctgaaagcaaggtgcctaaagtccagaaaaaggcttcaattccactgtcatcttggtagcctggtggctgtggaaacacaggaatgcctgtgtgtttgatggtgcctccccttgcagcagcttggtcctgctccatattcagcaagatgttcagttgtggggcatggccggggcagtaggcattagaagtctgtggccttaaccctctggtgttcctagtttttttccatggattcttatttgtatgcttgtgtctggccgccataaggtggcggtcctttgtatcatgtctggccttctaaggccttccttttttccttcttaatataatgat

SEQ ID NO: 191074 - DNA, 409 bp, Zea Mays
gtagaggcatagacaacggggtagcgcgtggcagaggcgacagacccgcatgcggcgcaaaagagggcaggagaaggggaggaacgccgactcaatcgacatcgagggaatcaaggtcgggaggagctagcaaaggggaaacatcctcatcaaatgcaacatgacgagagatgatgatgcgatgggtgagaagatctaggcaccggtaccccttgtgatcattgtacccgatcgtggtgaaagtttgaggagcgtggcagaggtgttgggatagcaggcacactcgaaggtgctcataggaggggatggtgtcgaagagggcgaagaacggagtgggatggggaccgccttggagggaagacgattgaggaggtaggtggctgtgttcagcgcctcaacccagtaccgg

SEQ ID NO: 191075 - DNA, 536 bp, Zea Mays
ggccacagaatatggagcttatatttgctgaagaactctttccattctctctttctccaaaagagagggcgacccattggattgcgttcttttcttatttcaaaccagaacatattaaggctttgaacatcattttttctcagaagagacggtagatatctaacacacatagtatttaagtgctagacaccaccacttgatgctgaagaaactttacttttaggttacaactggagatgcaaacatatttatcacttcgagcaaggaaggtttgtcaattcattaatctattggcaacaacagttgatcttatttctcaaattgaagcctgcttgtgctgtaggaggaatcatcagaagaaatgcagaagagaatccgtgcggcattcagaaagatggcaacatcctttccagatatttccaaagctgaagagtgctttgaaaatttgcaccagatgaaagataataacatatttaaggatttggatgaactaataaatgagggaaccagttttgcaaaaggccgcgtgaccagag

SEQ ID NO: 191076 - DNA, 304 bp, Zea Mays
aatttcctcctcaaagaagtggagagcaggagcaacaacacaagcacaaaagtcacaaaagacactgagcattttgttgcaccgagcatttcatgtgcaagtggtgttcagtccttgcagctagttaatccagcaggaagacaaattggaagtggtttgatgagccagaacaatgctgtatctcatgtgaagaagatctcaaagactaacttatgctccttagtggctgcttatgatgatcaatcagatacctatagttttgacatttttcagcagatagacaccaaggtgagctgtgaaggaa

SEQ ID NO: 191077 - DNA, 271 bp, Zea Mays
gttcagagcacaacttatccgcttggcgcttcatccaggattgagcatagagaaggtgttgctgaatcaatttggaaataagctctcgatcctgcaaccactgtttcagattcgttatctcgacggtagtcactgaatccacaccaaaatgtcggggagcatggccgtaaagcacctcagaaggagaacgtcccaggaccgagtggtagttggtattataccaaaactcggcgacagcaagccaagatgaccatttgcctaggcataaatg

SEQ ID NO: 191078 - DNA, 536 bp, Zea Mays
aaaacacttatctgcctacctcctctcgtgctcaccttcttcctccccacgcatcctctccccattccagtagatctaacagaactggtatcaaagacttcgattctcggatctggaggctcactactacactcgtcgtgcgaagatctctggcgccatggatccgcagttgaagatcgcgctggaatcacagaccaaggcgttcctggcagagatcgacaagaaattcgcgactcacgacgccaagtgggagtcgcggatcgacgatctcgaaaggtctgctgcgtcggcagcggatcagttcaacgacctcaagtccgacagccacacggatgtggccaatcaactggacttcttcgttgcgtcgtcgtcagctcgggcgaaacaagtcgcaacagccacagctacacgcgtcgcggcgctggaatcagccacagccgccttcgaagcttggcgttcgggtctggaatcggtcgtcgacgaggtcaagcagagcgtcgagtcggtgcaagcggtcgttgccaagctggcccaac

SEQ ID NO: 191079 - DNA, 419 bp, Zea Mays
tacgctgcttggcaggtgatcggccaaaaacttggttacaatggcttccatgggctgaattttgttacaatacgtcataccagactgcggccaagtgcactccattcaggattgtatatgtccgggaccctccaacaatgctttcttatacacctgggacagccagagttagggatggcaacgggtaaaatatccgcggatagtgtctctggacatccatatccgcaatttatatccgatatccgaacccgtacccgttacccgccatggataacaaacagtatccacatccgttacccgcggataacggatatccgcggatatatccgtttgcccactacacatacaaaatatataaatccagcaaattcaaacaatcaacaagtcgttgcatctggaataacctgtacttgcatttg

SEQ ID NO: 191080 - DNA, 1104 bp, Zea Mays
atcaactgaaccattctgttgtaatgtccaggtaactgctgttggagtcaacactgaatgggggttgctaatggcaagcatatctgaagattcgggtgaagagacaccactccaggtttgattttgttgttgttgccagcctttgcgcgagtttatttcctttacatgcctttgttgttccggtgcaggttcgtttgaatggtgtcgctactttcattggaatggttggactttctgttgcccttgcagttctggttgtacttttggccaggtaaaattggcatattttagtgtgctaaccgtctactttgtttatctacatcaatctgtatcaccttgttttctcgtaggtacttcactgggcatacttataatcctgacggatctgtgcaatatgtgaaagggaagatgggtgtaggccagacgatacgtggagtagttagaatattcacagtggctgtaggtattctgttctctgtttatgcatactgctttagtgcttacagtttttggctcaccatcttgaggtgtaaataggtcactattgtggtcgtggctgttccagaaggactaccattagctgtcacactgacgtaagcatggtttgtgtgttattttctgccagccctttcgtcccttgccactcaacatactttatttttgtcaggcttgctttctcaatgcgcaaaatgatgaaggacaaggctctggtatgttcccaactttctataccttggttttgtcatactacttgatccgacattgaatgctttgcacgctcacttcctatggaatgtaggtcaggaggctttctgcatgtgaaacgatgggttctgccacaacaatctgcagtgacaagactggcaccttaactttaaatcaggtgcaatggtgtttattcactttatacatactgacatacatgtttcagataattctgtttgttgaatctgattggccctgatttttaaattctcttcttcctggttgattttaagatgactgttgttgaggcatattttggtggaaagaagatggactcaccagataatgcacaaatgttatctgctgatgtcacatcactgattgttgaaggaattgcac

SEQ ID NO: 191081 - DNA, 564 bp, Zea Mays
gacactgatgatcctaaaaaaggggacagcctgtgtatgtattctgaaggcagggacgaaccacatggtgaggtgaggtggtgttggtagggagtaggattgtgagcatcatcatttaatggaatgttatcagtgggaatcaatagttctttttttatggaatattacaggagatgttagagcagatcactgatagtagcctttaccaacacatgggatccacatgtcagaatggaggatgtgtgagagagaaaaaaggtgacagttgctgtggtcccctttatttgaggagagatgggaggttttttggtgacaaaaaagaaaaaaagagcaatctgggaactgctggagcgtctccaccaatatataacagttttatgagcatgagggatgatattgccgagctgctggtgatgctttaatgatcgatgtcaaggagttgtagtgacgcaacaggagatgatagagtgctgtcggatggatggagtgaaactgcctgctgccgaggtggccgacggagagcatgctgagttgaaaaggggtgttggccacgctccacgataa

SEQ ID NO: 191082 - DNA, 354 bp, Zea Mays
ctgaattcaaaaattcgaagttcaaatttaacttagaaatagaggaaagaaaaagaaaagagatttacctaccctgggccgactactcccttgcccttggcccacattgttaccgccagcccacgttcctacctctctctgcgctcccttctcactggtatgttgggcccacccgtcatccaccttccttgtgcgcatatgacactcgcgcgtggtcctgtgttgccagtagcttcttccccacgtgagctcagatccgtgaggttcggatcaggctgttgcaacagaatccgtggatcccgcttggtcatccgcatgatcctcgcttgcgtggagaatttgccacatgaccgg

SEQ ID NO: 191083 - DNA, 398 bp, Zea Mays
cgaaagacagaaagagaaaagagctgcaaggtttgctcaaatgtggaatgtcattattacaagtttccgtgaagaagacctcatagacaatagggagatggatctgctactggttccatactgtaaagaccgtgagctcgatatatttcaatggccacctttcttacttgctagcaaggttgctcatcttgctctttctgtattttttctacttactatatttgtggattcagcagtttattgtttatctgctggattgtagatcccaatagcactggatatggcagcagacagtggcggaaaagaccgtgatctgacgaagaggataaaatcagatccatacttttcctttgctatcagagaatgctatgcttcattcaagaacatcatcaatactt

SEQ ID NO: 191084 - DNA, 706 bp, Zea Mays
ctccactcatggcataaattgtagtatctgaacacacatcttaacacattccatacatcccacatgcacatcaattattgcccttaagacgtacactagattgaccctatgcacacatatacctgctggagaggttcacgaagccctggtttgaaatacgggcccgttgctgtcccatcatggcccaaaggcactggaggttgatctggaaattaatttagcggcatgccatgatgaggcactcatcaaacaatcctgagtatcgaagattcaacccgagttttggcgcaaaaatcctagaggctgatctagaaattgttatgggggcatgccacaatgaaacacctttcaaacaatcctgatggttgaactcaagtgagcagcttacctcacatgccatgttacccagctacgagcccattctcatttagtttgatacttgatatgaccttttaatatactaagggaatggtattctattattagttagctggttatagaaaacacaatttaggcgaaggggtaatctgttttcttgtgtccatgtgcaaactgctttgctctttagttcttacccatgagcttttatgcacatctttagtgcctaagatcttttcatacttcttataggttttgatgcgcatggcaacttgcttggttcctactcctaccttataaatatttggcaatgggcattgctcattat

SEQ ID NO: 191085 - DNA, 289 bp, Zea Mays
atcgatcgatcgtgtcacgccagcagagcacgagcacggtgctccaatccagagccatgtcgaagccagcgtcgtcttcgttcctcctcctgctgctgtcggcgacgctgctcgccaccgtctgccgcgccgacccggacccggtgcaggacttctgcgtggccgtggcgccgggcggccacaacaacgcgtcctcctcctccagcacctacccgggcttcccgtgcaagccggcgtcgacggtggtctcggacgacttcttcttcgcggcgcacgcgggcggcgcgag

SEQ ID NO: 191086 - DNA, 407 bp, Zea Mays
ttctctcattctacagacttcacggtcgagtacgagccgggcgctgccaacaccgtcgccgatgccctatttcgacgcgatacctacgaggaggggtcggtcttggctctctctgcacctcgcttcgacttcgtcgaccgacttcgccaggcgcaactacaggaccccgccctcttcgccatcagagatgagatcgccgcgggtaccagaggtgccatggtctctcctggacagcatggtggcttatgccgcccgattgtacgttcccccggactcgccgctgttgcacgagcttgtggcagctacacacgaggacgaccacgaaggggtgcagcgcattctccctcgcctccgccgcgacttccacttccccgccatgtgccgggtggtgcaagacttcgtccgtg

SEQ ID NO: 191087 - DNA, 673 bp, Zea Mays
gcaatacaacagtacattagctgtagcaggacagcagtacactgattcagtggtgaacccaagatttcttgactgggtattcgagatcaagagatgtcctagggacattgccgtagtggcctagtggatcaggaggatagccgtggaaggcagaaactaatggatctgataagatcgtggaggaagttttaaagagtagagatagtgttgcatacataaatatactatatgctatttatattttgcaaaacagcgctggagggggggctctacagactacaatcgccgcgtgatggacgaggcgcagctgacgctcgagcagagggcttccggagcacagcagggcggtaggagaggagggcggcgacgatggagaaggtgcggcggcgcaggagaagggtgcacgcgtgagcgtgattgtgcgctgcgtaatgtgtgtaccgtattggtacaagtagggcaaaacattgtttgtgatgtacaaatggtgggtcggcccatgtaacagagaccggattagtggcccaaaacaggcaaaactagtcgaccactatacctagtcggacgactaatcgcgattagtcggcgactaggacgactaatcgcttcctagtcgctctagtcgagtcggagaccctaatcgagctccctctagcgataaggccgactaatc

SEQ ID NO: 191088 - DNA, 514 bp, Zea Mays
ctcgggaatccggtgccaggcctcgccttctcgcggcggtgctccctccctcttcgtcccccagcgacgcaggcaggcgcgcgcgcggccatgaaggggggcggtgccatgaggccgtcgcctatgttctacgtccacgaggcggacgtcgtccagatccaccacttcctcgaggagtgctccctctgcgccaaatcgctctccggcgacatcttcatgtacaggtggtcgcccccgcgaaacacatactaactataccactattatctttctctctcttttacgtagatatatagtcatatagatatgacagatagatgcacggatcggatcaggctaattggtttgcctgtgcaggggtgacacgccgttctgcagcgaggagtgcagggagcagcagatcgaggtggacagggcgaagcaccggcggaagaagcgcgcggcggcgcacgcgctgtccgcacgcagcagggagcaccggcaccagcagcagctgcagcagcaccaccaccag

SEQ ID NO: 191089 - DNA, 278 bp, Zea Mays
cttagccgaaggtcatcttgagtgaatgttacaggcatatgaaccacttagatctgatataggacccctgaacacctatatgttggaccctcctttgaagttcttgtttttatctcttattgagtggcccgaagcttgatcttctcattattgggaatatgtgctttgctggtggaactaagttgttgacgtctgagctttgggctcttcccttctactgagctggctatgttctcgtatgtggcgtttttgtggaggttgattatataacattggat

SEQ ID NO: 191090 - DNA, 931 bp, Zea Mays
cggatgggtttggttccactgaagatacagccgaagatgcagatgaactacagcaagatgctgttggaagtggaactggaatgggtgagggggatggtcaaaagagtgtaagctctgatatagatgatgaatcacaacttggtgacagtaaggttagtgtgttcaagtagatccttcttacttctttttataacaggatgaaacaaatatcccagcctctacactacaaattgagatgtatatgaacgatatatacttttgactgtagcagtttctgtatgcttcattgaagctgatcttttttcgtgttagcaggacttgacatgtaaggcagatcccgctcctaagaacgatgataaagctgttgaaatgcaagacggttttaatgcacaattatctgatgtttctgaggatcttgaaggcaaagactcgggtggcgaagatgaggataccttggataatcagatgggtgatactggtgatgcaagtgaagtggttggcaagaaatcatgggataaggatgaagatgatgatcctaagacatctattgagaaatatgagtcaggctcatcagccaagggaacacaacaggatgatagggaaatgagagctaaggatgatggttctattgaggaggaagatccgatggaaatggattctgaggaaggaaagaataataatcttgaacatgatcctagtacccatgatgaaaccgaactgaatactgatgaagtcatggacaaagctgatgcatatgatgaccggactggacctgaactccctgaaccagagaatgattccattgatgttgacatggtggaacaagaacaaacggatgaaataaatgctgacaatgaagatataggtacagaagaagctgaacaagcagatcagaggttagatgcttcagatgatatggaggaaggagata

SEQ ID NO: 191091 - DNA, 297 bp, Zea Mays
ccacaaagcaattttttgccacctgaatcacactacataggcaagcggatttgtccgtaaacccacaaagcaatttgttgccacatgaaccacactgcataggcagtatgcagtaggcatgatagtgtggaaccctcagccaatgcgaggcaccgtaaatctagtatttaatggtaaaagttctttttgctaacgtggaaatgctgggatcctgcagagcttgcggctctcacaagtaaaaaaattcctgtcccgtattcaaaacaatgacagataagctgttgagttatgaatggc

SEQ ID NO: 191092 - DNA, 321 bp, Zea Mays
ctatttcatttcttattcccctatcaacaactcattacatcatttatagatctcgaattcaacttttaatacacctaatgccttggctaattcacctattacagcccataaaaagattaatacgacccaagcactaatactcgaaagactcagctaatactctatacctgctacttaattccaccatactcgcctatgcgctgccaccttgggtcatcacatcccccagatggatggaggactctcatttatctcccctagacctctagatgtaggagcccatcattcttccccttattcctcctctctttccataaattt

SEQ ID NO: 191093 - DNA, 277 bp, Zea Mays
gagtcaaccacccaatcggtggtggttcggggaggtggaagtggcgaaggtacagtgtgagcggagagggccaaagaaggtgccccgacagaggcactaggaagggagggagatgacacgggctcaaccgcaagggaggcgatcgtagcacgtgggaagacaagcggtccaggcacgtgacggcccgcctaagggtggacctcgacgcagtcccgaagaatagggttccagactggatcgaaggacacgaacatgccccggatgagctggtcgtcgt

SEQ ID NO: 191094 - DNA, 776 bp, Zea Mays
gaggaactccgtcgtgcactgatcgtcagtgttgttggcagggaggattctggctgcgccgtggaggtgcgtgacgcgatcgcctcgaggttttgccttgaagcagggtcgctccgcatacgtcgtgttgcgcctaattctttcctagtcttcttcccctcggttgccgtggctgatcgggtgattggcgaggggcaatctcttcatgtccctccgctcaggttgcatattcgaaggtggtcgcgtcaggcgttcgctcctggaggtggacagccgcttgtgcctgttgacgttgaacttcgtggaattcctgcgcatctctgggggattgaggctgctgaagctgttcttggtgctttctgtttgattcatggttttttgcctggcttggtcaaggaggaagatatgtctgttctcagactgaaagtatggtgccggtcacctgtgctgctgccggcggtggtggatctccttgctgaagagccgatggtctgtggagaggatgggagctgggttcctagcacgttggtgttccctgtttctgtggtggttcttcattctgatggaagttcagattccggtgtggatccccctgcgccacccccttcgggctttgtcgacgaagatagtgatcatgagcatcatgtggagcggccggggcgccctgcgtcttctgttcgggttccaattcatttgcgtctgggtcagcgcagtcgttctgggcaggtggatgacatgtctgttgaggctgttcatcaggatttggtggagggggg

SEQ ID NO: 191095 - DNA, 283 bp, Zea Mays
gtggcctccagggactgcttcagcttcaggttggtctcgccgtccaggttcatggtctccacgtagcagatggcgtcgtcgtagctagaggagagcaggacgaggtcagccgggaagaattcgtccttgtggaccttgacgatgtcgcccacgcggatgtccttccatttggcatcgcggaagccgccgccgccgccgatgttgttgacctggaagacctgagtcttcctgttgttcacctccgtgtcctggaacggatcattcattctttcatgattcattt

SEQ ID NO: 191096 - DNA, 792 bp, Zea Mays
gttattgcaaaggaggtgattgtccatggagaatcaatgcaaggctacaaaatgtcgggtctcccactatcgttgtgagtatttttttagcacacattgtttgtactttcgattgttgatgaaattagggaagctcacaatggtactattttttttgcgcaggttacagttatcgtggatcagcacacatgcacttctagtggccgtcgaaatacaacaacacccaccagctcatgggttgcatccctagcactgccaatcctaactaagaaaccacatatgggagcaaaagaattgcaaactaccttgcaagagcagcacaattgcacaatttcttatgatacagtgtggaaaggtaaagagaaggcccttagagagttgtatggaacatgggaggacagcttcaaattactatttagatggagagaagctgttttggaggttatgccagactcagtgattgaatttggtctagtagttgaagatggaaaaatatatttcagcagattcttttgtgcttttggcccttgtcttgaaggttttcgtgaaggctgcaggccctacttaagtgtggattccacagctctaaatggtcgttggatttggttcatgcaacaacttcgtaaggctataggagaccctcctgttttagccatttgctcagatgcatgcaaaggattgacatcagcagtaaatgaagtgtttccaaatgctgaaaaaagagaatgcttccgccacctcatgcaaaactacattaagcacttcacaggttcagagcacatgtatcccgca

SEQ ID NO: 191097 - DNA, 333 bp, Zea Mays
catagtgaggaagtcaatccgctgtaagctatcaaagtagtatcagaatttccgaacgtgtttcctaaggatttaccaggcatgccacctgagagaaaagttgaatttatcatagagcttatccctggcactgcccctatttcttagagagcctatagagtgtccgaaccagaattggtggaactcaagaagcagatagacgagttgttggagaagggttacatcagacccagcacctcgccttgggccgccccagtgttgtttgtggagaagaaagatggtacgaagaggacgtgcatagattaccgagctctgaatgaggtcactatcaag

SEQ ID NO: 191098 - DNA, 333 bp, Zea Mays
taaccgtgagccagggggcataacccggtgagcgtgtcagcggcacgggggcataaccctgccggagttatcacggagcgagagtacgagctccggagtagaggtccggcatccctgccgaacactgctcttgacaacctggtatcaacgtcgcgtcgatcctttcgatccaccgccgctgcatccccacccacagcgccaccaacagcccctccaccgtcaccaccaacctcggtcgcgtccccctctgtgcatccggccatggctgacgaagagccaagcctcgctgacgttgtcaggatgttgcagaccctgtccgccgatgtggcgggc

SEQ ID NO: 191099 - DNA, 375 bp, Zea Mays
tgtcccttttggcagctccagcttgtacgccacagtgcccaccctttcaatcacacggaatggtcctgcatatcatggtccccgcttccctttagggtggtcgactagtgactgggcatttcgatgtaggagacggagccaaacccaatcatcaatgctgaactcgagctcacggtgtcgcccatcataaaacctgcgtgcgtgttcttgagcttgtagtagcctgtctctgacctccccaaggaacaggtcacgttcttggagcatctggtccacaatttgagtttcagcagtcctaggttgatatggaacaagtggtggaggatctcttccataaactacacgaaatggagttgttttcagtgctgagtggta

SEQ ID NO: 191100 - DNA, 499 bp, Zea Mays
ataggtttctggaatattttagcaagtttgactgggacaactattgcataagtttaaatggccctgttgctttgtcgtctttgccaaacttaattggtgggctacctttcatattttcattggcagattaatgtattgaggcatattctctaagttatctcgaaattttatcctgcttgcagttgaagctacagttacacataccagtgacttattgtttgacaaagaattcctcaagagctccatggataaagcaactgtacctccaaaaaattccgattcatgctatccgaggtttcgtcctaaacatctaaacatagttgatccactgaaggagtacaacaatcttggcagaagtgtcaacagaggtttgaatttgatctaaccaagatatacatataactcttttctaagttttcctatacaatattttgctgctgcttgtactcataattgcatcccaatttattaagtcttgctgctgcttgtactcataatt

SEQ ID NO: 191101 - DNA, 403 bp, Zea Mays
gaatttagcaaaaccaaagttttttgagcattggatactacactctgcaaagaagttctctcccaagtggttatcactactcctacatgtatattttcccatactcatatgcagacatgctttccccagtctattcatgtgccatcaatattccaccactgctaccaaagtcgaaaccattaatgatgatatcgacaccgcccataaacaacatataatgagacgtcaaggagacaaagatcggtacatatgccttccttgcatataaaattgattctccaatccatctcaacaaccctagtatgtgaaggatatcttgtgacagctctctcctctaccaacctagtttcccatgctactccatcttctctgctctctatttacaccgcatcgacctcctcac

SEQ ID NO: 191102 - DNA, 651 bp, Zea Mays
gaatgatgaactattccagttgaaagaggagttagaaaaatacaaggaggaagcacaagcaaataagaactacatggttcaggtgcctgtctctcaccttgttgaagtccagaggatcatgctttacgtagatgtaaaaatgtttctatgcactgaaaaactaaagggaaagttaaaatgacctttaccactattagttcttaattataaagcgttattctatgtttcctcccttatctttcctgttaccgatctgagtgccctgttcataatattttaaatgagagggcggcttatttatgatgacaacaccttaattttgccttctatgaaagttgcttattcactatgtatggatctcctgaatcatgcaacatgaaatcttgtacagtacaaagaaatcgcacactcaaatgaagttgcgttgaagcaattggaatctgcacatcaggactacaaggctgaggtactaaaattttgcatatgttacattgaagactctattatgcatatgcacattgacttaaggtacttttcatgtatagaccgaggttggcaggaaagccttggaagatgagattgttaacttgagggataagttatcagaaatggagaagagttatgtcattaagtgtgaagaagctgccaatg

SEQ ID NO: 191103 - DNA, 450 bp, Zea Mays
gtcgtggactgtcggggatgttcattcagcatgccatccccttgcatatttgacaatcaagtagcctgatcattctgtccaaaagttgatgttagatgactaagaaattgagggcaggactcctaagcaaaagcacacaagtccatgatagaacacaatataaaactggtgcttttgatttgtccatggctattgaggacattattatccataacagccattgatgtcattatccatggtaattcatgaaacacccattaccatgttttcccacaaacattttcatgtttaccatgtctagttatctacaaactgcaatttcatgtcagccctagtacggcattatgtttcctaacaactgtcaggacaatagagaaatagttgcataatcctagtattgacagaaattatagttccaagcatggttttcaaatcgcctggtcggctggt

SEQ ID NO: 191104 - DNA, 440 bp, Zea Mays
ccagagttagtttcagaaaatgcaaagagcgccacatgcgcgccaactccaaccgttaaccaacaaaatgattgccaaccagtgtacagaaaacaccattcggcccaaaagggggaggccaaagccttacaaccccgccgaggtattagcttcatcatcattgtcatcattgaagtgagggtcccccacctgttcatcagagaattcagattcatcatccatgctgtcggggggagcaatcggcctttgaatggcagtaccagtagccttggatctgttcaaatcctccggatttagcttggaaggggtcatcttacagaactcagcacccaattttttgatgacgtctagatgcaaagtaggaggggcatattgggtgcagcatgggcaatttttcttaccaatcccagtgcaatttttgaagcccttggcctttgccc

SEQ ID NO: 191105 - DNA, 315 bp, Zea Mays
tggtaggaggagcgcgcagtgcgcttagggcttaggcccacaggctgcattgttgcacgcatgtctcgaagagcagcaagatacgtcgtcagctcagtcagatcagatgaggccggctaggaggagggatgttgaaattgatgaagccggcaagttcagttccgtttagccggccggagcctttttgattggagcggcggggtctcgagtgagtgacctctgccttgacagggagatgtagcgaggctgatggttaggaaggagagttcaggttgactatgcatgactaatgctcttttcatatgcttcttcatt

SEQ ID NO: 191106 - DNA, 1396 bp, Zea Mays
atgaaatctcctttaattgttggccaagcaattttgtagaaacggcctgtgaagccgtccgggccaggtgccttatccgccggcagcgatttgatagtgtcccaaacctcctcctcagtgataatttgattcaatccttcgagatcaagttgagttcctgggtggaaggaaggaaggtccagggtgaactcacgttctctggccgttcccaacagattattaaagaactcccacactacctcctttttcctttcttggtccatcacgagtctgtcgtccactttcactttagccatataattttttctctttctgtatttcgcatgcaggtggaaataagaggtattcgcatctccctcctttaaccaattcaggcgcgacctagttctggctatcgttctttccagagacgcaagccctaaagacaggtgcttgagcttctgccgcaaccaactttcatgaggagtgaggcatctaagatcttgggctttttccagctgaaagataatttcccgagcgaataacagctgctgtctgacattcccgaccttcttctgtccccacgactgcaactcccgagcgagcctagccaatttatctgctagcagatttagagggcaggacccctccaaatgttgagaccatgaacgttgtacttcgtcatcaaatccatccaactttgtccagaaactttcgaagtgaaatcttcttttaccttgagtaaactcatgtaggccgaggagaagagggcaatgatctgagaacatggtggccgaactctggaggatacagttagggaagtagatctcccaatcagtggtgtagaacaacctgtccagcctaaccagagtaggtgaagccctttcattggaccaagtgtatcttctaccaagcaactctagctctttaagttcaaggtcgtttaagaggcgacgaaatcgacccatcatggcacggtccagattactattatttttgtcttccgctctatatataagattgaagtcgccacccactgcccaagggcctggacaggaagctctgatggttctaagctcctgaatgaaagccaatttcagattatcggactgaggaccatagacacctgtaaaccaccagggtgtgtcaccaccgtgtgcgatcagcagcgaaacagagaaggagtcgattcttgaattgatgacattgcatactgtccctttccacgccaatagaatgcctccacgagtgccttgagccggcaagaaaataaagttatcaaactcggatcccaacatagacatgaccattcgcctggagatggcttcctttttagtctcctgcaaacacaccaagtctgggcgtgtagaaagcaccatatcccggacaccatcacgcctcgacttacggttgaggc

SEQ ID NO: 191107 - DNA, 495 bp, Zea Mays
ctacaaaccaaactggccttcgttaaggaaagaacacagactgacctgcgcactatttcgctgcctccgccttgtccttggagaatcaggcgatgtctcctctcttcaaaaaaatctttttattcctcccatcgaacttcctgtactgagtgtctgagcgtgcttctagcagtgcgacgatttgagttgttctccttcttggtttttcactcctacttggattcttagcacattgcctcaagtcaaggtagcatgtcagatggcgagaggcttgggaggacaggagtacaacaaaaaacaagtacctagaaccgtcggcaatgatgtgagtgaggaggtcggcttgaccacaacaacttggggagggatgattcacgatggatttgggacagaggatgcacacatgagagccgagaggcagggcatgaacgcacgcacggcgctagctacactcgtttcttgcaaacgctaaacactcagggtagcagcttgaat

SEQ ID NO: 191108 - DNA, 350 bp, Zea Mays
taaagcgaggcggtgttgccgtggggtaggggatagccgaagtgcccgagagtctagagaggatgtcatgaccggggtggccaagacgacggtgctaaggggtggcagaggtagcaacggcgagggcgtagggtgcggtaacacaggatgagggaggtgggggtagcgaataggatataggggggccagagttgttgcatggggcgaccacatcacgagtggtaagatcccatatggtgagcccctagggatcgtactccatggaacaatggtttgtcagtggtgaagcgacagactgagagaagattctacatgatgttgggggcaacaaggatgtggttgaggtacaa

SEQ ID NO: 191109 - DNA, 498 bp, Zea Mays
tgtggccctagccctggctggcgcagctgcaagccgctgtggggcgcaagttggttggggttctaaagtcttgacgctcgtcggtttgacccgtgtcacggtcaggcgaggccagcccacattcgtgatcgggaccatctttggtttcggagagaactccttctctactgagttgatggtgtggctcttggtggcttctgttctcgcgtctacaacgcggtgtaggactcccctctggtcagcgatgcgggagaggtatttgaagtggaaaacctcctcaacgttgaagatgatcatgttgttgaggattacgaccatgttgctatcgtgagttgacgctgcaccccctacctggcacgctagctttcgttgtttggtacctactgcgcactacggggtagcccacgcagtgcttttgggaggacgacgacatcgatcgctgctcgatggtacgtgcggtggcacgtcggaacatggggagtttatataggtttggac

SEQ ID NO: 191110 - DNA, 608 bp, Zea Mays
caactccttagccaaagccaactgcaaccttacatgcccaacctgcttgtcactccacccttgcagtcttcttgctgtcatctttagcttcttctccagggtctggaaagggcatctgacagcttcgactgagttccatgcagaatgcacttcctcctgaaaaccttcaagcttgggccaaaaggattcgaaatggaaccgccgttttccaggcctattgtcactgagacccaggagcagagggcagtgatccgaatcaagtgacgcaacactatgaagaagaactctggggaaggttagctcccaatccacagtacaaaacactctatcaagcttaacaaggaccgagttatcttgttggttagaccaagtgaatttgcgtcctaccagcggaatctccttgaggcccaggtcattgatcaaatccctgaaacgacccatcatggctctattaaagttggagttattcttatctgatgttttatagatgagattaaaatccccagccaccaaccaagggccagcacaggctgttctgacatctctgagttcctgaagaaaaagaattttttcatcatctccctgagggccgtacacacaggtaagcc

SEQ ID NO: 191111 - DNA, 575 bp, Zea Mays
ctgcattcttcttcagatgccaaaacttttatgggagcatcgctagattggatgcctagtggagcgaaggttgctacagcccttgataggaggacagagggaaagtgtcctcttattattttctatgagaagaatggcttagagaggagtcacttttctattgatgagccaggagaggttgccattcaagctttaaagtggaactgcaattctgagatccttgctgctctggtttcttctggtcagcatgatgttatcaagatatggacctgcaggaacaatcactggtacttgaaacatgaactgcggtacacaaaggaagagggggtgaagttcttttgggatccaacgaaaccaatgcatctgatttgctggacactgagtggccaggtcattattcacaagtttgcttggactacggcagtcagtgagagttcaattgcacttgtgattgatggttctcatgttcttgttactcctcttattttgggcctcatgccacctcccatgtctctgttccaccttgcatttccttgtgcagtgaatgaggtttcttttgtgaccaataactcgaa

SEQ ID NO: 191112 - DNA, 483 bp, Zea Mays
tctgaatctcgctggtcctacgatcgggtccgaagctcggagagccagagccccacggcacggagaggaacgctggaaggcaggctagacatcggagggaagatcaaggacgttcttgaggtgggttcaccgatactttccactgcttcaggctctctgcgcgcgcaccacatctgctaataaattttctcgcctgatgaatgagatgagatctcgtttccttgcagaaggagggcctggcggtggccgacaacacaatgtcaggcaacagccacggcggtgtcgtcgctgctgcccggaagctgcacatcaggaggaaggcgtgcagcatggacttccgggccgcaaacctgaccccggccagccccagcatgtcgccgatgctggccgacatggaatcgcctcagctcaaggcctctcgcgacgtaaggtgccctcccgttttgcgtgttaggaggaggatgctaatgccggccgctggtt

SEQ ID NO: 191113 - DNA, 2128 bp, Zea Mays
gcatgtttcattattttgtgatccttgactgtatcatacacttagagaatatgtagaaaagctgcagcttctcaacgattctgaggaaagaacccgcaggattaatgaagttctggaagtgcatgttgactcacatatggatcctaattatgagtctgctgaagaaacagatgagaaaagaactggtatatatcttcctgtaatgttaatgcttcatgttgtttgttgattaataaatattggaattctcttggagctgtagcatgatttcatgtggtttgttgcagtatagtctaaatatacatctactatactgcaccgtaattttcttgcaaagttgcaatgcagtacatttaaattaatgttgcgataagcatcaactctattacaataaatcagatttctgaacctaacctttaattaagtggtgtctgagcatttgcttgtttattatatgcagttggaaagtcggtagatcggacaagaccagatacaaccatatcacgacgaatatcaagatatcttagcactatgcagaaccatcctcaaaaagtttctgattgtagccaccatccaaaaaacttgtcaacagaaagtacaatatgtggatcaggagcaagaagtttggagaacagcacagcaaacagaactatgtatgaagctggatcattttcatcttctggagtaacaatgtcaaatgacacggagccggagaaagtctggcactacaaggatccttctgggaatgttcagggtccatttactcttttgcaactatcaaagtggacaagttacttcccacgtgatctgagagtatggcttacatttgagagtgaggagagatctttgctgttgactgaagtgctttcaaaacagcagaaagatttcactcaggctgcatcacatacaagcagcaaggcaacgctggttggcactggacatacaaggaacaaccctagtgtggatcagaccaatgctttctcccctgctggtcatagtgtggttagttcttcaggaataactgttcagtataataagtattctgttccagaaagggaaagtgtgtactctccagatgatagcttgtcgctgtcaactagttcggttccgccgaaggatgcttgtactgtgaatagccaaacacactgccagaataagcattctgttttcattcaatctcctggaagtgcatatgggcacacagacttgaaccatgatggaatacagggaggatgctctggtgaatcaaaccaccatcacagcagcggagccctatggagtcctaccgtggtacaggtgagttgtggacatggtaatgtggaatctcatcagagccagcatgtttcctggtcacaaagtcaacatgaatctaaaaatagttcacaacgacctgttaaagatctgaattcaaggcgggatctatcgaaaaacctacctactcaacgtatagggaaagatgtctccagtcctttgtttgcttgtgcttggagtccggccgagtcgaggacagcttcaagtcaacatgacggctcttgcttaagttcaacaactaatccaaactttctcgatgaacttcattattctattgcttccgcaaagcctaagagctgcgctccagcaacccctattgaagacagaggttctagttcaccatcaggcatgctgagtcatgcagaaagagttccaatctgcagtccacaatcaacccctttggcatctgctttcgatatgtgcaagatggaggagatcatgaatcagcaaagaacactggagccggatacatcaaatgcttcaattaaccagtctcccgaatcaaagattttccctgtatcctctcctgataaccatgatattgaccgtgagtttcctagtccagttccaagatctgagaataaggacattgcggttgacagctcaggattaacaccagcatcacctgaaaatattactacgaatttgcctggttcagatacatgcaagatggaggtcatgagtcagcaacaagtaactgaggctgtcgtatcgaattcttcagataatcattcccctcaatctaaggtttcccctgtatcatctcctaataacgaagatatgaaacatcagtaccccagttcaacccgaaggtctg

SEQ ID NO: 191114 - DNA, 780 bp, Zea Mays
acaaaatcaactgaaattaaggaatacaatgcacctgaaaaagcacatctatttgaagaaaagctggatatgagaagattggtaaaagaggaaaatcaaagcaatgatatagctttgctggataaaaacacgggcagtgttgcacttgagcacagtgatcatgacaaaaaagggattatatcaccagggaagcctaaggagatgatgcaaaacgacagtgaactagaacaattaggagagtggacatcagatgctgatttttatgaattggttagcaatgatcagaaatgcagaactaatggagctgaatgcagagacaatggtctgatgacaaattccttagccaagcttgaccggtctgagaatgaaaaattaggaggctttgcaggtgagtcaaaaaggtctaggaaattgtgggattgtaacaacagaacatgtctgcggactgaacatgtaaatcagggaaaagatggtataggttcattggaggttgaacaaaagaatactaggtctccagaagttacagaacatgtaaatcagcaaaaagatgctatagattctgtggaaactgaacaaaagactcctaggtcacctgaagtttctccttgtaatgaaagggtgacgtatgaagagccaaccaaaggaaataatgatctgatgacaaattcttccaccaagctcgaccagtctgtgaaagtaaaggaagggggttttgcaggtgagccaaaaaggtttagaaaattgtggggcagtaacagtacaacagttctgagaacagtg

SEQ ID NO: 191115 - DNA, 500 bp, Zea Mays
acaatatctggcctggtaacagtaaggtaaactaagctgccaacaggatgtctatatcgagatggatcctccaaaggtgtcccatcagtcggacgaagagataagtgaagatccataggtgtggcaatagtgcgagtatcactaagaccagaacgatcaagaaggtcttgtatgtatgtacttggcctgagagagataaataccattttgagtctgcaaaacctcaatgcccaagaaataactgagtgcccccaagtcagacatttgaaattccttactcagatacgccttcacatgagcaatatggtctggatcatcgcctgtaatcaacatgtcatcaacatatagtaatagcaacgtgcgttctcgtgaagaaacatgaatgaacaatgcaggatcatgatcactagaatagaaaccacaagccttgatgacaaaaataaatctctcaaaccaagcacgaggagcttgtttaagaccatacaaggctcgacggagac

SEQ ID NO: 191116 - DNA, 326 bp, Zea Mays
tagtgaccccagcaccacgacggtttcagccatgtcctcccctgtgtgcgtgtacgtgaggaggaagacaacagccacatttgatcccactagaggtaattttctgcgttcgtgtcccatgtggccttttgtgtggccacactggaaaaaagaggactgaatcatcctcctagatgccctctttgtgaccaagagcctgaaaccatcaaccatcttttggtttcttgtagcttttccagattatattggtacatcactcttcggaaatttgggctccacattcttgcccctctccaggatgacacaaacttcctgcagtggtggaa

SEQ ID NO: 191117 - DNA, 428 bp, Zea Mays
tctcattgaaccaatagttgatacgaagtcccccgagtcattgtcagatgctataacctctgacaatagtatactggataaaagtataaggtgcttgcctggaacaactagtaggcaatatcgccagctagaggatggtggtttccatacggtatcagctgtcaagctacttctttcgtatttttcttttgatttggtaaaaacaggaaaaaaactcacctcctcctcttttataggtccgcaaattattgcagcattttcctcggacttatgcagatctgcaaaaccctcaaggccccatagaatatgggcagtatattatgttatctggtactgttatatcttccaggtaattaaacattacgcattagagatttagagctataaaatacattcagaaggaacataatgtaagagaaaaggagtgg

SEQ ID NO: 191118 - DNA, 364 bp, Zea Mays
tggccacagctttctgagacgacattttgatattggatcctaaagcatcttctggaagctcccattaggaagccctttatgacatggcagaatgaagggaggatatttccacccttatctccaaaagatccataacccatataatccttacaggattatagcaagttcacttcatcattttttaattgcaaaataacacggttttaggactattgtcaccatagcgagctgagagccaatgaagaatgggcctagctttctgagatgacattttgatattggatcctcaagcattacatcagagctcccataaggaagcccatggagacatggcagaatgatgggaggatatttttcagcctta

SEQ ID NO: 191119 - DNA, 451 bp, Zea Mays
gtgaagaacgacagagatatatggtatatagcctgagacaccatacatacatgtatataatgaataaatacatatatattacgccgtaccattattgttattctttagtttgatttgattgagtgaagctcttcagtagattcagatgcaatgaactgcggtgtggtgtactggtatgacctcgtgacattgaaaaggcggcgggcacgaggacgaccatgaccaacacagcatcgtggtgcacatgctagacaacaagcgtggcatgagtcggacgtaggtggctagaccgaggtcgtcacgggagtctctaggcacttgacctggttcgctttgacgacagacgacgttggcaataagttgtcatgtcaaggccatcggagtagctccaatatgacaggatgttcgttttgggcaactttaggtgcactctaccctatgactccgcaat

SEQ ID NO: 191120 - DNA, 759 bp, Zea Mays
tttacatgactcttaaaaagaagcttgcgatctatgtggaaaaacaagttttccggtatgttacagaaaggattgctcctgcgctcaccctaaagttagatgaagaaattagcgctttgctgcagctgagtcaaggaataagagcatcagatcagcctaaaagagattctgctgccgttggaagggttgcattaatgcttgaggagtattgtaatgcttatgaaacagctagagctgccgggactgcagtttcgctaatgaaaaggcaattaaatgagctcactgaggctctgcgcaaaattattttggaaatagttcaggttgaatggctacatgatatttcatcgtctcatgcacagaaggtgaaggttttgtcacaaaatattcttagtgatgataagttcatctctttgatgttaaatctgagcagaagcaatttgttagataagatccaatcttctgtctcattaataacaaggtcaattgaagtcctgcaagcttgtgaaagcatttctgtttcggccgaaggacaacttgagagagcaatgggatgggcctgtgctgggccaaatacttccagtgcaggtggttcaacggcaaagggttcaggaatcccccctgaatttcatggtcatctattaaaaagaaggaaattgcttcgggtggttcaaaaagaggcatctgatcttgttaaagtttgcacctctgttttggagtttgaagcatccagagatggactttacttcgttcctgaggata

SEQ ID NO: 191121 - DNA, 374 bp, Zea Mays
ggaaagggtgtctgatggatgggtataggcatggtagatgtgggtggcagcaaggctgaggttggcggtggaaggttggttgaggtggatgggagtggagcggctgtggtggtgattggcgatgatggtatgggtggcgcggcggggtttgacaagggaggtatcccgccataatctggcatgccatatgggatggaagtaggtctggtggacgctgggggcggtggtggtattggcggcctactgatcatttgagtgatggcggtggtgagatcggcaagggccttcgtcatggtgtcgatcttttgctctagcgctgcgttggcggaattggtcgcggcagcagatgcgacatcgctggtgttgtcgtcgtt

SEQ ID NO: 191122 - DNA, 476 bp, Zea Mays
tgcagaggcctggattgcccatgaagctttggtcgtaggtacgggcgagcgcatcgggaacctcgccggtgagctggttggaggacagattaagctggttgaccctcagcgttcccagcgccggcggtatggcgccggaaagctggtttgacgaaaggtccagcagggtgagctccggcatcgagcctaaccccgccggtatgccgccggtgagctggttatggcttaagttcatctgcgacatgccactgagcgacgcaatgctctgtgggattgccccagacagctggttcgccgacaggtccagctcctgcagaaggggcatcgcagcggtgaaccccggtggtatgtcgccggagaacaagttgttgctggcgtggaaccgcttgagattagtagccgatgcaggaatcggtccggtgaactggttgttgtcgatgctaagcctcgacaggttccagtacagcttctccggc

SEQ ID NO: 191123 - DNA, 1070 bp, Zea Mays
cctgaagttcaggacaagattctttttatgatcaacaatatatccatctcaaacatggaagctaaggcaaaggaatttaatgaggtcatacaggaacaacattatccttggtttgcacaatacatggtcatgaaaaggtatcattcttgattatagatttctctgacaatgctgaggtatacaaattacttctcatcttggcagggcaagcattgaaccaaatttccatgatctgtatttgaagttctttgataaattaaactcaaaatccttgaacaaggaaatgctgaaggctacgtatgagaactgcaaggtttttgttcaccccaattcgtctgccctgttcatattttttgctagcgattttgtttaaacttgatacttctgctgcaggtcttgttaagatcagaccttatcaaatctagttctgaggagcgttccttgctaaaaaacttaggcagctggttgggcaagttcaccattggtaggaaccaggcactaagggctaaggagattgacccaaaatctcttattgtggaggtactgctcctctgcattttttcttgaacatgcaggagaacacttctcttctttgaactcctgagtatttggagttctgaaagctccctttggccatctactgcctttttatttagtattgctataatttatttaatttgatatttctgtttcacctgtgtttgtgttggtttggtaaacatttacatgcttattgagggatacaattcagttccatggattcaatttggctgcctttaatctttcgagtatttctttcttcaggcgtacgagaaaggattgatgattgcggtcataccattcacttcaaaggtgtgtattctcgctaactttttttttgtaaaagatttctcgaaaggaaataatcttattaaactaatccaaagaaattccaattattaatttggattttgggcgcatatcatgtgtcatgactattggctgctctgcagattcttgaaccttgccagtcaagtatcgcatatcgtcctccaaatccctggaccattggaattctaagtctacttgct

SEQ ID NO: 191124 - DNA, 389 bp, Zea Mays
gggtgagctcgccagcgcggttatagctccgcgattctcatccaattccggccaacggcctataaattgagctcggatcctgcttcttcaccacatcacgcacacaagcacttgagcaatcgactcaatttcaccagaagaactcacatagtccacaaaaccatttcgccctgctcttcgcgctgccgtgaagaactcctccgtggccagcactcctcgggtcagtaactccccgattgcttcctgttctagcttgtttatagcttcctattgctcttggagccgaccagttgaagtttgccagagtcccatcaccggaacactcctctgctccgtagaacgccgccgcgacaccctctctgtcgacccgcttttctactcttgcctag

SEQ ID NO: 191125 - DNA, 486 bp, Zea Mays
ttttaaattacaaacctcttgtaactctcatgaaaatttccaaatattgtttgatcttgcagattggaagccattaccattttatagagaccaatccttatctggtttttgataggaaaagggcctatggcatgaggttgaacatacttgctggaacagctgttcggtttgaggtgctcacattccatccatgcttatagcaattttcagttcaaagatgctaagactatattcttgtacttaccctcctacttgttttaataaatgtactgcacacaccactttaaaacctttcagaatctgatatctatattttttctcagccaggggatgcaaaaagtgttatacttgtaagcatcggaggtcataaggtaatcaaaggtggaaatggcattgctgatggtcctattgacagttcaagtcttaatgtggtgatgcagaaggttaatgcaaatagttttggacatgaagattatccagatgcaa

SEQ ID NO: 191126 - DNA, 302 bp, Zea Mays
gtggaatgaaatcggtggcgcaggcgacgacgttgggttttggagtgacactggcagtagctcgggccaggctatggcaaggctcttcctctccaagattgagggcgatggatggattggaggtgagtattcctacacgtagcatgggggtttgatacaagggaccccaacagtgccatggaatttgaggccacgggaggaaactgtgatgcgtgttgtggcaggaggcatacccaccaagtgtttgatggtttgcctgattcggagtcatgaggagattatggtgagtggtgatggcagtt

SEQ ID NO: 191127 - DNA, 515 bp, Zea Mays
gattatcacgagtcgtttggtgacgaccaaggagctggtggctccattggtgccatggagaatgccgtgtcccttgctgtcttggcggcagcgatgctcagccaggacgtgccgtcgtctttcgcagtggcggtggcggctgccggcggcgatctctcgtcagctagatcgccttcgtcattctcagccagggagagggagatagtggaacggtatatcaagtcgtcggtgaggcgtgctttcaccagggtacgtatatatgttgccctagactatatatatatacgtatccagcatatctcctgctggcgcatgcatgcggcatatatatgtaacaagcaagcatgtgtggcggcggcatggatggcagctgcacgaaaccggcaccgccgagaagatggacagcatgatcgtggaggtggacgaggacccttgcgagaccctgatgtatgtggcgtcgcagaccaaggagctggcaaggctggaaaaagaggtgtacgaccgcgttgtccggc

SEQ ID NO: 191128 - DNA, 689 bp, Zea Mays
gcctcccgtaacacatgttttcatcgtcaaacaacgatttcatgcctcccgtccgccacccatgatttggccacagagactgctaaggctatttatggcctcccgtaagctatagcacatgttttcatggtcgagcgactatttttaagtacgtgttccaccaccagcgttttggtccccagagcaccttaaagttgttcttggcctcccacaagctgtagggtttaggttttagggcgtcccgtgacacatgtttttgtcgtcgaacagcgatttcgtgcctcccgtccgccacccatgatttgaccattgagactggtaaggctgttttggcctcccgtgagctatagcacacgttttcatggcccagcgaccatttttatgtccgcgttccaccgcacgtgtttttgtccccggagcaccttaaagcggttcttggcctcccgcgagttatatcacacatttccgtggccaaacaaccaattttatgtatccgacctgccaccttcgttttatatctaggaggccgttatggcattttttgccaccgtgtagctatagcacacgattttatggaaacctagaccctaaatcctatccctaaaccctaaacctaaacatcgacactaaaggattttagtgtcgaaaccatggtaaaatgaaatttgagtctcccaaccatatcaact

SEQ ID NO: 191129 - DNA, 1005 bp, Zea Mays
cacgcatgtgtatgcacatgcatggtttgcgccttttgggagttcctgcttgtcctattgctcctacatcacctgtgatttcagagaaggctactgacgagaaggtgctgcttgcagactatgatgatcgaatgtccccttatgagttatgactcagtttagtgcttacaggacttggttggatgaggatgtctgtgcccgtgctattcttgcctctagcatggaggatcgttttgttgctagagagatcctacaattgatgagttcttcacttagatgtatactatttgacgtcaacttgatactcttggtccccagttggccagttgtcaccgcatacttgtcaggcttgttagggtcaaaaggccggacttgagcttctacatacctacaacttcttgacatggctgtgacaaatttgagccccttcgtgctcagttggtcatcgtcatccttgtgtctctctgatggatgttcttgctagtgtccgtaatgaggagacccatttgtgtgttgttggcctgttgcagtctttgttggtcttggctactcattcttcgtcttcttgatcgcccgctactccattgacaatgtcatcttcagttgcgcctccctttgcgcatggggagcgtggtggccttcattgtgcttactgtgatcatgacagacatgtggaagcctattgtttcactaagaaggctttggctcgccgttcttcacagggtagtggtggtgctggtattgtaggatctcaggggagttcggctgcgactacggaggcccaattgctcatgctgcttcgtcgccttatggcttctacctatatgagccactgctcactggttctgtgactcagtcctctgcacctacaggttctgttgttggttctctgtcttccactaagggaccatctccttacactttaggtacttgtctatggattctagactctggtgcctcctttcatatgtctcctcattgcacccgtcttctgtttatgaatcc

SEQ ID NO: 191130 - DNA, 596 bp, Zea Mays
atgttgaattactgtcaaggtgagtcgtttcatgtccaaggatccacatggagtgcctgtggaagaaataattatttagatgagtatgtactgggatcttgaattaactaagtatccaaaggctgatcctttgccaacaaaaaaacaaaatttaattaaaccaacaaaaaggaacaaaagttaacctactttgctcttgtcaaagccacattagttctcataacacaatcaagaaagtatatattcccaccattattttgtctaactgttgaaaggattaatgtccttctcagcaccttgacatgaatcaacagtgcatacttcaacagaaagaaagtcatacttttcataactctgaattctttcttgcaaagaaattacttgggctgcatatggagatactataccaacgctggttttcttcttctgctcggcgcatgctgtagtggttatagaccaaaaaaacatggatgtcacttaaacatatcaactttaatgaaacttacatgttctttatcagctcaaatgttagacttaccttcagcaagtctgccaacaatatttgctaccacagcagcttcaacaatatttttaag

SEQ ID NO: 191131 - DNA, 344 bp, Zea Mays
caactttttccaactccccagatgcattgcaggctgatgactagttgaaagctatggaaaagatgcttaatatcgcacaatacattgatcgggataaagtcttttatgcatcaggtcgcctctctggcctcgctgctgattcgtgggatgcctattgtgcagcacagacaccatcacttgggccgaattctcaacaaacttcataaattaccacattcctattggcctaatgaagatcaaggagttcctttcactcaagtagggaggaatgacagtaagcgagtacagagacaagttcacccaattgtccagatacgctcctgaggaggttgcagacaacgaga

SEQ ID NO: 191132 - DNA, 1139 bp, Zea Mays
tgctagacgtattcggtgactgttcatcagaattatggatagcaccagcatgatcatcactcagagagtgaatcgcttcctcgtgttgtagacaactaacgagacaatcattgttttgtacgtcaccattttcagaaactacactagaagatgagctcacgtcaattagatccacatcgttagaagactcttcgtctgtggaccagtcaacaccattcatttgtctgccagattgtgaaccagagtttggaccattggtggctgacactgtgggagcagaatcacttgacagtggcaagtccacacaggttggttcttcaccactgcttgcattatccaatcccaatgacgagtctattgcaggacctacttctggaggttcggcatacaatactttgtcaccttccttgttgtgacggttcaattcaaccagttcaacactggcactgggatcacattcagttttcatttgaagaccttctttgttttccatgtccgtgtcattagaagcaccaatgaagttgtcttgatcactcacgatgtcatcaggcctgcggccatcaacatctttctgatcagcaggaacctcagccaatcggggtttctcttcacatgtcaaatgtgatctgttattactttctccaatatccaagtatggacaatccggcagcttttctgagctatggaccatgccattttgttgaaaaggttcatgttgtttccccagattccgtttatcacctagctccaaataagccgatccatcaatgggttcagatttagtatccacagcatcagattcgtttactggaacaacttttgtcagatccaatttaccagaagattgaacaagggcgccaaaactgtccatttctccaaaaggaggtgcagtttcacttgagtcaggcgatccaaatttcacatagtaatgcctcaccgaatatctggagatgatttttttctgcgataaaatcacttcttgcagatgctccctcaagattctgctagtggttttatgatcaggactccgtggttgcctggatttcaactttgttgtcctaggtggaacttttctagaagttcgatccttgggggtaatttgagacctgcaggttttgcacaaaagtaatgtatctgat

SEQ ID NO: 191133 - DNA, 453 bp, Zea Mays
ctgctgcggcttcctcatctaatccgtcgaagctagacgtgacctatgaccttgcccagctgatcgtactatcgttcccctgtagatgcttcaggacctaggatttggtatggggaggagaagaaaatcaccttgagggcctatccgtatgcggtggaagggagtaggcaaacgaagggaaatgggatggagaagaagccgttcaacatcttctgctctggttatctcacctccgcctctgcacatcccactccatggctgaccgctcccatcttcgtcgttgcggcagcgccatcttccactggtaccttttctccttccccaccacacaaccctgggacaaagcgcgcaggggagcagggacattgaggaaccacagtcgctgctcccgacggcgatggtgccatgacttagcggacgtcggtgggctttgctcccgcgccgggagaagga

SEQ ID NO: 191134 - DNA, 503 bp, Zea Mays
gtacccagttcccggttactaagagcctggatgatctggaagctcagaaacagagtggtgtttgatgggatctcccccagaacactatgctcttagatgccactactgaggaaagggagaaatggctggttgcaggagctaaggatctatcatttctagctgctcccagtaccattgtatgagaatagttgtatcttcttagttgtgcatggattgttttctttatgcttgtttttggcctccataaggaggtcctgtaaccgggtgctttctggcccttttcttccttcctacttaatataatgaggcgcagtcctgcgtttttcaagaaaaaaaatgttgactctgattctccatttcactcagtttcagcttcagttttgtcaggctttagtattttgggcaagcagaaaaagtaaaagttcagggcttaggtcgatcgatttcactgttaatttcagactttaaaaagtgctcagtgttctgttaattattgtggacct

SEQ ID NO: 191135 - DNA, 1362 bp, Zea Mays
acagattagataagttcccagaacatcatgggataattcaacaggtgcagtatttcctgttggctcactctgtgaatcctcataaaattctccatgggatgggactatctttttccagaccttgtcatcatggcagaatgttgtggcatctgactgtgactcccttgtagtacaatgggtatctgagaatgtactgtaatccttaagttgcttgaccactgaagagaggagcatgtcacacttgctgctttgatcatctttatctagcttttctgattttgtttcagctttcatatcgtcttttagtgtgctaacacctgaatacataatgtgttcctcaaaggcattagtgtctcctgggtcagccatgtccatagttgctacattggtctcgtccagtccatctgcactaatatcaaatattcttttcggtttcttgcttgacatttttacagagctattaagagtttttggttgagcataagtttgtcttccatcattacttgcatcgatgtgatgttttgtctcgtcacttgcattgtaattcagactctcattgcaggaaagctttgggtccgtatccctatagttgttgtcttctacatcatgacagctctgtaaagattgatgcccgttgtagctctcagttgcaagtgtgctgcaatcagagtctgtgatcagtggagtcaaccggatcattcggcttgtcaaaagctcactggctttgtgcatgatcttacttaccgatgatgtgtctgagctgccatcaagaacaaaggttgaactgtcgacagctctaagagttttatattgctgcagagcagtgattttcctactgatgaacacaacagctacaaaaggatccaaaatctgccaacgttggagaagcgtgagtgcattttgctggtttgcaagcatcctatcaacataggtcattgcatctgtgagatccttccaaaacgaatcaacatctgaccactcctttggataccttcccctttctgtatctggggaagcttcatataactttttgccacaaaacttccaagcctgggttagtgaggtatgaaccgcttccttgtttggagctgtgaagtaggacgccatcttagccctgtcattccttttccgtggcttaatagtccatccagcgtccttgaaaaggcgatgcgcatgtgcttccagctggtcaggaatatccctgcccaaggccttcttggaaacagcagctgccgagccaaagtgtaccgcgctgctgccgcatccatgaacatcaatttcatccgggcaactaatattcgcatcaggcgtgccttcctggcaaatggtggtgccatcgagctgggtgaactgaccagggct

SEQ ID NO: 191136 - DNA, 282 bp, Zea Mays
cccaatcctctactggccgaagcccatgtgcccaacagcgccgcacactcccactttccctcgctctctttcacttgtgcaagggacccacacgtcaggccatcatccccacagaacaaccgtatgtttgcaccggtcttcactgtgatgcatgcgcccacatcgcgcgggcggttggacaactccccctcttctctttaggacaccagccctgcccctctctctcttctccatgcccgccttgtgctcgccacactgcctggtcgcacatcgcgttcggcc

SEQ ID NO: 191137 - DNA, 490 bp, Zea Mays
tttggttaatgagagaaatgaagcatggtacgctcgtatgcgcaccaacaaaccttgccatcaaacaggttgcttcacgtttcttgaagctggtccaagagcactctggcgacacaaggtgcttgggagatgtcctattgattggcaacaaagagcgcatgtgtgttgatggtgacctcaaacaaatatatttatatgaccgtgtaaggaggctttttggctgctttgcaccattgaccggatggaaacatcacctatcttccctgtctgattttcttgagaatggctactcacagtacctccaacatctacaagacagtcaggaaggtgatacgccttcctttttctcttacgccagaaaaagatttgccgttatttatatggagctcagaagatgtttcaatgatttgttgttacatgtcccaaaatccagtattctggaagtgaattacaacagtatccttttacttcttgaaatgcttgaagagtt

SEQ ID NO: 191138 - DNA, 390 bp, Zea Mays
aacactaaaacgagagggaagaggctatgagcggacctgagatgagctgaccacagcgaggtcacaccgctcggtgttcttgagtgatttgggggaaatcccaaactagggagttctagtggatgattcgaggcacgggttgcttctctggttgcacaattacatagcggagcaggcggggtcagcaatttataggcttccacagtggtggcgtccaatttcgtgaagatgtgctggcggccggagaggaagaaagttactggcgctcgggattagtggctttcaccgtggcaagctcccaggcgatcaccgggcatgcacgatgtgattcactgcgacgtggtcaagctctttagcacgtggcgcacgacggtaatcggccaacggcgg

SEQ ID NO: 191139 - DNA, 558 bp, Zea Mays
gtacacctgagtcgggacattgtttttgacgaggaggcgcactggagctggtctgacaatgaacaaaaggaggatgatggcgagttcacgatcaggtacacctcggtgtcacacccggaggtggtgaccacgctccgaccacgacacgcagctacgctggcgtcacctatttctccaatggatgctacgactccatctcctccggcgactgcggctccatcgtctttggcaacagcgtctccatcctctacggcggtttcgacgtcagcaacgcctgcaggaccgacggtcgagtatgctacaccgccaaccgtggatgtggaggatttggacgcggatcatgaagatgacgtaccccttcggttccgtctcctagacaagatcgcaggaccggcaacgtcccgagggctcgttcaccgctttctggatgaagacgaggatctactgctggctgaagaggacgagccgaggaccttcgagcaggcgcagcaacatgactgctggaggctcgccatgctggatgagatgacatccatcgaggcgaatggcacctgggag

SEQ ID NO: 191140 - DNA, 1041 bp, Zea Mays
caatctctcctatgattaaggcatatgaaaaggaaactaatcttaaccaatctctcctatgattaaggcatatgaaaaggaaactaatcttaaccaatccctcctatgattaaggcatgcaaaagggaaactaatccttatctttctaaacttagccactgattgtgtcgcctgccttggctgcgcgatcagcagctctcctggcgtcacgacggcgcctgtaagtgtggccgtacatgacatctctccccccctcgacgatcaactcgtcctcgagctgaaagtggggaaatttgtcgcggaagtcggcggcatcttcccatgtagcatcagtagtggcctgccctttccagcggatgagcacctgttgaatacccctggccaacctgtaccgaacagcctgctccggttctgggatcaccgtcccattgtgagtgggtggaagaggaggtggtgtagctggtggggcgccgacgaacttcttgagaaggccgacgtggaagacatcgtgcaacttggcacgcggaggtagcgctacgcgaactgccaccggattgatgagctctgtgacttgatacggcccgacgaagcgcggcttcagcttgcccttgggcgcgtggggaagggaggaggctgcccgatgacgcaggcgcagcagcaccatgtcgcccacggtataggagaccggtcggtgcaggcggtcgtagaacttcttctggacggcctgggcttgttccaggcggtagtgaacatccgctaggagctcctcgcgttcagccattgtcttggccaccgccgccacccgggtatcgccaggctcacaagagcggatggagggaggatccctgccgtaaaccaccttgaaaggagtgtccctgagtgatgattggtacgccgtgttgtagacgtactccgcccacgatagccaacgtagccactgacgggccggtccccagtgaagcaccggaggtacatgtcgatgactttgttggccgcctccgtctggccatcggactgcgggtggaaggcggacgtcatgtg

SEQ ID NO: 191141 - DNA, 301 bp, Zea Mays
ggccaacaggccacatcaccatacaaattacaattacatacacacggcgagggcatcacacattacatcggctcgaccttagggataatacccatctccctgtaattaaacatcattatcctcagctcctctccctcaaaaagcttccgcagatccccctcgcctatgcccgccccaaccggcgaagacaacaattctcgttttccaacccggtctactcggagacggccacgctccatccccatacgacggcgcctgccacttcgcgaaaattcacccacactatgttttcccaccaccc

SEQ ID NO: 191142 - DNA, 350 bp, Zea Mays
cccagctcttccaaaccctcttacaaggagagaacttgattgtccctacaaacagcatcataggctgacttgctgctgtagcaacctgaggagcataattttcagtagtgttgatcagggacatcaggccgcagtaccaaaccatccaccatttgtcagatggctaaatattccaccagcacctgcacagataaagcccctcttatatcagccacccaactcctattagcaagtgcttgactcactgtacgcctccttactgctcttttggggaccaaactaaaaagattgggaacccactcagacaaagtcctgccatgcagccactggtccatccagaattttgtagc

SEQ ID NO: 191143 - DNA, 544 bp, Zea Mays
gttttggctccgggaccacaaggtctgatagcgtggcctttgcggtggcggtccaccattgctcttaacaactgcatcagactccctcctcgacgccctgctgacagaattcgacgacctcttcactgagccccacaaactacctccacctcgtctacttgcgaccaccacatccacctgctggcctgcatcggccccgttgccgtccgcccctatcgctactccgccatacacaaggacgagctggaaagacaatgccacaacatgctggaccacgagataattcgccgcagcacgtcggcattctcttcctcggtgttgctggtcaagaagaatgatggttcctgtaggttctgcgtcgactacagggtgctcaatgctcagaccgtcagcgacacgttcccgatccccgttgttgacgaactcttggacgagctgcataaagcccgcttcttcaccaagtttgatctttgttcaggctatcatcaagtccgaatctttcccaacgacatacacaaggcgacgttccgtacacatgacggtc

SEQ ID NO: 191144 - DNA, 677 bp, Zea Mays
cagaaagaaatatcctctctaaagcaagaactcgatcagctaaggagaggaatgattggtggtgccagccgggaagaaattttgagtttacgtcagcaggtatgttcagtttgttttgtagaactacagaataaaactgttagccaactgttttgtgctccttgaaattgactctgtagaataccttttgtgttggtaagttgataactgcctcaaaagtacctttctttcttgtcttaagttggaggcgggtcaggtcaagatgcagtctcgtctggaggaggaagaggaggcgaaagctgctctaatgagcaggatacaacgtttgaccaagttaatacttgtttccaccaaaaacaatattcctgccttgacagatgggcatcagagtcacaattctctcagtgagcaagatgtaagtattaattgcccaactatttcacatttgtatatattccttctccatgcttctgtttcatttggaaatatgaattatctgtatatttcagaagttaatcacttcacaagatagttctacacttgtccaaactgagggcaccacaaaagaccccctatcatccgctttgccagactccttagatgagatcaatcagttaagatctggcaccggtgaacaatcttcagttaccggttctgcaacagattcaatgcaggta

SEQ ID NO: 191145 - DNA, 298 bp, Zea Mays
cactattctggatcgtcccgaactcgatctagggctaggattaaatctccataatattgaaccggtatgtgctgtcgaccctcggattggaattcaacgcccacgattttaaatgctgcgatgcaattccaatcacccgatctcgatccaacgacatagccaacatctaacccaatcggtaccatcgttacaatccacacggttcaatctgccatcaatggccaaaggatccatcttctaccctgatgcagacccgagcggcgcgttcccagggacggcggcgcggtgctccggcgag

SEQ ID NO: 191146 - DNA, 291 bp, Zea Mays
ataccacgcattgcaatatttacttgcagaagatgaagttggttacccatgcctgagttcctgaacaacaataacagattgcgacctgaggatacatacagggaagcataaaacagcagacaaaacaaagatcctgttattaccactttctccacatgtcatgacccttgcgaatagtcccatcaccactacacggaacatcacaaagtatgcggtcgaattctagcttttgtagtttgcagggatctttatatgaacctgaacaatcctttgcaagagaacaatagggga

SEQ ID NO: 191147 - DNA, 690 bp, Zea Mays
tcaaagacttctttttctgtaattggcaagtccaaatcctccaggttatgagagggcagccccaagtagttaagatcaatagtgacagttctatccattcttgttcccagcaggcttctatagaaatcatccaccagcatggctttgtcagcatgatcagtaaacacattatctccagaaaccagctttgccacaaagttcttttttctatatctagcgtgcatatggaatagcttggtgttaacatctccctctctgagccaactgattcttgatctagatcgtgcaatggtgcgcttaaaggaggcaagggctaaggagtgctttttcagtccacatctcagccaatcctccaaaggggacaaaagtcttaaatcttgggctatttcaagcctgtgaagaatctctcttgctaaagctaactgtgaggccacatgcccaatcttttttccactccatttctgcaaagatctagcagtgacttttaatctcctgtcaaagtttagaactaggcagactccatcatcgatagacaaccatgcttcactgacagcttcctggaatccatccaactttggccaaaagggttcaaaatggaaccacctcttgccaaagcagttgctctgcagaccaagcacaagggggcaatgatcggagtcctcagaggcaacgctttggaggaggttattg

SEQ ID NO: 191148 - DNA, 538 bp, Zea Mays
ccaaaccaacagtgaactgaatcagcacaacactgatcccttgcagacctcccttttcaaaccttggtttctcacaattccatatgtcaactggtcaatcttccttaaccaaaactattcttcacttatagcccttcctacttggtataacattccatggcttaaaatgctcagaacaagagttgtggtgcactgaagttgagcaacaacactgaaaatccaatttcaaagtctgaaatagcatatcaccaagtctgacagaacatgtttgggaccattttactcccttctttgtgtagtaccagaccaaacccacttaaggaaacttgtgctcctatatatggtatttcactttactataatttttttaactcaactcgctttatactaattaccacagggttccaaaggtgggtaaaaacacactagaactgccatcaacagtcaactaaatcagcacctctcaagtctgacaaaggaaattagagggtactttactcccagatttatatagtaccaagtctatctttcttcaaga

SEQ ID NO: 191149 - DNA, 1984 bp, Zea Mays
gatgaagatggtcaaattcttcttttgtgcaaaggagcagacaggtaggatttgtaccattttttaattttttttggtgatgctctttgaatttattattggctaagcctgtacatcaggccatctgcactcagattttgatattttttattagcttaaaaatgttaataagcaaattttacacctgattacttggtgctgccaacatgcttggcttgtttgctctatctttttcaatgccactactttctttggcttcaacttgactatccttgaccgttctttgttcccaaccaagcagcatcatatttgatagattggcaaaaaatggaaggatgtatgaagttgatacaactaagcacctgaatgaatatggtgaggcaggcttgcgaacattggcactatcgtacagggtgcttgatgaatcagaatattcttcttggaatgctgagtttcttaaagcaaagacctctattgggcctgatagagagttgcaacttgaacgtgtctctgagttgattgaaagagagctgatccttgttggtgcaactgctgtagaggacaaattacaaaaaggggtaaaacagtgtctgacttttcgtattgttaagatatgaatcttggttcctagtattatgctagtaactattttgagttatgctagtaactattttgagttgttctgactcctaagttatgttttgtgctctatcaggttcctcagtgcatagatcgtttggcgcaagcaggtctcaaaatctgggttctgacaggtgacaagatggaaactgcaattaacatcgggtatgctgtcaagtagaaattcttaatatgtgggaagtaactttttgtaccttgttagcacatcacatccatcaacatcgtgtgatggctctatttcttttgcaggtatgcatgcagtttactgaggcaaggcatgaaacaaatatgtttgtccatacccactggtgagcaggtagcccaggatgcaaagaaggtaccttaacttttttctcttttactatacaagaagtttagatagtaattatcttaatggtaggctttactttcatctttgacaactgagcaggctgcaaaggagagtctcctgtcgcaaatcgccaatgggtcacaaatggtcaaactcgagaaggatccagatgcagcattcgctctagttattgatggaaaagctctagcatttgctttggaggatgacatgaagcatatgttcttgaacctggcaatcgagtgtgcttctgttatatgttgccgtgtgtcaccgaagcagaaagcactggtaggtttgcctctatccattggattatctgtagtttctcaataaagcgttgttgagtttactcttcactttgtaggtgactcgtctcgtcaaagaaggtataggacaaaccactttagcagtaggtgatggtgcaaatgatgtgggcatgattcaagaagctgatattggagttggtataagtggggtagagggaatgcaggtgagttgttcagattatcatgatctaatccctatctagtgtagtgctactttcatttaacatcaaggattggtgattaggtatgagtaaactttttttgtcctttaccaggcagtgatggctagtgatttttccatttctcaatttcggtttcttgagagacttcttgtcgtccatggacattggtgctacaagagaatcgcccaaatggtgctgctcgaagcacttctactcattctattgcatctgattctgttatgttttaacttcactaaattttctttgttcttttgttaaattgcagatttgctacttcttttacaagaatattgcctttggacttacaatattttactttgaagcattcgctgggttttctgggcaatctgtatacgatgattggtttatgctgcttttcaatgttgttcttacctcgcttcctgttatatcactcggagtttttgagcaagatgtttcgtccg

SEQ ID NO: 191150 - DNA, 308 bp, Zea Mays
aaccgcaaccagcaacaagttaacaccattgccaactaacaccccaccggagacatagctcgttggaagtatccccacaacagagtcgcggcgccaacaccagaggaagaggcagaggctgggctccgcagctgtgaaggttctactgcctcttccacggcgaagactgcgcacaccccaccagggattgccctaaaaccaaggccaccaaagatagaatggccggaaattagccagccgacaaccaacaagttgtcgtgcatacttaccatcccgagcagtaccaccaacaacaatttcataataaa

SEQ ID NO: 191151 - DNA, 278 bp, Zea Mays
gcttgcaggtgccaattaagagcatcatgcgtaactctaagccgccgagcaaactggccatgcttatggcgttgctgtcgctgtcgtttctgttttgttatggagtcgagaaggtccattgctcgacggttcacgagaacaaccaagattttcactctctgctcgatttcaagaagggcatcaccaacgatccaaatggagccatgagcaattggaccaacaacactcatttctgccggtggaacggtgtgaagtgtaccttgacaccgccatatcgt

SEQ ID NO: 191152 - DNA, 602 bp, Zea Mays
cacgtacgtacgcatcttctggctcacgacgatagccgaggaattcgaaggaccgaacgagaagctcctgcgtggtgtcaacgtctaccctaccgtaccagctagccaccacacgcgtagcgcgggaaatgccggcggcggcggccatgacgacgaggcgggtggtgctggaggtgctacggtcggcctcccgcgacgccttccaggtggccttctccttcgcggcgaggccgcccgtgtccaccatgctcaagccggccatcaccaagcccctctaccaccaccaccacgacaacgactaatctggcgcagatctacagcacggccgtcggcatgccttcacagcccggtgggtgtgacgactattgatgacgtactaccacatttcgtcgctcctattctagtaagcaacgcaaaagaaaatgttgtaagattgagcctgagagcttgagtcaccaatgtaaattgtatacgactgactatatatagagcatgctctgtaaccatatatattgcccgggccccccttgccctcgcaatctatgctctacagcaatggatctttattccttgtgttagaacataatataagtgaattgtcc

SEQ ID NO: 191153 - DNA, 312 bp, Zea Mays
gaactcagtggcgcttgtgattggttgtcgaggcaggatctgggagctgcgcgtgctcatcctgtgccgatcctaggaccctattgtgcctattgacttggttccgcggtggaccaccatcgctgggtggatgctcatcggtgggtggatcgtgccatggtctgggtctcctacacatgatagctcggtaagaattccgtcgaacacctcgcctcagttcttggaccgtgtaacgcgatttgattagcagtttgggcgtgctgctcgctggaggggcaccgctgtaagggaatgagcgccgctgcctgttcg

SEQ ID NO: 191154 - DNA, 510 bp, Zea Mays
ggccaacaggctaagtacgtcatccatctcagcatcatcggtgctagatggcatctcaaaatgagtttgcctctcagcctcggggagattccgaaggggagcaatcaaggcttcaatatcctcaggggagggccgcactctatggcccgggctaccatttcgagcaggaggattggagacaaattcagagaagggcctattcggaggcaggttccacgtagagtaagctaagggagcaccagcattcgagaccctacccctcagtatcatatccagtcggctcaacaagtcctcattgggaatctgtctgtttgtgacccgggtggaatcattgatgccggtatacaagtaagcagggtaaactctgtccttcaaaggttgaatattcttgaagacaaagtcggcgaccacggcctcagcagtcagacccctatccttcaataagcagatttcagcgagcaacactttggcttcggctacctctgaaaaagtgggagactccacccagct

SEQ ID NO: 191155 - DNA, 755 bp, Zea Mays
gctacaaaaggaactgagtgagaagaaatcagagtttagacgtgttcaggatgagcaaagcaaaagggacaaggagcacgtctcggacggatctcttcagagcctaagaaatatgttgatggctttacagaaggagaactctagcctaaaggtctcaatagatcatgcatatactgtaataatagtgctaatacaatgatcatatgtaaatgtcgcaacagattttgacaacataatatttgcttctgcagatagagaaagtcaagcttgatgcagatctcaagagtatgaagagtacctcacaaaaaactgttgacagtacattagatgctaacaagatttctgacttggaaaaggtacgatcttgctctttattcagaactttgatgttaaatcaatacctcattgcattatatgttgcttaatgtgctgaaataagtttccacagctcttgctagtttgagtcatctgaaaactgtcaagatcatagagtgtaaatttcactatggattactttttacctaagagttataggccaacaaaacaaggatttgtagcatatattacttgtgatactacttaatgacaaagtgaataaaagtactgatgtgcttgtagttctactgtgaaggttaagaaagagatggactctttgaaaagagcattacaggatgcttctcgtgagagagacaaagcagtgcaggatctggctcggctgaagcagcatttgttagataaggtaacccatatattgg

SEQ ID NO: 191156 - DNA, 319 bp, Zea Mays
ggtagatgctgttgtttcgacaagtactggcaggcttcgcacctctggactaactcggttgcgtcactctttgctgttggccagtagaaacccgacctaaaaaccttcccaaccagggtcctgggtgctgcatgtatcccacattgtccagcatggacctcttccagcagctccttccctatatctgagagaatgcaattcatgaggactcctgacgcgccccttctgtatagtgtttccccaatgatagtataatgagctaactgccttgcgatgcgttctactacatttttgtcatctggttcctcctcatttttta

SEQ ID NO: 191157 - DNA, 513 bp, Zea Mays
ggagaagctggtcgtcgtgaagggagacgcacatgacagggagacacgtggaccatggcatggcgaaggacgaacgtcgatggagcaggcgtgaggtggcacggggagtgctgactccacgacgtgctcggcgccggcgaagcaagagagaaggcctcgacagcagaggcatcagaggaggccgagggtgcggtgccgaccaatgaggaggggcctaggagagacgctcgagcataaccaggtgttgtggtggaggttgcagcgccgaataaggtagaggttggtctagcggaggatgcaggtgttgtggcatatagcgatggcgcagacgagaaggtggatctgaagccaaaagcggaagaggatgcggcaacgaacgaggccccgaacagggaggtctcaaaagtgggagcagaggcggcggcgacagcggcaggatcaccgtgcaggagtggggtgcacctatggtagaggggtggagtcgtggggagggagcaccagcctcgcggcgat

SEQ ID NO: 191158 - DNA, 381 bp, Zea Mays
gttggctgagtcaagtagctcaaggttatgaccaagatccgagtgccaaaaagctactgagttgtttgcttacgggtgaaacaatggaacactacactctgtcccagggcatcattcggtttaagggaagaatatggataggagcaaacaaggccatacaacaaatgattatgtcggaactacatgaaagtgccattggtggccactttggatttccagtcacataccgtagaattaaatctaattttgcatggctaggcatgaagcaacaagttcatgattttgttcgtgcttgtcagatctgccagcaagcaaagcctgagaggacaaagtacccaggactattgttgccactgcctattccagaaaatgcatggcagg

SEQ ID NO: 191159 - DNA, 346 bp, Zea Mays
ttgggaggccaagaccaccaagttgcagcggcctagtaaccttctcccaagccacaaggcagcaaccaccatttatttcctttcttcccttccagaggaaagcccgtctaattttatcaatagctttgatcacccacttgggaacgctcatagcaatgaggagatagactggaatggctgagaggacgaaacgaaccaaggctgttctcccagcgagattaagaagggatgctttccagttaggcaaccttgcagcaatcttatcaacccaaacaatgaggtcacttcttcgcagtttcttgttggagattggcaagcccaaataagtgcatgggaaggcagcagg

SEQ ID NO: 191160 - DNA, 515 bp, Zea Mays
gttgcttgtaaattcatgcatgaatggctactggcgccttgcacgatttgcttatatgtggacacacggattttctgcgtgacttctgtgaatcggttttttatggggaagctggttaattgttgttgggaaaaaaacgttctatgaaatgttctctatggttgtgtcggagtgatttctgttgctttacttttctcatcaatatggccacaccaagttatactgtgtacctttaacagaaatgaagaaggcacatattattccatagatctcggaggaacaaactttagagtgctgaaagttgaagttggtgatgggtctgtggtcactcgccgtaaggtcgagcttcccatccctgaggaattgattaagggtacaattgaggtgctttttattccatatagttcccattttctaatataaatatgcttttagtatgaatctctgattttatttttcttttttaacctcaggagttattcaactttgttgccgtgaccctaaaggagttcgta

SEQ ID NO: 191161 - DNA, 456 bp, Zea Mays
caccaatccccatcctccactaacgaaccaatatcttacaggtactctgcatgtgtgtgaagccgtctccgcctccaccaccctcggtatggacaatcgattcctcttcatctccctctcgttgcgtcgtctcctgttgcgatgtggatcgtcgatgcgaatggaatgcggtgtgtggtgtaattctggtggtttttgtgacctacgagtcatctccttaattccaatctggtatttattagtatgggtgaattgtcatggatttgtgatactccactgttctggggaatgcatatgtttttcagattgttaatataactctgcttcctgtgagaatacaggatatgtttttcatgtcatggcccatgggctctgaaaacttatgttagactttgccccggtttctaattgcaggcagtgagtggtatgagtggttgctttcaaattgcctgatgc

SEQ ID NO: 191162 - DNA, 531 bp, Zea Mays
cctgttctctaactggtacccttgctggtattgctctttgcttattactgcaacctgattgttcaaccaatgtgtgatgctcccccctatagtggccatccatcacaacaccgggaccaactatgcgttgacttgcaatcatttcagccctgcgttcaccttcccagctagcagagttattcatttctcgtgcagcccctacgtcaagcctcatgcgcttgctgctcaccccttgatcaccaccacctcgcagcatgctcccttgtgatttgtttgtcctagcagcagctacgcgtccatgccctatgcttggcttagctgccacttcctcacccttctttgtgtaattcttagtgacaaccacctgaccattctgctttgccacttctgcctgggaaccttctgtatcatttaatatgtcgcactccactgttcccactatgactttagagcatcttttgctcggtggctcatctcgcccatcaacaataacacccccttcttctgtttttttgcccatatgcagccctc

SEQ ID NO: 191163 - DNA, 673 bp, Zea Mays
aaaacgtgtactcgaagaggtcgaaaaggtgatgcaagaattcaggggcatgctttataagtccatggaggatcctcatcttgatcttgctgaggttagtggaacatggttataatatctgtctttagatacttttaaaaattacctacttttgttgacaattaaaaatggtttagcctgcaagtttaggtttatgtattattgaacataaccatatagagaaaacattatagaggacaattagcagatgattatagaacactgcttgtttaaaatcgactacttgatttcctagtacttaactacttaagtctattttaagattgaaattatctgatgtttttgttctgtttgcttactgatttttgttttttaccgttcagattgagaacattgttcgtctattgttggagttggaacctgaaacagatccagtgtggcattatttaaatattcaggttcaattttaatctaaatatgcgtgctggcttttcaattctgtgacttctgtttgtattttctttttatttataccataatatttcctatcagaatagcaggattcatggattgtttgaaaagtgtactcaagatcatgactcgagaatggaagttttgcaaaataaaattcgcgaaaaagtgctctctgattcgaagtggaggcagctgcaac

SEQ ID NO: 191164 - DNA, 405 bp, Zea Mays
ggagagggtatccctgatttagggtaccgacagtggcccccggtcctacctcaggggaggatgcgagcctgcaggtgggaccagagtctgattggtggttggaccgctgcttccgcgcgtctgttgctgaaattactatcggcccgcctatggccatgccaactgccgtgcctattcccacggctgactgacccatgatcgtcgtacttaacggtactgttgggccatgcgcggggctgcctcgagtcgctgcactggttctgaaaaatattccttttcagaatcccgtgacagccccaagaagacgtggcattggcgcaagcggcggtgcggtttctttgcacacggtaaccggtgcaccggttacatgacatgtgggcctgggtccctgagttggaccgccag

SEQ ID NO: 191165 - DNA, 454 bp, Zea Mays
aagtggacccctggcttgctcaaccgattcatacgatttctattagatatggccaggaactcctcagaagcccaatactcgcacatccacgcccaagcatccgaatgttggctcaaccaatccacctcactctctttgtactgctgagccgtcaggtgaattttctttgccatattcgcgtcacaatagttcccctgtcgcttttggtacaccgtgacggccctcaatcatgctttatacatcatacccttgaccaggcaatttgacacacaccatacgtgattggagcttgctcggcaacatggtaccatgtcgtttgcgcattcacgttatttgtgtctgaaaaatacttgcttgagaataatgtgatctctctggctgcgaacgcctctgcaatacacccctcaacccttgccttattctgcaccattcctctgagttttttcaattctct

SEQ ID NO: 191166 - DNA, 437 bp, Zea Mays
tcgagaagtatcttcatcatgataagctcttctttcagacgatacaggtgggtcttcaaatgcagcaacctgagacgtatcaaactggccttcaacaggaacagaactaaggttgctattaaactgggtcatctcataatctgttggtgctactggaaacacctggggcctgctggaaggaggcaacaggctagaaccagatgtgtgaccttgaaaagcataactaggcgcagcctcctcagatccatggagaagttgtgatcctgatgtgagagaaggtatcctggaatttgaagcttccactggagtgtcatagtagtgaggacttgccctctcatatgtatcacttggttgctcaggaaggaactggtactcatggacagcccgtgatccaacatgaggttggactacgggagaattaccaacagttgattttc

SEQ ID NO: 191167 - DNA, 319 bp, Zea Mays
ctttctgtgaaggatcttgccaccaggacccttctcactcggcgtgacagccctaggccgctctacacactccgccttcctgcttcccctacattgacttctgccccacatgtccttgccgcggccgcctcttctgtgacttggcatcgtcgtcttggtcaccccagccgcgatgtgatgtccaagctctccagcagcacctctggttcaggttgtcgagcatcttttgagcacctctgtcatgcttgtcagttaggtcgccatgttaggctcccattccccacctcctcttctagagcagcatgcacttttgatctga

SEQ ID NO: 191168 - DNA, 768 bp, Zea Mays
gacaagttctagaaaaccatcaagctctgccgacaattacaaggcagcacactgtcgcatagtagagtccttcactgctggcaacttatcaagctatcgtgtctcctgtcttggtgccgatgagcaggctcatggagcaatgcattctcctgatgctgtccgtttcaagcttgcagtgcagtggacgcctcctcgccctgatcgggtgtacactcgtagggtggtgactcgcaggagcgagagggcaagaatttgcagtgcgatggatttggagagcatcgacatttgcaatttcagtcgtcagagggatggtcgtggccatggacagctttggaaccatcttcggatgcatgcacatcttctgatggtggatgccgggtggaagattgaggccaaggaaagagacaacaggagtaaagttgatcatgtttatgtggcgccagacaatgtgacacgcctgtattctcttcccagagcatggaaatgctttggccagtggttgcttatgacaacaccctgcgtcaatggaaatgagtcaattgactacggaaaggagtggtcgaacatgcatgaatttctgtatgatctgaagaacacactgctatgcctacagtatgaggtccaacgtacgaagccagcactatctttcctctaccagtggcagctccttgatcctttcatggctgttgtttgcatcgataagaaggttgcagctcttaaagatggagtggcactgaaagctgttaacagcaccgtgacttgcctcaa

SEQ ID NO: 191169 - DNA, 499 bp, Zea Mays
gttggcgcggcctccgtttcctctcccctttccttgtcctctctccctctccctccctcccggcctcacctctccagcctctctcccccacctcttccacccctccacgcccccagagagccccaggcgcaccgccgacgaccccggttcaggcgcagatcagcgtgcgcagtgtcccgcccaccctgcctccgcgacctccgaccctgggagcgcctgcccgcgccgcagggggcgcttcgcatatctccccttctcttccctcgccggtgggtagcggccggcttgctgctgccctgtccacgccgcgtctacgtgtcctcaagggctgggcgctcttgtcctgccaaacccggtgcggcctctgcttggaaccgtgagttttgagccccttaatccgtatccctgccgccggccgcccgggtttccttaacctgactgactcgtgcttcccgcagactccgttcgtgtgcctctctgtaggttttctacgctctag

SEQ ID NO: 191170 - DNA, 585 bp, Zea Mays
agttcaagcgatcacatattttggtctcgtatggaagaaaaataagactgacaaggatgatggaagtgagttcagggcaaatgatgtaatccttaaaagcaaggatagtataggttcatcaataagaccaacatgctgtctctgtgacaaagcttattctccggatttcttgtatgtacgctgtgagaggtgccggagtaagtctagcattactgtagcttagagcattatccttttttgtgttatctttcaatgtttttctaacatctcgatattccccgcatacagattggtttcatggtgatgccttgcaacttgaagaagaaaggattggtgagttggttgcataccggtgctgtaggtgccgaagaagagccataccacattgtcctcattctgatggttatacaaagcctgaaccagaattaagtgaacaaacagttgctgcatcatctcagtcaactatgctatctagtgaggacacttatgctttagcagatcaggacccactgcttgcttcttacgggatagttgaaccgattggtgatgatacaatggatgttggtttgtcaatgaacatgtcaa

SEQ ID NO: 191171 - DNA, 314 bp, Zea Mays
gaattttgtagagcttccattgccaacagtggtgacaactgcagcgtcaaaaagggcatgagcaatcctttgcacactgataggaagacccacccatggtcttgagtcatcagtcttctgtaaccacaaccaatggatgcgttgtgcccaccccaaacgttcaaggccgtgaacacgaaggcccccatacatcaatggtcgatgtatccttgcccaactgactaagcagccccccagcttgttcctgtcctttccaaaggaaattcctcctgattttatcaatcgatttgaacatccaatttggcaggtccaat

SEQ ID NO: 191172 - DNA, 519 bp, Zea Mays
cccagttgaaaccttctgtcaaacaacatgtgttggtgagtgcatctcttccctcagtgcctgacgctcttcgtgttcctgtccaagtgctgcagcgtcgagtggtttcccgcggaggtgcttctatcgatcaggttttgatcaggtggtcggggtgtgatgctgctatggattcttgggaagatgaatgtgatgtccgtcgtcgctttccatgtgcggtcgcttgggggcaagcgtcctttcaagacagggggaatgtcagcagacaacatgtgagcagacatgttgacgaggtgcagcagccggatggagttctgatggaagatgtaaaggctgcggaaatgggccaagacgatgtcgaagctggaattatcagactgggccgtcgtgttcgcaagcccaatacaagatatccatcgtcttgctggacgcgctgagtcagccgtcatgtaataaatactgtgaacgggagttagagaggggaagaaagaaattaccaacaaatattcctgttatttc

SEQ ID NO: 191173 - DNA, 1514 bp, Zea Mays
tcgcgaaatggagaaaacaggaaggggacaaggttgtgcttttgctagctgttatttttttaaattcaataagaaaaatatcctatttccagcttagggtttcccattttttttgtttaatgtgttttagttctgagaacactatcgttgaactttatgttgttgcagatagaggttggtgatgtgatatgtgagatagaaactgataaagccactcttgagtttgaaagccttgaagaggggtattgcccttgacgaagttttctaagatgctattagtacctttggttattgtgatgttacattcccaactttacattttctatcaagatgttgtaatctcatgtatagtcattagttcttttcattagaaccccccatccagggacagaacatgtgatagtgctccaggaacagattcttgccaaaatctaatgaaacccattcattatatttagttccaaagttagcaccatgttttgtttattgtaacctactggtacattcctttatatgaaagaattcactagtggaatgaacttatttaaaccttatttatttacattcagacaatctttatcaatctgttgccccaagccacactgagcataatatgcattcttctttgtttcacctgattgccttttccattgcacatgaactgtgttgacggcagactgacgtgagctctatagtatgaccataaaatgcatggaaggatactccattgatcttttacaactttaagtctatttaattcctctaccattatgggtaattacataaaaagtgtaagcttttaaataactagaaactgacactgctacatcaaacaattatggtttcatttttttctttagtgttatggacaccctgctggctgcccataacgttcatcttgtgtttatcattttttattcttgtgtgtcactttatcctttcttatcatgaatgttttgtatcatgcacacaccttttgtgtttacccttacccctttaatgcttcaggtatttggccaagattttagcacctgaaggttctaaagatgttcaagttggacaacccattgctgttacggtataactcataaacacccattttaatgtaatgctttacatctattttgtactgagtgttagttgtccattttgtaaggttgaagacgttgaggatattaagagtataccagctgatacatctttcggtggtgaacaaaaggaagagcaatcaacagaaagtgcaccgcaaaacaaagtagttaatgtgtctgaacaaagctcaacagtgagccggatcagcccggcagctaaattactgatcaaggaacatggactggatacatcatcactgagagcatcaggcccccgtggcacccttctgaaaggggatgttctggcagcattgaagtcaggtatcaattcaagttcaaccaaagaaaagaagtctccagctcaaccttcgtctcagccaactcgagattcccaatctcaagcatcctctatttcacaaaagg

SEQ ID NO: 191174 - DNA, 708 bp, Zea Mays
gcttcttggaggaccttctgtgcctgaacgtactgcttttgttgatcaatattattttgttgcaagagcatgccagctgaagtctggagcctttgttgcattcccaattgttgctgcgtttgattaggctgagactggaactgcgacatcatatgttgttgaggttgctgaagctgattctgctgagactgaggttgcatcaaacccattgatgtctgctgagcatgctgttgctgctgtggttgctgaattggcttttgttgctgtaacatatgcatacggacatttggcacggttccaagaagctgctgctgctgctgatttagacttgacacatttccctggtttgccaattgttgtggctggtgcaagggcatagattgctggttcatcatctgctgcgtttgatgcatattcaaaagattagttgactgaactggtagcctttgttgctgttgcatctccacagcaccactctgttgattcactaactgattttgctgtaaatttgactgatggcccattaattgttgtggctgctgttgcaaaggaatgttgggctgttgagttggttgagtttgctgcagagaagactgctggtgcatggactgtggatgttgctgctgccttaccacagacggtgtaggctgctggagtaacgattgcacaggttgttgtaccgaattcagtgcattctgttgaatacca

SEQ ID NO: 191175 - DNA, 461 bp, Zea Mays
agggaaccctgctggaggggatagaggagagaattacctaaatttggaggagaggagccttcataggctcttattggaggcagcctaaagggtcatctacccctctatatttagagaagatttcgtcctctatatgctctaacggtattctttgcaacgttttctaaatatagaggacgcttctccatcctctctatataaggtctcacctttcctctatctatttttatattttagaaaacggattaagcaaaactaaaatatgtataagatatttaaagatatgataaatacgtatggtatgatctctactccttaggttgcatgagtggtgggggtagagcgcaggctggaagaacgggggcgagaggacgccgtgctgtcgcacggctgggcacaatgagaggcaagtaaataatctcttctttagattaatttctcgctgaccatcctggttacag

SEQ ID NO: 191176 - DNA, 607 bp, Zea Mays
attacatttcgggactagcaggtgggctccgtggtatgtccagaagatgccgaagaaaagttttcagcatgtcctggaaggatggtcttcttgaagctcggaattgcaagcattcaccaatcatcttccacagctccccaggaagtcctacacctactactcttgaatattgaggcggtggcttcttttcttttacaacagacttacatatttcctctgcactcagtccagcccatctgcatttcaatgagcatataacaacaccattcacaaaacattaaggacaacaaattgaatatcatgctacttacggaacagcaccagtacacatttccacaagcgtgcaaccaaaactccatgcatctgactctggtgatataccgtttgcactatcccaaaacatattcagtgacttcttcagtggtccccatgcctcaggagctgtataattggggctaagcagtgtagcatcaatgccagcactggagtcatcaggtactctcctactagtaaggttcttcagaattgctgaaagaccgtaatccgaaacgaatgcatgtccatgtgcatccaaaagaatgtttgacggctttatgctcatacaaac

SEQ ID NO: 191177 - DNA, 312 bp, Zea Mays
aaagatgtggcattgatttctatatcatgagtcattatatgcaatcttgcacatcttgatgagcctgttacagaacttgaactttggaatacaattaggagtttacctaatgacaaggccccaggtcccgatggtttcactgggcgcttctataaatcttgttggaacattatcaagatggaccttatggcagccatttctgcggtttggaacaggaagtttgacaactttggcttgttgaactcggcctacattactttaatcccaaagcatgatggggttgtgcatgtcaaagattttaggccaatcagc

SEQ ID NO: 191178 - DNA, 2197 bp, Zea Mays
tcagatggcggtatacccgcgggtgcagaaactgacagttcagcgaacaacgttgtggaccaagaacaagacaaaacatccgctactggaaaagagcggttgtgagtattaccagttctccatgatcttagagctaataatattttctctcatttgacatttagctcttgcaaattctgcggaatggtttctggccttggctgttgtctgtaacttcttcgttctttctcatgcagagccaaagcagtaagtcgagtccagaagctaacagtacccaaagtcggccaagcatcaagcttgaggcctaaaccaagagatccttctgctcctaaatcttcaggtaagatacctctttgcacttctgttacaatttaatttcatgggaatgctaatcttgaggagctggtatttgtggcaaatggatctgagtctgacacggtagttttagggttgattaacttgatatgactaagagaacactaatagaatgtgccaaacggatgtctattttaacatttgtttgtatatggatttacctctagtttgtgcttgcattgccaacattacgaatttatgatcatcttgacaaggtttcttaaaacaaattatattgtccaaggtgcattaggctatccatactaagggctcgtttgggaaatacggtatcaagtgaccctggtcatttagcaccggcggggcaaacctgcaaataatttccccgtctctgtgctgtccggtgggttttgggtgccctgtggccatttggaaactgtcgagtagaacatgtttacattctccaaacaaaacagtagcggcgaacatcattgattccaaacaaaatagtagcagcacacatatgccaaacgtttggcttgtgcaccaaaggcaaaccgatacaagcattttgactggatcagttttcgctgaacaaaaacatatacaagccaaccgagaggcattttgattggatcatgtaaactcatgtaaatagatacaagcatttccctgaacaaaaactgtaaactacaagcaaagaagaccgtccaaacgtttcagtaggatcagttttctcaaaacagagcatgatgacaagttgactacaagcagatacaagagactgggttcagacacaagaggatgtagttcatgagacatggctggcggcttcttcaagatggctcccttccctgtggacatgcacagaaaattggcatcaaattaatgaaaaatgaagagcaatcaacaaaaaagatgacacaccacaactctgactctgcgaagttaactcaccctacaaggtgcataatcagcacataatcagtttaataattagtattctttccatgcatccataagaacaaagtgcagcagaatctacaatagaatcggaaccaacttgggactgaaagtcatcacctttctaaatccatctctcaagtatacctaagtggtgcgcggggtaaggaaacctgcatgcagtccttccaaacacgcagacagcgtgggcgtgttttttttgtctgtggcccgcccgtcccgccgaaaccggccagtgttggtgttcccaaacgaagcctaaaagggaataaagcagaccattaaagaattatattcgtatggcagtgcaactcaccaactcttgatgcaagcaatctaatgtagtaccatgatacaattttattgaagctcttgagttcaaaaataaagaaataatattggaaattttaaagtttcttgtatacatgtgactctttaacagctcacagaaaccttgataaagaacgatggtaatggcatgttttacttttactccctggggttattcatttccctctattttctgtgcaatttatttcctccaaagtgcatgttgtcttaaatccacataccattctgttagttatacatcatattttgcataattgcagtcacaccaggtgtgcgaaaaggtaccaccactcaagcaactccaccagcaaaagcaagcggcacttcaaaaagagtaccatagatcaagataatcatttggcgaagccgcttcccagccatttttctttttgcatagctttttcagatcttattgccatgtgtaacaccgatgccaattactgacttgtgcatctcaggtggataggttcttttcttttcattgtttgcaatgagggtgttaactgcatcagtatgtgatgttagcatg

SEQ ID NO: 191179 - DNA, 333 bp, Zea Mays
ctcgcgtgcctgtgcctgcgagggcgttgtgtactttgtatggtttggttttgctatgctggtgtgattatagtcggtcttagcgcagacggtttgatgctgtcgtttctgcttttgttgtactggttcggctgcgcccttaggcggcttctgcgcggagtctttgcgatagacttcgggttttctcgcacttgttgtgcttagtccggctgcacccttaggcggcttctgcgcggagtctttgcgatagacttcgggttttctcgcacttgttgtgcttagtccggctgcacccttaggcgacttctgcgtggatagtcttcgcgatagaca

SEQ ID NO: 191180 - DNA, 817 bp, Zea Mays
cagttcccagattagttgttcttcactccatgttccttgattgatgtccctgtatttgtctccatcaagctggtagagcatgtttttgaaaaccttgacgacatcaggattatgagacacataaacaaatgccccacagccaaattgccctttaatcttctcatacacaagattagcaagagtagtcttgcctaaccctccaaagccagcaatagacagtacaactggctgcttggatgcctccttgtcgccctccatgagccttctcacaaggtcactgctcttctcttcggcgccaacaagttctgtcgcctttctgtaaagagccgacagccgcaggttgtcgatgcttctgccaacaggcttggaaggaaccaaatcaaccttgtacctgtcacgccgttcactcacatcctttatgcggctcctgatctccttgatgtctatgccgatgctgtgttgaatcctgccccttgtcagcaggtggaggcttctatcaatgaatcccttgaaactatgtggcttgccatcgccaactcgcaccatgaatctgtcgatgctgtcctcgaggtcgtaggacagctctctcacctcccttgtccagagcttgacttggatgtcaggtgggtggtcgatgggtgcctcggagaccttgatgagagcagcctccatgctcttgagctcagcctccaggaacatgatctcacccctcaccttcttctgcaggttatactcctccttgatcaggttggccagcttgggcaagagagtgcccatcgccccggtgactatctccgccatggttgctcagtcagag

SEQ ID NO: 191181 - DNA, 510 bp, Zea Mays
tgctactcgaaaatcaagcagctgcctaactctggctctgagaagcaaacaatcatggagagcgagagcttagaccatgtaggtatgcagtttgacttgcccatgttgatactttgctgtcaatacaatggtcagaaagcctatgtcatcgtactgaactttcgccatcgagttcattactcagctgctcaaaccggaattgtaggtaagcgtgtcattgagatgcttgatcaggtgactccagtggtgaaagaaatgttcagttccatggaaagctccagttctgcacaggcggcggcggcagcagcagcttggccggaggatctcccagaaagaagaaccctccctcctgttctctgtcgcactacatcccatcatccatcagacggtgacgaggttgcgatgcacacaggacgttgcaaagttgaggcaccggcgcctgggcacgagacagatgagggcgtttgcaccagggaggaggatggccaaaccagcagccgtgaaccgctg

SEQ ID NO: 191182 - DNA, 414 bp, Zea Mays
cgcctgcctacttccactacaccggcctctgcgccacgtgttcttggcttcttgcaacagccgcctcttctgttacttggcatcgttgtctcggtcaccccggtcgtgatgtgatgtccaagctctccagcagcacctctggttcaggttgtaggggatcttttgagcacctctgtcatgcttgtcagttaggtcgccatgttaggcttcccttccccatctcctcctctagagcaacaggcacttttgatctgatacactgtgatgtatggacatctcctgtaatcagcatttctggctataagtattatttactcattcttgatgacttctcgcattatctgtggacttttcctttacgtcaaaagtccgacacttatcccaccctgtctcacttcttcgcttgggtctcca

SEQ ID NO: 191183 - DNA, 291 bp, Zea Mays
tgaattcgtcgcccttttacggaccgagtcgccagccatagacgagcacaccggatcaaaactttgctcgcagattgattgttgatccagtttgacttgcctctccgtttacccggcatgcatttgtttccaaattccaggcacgagcgaagcaatcgatcttcttccatgcaatgctaatgctacgatgctagccaggcagtgtgtgccagtggattggcgacgcacttaccgctatctcttcttccagagctggacgacgagggagaacccgccgccatccttcagcgt

SEQ ID NO: 191184 - DNA, 455 bp, Zea Mays
tgtctgtcggctcaataagtctatggtctgaagcaggcgcctcgtgcttggtatagctgctttgctactcactcactctggggtttgtcgaagccaagtcagatacttcgctgtttatatatcatcgtcggactgatatggcttacttgctgctttatgtggacaacattgttctcactgcttccagccaagaccttctgcgtcgcattatcactgctctttagaagccattctccatgaaggatctcggtactctccatcatttcttaggtgtggctattcaacaacattcagagggccccttcctttcacagcagcagtatgctctctatattcttgagcgtgctgatatgtccgattgcaagccgtgcagtactcctgtcaacactcatgctaaggtctttgccatgaccggtaccactgtcagcgacctcactcagtattgcagcctggtt

SEQ ID NO: 191185 - DNA, 469 bp, Zea Mays
ccctaataagcatatttacccccacactagtaacaaccatgatttaatccaaagtaattagatattgtttagtctaatctggtgatatcgatctaatctagactccatctaatctactatgatccaatctaaaatgagttacctaacaggatagtcaatcctggtggaatacattagaccctgctcctataaacaagtttgagatcttagatcaactcgaccctacccaacaacttgacctacaggttacacaactaattccatctagcatatagctattgaaccctctacccatcttgtcacaaacccggatgaagacaccaaagctcaaggaagaaaggatcaaccgcgtcaaggaaggataagagtcaagccaaatctggtcttcagccccaactcaagccttcaaagatcaagctagatcatcagatgaatcaagatccacaaatcttggatggagtctttcctt

SEQ ID NO: 191186 - DNA, 399 bp, Zea Mays
cagctatgctggcagttatggatctgtttgagtacattatagagttttctttttcttggttgtattatgacataaaatcattacttatcatgataaatccagtcctagctacttctgttaatggggattcctttcaagtactattagatcaactgatgcatgctatatgccacaaaaatcatgatatatcatcaagtacaggaggaatgccccatgctgcattgagtaaaacacaactgaaaaagagtgtgaattcaaatcttttagcagatgagaagtggcatttgataggcgcttctgtgtgggttcggttgatatctgtgcttgaacatcgtctaagggaattctttgagaaagagggacttgaacatgaagctggtgttagtggttcagaattca

SEQ ID NO: 191187 - DNA, 537 bp, Zea Mays
cctccatcaaactactcacagccaatgcaaggatcagatctagatgttaggaatatggatgccttggatccatctaaggagtggttggactcaaggttattgtcaaatacggtagagccatcaagttcctcaaatggaggaggcacatctgttgagaaagacaacattgaaaaaacagaacgcttgtcaggcattgacaccgtcacccctggactggataatgtccagggatcaaatccctcagcagagccatcaagttcctcaactggagaaggaaactcagctgttgaaaaacacagtgctgaaatgacagaatgcttgttaggcatgggaattttgaaccctgcactgcataatgtccaggtattgagtccctcgacaccaaaagaatgcttggtttctagcgcagacaagtcagatgtagcaaataggtcagatgaaattaatcacagtctcgatgattttaaccaaagtaatcccaagccagtgctgaagggaagagtctccaaaatgatgtgcccaagacttgcgtttcaa

SEQ ID NO: 191188 - DNA, 1999 bp, Zea Mays
tggttaaggggtaaggtgaaggctgtgacatctggggattgtcttgtaattatggggtgcacaaaggctgagatcgaacctgagaagtccatcaccttatcctaccttatggccccaaggctggtaagatcaagctgcacttgatgaatttccttgtcggtaatgagcaatatttgtggccttttcacagtttttatttgtttcatgaatcagtaaatcattgggttgctctagacaaactaggttattaggttgaggttatgcttgaggactaatgaatgcgggcaattctcaagtttttttggttgcattttgttactaaattttgcagttggaactatttactgagtatcaattgtagcttcttgacaattgacattcttctcatttctctagttttcatttttcgcttgtttattcatggtgctataggctcgtcgtggtggagttgatgagccgtttgcatgggaaagcagagagtttctgaggaagctctgcatagggaaggtgctacatttgaacttcatatcttctccgagctctcatatcattcattgtattcttttttttttgacactgcaaaattataatctcctgttaacaggaggtcacattcaaagtggattatacagctcctaatattggacgagaatttggaactgtttttctatgtgataagaatgttgcatactcagtagtttctgctggatgggcaaaggtaagaaccattctactttcacctttgagtttctttatcatatttactgtactaaactagatgtgttactgatttattcttctacttccttaatcaggtaaaggagcaaggctccaagggtggcgaacaaaacccgcaccttggtgagttgttgaggttagaggaagttgccaagcaacagggtgttggtcgttggagcaaggttggcaatttttcatcttgaccaacttattttgtattgaatgagatatgcttttcttgattttgctgttgtgtgcttcttatctacatccaggaacctggtgctgctgaagagtcaataagatatcttccaccatctgcaattggtgaagcaagtggttttgatgcgaagggttttgcggttgaaaataaaggcaagagtttggaggccattgttgaacaagtacgcgatggcagtactgttcgtgtgtatttagtccctagttttcagtttgtccagatatatgttgctggagtacaggtacgctactcataatttggtgttgttttcttttatgtttttataaatttaatattaattagaaataattctaggccccatcaatggggagacgcccatcggcacctactgtaattgctgaaactgatgatactgctaatgacacgaacggtgaagattctgagggaacacctgcccaactgactacagcacaaagacttgttgcatctgcagcttctgctgaaattccaccagataggtatggaagagaagccaagcacttcacagaggctagagttctcagcagagatgtaagctatctttttctaatcttcctctaatttcttggtgtgaataatttgttttgtgacttggcctaacttttccttataaaaaaaaccctaggtgcgtatcgtggtggaaggcacagacagctttagtaatataattggttctgtgtattaccctgatggagagactgcaaaggacttggcccttgagcttgtcgaaaatgtatgggcaatactatccatatagttttttttgactatgtatggtatcaggcatcatcatgtaactaaaactgttaaatatgattgctttcacattcttaaattgttaaatcatattgcattaaaaatttacataccaacctttgtgttacaggggcttgcaaaatatgttgagtggagtgctaatatgcttgatgttgaagtaaaaataaagctgaagaacgcagaactacaggctaaaaaggatcaattgagaatctggacagggttcaagccacctgtgacaaa

SEQ ID NO: 191189 - DNA, 413 bp, Zea Mays
gatgaagatggcgctttgttcctggcacatggctttatcagcctggaacagagcacgccggcgcacagctacacggcacagcacgtcgagttctccaagccacgtgcttgtgcctatcttggcgtggacgaagaagtggacagcggttggtacctggattccggagcgacgcatcatatgaccgggcgccaagagttctttgctgatctgaacactagcgttcgaggaacggtccggttcggggacgcgtcgaaggtagagatcaagggcgttgggtctatcatcttccaagccaagaccggtgagcagagggttcttcatggcgtctactacattccggcgctgaagaactctatcctaagtctgggacagcttgatgaaggagggtccaaggttgtgattgaccatggcgt

SEQ ID NO: 191190 - DNA, 800 bp, Zea Mays
agaaatatctactgatggccaagatgaggaaaaggttactctgggagatgcattgtccatgaatcggccttctgaagctcctccaacgtctgttgaagagcttcagaatcttgcaggtggagcagatattaaggtactgaaactggatctcttgttgctatcggaacttcaaaatatgtctcatgtattgcattggttccatctaattttaagagttcttttacaggggctggaagctgttctagataaggctgttgaacttgaagacgggaaaaaagtgtcacggttcgttaagcttgttttaagttgtgcttagtaatctgggtttttgcttgtcgaaggtgatgctttggggacttagatgtgacagtaactaactacctttgcccctccccctctgttttttccagtggaattgacctggacactgtgaatataatacagcgtgatgcactattgctctttcgaactctctgcaaggttggttgcttgagtaatgttactttagtgggagctatgagaaagtagcaattatatacttcctgcgttttgtcatccttttagatgagcatgaaagaagaaagtgatgaggttgctaccaagacaaggctgctatcacttgaactgctccaggttagcttacttctttggggttgctaatgttcatttttgtttgttttgatgttatttgtagtcattctctttagggattgctagagggagtcagcaatgtgttcatcaaaaattttcacttcattgattcagtcaaagcatatctttcgtatgctcttctgcgagca

SEQ ID NO: 191191 - DNA, 324 bp, Zea Mays
ctcagctcaacgaatcccacgcctccgccctcaagcaccgcccgggtgattcgtcgacgcacgccggcaggcaggaacttcatcctccttcccctcaccccccatcaccgtcgtatttacctcaaacgcttcctcgcttgctcgagtgccccccgagatgttgcgtcccttcgctgcaacatgcgccgcccgacaggaactgcctcctcccccctcttcagatgtcgctgcggtggtaatgggccgcgtcgtcaccacgggtcgatactcttccaaaaataagttgaacgggcgcgcagtcaaaaaggggaatccggcgagccg

SEQ ID NO: 191192 - DNA, 761 bp, Zea Mays
caagatgctccttttgctcaagatgaaaattctccttcagtgcctagatctgttaacaaaaaggaaaccaaaggcaaccgtagtaagacaaattccatgaaatcccagaaagactccgggaagggtttggtagttttcaagaacatcccacaagtcaagggtattataagtagaacatctttacgaatgataaaagagaacaaaacattaactgcattccttgcatctgcacagagcactttggcaggcacttcagaggtagccagtgaaaaggactcacaaacacccatgttagttccaactaaaccacatcctggacctttctcagtcaaaaaacgatattctccagcagtggtttcaattggatcactttcttctcctagctgttcctccaattcatcatccagtgcaaagggcaaggcagagcctaggcagtggatggaacctgatgttgtacacttctctctcccaaatactcctgcagagggctttgaatttcatttctcacgtgaaggcttgcagaccacttggattccaaaagatagaaaagaggagctggctctaaaactagtccagcgcttgggtgagttaaagctggaggtgcaagtctggacagattgggctaatgagagggtgatgcagtcaacaaataggctggtaaatgaaaggactgtacttttatctcttaaaaaggataaggcagactttgaagagcctgatgtgtttacaagaaagaagcttgaggagacaaaaagggcaat

SEQ ID NO: 191193 - DNA, 476 bp, Zea Mays
cgagaattcgagcactagaacctaggatagagggatccgttcatgggcgccgccgcggcagatttgtgcgtcgccgtgtgagtcgtttgcctcggccctgtagcgtgcggagggtgggagatgatgtgtaagccgtagatcttaggatgtgtggcttggattggctcgcgtggactgttttggccaaactgatctggttcgtccgatccaaatcatgcgcgtgtgaatcaacgtgagcaacttaaaatctgggacgtcgatcgttgatccaaggacttgcaagacgtgccgatctgttaaaagaccagtttaatcttcgccgtgagttttagatccgacggccaagatctctcgataccccttcgcgatggtcatttttctaaagagtcctcgggaaataagaaaatagaacccgccgtcccatattgatgttcactgtgtctaggataagttaccagtgagtccctgcagttttc

SEQ ID NO: 191194 - DNA, 370 bp, Zea Mays
actatgttctgcatctgagtccaaattcacaggtatggaaggtatattattcgaaccctgcaatggtgtactggtattggatggtggaatgcaatcaggaaatgggtttacttctggtggcctaagaggattcctcacaaaattcaaataatgattccagtacatagctgattgagaggccggaatcatggaagattgggaagaagtattccctgtatgcatgggtgcccacatagttgtcggaccttgagcagggtttggaaaattcagatttcccacgaggttacaatccatagcactctgctgcatgtaagccgtgggccacatagggggtggaggaacaaactgctggccaattgatgagtttgac

SEQ ID NO: 191195 - DNA, 328 bp, Zea Mays
tcagctcccttattcgtttcatcaacagatatcttatctgatacttgcataccattcattgacgagcagttactgttacattcttccttctcagaactggaaccgtcaatgttgcattctttctttttaattttctttaattgttcaaaatgctttccaagacctttgacagctgattctttataagcctttgttgcattccgcttaacattctcagatcctggagaatcctttttctgtaactgttgtagccaggaggacccaagttcccatatgataattctagaatttagttccgtgcggtcggtagtacaccagtaacaagttc

SEQ ID NO: 191196 - DNA, 290 bp, Zea Mays
gcgtgatcagcctaattacatagtctaacagtctgatacagattctttatcccctgctttggaccaagcaagggactgcactgcacaaaaccaacctcactttgctaacaacagcacaaagaagacctggctaacacggcaacactcaactaggacaaattggccaacaccttgaacgggacctaaatctcttggctccagcaaaacaccaaagctgatgttcttcggcaaagtgagcttaatgtgtgctgtattttctccctatttatctcttgtagaatgtgttggct

SEQ ID NO: 191197 - DNA, 597 bp, Zea Mays
tccccaggtgccacaaatggtgctcaacaaccctcacctccacgtccaccctaccatcgatagcgaccactacccatagaccccgcattcccctaggtccggactgggagggagggtgcgtgtagccagaggccgaagggatagacgagcgcgaccacgagcccccaaggtaggagtggaggagggtggtcgcaaggtctggccccgggggtggatctgtagagagtggtagcggcatcgaagcgaggaggtgcccccttggtgagctcctcgaggatgatgttattgcagaccttggcgaaagacaaacaatatcgaatgtaatccaagtccggaggtgatggtagcgcttgttgagatcacagagaaggtcgaggacgagcgtgcaatcggagacaagcaccccgaggtcacaaagggaggccacaacgcctttcatctagcagcagtactcagtgatagagaggtcctcttagatgaaatctggatggcgacattgaggtggagagcttgagtcttgcggttgctgaggaactgctcctcggtggcaacctaggcctgacgagcagtgccaccacgctcgtgaatgatatcttg

SEQ ID NO: 191198 - DNA, 417 bp, Zea Mays
gggggataaatggaggcaatggcgacttagtgagacagctctcaccactgcattatgcctgctttaaacttcactcaaatgtcaaaactggtgtttgcttatggctatgtgctgcggtcttccttgtgccaagtcagatgcaacatgatctggtcaaagttgctttttattctgtacccctaattgctttttaatttgcaatgctctttaagattttctagtttggtgtgtttaaattgtgatgttttacatttatcaaactgtttcattactttgtagggcaactttgccaaggttaccaactataaatttggtttcctttttttccctgttgccaataccactgttgctactggatgtttgaactttccagtccatgagctattttatttggtttcatggataatcatccttgcc

SEQ ID NO: 191199 - DNA, 358 bp, Zea Mays
ggttttggttttggtatttagcactggggcgaggacttacctgatttaggtgtgttggaggtcacatgaaagggaggttggcttggtaaagttcgcggtgtcaaggcagtatgggcactgtccagcgtaatgtgttgggatttatgggcaattgatgggtgttctcgttcaagatggcttaagctaacaacagatttgatagcatgaagctgttgaagagggatgatcatagggagggtctttgaccctattgcggttgcgaagtccatatgagtgtgagattgggggttgtgttcggaacctccgattttgagaatacgtcgtggtggctagtgtgttttttcggtggcacaataat

SEQ ID NO: 191200 - DNA, 329 bp, Zea Mays
gtacgcgccctgcacttcgcttcgcgctcggctgctttcttctctagcgcgcttgctgacaaaaacgacaatgccgtaggtccgcgtgaggtgcttctcagagacgccggcagcctcgcttgccaggcacccacttctcacttttgcgttcaactcgctgcaggtgcgaacattgcagcctccgattccttataagggctgaaaagtgtacgtcaaggaattagttgtgcattcacgtgctcacgcgttgttttgttgttgtgtgaccgatgaaggtgtccttctcgtttgaggtggccatagaggttatgactgagcttgtcagccag

SEQ ID NO: 191201 - DNA, 351 bp, Zea Mays
cggggagaaagcaaccaactttttggaagattggaagagagaatcagctcagttgaatgcttttaggagacagtggcagcatagaagttaaaccaatgctggaagatctcatacgcaaagctcaacgcttggacaccgagacggcaggtcttgcagaaaaagctcgcaaggaacaaccttcggacctcaggacagatgaagaaggggccctctggtttagtaaccgtctgtgtgtgctgaaaggagaggcacgaggaatcctgcttgacgaagcccacaacttagcctactctatccacctagggaccaccaagatgtacctagacctcaagaccagatactggtggagag

SEQ ID NO: 191202 - DNA, 299 bp, Zea Mays
tgagaagcgagaaagacatagcacaaacatccaaaaagacgaagactggagtaatctagtggcttgcaacagatgcgttcatatgggagacacgtgctgagatcctagaataacatgacgaccatgattggtgagctggccagctgaaataagttgcatggtcaaattagggacataagtaacattaggaacatgaataaaggaggatgaaagaatgccatgtccaacaaccgaaagaggtgagctatcaacagtttgaatagtgagaaataggagggtaaatggaagaaagatgggta

SEQ ID NO: 191203 - DNA, 1032 bp, Zea Mays
agcagatctgcaaggcttataatgaattgccaaaaacatctgaagccgcaaatgtagcattgcctgatcagagtgaaaagactacagagcacctggtgaggtcacctgatattggtgggactccaggactgggacaaatggaagatgatccccctactgattgctcaagtacttcagggcaagggtcagggaccgaggaggatgtcaaagatggtggtcatgaaataggtgataattctttggcagttcctcaaaagaaagcatctttacaacaggatcctaagcatcccaagacaaagaagtctgctgcatcaaagtctggttttgacatgtacacagaacaggagcattcaccaacatctctgcgggcagaaaggcagattgaagaggtgaaaattgaagaagagagctgtcatctagaaggttttgttttggaacctaacttggaggtggtttgcgcccttgaagtgccaaagaattttaaatccaacaagctgttgaggaatgctgaaagtaaggaaaatgagcatgttggtgttggtagtcctactggaaggattgctgttgaggccgcatctgatgttgtattaaacatgagtgctgaagaagagagcagagaatttaagaagtcaaaaatcatgacaaaacaatcactgactactggttcagagaaaagggataataaaattgtccatggaaagcctgacaagcaattgactggaaaatcatctgcagggttttctctcaatcagaaatctctgacaggtagcgggcagcacaagatggacagtagtgctgatacacgtccggcaaagaaggcaagacttatggacagggctggtgaaacagataagacagttgccaagagtgagacgaagttaaacatcaattatgaaaatcataatgctgtgaaacatgagcaatctactgctgtggaaacatgtaaaaacacaattcttaagactggtatcggtgatgatagggcacggaagtcaggtggtgctgtatcacccatatcaaagcttcattctg

SEQ ID NO: 191204 - DNA, 282 bp, Zea Mays
tccaggattaatgctcaataaaatggattggttacaaagacagtgtttacagatccctccgttggtgatgttctcgaatctatatcacctttcagggacttggattttctggctagccacgggtcaactgtgatgttattcgacattcacacccgtctcgtgtgctatgaacttacagtgaccacttgttggtaagcctccttctgtgtgttttacccaagatggtgcatctgattctgtttgggtaaaatcgcgtatttaccgctcgctcaacagactcag

SEQ ID NO: 191205 - DNA, 436 bp, Zea Mays
ctcagttgtatcttatttggtgggggagagaaagcgcatatagctcagtttaaaggaaaatttaggtctggagtccttacacaccttagcatgcaaggaggacgaagctgtcgtggctgtgtctggagcgagcaaatgtggtggaactttaatagaagagatttattcccgtggaagttggaactgaaaacaaatgttgaaatcatgattcagtttatgtactcaagcctgctcatgatgtgaattaattggacaaaaatgttggacagatccgatggcccttgcattgatgtcacattaattcaagaggttatgttctttttcctgaaaatgaactgtggtcaaggtctgagaattaaccatgtggttaggttccatactgacctgaaaatctgaaataggtactttgcaattggtccttgaaattcgatcaaac

SEQ ID NO: 191206 - DNA, 698 bp, Zea Mays
cagacacactagtgatgggtgaggtccagagatcacagtgaattaactgaaaattacaggtggcgcgtgaggaagaagtaggaaatggtagacggacatgtcgtccgagttgacaagcatgacaaggatgagtactagtatttttattacaagaaattgcggatgactgcgctaaatgtgataaaacggcgtgaccgggatgtccaagtcgttggaccatagggtagatgcaagaagagcagaggccgggaaccgcagggggtatagtggaccagagctgttacatctgaagatctcgcgccgagtgggtagatccttcacagagcagccaaaaggatcaaattcaacagagcaattattatcagtggtaaattgacggacagaaatcagatccttaatgagggagggggaaactaaaacattgtgaagagaaagattatagggaagacgggtggtgccagtggagataacagggattagatgaccgttgccaacgacaatatgagtaggaagatgctgggaagaggggggatgagatattataccagcgtcagatgtcatgtgactggaggcaccagtatcaaagtgccactcttgttgaggcggctgctgaagagtgacagtttggaagttggcagcgagggtgtgttgatcccagacgggtgcaggcgtagaaggatcggcgtaggcagggggcg

SEQ ID NO: 191207 - DNA, 515 bp, Zea Mays
atccccgtggtgcgcggcggggacggtgcctatgatatctcttaccagaggatttgcatcgccctggaggacggtggggtgatcgcgctcgattggcctgataatttgtacttggacaaagagcatggactggattccacggtgcttatggtgcctggtacgcacgaggggagcatggagaggaacattaaggtgttcgtgttagatgcactgaacaacgggtactttcctattgtaatgaaccccagagggtgcggcggctccccggtcactaccccaaggtgaaagtcttctgcttatttaaaaatgtcttctgcttattaaaaaaaggcagatctagtcgagacgactctcgcatgagtgaaatctggaaaggaaaaacggaggcaagtttttcctccgtaaacgtggagcgactgcttctagcctgcgacctagtgacccagacaactcacaccagtgcactaggcctgcccttcagtcttctgctcattggggatgcttatttgttgccc

SEQ ID NO: 191208 - DNA, 293 bp, Zea Mays
gcccattcaaattgattcagtcggtggtaaagttcgagccgatagtgtttgcttgaatgtaagcgtggaaataaggggggtagagtttcccgctaacctcatagtaatgggtactcagggaatagatgttatcctagggataaattggctagataagtaccaagcaattatcagttgtgataagaggacaattaagttggtgtccccagtaggagaagaagtggtggctgagttggtctcacccgatccaaggaaaggaggttgtcatcagatggctattgatagcagtgagg

SEQ ID NO: 191209 - DNA, 374 bp, Zea Mays
ggaagaattgaaagtgtggataacaacagtgcagcagccttcagacaagttagaggacaagaatgtgacaacagcgatcctaaatcctatggagactctactactcgagtgaccagaggtaagacaaaaacaaaaggtttgatgtttgatacctgatacttctttttggttttactgaattatcttggtctgacaaactatggtgctctttacgttaacaaaactatgccgctctgaaactaatataagaaaatattgtatctcaacacttaaattatcagatcattaatgttttttttttcgaaaaacgcaggagagatcattaatgttttaatcggtttataaatgtacagtcatcactatgctgacactga

SEQ ID NO: 191210 - DNA, 3368 bp, Zea Mays
attgccaaatagcgcttgctctactgctcatcatgaagaggtaataatcaaatgaggcttccatgattttcatgcagcatatgcgtttttcatgttttatttagtgtgatataagtaaccatgtgcttgcagttaatgtttcttttatcctcctccaggccagcaagtcggtggaagatggtaattctattgggattcaaggtgcatgcacttcaaggaatactgaagctatccaatgtgatgaaacatggtatgatgacaacatttgtgttgtttgcagaagtagggaaatctcagatatcctgaagtaagttactctgcagtctaattaagttatctctttttgatgggaacatatcttgtgctcaaaggggtactgtgctcatgtgcacattttaaatttgggactttcatcttgaatctaacagcagcaccacttttatgaaaatcccctcccaccatgggagcgaggtgaaagggtttctttataaaattgctgctgctgtgagatgcaagatgaatgtcccaaatttaaaatgtgcatgtgagcacagcaactctttgagcaccggatacgtcgccctttttgatccatgttattttcttaataccgaaatcacacaaatatgaacctatagaatcgaaagatggaacatgatcatgctaaaactaagcagcttctgtgatagaccccccttctaccagttgacttgatcacagttgcaatcttgtttattctttacgcaggcaaatggtactccgcattgtttcagttatctgtgtttcactagcactatctggttattttactcccatcattggctgacattataagcgataaaacatgctctagtcactatgcccgtccatcatatttatctgttcattccagatgtcatgcctttcataatatactgttgaaaatactgtgcatataaaatcagaagtgttaaaagttcgtgttagaatacaagtgagttgcccacctctctctatcagctaaagcttttgagttgaaatggttggtgtatgcaactcaatgtggtatcaaagccagaggtctcaaatttatatcctgattagcgcaattaaataaaaataatcgttattagttcatattccacatttgaggtatgagaggcttgatgtgagggggagtgttagaatacaagtgaattgcccacttctctttactagtttaagcttttaggttgaaatggttggtgcatgcaattcaatagtttgattaccagatttaaaactatatatgaataagtgttatttgtcttcaaagtatgactttgacaacaaaacttttgttgtatatttttggacatgatgcaatttgtgttatggatgtgtttttttttttgaatcacatttgttcattttcatgtgatagattcaaaatgataaagacgcctttagtcaaacttaaaatggtttgatgccttgatggatcttgcagtggtacttatttgtaactgtatggagtgaagttgtaggttattactgtcctgaattctgggagactacgtagctaggtttagagatattgtaggctaaagtttgagtttgataattataatattcagatttatgatgatagaatgtaggaaaaagtaaatgtaggcgaacctaacaaatccagaaacaagtggtacaaaagaatgcagtaaagctttcctaaaattgcctacttcttgctacaacaattttagaataaatacattctcaaacgagtgatatgattcatgggtgaacagtgaactctgtttcaaggttattgaacagtttttaggtgactgaaagattcgatatcaggtgaaagataaacatgtgtttttttatctcccatttcggttgtgcttctagaatttaacaccttatagtctttgtggttgatgcatctttcaaacatgttttgtggaacagttcatctctaataccatgctgtaaatgtgaaaattgtgttccatggttcatacttgatttgcagggatcttaataaaactaaaccccttaatataatgatacacagaaaaaaataatatgaagctctcccctgtcttcgaaaagaaaaaaaaactaaccccattttttaatttggtaataggtcttgtggtggaaaaggatgtaaacgacattaccatctttcgtgtatggatccttccttggacgtgtccctaggaatatggctttgcataatgtgtatgaaaaagaggattcagtttggtgtatattcagtcagcgagggaattgaatctttatgggatgtcaaggaaggtaattatatcttataaagcgtatgccagtttttctttgattgttatcattcatttattaattctatcgcctctccattttaggagtggtgaacagcaagcaatatttcgttaagtataaaaatcttgctcatgtacataaccagtgggtttcagaaagtgatatagttgatagcaccccgcaaggttctgatcttatctccaaagttagcaagaagattcataaagaaaaggtgattactcgtgtgatgaattccattgcttatctttttcacaggattttaggctctgcaaaagtatgcatgctgatggattcttttctgattttgatttcttagacaataaggtggaagcaggaatgggctgaaccacaccgtctgttgaagagaagattgcttatgcctcaaaaagaagccgaagttttttttaattcactaggtgataaatttgtatactgtaatgtcgagtggctagtgaaatggaaggatctgggctatgaacatgctacatgggaactcgagtcctcatcctttttatgtactcctgaggccgaggagcttaaaaggagctatgaggaccgctttaaaactgcaagaaaagcatctgatccttcaaaagtagacaaggtatgctatagaaaacatttatttgtattaactggcacactgcaacttcatttgagaagaaagtgattataatctgtgcattttcatcatctagggtatatgctcatccctttgctagtccacaacaatcaacaagctctattagttccaagcaagtttgtatttttctgcaattgtctgtcagtctgtcacattgctttgctaagctgccacacaaataatgagctctattagttccaaacagtccttagattgcttaaagagttcacatttcacaattttcagtgatgctaaactatctatgtgctatacaggctaagggggggatatttcagcaactcgagagactgccagatggttgccctcctggtttagacgatgaccatttgagatcacttaaccagcttcgtgagttctggcacaattcttgtggtgctattttcatcgatgatcaggt

SEQ ID NO: 191211 - DNA, 300 bp, Zea Mays
tagaccatccgactgataatgagcgtcttagattagactcaacttacctcttcgtttatttaaatctgagccatccaatctagatccaacgtccgagaaaacaggataccccttcagcgcagtcgttttgcagaggagcccttaaagaattgcagaatgaacctggcgtccaccactactgctcaccgagtattaggaacattacgtgatggcccctgtattttccagaaattaatgcccagtccagagaattagaaaatccaattagaaaatgatttttaatgtgaaaataaatgccag

SEQ ID NO: 191212 - DNA, 682 bp, Zea Mays
gtcgattaggcgtccaaatcgtccgattagccatctctggtcgaccagtgcgcggcgggctagatgtgctattgggcttcaccgttttttgggcccagtagccgcataaatctgttggcggccctaaaccctaaagcctcccctgtgcctgcgcccctctcctaaactttctgtcctctgccggtggcggctgctccagcctccagggctctccaccgtccaccagcgccggcgtgcagctcatccttgaaggccgtccctgccccctgctcatctacaaggcacaagatgagctcatcatccgaaggtcatccctgctcccctccttcccccttgtctgcactctgcagttttgcattctgcgtagcagtacccatttgtttgcagtctgccctggccctgctcatctagtgttctatacttctattttctatttccttacttcaatagttcttagcttcatagcagcgaccagtttatcccaccagtccagcagcaccaatgatgttattcttaccagtttccatcagtccagcagtagcacatatctagtgcctagtagtgacttgacctctatctgttgacatgttcagagtttcatgctgccggttttattcactggtttcacttatgctgcattgatgctagcctgctactgttatatttcagtaattcagttcca

SEQ ID NO: 191213 - DNA, 447 bp, Zea Mays
cgaagagctcgttgtagccagagtcgtggctggattgcgtggtggcgaagagctcgttgtagccagagctggagagcgtggcgctggagccggtggagacttgggggctggggtaggcctactcggagaagggtcgcctactcccccggctccctcaaagtggacgtactcgatggtgaagtcgtcatacgtcggagtcgtgtcatcgtccaccgccttgtcccaggcccatcctcgcccttcgtcgaacactacttcgcgcgtcgtgcgcacacacagtgttcctgggtcaaggatgcggtaggcctccgagccctccgtgtagccaatgaacacccctggggtgctcctgtcgtcgagcttgccgatgtggccaagctccttggtgaacgcgaggcaaccgaagacccgtaggtgagagaccgccggcttgcaccgatgccaagc

SEQ ID NO: 191214 - DNA, 514 bp, Zea Mays
aagcagcttcttcaataatccatcaacgaccgttaggagcggtgacaatctagctgtctagaaaacgcgaaacttgcaagacccctccgtcgctcgctcccataaaagcctcaatccctccacccacccacctcgcctgcatatcactcgtgtgctcgcaaacaagcgtccgagttggaggcgtggcggcccgttttgcatgccgtagctctcccggtgttcctccccttccgaacccctcgccgcctctccgtctcgtgattcgaatcactgccccattgcgaacgagccgccacagctgctgccagcctcaaggaagggccccggttcccaatcccagacgggccagcggatcgatcgaacaggcggccggccactcgggatcgggtgggtgagtcgttccgcttccgaaaccagcctccctgcgtgatgggcctgcttgggtccgcctgttgccgcctcctcgtcgtcgctcaccgctcgcgtccgcctaatgctgcaggccggggccgcg

SEQ ID NO: 191215 - DNA, 888 bp, Zea Mays
cacaattgtagcacctggtggccgtatggattggatcaatgcgatatgcctgctgttcagttcaggctcagatagaactgaaaagtcagatgatagtaacacaccaaatagctatcagtctggtgaaccttattcatcatctttatttatcgagttggctgatgttgctgttagctatgaacctcattttaaacattccactctcagtgctggagcagccgaccgcaagtttttctcatgccttttagctgcatcatcatttaaactccataataaatctgcatcagcctctgcagctactgattttgatatccaattacgtgatcttggagtcctcatttctcaatcatctggttcaacaaatggtacttgcagttatggtgtagattaccttcgtcaagcaggttatactaaggttgtccagaacacattcattgaagcttctctaagattagattcttccttttggaagcttgaaatatctgattcccaatttgacattggtacatgtcatgacacaacttatggtcttattggtttgggatctcaactccagcagctatatggtccagatatgcaggatgctttagatcatctgcagtctaggtggaatagtgttcagcaagcaaacaagcaaaatatggctgctgatgcatcagacaagtctgagagcagtttggagattttggtcgattctggggattaccagtcagatggacttcttgatgatattattgagaatgcttttaacacagaggattgcatggacaccaatttttgggagaacaattaccatcacttatttagtagcagtgagacggatgatggatttgagctgaatgcggccacttcacatgtatttcctatatctactccagaaggcaatgt

SEQ ID NO: 191216 - DNA, 572 bp, Zea Mays
gggatgagtgcgcatagttgaatacttctttactcccaataggttgcctcgcattttgccattccgtaatgtggtacttctgccccttataaggtgcaaggtacccctttctatttggataacccgaatcgacaagatagtatttacctgcacaaactcaaaatacaaatgttacgtacatgtgatataaaatagtaatgtattgtacaaatgtacaaaatatttatataccttccggtggatgggggaacctgtccgcataagttattaaagtatcctgtagtactcttgtgtcatgaacggaacctggccagcctgtgaccacaaatgtgaacctcatatcgaagtcacatacggccattacattctgcgacgtgtaaccgtgtcggccaatatatttcgcttgttccgaagccgggactgccgctgggaagtgactaccatctattgcgcctatgcaatccttgaagtgtggccaaaacctcgcctctcgcaaacgatgatgaatctcgacaaaatgtgggtcttttggcttgattgtgtcagatgacatcttataaagtgcattaagg

SEQ ID NO: 191217 - DNA, 333 bp, Zea Mays
ggcggcgcacctctcccctacgtgcggtctaccgacgtcacctcgcccgcagtccccgtgactctcggttccccctgcgtcgccaccacgtcggctatctgtcctagcccatccctggcctaggctctccatagtgtacatcctcccaccactaagggccccgctcttgccttggccgtcgacgccacctccgtaacgatcaagaccttgttgtctcccccacctcctagtggctctataggggcacctcccctggctctcttctcgcaccacgtgccttcgccaccccctccctcttccactgattggattgtcgactccggagcctccttt

SEQ ID NO: 191218 - DNA, 481 bp, Zea Mays
agaagaagaataagtcccgctgatccgtaagaacagccgacattatagaggtagcgaggggggagcgatattccttctccagctttgtcggctcttgtcagtcttcagggactgtcaataacaaattttgatcaagcccttgaggaagtcatccccgaggatatgatgtccgagccgactaccgatgacgtgatggtcgtttgttcagatgttccagacggcggactagaggtatcccgagcggtgtctcgcgcatcgtcgtctttggtgggcagtcttcaatgccaagatgctggcccaagttgcccgactcccatggaggtgacggaggagccctcagccttagagatggctactacagaagatccagcatccgagggtggtgctggcagttacccagcccccgagggtgttgccggtagtgatccggctctagtgggtagcgcaagctgcaacccagcccccgagggtgttcaggtgg

SEQ ID NO: 191219 - DNA, 439 bp, Zea Mays
tgggaacaagatgttcacaaacaggcaatcaacattgattgtgatcaaccaagagatactgaatcaaatgtacaacacaccgttatctgacaagatcaacatatgacaaacaataaccattgttgagtaagttctcaagaaggcacgtaaattttaggtctccgaatgggatgggaaggtaagaagtactaatttggttcaacattcttccgtaaagcataccaaagtgcagggaagcaaggattcaagaacccggaaccctactgctccctacataagagacccacacgacttcaaaatttgcctggaaacttttttttgagaaagaatttgcctggaaacggacacgtacaagaaacacaatcatcacatttttgcagttcttgtaaaaccgacacagacaataaacatccagcgttagtgctccaaaaaggcaaaa

SEQ ID NO: 191220 - DNA, 366 bp, Zea Mays
ttcaaatcctccacttccgccttgagttcgatagggggtgttaaggcccataaagcccatatattcttgtctgcctacatatatatgctacagtacccgagggggttattatctcgcctaatcaaggttagtgacaatatgtatctagtacttgcgtaggattgtggcaatgccttgccattaagtgtttgattttcttcactgtagcattggttcattttatgctcatacatatgcatcgtgcatctcattcaggtacgttagttgattacgcggagtaaagaacgtggatcaaagccaaccacaagacgatgacggcagaccaacctgaagatggatggacagatcaagtgctaggttgggaga

SEQ ID NO: 191221 - DNA, 765 bp, Zea Mays
cttttctctctgtacattcgtgatcttggccctgctgttgaatttggagatgcacactggcttggaagacagggtattgcattagcgctccactctaccgctgatgttttggccgctaaagatcttcctgttgtcatgacatttctcatctcacgtgccttggtaagtaatttgtttttatggatcttatcattgcagatttgcagtgccacttacatagttacatttaacttttaatgcttctcatgacgaatctacaggctgatccaaatgttgatgttcgtggtagaatgattaatgctgggatccttattattgataggcatggaaaggaaaatgttcctttgctatttcctatttttgagagctacttgaataaaagggcaagtactactttcctattaataattgtactagcattattcaatatactacgttcctattagtaactttactaatatattattattgctccttgttttttatttgctatgcaatccatatgtaacaggcatcagacgaggaaacatatgatcttgtgagggaaggtgttgttattttcactggtgctctggccaaacatctatcaaaggtgtagatggatactgaactatcttttgtttacaagatacattcacagtactaaatatagcatttgtaacaggatgatcccaaagttcatagtgtcattgagaagttgttagatgtccttaacaccccatcggaggcagttcaacgtgctgtctcagattgtttgtccccact

SEQ ID NO: 191222 - DNA, 360 bp, Zea Mays
ccgggtggttggccaattgagcaaaaactaagggatctcatttggtattcaaaagaaacttgtgtcatgaggaattgcatgtttctacagtcattgggtgcccaatacgctgcttatcagataagcagtttgaatgataattcattattgttgggtcagattagtctcatccacccatctattcttcctgctgcaagcttacgcgaattacagtttcctacggttaatggtcagcctgtcaaaatttgtgtcactggggcattcaattcatacttagctgatcagatgcttttctttgctgcaaactgggtaatggagcaatgtactaaaaacgatcttgaactatatggcaaatggttt

SEQ ID NO: 191223 - DNA, 497 bp, Zea Mays
gttgtttcttactgacttactgttccctcttgatatttatgtgtacagaggacattaaacattggtggatttgggcctactggtcatctcccatgacatacagtaataatgctatatcagtcaatgaattccttgccactagatgggccatggtaagtttctgcacacacacataaaaaaattcttctaaatgtcatactttctctatattattaggtacaaggaatgcaattcatgccctccaagatagatgtttgtacagagatcccatgccaagttttttcagtagtttgaagaaaagaaaaccataatatctatctttttcacttatactaatttctaggttcttgatgtgcttaattatttgtaagcggcgaatatcttgaactaatatagcatttacctgcagccgaacaatgaagcaaacattgttgcaccaacaatagggaaggctattctaaaatataaaggctactttggtggtcaatggggctact

SEQ ID NO: 191224 - DNA, 562 bp, Zea Mays
gctgaatggacgatacagggttacgtttttcaccaagatttgaaggtccttcccctgcaacattatgacatgattttgggaatggattggttggaggttcacagccctatgcatgtgcattggcgtcacaaatggctttctattacatatcatggatcttttgttacattgtatggctcaaactatggggctagtgagagcttgctaattcagatatcatcagtgtctgtacccgagcctgcaagtgagagctccaagttttaccctgagattgagtccttactgtcccagttttcttctgtggcttcagctccaacttcgttgcctccagtaagaagttgtgatcatgctataccattattggtgggagccaaaccagtaaacatccgcccttacaggtacccacctgcacttaaggatgaaatcgaagcacaagtcactgttatgttacaacaaggccttattaggcccagttcctctcccttcagctcccctgttttattggtcaggaagaaagatggctcttatcgtttttgtgtggattatcgatatttgaatgcac

SEQ ID NO: 191225 - DNA, 792 bp, Zea Mays
ggctcagacttaaaatgacgaaggggtattctctcttctaatctggaccctccgctccctgatcaacggtccacaatcgcaccagccgaatcgttattgcgcaactaatcacaaccgtcgcagatcgatccaatggccatagacaacccacatccgaccgatacgcccatctaatctacgcccttcatcttggatccgatggctctctagcttcttctcccccccggtgttcttccacggaggagcatctcaaccccgcggtggcacacaaaaccggcgaccagatcgacgcccaagagccccaacagctaccccggatggtgctacgtgtattcgagacaaagaagaaactatggaagcaattcttaccaagcttagcggcgcggaatcctctggccacggcgaaaacggatctacggcggatttaacttcgatggcgagaaattcccaaggcgcgggccaaaatttgcgagcggcgcggccccgaggtcatccatcccagcgtctcgcgtttgagggagatccgcacagggcgttcttattctctctccctcggtctctcacatcttcttaggtgctggtgttcatcctccgatcggcaatggcggtcgaagcggccatcggttcctggtttaccgtgccatcttccacacaggttgcgcggagcccagaggagagggataaggggagggaaaacccacgccatggatttatagatgggtgaagtccgctatgctcgaaggaacggagccgcgattccgtcgcggaggttgggatcgtacctgagctgtg

SEQ ID NO: 191226 - DNA, 377 bp, Zea Mays
ctttgtttaaggcaattcgtctctttccctttggcatagacaaccgaacgttcattatgtctttgaacagctactatcgaacacatgaacacacttgatcagccatccgcttcggcgccggcacatgcgtcgcgttatgcaatttcgttgcgttctcagcaggttcgtcaaaagcggccaggttagtgactgtcaagcttttgatactgcttgtatctactacaactctatgctcatcctaagatgcgtgtgcacgccatttgtaggcgacaagtccttactcgactttcctacgactgttgccactgctaacagacaccatcgcaaacagagaatgcgtcgtacgcctgcgtctgctgaacgagcatgtgccaaca

SEQ ID NO: 191227 - DNA, 326 bp, Zea Mays
ggtttttgaacgcattgaagatatcatgtcagaggcaacatttccagaagatcttctttccttggagatgacagataggttgggatggttagttgagcagaagaaaattgcagatatgatcttctcagagcatcagaaagttaaagaaatcttgagctctgttgacattccacattctgtcttaacctctgaacttgattcccagatcagttggcttgccagctcactgaaccaggccaaagatgatgcggtccggttgcgtgatgagtctgctgaaatgttggctaaaatggctgcacatgaatcaaagctggtgtcaatgcatg

SEQ ID NO: 191228 - DNA, 271 bp, Zea Mays
tggtcctctcctagaactcggggacgatcactgtcgagctgcaggacatcattcgtgagcgcggtggcacaacttgtcaggcctaggttaccattaaggagcactttctcggcaatcatgaagcccgtgtgctccacctcgatgttgtcttttggacttccatccagggggacttcttcgtcaatgagtactaccgcttgatgaacagcatgacaacctccctatgtgacctcgaggaacctatcttcgattgcacactcgtcctcaacct

SEQ ID NO: 191229 - DNA, 354 bp, Zea Mays
acaaccgaagacgcggaggtggtcataggtagggtgagagccgaagagggcaaaatggggggtgccataagcaagggttttggtgggtagccgattaaggaggtatgtagcggtgtgaataaggatgaaaacggccggtaacggtcggaaaaaacctctcaccgttttcacccgcataaatttttgttcggtcggaatcggtaaacgggaaagtcggaaacggataacggccggtaaattccggtatatcgaaaacggataaatccgagcaaaatagctcgaaattgatcgggaaacggtaactgtaatcggaaaagctcacaatacacaaatcctaaccacacagatgttcat

SEQ ID NO: 191230 - DNA, 284 bp, Zea Mays
atcctcagtgtgtattctattatcaaaggatgaggtaactaattcaatttaactttggaaattgtacattggcatgattgtattaacatttgtatacttggatagctggtcgtcttgctacactcttgtacgttggcaacatgtgataagataaaacagtcagcagatgcttcaattcaagctattatcatgtttattatcagaagaggcaaggagctacgtgaagctgatgtctcgaggttagtttataaaagttgaaattagttcattaacatttttatact

SEQ ID NO: 191231 - DNA, 449 bp, Zea Mays
taaggatattatagaatggaaatcacccacttcattgcatcaagttagaagttttcttggattggctggttattaccacagatttatcccggatttctccaagattgttaaacccattactgggttattaaaaaatgatgttaagtttgattggtcctctaattgcaacgaggcctttgaacaattgaaagtattgttgaccactgcaccggttttggcccaaccggacattgagaagccatttgatgtttattgtgacgcatcaggtagtggggttggattcgtcctgatgcaagaaggacgagtaatagcttatgcttcaaggcagctacaccgacatgaggaacatcaccccacacatgatttggaactggccgcaatagttcttgcccttatgatttagcgtcattatctgctaggtaatatatgtcacttatatacggatcaca

SEQ ID NO: 191232 - DNA, 386 bp, Zea Mays
atagacttttcaaatttccactttcagatcatttatgtgctagtctttttgatgttcttcttggtggagccagtcctaagcaggtaatcaccaagtttcatactaagtgtaatactatgatatttatcctcttatctttggcttccgatgtcaactaatgccttcaataaagtaactaatgcttatatttttctgtctaggttttacagaaacgttcccaatctgatgctttaaaagataggagcatggctcctttttttgtccctcagattctggtttgcatttttaaatatattcaatcttgtcgagatgcttcagtgcgtacaaagattttaagtgatcttcttgatttgctggattcaaatcctgtgaatgttgaatccctt

SEQ ID NO: 191233 - DNA, 285 bp, Zea Mays
ttgttatgcttttaattattatcatatgcacccttgacacctctatatcatacattaatgtttgtctcatacctgccctttaagatcgcccctctttcatctcataccttctttctcttggtcgtatcctcttctttggctcgcgagtttgtaacctcatcctttgttatgcttttgtttcttattgcctttacccttctcatctctcaatcttaccttggcgattacgctatgttcgttatctaaaacctccaatctcccaccttagtttaagcatggtctctt

SEQ ID NO: 191234 - DNA, 304 bp, Zea Mays
catctgaggtttggttcatcacatattgatttggattcagacttggatggaatggataacaaagtaagagctggaggccgttactattctgcaaaaaatgcagtttctgaaagaaataaaggtttcaaacatctgaaaatatttaagggaaacacctctgtaatgctcgctgaagattttgtcccatttggtacacaatcacttcctttgaaaagcacaactgtggaacaagagctagaggagtcttgggaagatgaaatacttcgccggactagggaattcaataagatgtctcgtgaacgcc

SEQ ID NO: 191235 - DNA, 367 bp, Zea Mays
cctctgccttatcgctatgactggtcactagctgctccccgtcttgaattttggctatgaaattttttcttttccgatgacgagaccaagagtggaagagctttgtattagcatccccatctttgagccaggcaattcttgatctagtcctagccaccgagcggattaaggaggcaagagccagagagcatttcttcaagcgcccaagcagccatgtctccaaaacattaagaattctgctctcttttgccacttcaagctgcagcaatatttctctggcaagctcaagttgcagtttgaagtttccaacctttttgtcactccaactttgcagcccttttgttgtcgccttgaattttagggaaag

SEQ ID NO: 191236 - DNA, 312 bp, Zea Mays
cggacggctccgacgatgaacagagacagagagcgtcggccgcgggcttcgcggtagaggagagggagagcgcagagtgagcttggatggccaggaaacaactccacggggcatggggctttgatttatacggggcatggggctttgatttatttggaggggaagagagcagaggggcgcagaagagggcgaaggccgacgacggccatcaacacattaatagtgttggcgttcacaaagaagagtggggagatgaagaggaaaaaggggcggtcatttccgttgcacggggaggcggagaggcatggggag

SEQ ID NO: 191237 - DNA, 758 bp, Zea Mays
ttgggtcccactcaggcatgcccacctcccgctcccctcagctggattgtttcagatctgaggtggcttggccaccctctgcctcctcctgtgttctggatttttctgaagaccttgctagggaggaaattgcccttcgtcgtgctctgttcgtctctgtggctggttcacgtcctggggtttctggttccgacgagttgaaggaggtgaggcattgttttggtgtcaagttggaggacatgcggattcatcagacctaccctgaagatttcctgttgtttctaccggatgaagacacgacaaccaaggttctcaacgaaggaagacctctgaggggaccccgtttcagtttgctgctcaaaagatggtccagatttgctcatgcgtcctcatcgtcgatggctgagttggttgatgttagattaacaggcattccccaacatgcttggtgtagatctacaactgaacagttgctcagggactcatgttgggttgaagcattacattcagaagctatggaaatgagggatttttcagccttgatggtgaaaacatggtgttttgatcctgaaaaactggttaggaaaatggatttacacatcttggaggctgggatagatgatcaggaaaagagattcttaacctataagatctccattgatatccttccacctaagaccctacagatgacatcggctaccccaccacctcctcctccacctccgtcgggaagggaacctgatgatgatggccctgac

SEQ ID NO: 191238 - DNA, 407 bp, Zea Mays
ctgctgcgtcaggtgatttcgtgctcgtttcagatggtgctgtgctgaaggatgatgacaagcagggggaggaggttggcaatgacgctgcgtctgagcctttaatgatgcatgttgccggtgtcgatgacctgggcaccgtggatgttttggaggggatgcttgatcgtgaggttgctgaattgcttcctattcccagtgctacagaaggagatggtgctggtgctgaaattcacagcagtgagtccgatgcagaagctagtacaaccaatgttgatgctagtcctgattatgctgccacacgagatgtcacatctgatgtcgcgcgagttcatggtaaagttgatgacccagactccattgcagacgatggtcatgataaggtagatgaggaagctgatggtgac

SEQ ID NO: 191239 - DNA, 391 bp, Zea Mays
aatgagtggaagctgttgtttgacgaggcgatcatatctgcgtcgtcgtaccagcttagacaactttttgtgaccgtagttatgttctgccctgttggtaatgtgcgtgcgttatttgatacatactggctatcttttacagatgacattggtcgacaacttagagatacattgggaaatcctaactacaacataccacaagaacaactcatgtccctcctgatacgcaaactatcagatgtctttgctaatagtggtggcaacataaatgactatggtttgccaaagatagatgtccaatgcgcttttgtggatgagaacagattaattaatgatgaaattgaacatgagccattaatgttgtcgatgcacgctgattccttggttacac

SEQ ID NO: 191240 - DNA, 341 bp, Zea Mays
caggtgaacatcgtgccaattgtcgtaacatacaacaatcctttgctgatggcgcgtgtatcgacaatgtgtttatgcaatgcttcattgagtgtgtctgcgatgactgttctaaacatattcctccattgaatgctcaccagctcatactagatgttaatgttggggtatgacttctacctttataccacttttatttaatgcatagcatatggaaaatacataatactactctatcctattaggctatattgaactttgaggagcaggagcaacatagtaagtctcctcgtccatttgacccttcaattttggagagttacctcttgaagacactgcct

SEQ ID NO: 191241 - DNA, 1070 bp, Zea Mays
acccgtgagctatagcacacgattttatggaaacctagaccctaaatcctatccctaaaccctaaacttaaacatcgacactaaaggagtttagtgtcgaaaccatggtaaactgaaatttgagtctcccaaccatatcaactttgctgacatagtagaattttagtgtccaaaccatagtacacattttggtccccggaggccagtaaggctatttttggcctcccgtgacacatgttttcatcgtcaaacaacgatttcatgcctcccgtccgccacccatgatttggccactaagattgctaaggttgtttatggcctcacgtaagctatagcacacgttttcatggtcgagcgaccatttttaagtacgtgttgcaccacccgcgttttggtcccagagcaccttaaagttgttcttggcctcccacgagctgtagcacatgtttccttggccaaagagccaatttcatgtatccgacctgccacctatgttttagaccggggaggccgttacgacattttttgacacaagtgagctatagcacacgtttttatggtaacctagaccccaaatcctatccctaaaccctaaccttaaacaccaacactaaaaggttttagtctccaaaccatagtaaaatgaagtttgagtctccaaaccatagtaagcttgcagacatagtagaattttagtgtccaaaccatagtacacgttttagtacccggaggcccgtaagtttgcacacatagtagaattttagtgtccaaaccatagtgcacgttttagtctccggaggcccgtaaggctatttttggcctcccgtgacacatgttttcgttgtcggacagcgatttcatgcctcccgtccgccacccatgatttggccactcagactggtaaggctatttatggcctcccgtaaactacaacacacgttttcatggtcgtgcgaccatttttatgtacgcgttccaccacccgcgttttggtccccagagcaccttaaaggtgttttggcctcccacgagctatagcacacgtttccgtggccaaatagccaatttca

SEQ ID NO: 191242 - DNA, 306 bp, Zea Mays
gctgggcgtaggtggcgaagggcggtggcgaagcgtagagtgagtgaggtggatggcggtcggcttcgtgtgggcagggctggcaagcaggaattgttgtcctcgccggctggggcgagtgtaggtgagggggaattgcgaagtctttttgagggtgatgagcttaggataatgctatatttaactatagggagatgggaatcattccgaaggttgaaccgatgtaaggtgtgatgccctcgctgtaagtgtgttactatagtttgtatgatgaggctgtgtgccttcgcgtatcggctatgtcta

SEQ ID NO: 191243 - DNA, 412 bp, Zea Mays
caaaaagataatgaagtcacctctcctttgccagaatcaaccttccaagccatggcagtaccatcaggacttcctgagagtacatattgtgtcttcctaccaagaactgcaagccatgaaggaaaaaacattcaataaaatggagcaaaagaaacctacactcaggatcaaacatatctaatctagtgttgtatatctacaacttgtcagttaacatctcaaacatatctaatacagtgttgtatatctgcaaccaatcagtttaccaactaaaacaattcaaggacattgagcatttacaaatcatttaataatcaactaaattccatcaaccttattctttgttcacatttatagaaatatacaacaattgtagcctgccaagaattaggagattaagttaagacttaag

SEQ ID NO: 191244 - DNA, 351 bp, Zea Mays
taacgagccaagccaaagttgaagtcactcaaaattaactcattttttatttaaatgaaaaataagttcaattggagcattttttacacgagcaaccgaaccggctcaatgagttctttgtccagcctgactgtctgtgatcctttgtattgtaatttcacccagcgcacgatctatgggaatagtacttcaaatcctgagttcagcaacgccgattaaggacattattgatgttgctttgtgttactgcatgatgaaatatgtgagcgtttaccatttagagaaaaatgcttctgaagttaacgcatttccaaaattagcaggaataggcagtgtttggtaagagctagt

SEQ ID NO: 191245 - DNA, 321 bp, Zea Mays
ataaatttcgataagctactgtgcgtttgcatggtaccgtctagattaatgcagcagacttctgggcttaagctctggtgctgttgacggtgtatggagggaagggatctgtgttttgttatgttatgccgaaattagtgttgagcatggacgcgaatcctaataatgcataacgtggacggctatttatacgctctatttgggagtgagactcccagatgctggaatatttcaaaaaaaggctggattttcagttgctttcggttccttcagttgtcccaatttggtggggacaatactctttatccggtagacacctgg

SEQ ID NO: 191246 - DNA, 687 bp, Zea Mays
cgcgacatacattggagttgcgatccaaactgctggtgcagttttacttgtcacaacccttggtggttcagcataaactccatgagcgacgacggcatggcctccgctgcggtggagccgcccaagcgggagcaaaattttctagtgaaggtggggatggaggcatggacgcagtcgttcgcggttgcacacaaagtcaggttggtgcacatcctcaagaatctccacacctcggaggtgaaaatctactccgacgcgtccaaggagttcataggagtactggatggtgagtctggcggcgaggtgctgcaggagtacgtgcaacagtcaccgcagcttggggagctgctcgaggcatggcggctccaccgggagaacccggggatggcgcacatacttttgctctttgcagctgtcctgggccaccctgatggtaagctgcggcgacatggttcggttaagaagagcttggacggtgtcgctaggatgatactggaggataaggagaagatgggggatgtgtatttggagctgaatagtggtgagttccgacggcagaatgcagcactggatttgcttgctgcaattgtcaggcgtggagggggtctagcgtctgaggtcgctgagagatttgattttaagatacctattttgccgcagctggctgggacaatgaagaagaagggg

SEQ ID NO: 191247 - DNA, 1008 bp, Zea Mays
cttaaatggttcaggagagcgtcgagtacaattgtggcaaatatctccattgatgctttgacacatcttgatgaattcgaagtgagtttgtgcatgattgattagtaattatacttttttcagtgaccttgtggcagtacaatctatactccttggttattgaccttcttggctgatacaaatttcattttcaaagttcatgatgccctcaaatgctgtaatgctttaccattttgtgtcaagttggtacctgattccagatggttgagcccaccttgccaagcaatgtggatatgctgtttggacagaataaacctatgtacttcataaaactaccttagtgtgcttaattgtggagatgcagatgtataaactaaaacttgtactgtataaggcatgataagtttttcattatttttaagtttccattgtgtgttcttcagattatgagtccttggtaactattatatttgtcgataatgaaactataacaactttttaggccgggttagtggccagtcataattctgcatgttttatctagaacgcgcaagggagctttgtatcattatattaagaaagatcctgcaggttttgctggagcagtactggttttggttgtctaattgtcgttctttattctttaggtggattctgagtacattccagacctttcagcgaactctcctttgtgtgtatctggaaaatacaaaggaaaattcccggacacaattaaagctaaaggttacttagctgacatgaaggagatctcggttgaactgaaggtccaacaactaaaggaaatacctcttgacaaagtaagattcttaagctattttgtttgtatgttatgcttgtgatttctctccacttgagttttgacttaggacaaaattacaacatgatagccttcatcaatcaaagttttggtaggcaactaatgcatcacaaaagtactctctagaaaaggagtttccccaaaatcacttgttcttctcgacagtggac

SEQ ID NO: 191248 - DNA, 486 bp, Zea Mays
tgaggtacttttatattatgttgattgtgtagaggatcgtaggataagactatttgttcttagattgtcccattacacctcttagaatgctctaattattacacatttatgtccactagtctaggctctaatatcaaggcactatgccaataatagctagggaaaatcttatgtgtaaaccatggcgatttcaaggcatataccaatagtaccagcaacatccaatctttgtgagctactcataagttcaaatatagagaggctacctcagaacttgtgtctccttgccttgtatgagcacataattgtggctcaatagattgccttgggtccttttgatatattgcattatcaagatgcaatattgttaatgcataatattgtccaatcacaaacctatcaaaaaattcaagtttagtttaaatttttagaataggacacgtgaaatgcaaacaaattaccacatatgaataaaaataaataaat

SEQ ID NO: 191249 - DNA, 284 bp, Zea Mays
agtggtgtggtatgaggcactagagtcaacaatctagtcggtgggagtaggagtgggttgtgaggacatgtagtacaaggagagagccaggggaggcagcctcagagccaccgggttgggcgctggggccgctagtggcgagcagactgatagcatgggcgatggagactgatagcaagcatgggcgatggagactgcaatgcctctaccgtcatgtagacaatctcgtcagtgcggaacacaaacaaccttatagcttggtggccctcacgaggatggccgaa

SEQ ID NO: 191250 - DNA, 519 bp, Zea Mays
caccatgatgtccatgcatatctgcgacgtcaaacatcttagtagcagctctgcctccaaagtccagaccttgctgaacaaagaggaatgaagaacagaggggggaagatagcagagaacaaagagtaaagaacaggcaaaagcagcacaacatccataccttcagaagagctgctcatctttggttggactgctcagctgctgtttttcgcgactaaaatggcggagaaggctgctgctgactgctcacgtctaaaatgggggagaaggctggtgctgctgactgctcacgtctaaaatggcttttggcctcccaaacagcatttaaaggactgctgactgctcacgtctacccaggctgtatctgaagggattgggcgtcctttggcctcccccagacatcatttaagcctaaaatggcttttggactatcaggcctatccgctgatggaccaacgcggtgattaatcgctataaatcgcgattaggcggacgataaggacgatcagctaccctgat

SEQ ID NO: 191251 - DNA, 505 bp, Zea Mays
gacacttaggagttcacttgctcccactataacattatatatgtaccagacatttgcatataataattgtttcctttaactgcagtttacttaattatactgaccttctcatatggcgttggatccgtgatgcctcctccattcctgaagctatttggaattcattgcctgaatcagtgttctgaagtgctatctaacagtcagaaatggatggatccgagcttgaaaatcctacttctagaagctcatcccagaaatctagccgacgttcgagtagtaggcgttctcaaaagtcagctggacagcattctttgaccggtgctcaagagaaaagaagcaaatcgaaatcttcaaggcagaaacacttggttattgacgacaaagaggctaaaaaagggaaaaaacatgaccacaaaattgacgtggcagatgagaggtccaattttctaggttatgaagtgtatgctggaaagctgattcttcaaaagaaaaatagaagtgcgag

SEQ ID NO: 191252 - DNA, 438 bp, Zea Mays
tcatgcaggttctgatggcggatttcttcatggctgaccagctaaccagccaggtaaactgtgctcagccgtacactaggcatgcatggagagctagccattgtacttattacgttgcggctcaaaatgtcttgttttgcagatcccactgctaagacacctcaagttcacggggtgctacttcatggctgaaactttcagaactcacgcgtatggaagttgtaccagcagctcccaatacaagaacctggcatatgtgctctctttcctgccatactactggcgagcaatgcaggtagattgatattgaacgaatctagcagatctatctgctcatcagactaactaaaatggtctactgctgcatgctagtgtctgagaaggtacttggaagaaggccacgacatgaaccagcttgctaacaccggcaagtacgta

SEQ ID NO: 191253 - DNA, 511 bp, Zea Mays
gccgctgttgcatttaagtcggtctgtccaagttgtttaccgttagtatcaaaacatttccggaggctatgtgagaccctccctgatatcgaggaatggactcagatcgtcctcatcgagatcctcttgcgttatgtaatagccagacatgggttggtcaaggattctttactctttgcttcagatttaccgacagagattcatggcgttacagattcagatgctgttgctagcgtgcccacccaatctgattctatcgtcaatggggtttctgatactatatcaagcatcatgctgttccggcactacatcgaacaatgctcaggttcctctgatagagaaggcaataatttagaattatcgtctgtcaccgcaaacaacaacgatgatgtcacaattcttttgaaatgtacatcacctcttctatggagtcgaaatagtggagttgtacttgcagcagcaagtgtgcattggatcatggctcctattggggacatgaagaaaattgttg

SEQ ID NO: 191254 - DNA, 297 bp, Zea Mays
agcggctaagcgccacagtgagatgaggaaacagcagcagaaactgcagtagttgattcatttcccgcacttatccttgaccagcctgctcgaaccacccttatggaaagggacctattcttaaaaactcgacccgcgggggtaagacagccctcgggtattatattaagaggacattctcacataggtcgagaaatcgccgaacacctaccccacccatacaggccaccgtagtccatgtgagaacgagtgtaatgggaccgcgccctagacctatgctttggcataggagagacg

SEQ ID NO: 191255 - DNA, 455 bp, Zea Mays
ggaagattctataaggtgtgttggtcaattataaaggaagatgtgatgtcagtcttctcagcagtttggggtagaaaacttatccattttgatcggttcaatacagccttgatgactctgattcccaaggggggagctgaagaggttaagaattacagacctatcagtttggtgcatagtatggccaaactaacaactaaggtgcttgctaatatattggctcaaaaactgcaggaaatggtttctcttcgacaaagtgcattcatccatggtcgttttatacaagataacttcatgcttgtgcaacaaactaccagacttcatcaacaaaaaagaacaaggaatcttttgaaagttgatattatcaaggcatttgactcttatctcctggcttttcctactggaagttctccagaaacttggttttgggcagatttggagagacatcctcagtg

SEQ ID NO: 191256 - DNA, 858 bp, Zea Mays
cggcacccagtggtaccagctccagcccaagagcaaaaagtccaagaagaaatgccgcggtatcatcgcagttgcgcgctttctcaacctctccttctttcttcccgcaacattatccacgtggagtggagtacgatgcaaatcaaatactagtgatttttcgtcttgatccatgacctagatttgcttgctaaattttcaggagaagtttgtctgcacgtatcgttgtccacaagaacccacgtatccgaagaatcacagagcgttccccatcctgcatcagacgacctggcgtccagttcagacagcaccatcgagcacaaaacgctgtcgacaacatatagctgcatcgacctatcagccgtccccagcatcgaacgagcgtctcgcagcagcttcgagcgattcccttccagcattctggagcagccagaccggagcagcgtggaggacttagcagcccctgaccctggtggaccagcagcagccgcagacaccgacgcgatgccaaccccgtcgtcagtggtggaggtcctgtcccgctacttcttcaggaaacccgagaacgccaccgtgcagcaggtgcagcattctgtcgcatcggacaccaccgaccatccagtcgtcgaccgtcagctgcaagagccaaacgcgagctcatcagaagaccgtgagatccccgagagagtcacggtacctgagccaagcctcgacgagctgctcaaagtcatggagtcaaaagaccaaggcagcgaaatgccggccgccttgcctggtggcacgctggtcgacgagtcctacgtcgccgctcccaccgagctcaactctctcctgttctcggcgagctcagacttctgg

SEQ ID NO: 191257 - DNA, 490 bp, Zea Mays
cgggaggatcgactacagcgagttcgtggcgatgatgaggaaagggacggccgagcagaaccccaagaagcggcgcgacgtcgtgttgtagcctgtacgtaggaacagagcagtgagagagctagctgctgaccgacccatgagcatgagtggccaaacaggcggtggttcgtgtatatatctaatggtaatggatcggcgtcgagcggctgatgccattgccacggccgagagagcaaggcactggcagccagaccccaagcatgcacggtgagctgggtggagcctggactggaggagccagggaccctttgacaatgtaaagtaaactatgggatgatgaaaggatgcacgcgctcgcaccgtacgttattgacaacgacctctcgacgtgcaatggccatggactgtgtatatacatgcataccttcagatgtgtaacttgagggaatagcagaaatctagatctaatatgtgttcagtaaagggg

SEQ ID NO: 191258 - DNA, 337 bp, Zea Mays
cacccctctccagagaacacattgcttccttagcagctctgtttgggtgggaagcacctgagttggcataaactaagatctgttcatttggtcgagcttctttttctcaatgaaccagtgcaacttcctgatttggaatgtgagaggattgaacagtagagctaggagagataatgttaagaccctgatcttggatatcaaaccatctctagtctgcttgcaagaaaccaaaatgagcaacatttcagcatttgatgtccaatccatccttggtactggttacagtggttttgtatttagcctagcacagggagcaagaggggcatattagtggctt

SEQ ID NO: 191259 - DNA, 338 bp, Zea Mays
atgtttttcagctccactacgtttttaagccaaacaggtgcagcccaagaacacctaaaagggtgctccaacaactctagtttttttgtggagctgctccacggtggagtttatgaagcagtcccaaacaagcccaatttatccatgactactccaatgcaacctttggcttcatactattatgtctgcccatgcttaaatgtaccctaaacaatgcagcaaacttgccagctaccctaactttttagcaataattggagggcaataggatcatggtaagccttacctttcatgtgcctaagtctacatggacttatatttggaattaaaagtagtag

SEQ ID NO: 191260 - DNA, 514 bp, Zea Mays
gccagctaggagaacgggggaacctaattaacagcagtcgcgtcggcagcccgcggcgacatgaaaatgaaaaaaaaaaacacatccatctgtagctacgcgtaaaaactgatctactggacgctttgactaatgctagtgtagtgtaggtgtagtagccgtgtaggaaaagaaatgcagtccatcttgcatctggtgtgtacgtagaatactagtacgcgacaggctgtgcgtgtagattacgcacgcgagcatgcaccgcgatccggacgcccaggaggccaggacccgggtgtgtgtctgactctgactcccggggcccgcattgtgatgagctgagctgtaagccgctgggcctgggattcgtgtatgccaatcagccgatgtggcgagccaatgaacggcaaacgagtcaacgactcggatttgccagcctgaggagcagattttgctatgcaaaaaaatttgcgtttgtcttgtgctgcaatatttcgtatttcctcttccggtcggc

SEQ ID NO: 191261 - DNA, 372 bp, Zea Mays
ctttgaagtttcatttgatacttgtcctttggataagtagtcaaacattgtagtgaatatgggtagcaatagcacaactggaggtggaaagtatgttggttaagtaagaattaggtagcaatagcacaactggaagtgggaagtatgttggttaagtaagaattaggtagcaatagcacaactggaagtgggaagtatgttggttaagtaagaattaggtagcaatagcaacaggcaacagctacatttcatgccatggttacagctttgcatgttcaattggctctcttggacagttgtgtatacaacttgtggatctttatgcatatttaatctaaactcttgtagttttgcttagactcatttaatcac

SEQ ID NO: 191262 - DNA, 336 bp, Zea Mays
cacacatttaagtgcaaagggagcttaacatttgtggaaaaccaaccactactatctgaccaacaacatgcttttagacaacatgccatgctgaaactattctgcttctgaacggcatgcttccataacgtttaacacaagtacactttgaggaggaaaagaaaaattatgttctggcgcaaaagatgatcatatagggaaggcaacacgtaaatttagcagttcaatgagtttgacaattaaaactggcacaaagcagtgttttttgttttctgttggcaaagaaaaatacagcaccactgatagcaggtaaattgtaaatacaatatcatagtc

SEQ ID NO: 191263 - DNA, 535 bp, Zea Mays
cagatcaagcagaagagtgcaatgttttgagccagccagagtcagactctaatgactggagggagcccatcatcagatatataaagaataaagaggaaccggatgacaaagctgcagcagaacgcatcgcaaggcagtcagcccactacaccctcattggggatgcactgtacagaaggggcgcaacatgagtcctcaagaagtgcattctttcagctactgggaagcaactgttagatgagatccacgccggacactgcgggatacacgcagcatccaggaccctagttgggaaggtcttcaggtctggtttctactggccgacaaaaaagagtgatgcagccgagttagttcagaggtgtgaagcttgccaattcttatcaaagcaacaacatttaccggcacagcaactgcagaccatacccgtgacatggccatttgcgtgctggggattggacatgattggacccttcaagaaagctcagggaggatacactcacgtgttggtcgccattgacaaattcaccaaatggat

SEQ ID NO: 191264 - DNA, 290 bp, Zea Mays
ggacaggcctgtgaagatgcccgtggagtcagtgagccagaaaatcagatgtacgtacgtgcgtaccttagaggacataggcgagttggagtagctggagagcgtcaggtcaccggcggtgagcagatccaccaccgctatcgcttgaggggccttggtacaactctttgtcgctaggttggtgggcagattatgatgagtaaaacggcaccaccccacagccgctgcaaccactttcctcgcgtttctatgcattgaagacacgacgtgtgtgggtctgctgaatccgc

SEQ ID NO: 191265 - DNA, 565 bp, Zea Mays
ggtatcctcatctgatattttgttggaaacaatgagtaagacatatatgtatttatataagcatttgtatcatatcataaaaatattgaaattagtacattgcccagcgaataggtatccctcgttctcatcagcatcgtcttcaaatacgacaccgtcatcgtcatcaactggagggtgaaaatacaagacacataaaatacctgggcattcaggataaaaggggggataaaaatgatagtaattaccattgttgttgatcttttcagtcatatggggttgtgtccaatcatccccttcctcggcgtcactaatgatatcctcagccacagtagccatgttccttgaaatggatgcttcaaattgccggtttcgacgggctaagatagcttgtctttcaccacgtggcacatgttgtttacgtcttagtggtctagtagacatacgcagtgaatcggcatcctcgatctgtgttgaagctggtaggaacgggttactggcgatatcagggataacccagtcgcagggggtaagagcggatccattaggttcaattgcatctgtt

SEQ ID NO: 191266 - DNA, 2555 bp, Zea Mays
aggggtgtcccagaacccaagctaactgctatggatgcaatgattgataagcttactggtgccatattcttatttcaacttacagtcgttgtcgttcttggggctgcaggcaatatttggaaggatatggaagctcgcaaggtagttttgcttgcaaattttctaattgtgttgtacatattagccccattgttactagtgtagacctgcaaaaatatttgcaagatgtaaattcttgccacaaactactactgaaatgttagagtttattgtgcatcttttttcagaagtttcaaattttgccattttgagattcataggtaataaaagatgggatcaccttggagttacaaagtaattttaagaaagttaagcacccaattagagctgaagagtatttggtgttggtgtgttcatctaggattggcctcctcactctccctctctattgtctactcctatttccttgtggccttcagttgaagtagtatccccaacgtgctctgtgtgttccctatatatatatacctaagtgctaatcatcacccctcatggtccatcacttggactaaaagaactagtccaactaattaatcgcgccagcgccatccgtgcgcgattaaccgcactagccgcgcacgattaacgggatccacaccagggaaatcaattgaatcagggaacgaaccgcaccaaccacatgcaattaataggattgattcgcccgccgaccgcaacatgcaacaccaaatattcaccccattcaaggtttagtttcagccattcaatgttttgttcagacattcaaggtttacttcaacaattcaatgtttacttcaatgtacagcaggaacaaacatccaaccattctaggtttgctttagtcattcaaggtttacttcaaccattttaagatttacttcaacgtacattaggaacaaatattcagccattgaaggttcacttcaacatacatcaggaacaaatattcggccatttaagggttacttcagccattcaatagttactttagccattgcagatatctggggtgtggtggaggcacgacgagtgaaggcgcgattagcggggcttggctgagtgggcgcgcgagtaggggccgtggccggacgatgcatggccgagcgggggacgcgctggtgtgactggttcggtgggtgggttaattagcgtcgatatgctggtttaggtgatgggccttttgatccatcgcttccacgtgtgacacatacgtcgacgctatccatcacccgaaccaaccccatgtttaattctgatcgaactcaccccccttgcttagcacgcccctgttaatctcgctcacccgttccttgcccgtagcggcgcctccccccgatgattaactccccctccagcgcaccgacccgtcacggcagctgcctcctgttcccgattcaccaccttgaattgctgatatagaatggctaaaataaaccttgaatgactgaatatttgtttctgttatatgttgaagtaaacctttaatgactgaagtaaatcttaaatgactgaatatttgttcctgctgtacgttgaagtaaaccttgaatggctaaagtaagccttgaatggctgaagtaaaccttgaatgactgaatatttggtgttgcacgttgtgggcggcggacggatcagccctattaatcgcgcgcagctggtgccctggtacggttaattagttcttttgtggctggtttggttggaccttttagtccaggtgatggactaagagagggagagagttctgtaacttgacagtaagtttgggcatgtggttggacaatatgtcaagaatctgacatgtgtatttgcaagagaattttggtttaggatgttcctttgtaatactttgtatcgacttaactgacagaaccccttgccagaattaaaattcgtttgtagattggtgggcaagagtggtcaggaatttacccaagttaacgaaaaaatggtcaatttggtgataatattgggtgcttggatgctttggaaacattggaatgctatagttttttatgggaagcgtccttgtatgcagtcggctctccgcccatttgatgatagagtgttgtttttggtgtcttgaaggatctgataacctgcaagctctaggtcaagtccagggtctaggatagaagtcagctattgaacttgttttgtattggcaaccctctactgggtccgggtagagggtgaagtctgttttgaactctcttctcttcttaatgcaatggtacaccgctcttttgtgtatccgagaaaaaaaatctgacatgtgacctctttattagttattgtgctaattcacctgcccaaacctgaattaactgaactatacatatcgacattgttcatttgggccttgtatattttgctgatcatctaattatttgcctgtcttcatgtagcaatggtatgttaagtatgatgacaatgaaccatggtatcagattctggttatacctctgcggtttgaactattgtgctctattatgattcccatttcgataaag

SEQ ID NO: 191267 - DNA, 674 bp, Zea Mays
ggcttcaaaactctggagaggtcttacctgttgaagcttgatggtaaggtcgttgaaaggccgcagcacatgttaatgagggtttcactggggatacacaaggaagacatcgagtctgccatcaggacgtaccatctgatgtcccagcgctggtttactcatgcttcaccgacgcttttcaatgctggcacgccgaggccccaagtactgtcttgtttcccgccagatgatgtcattgtgggttctgaaattgtttatttactgctgctttttctgtgatgcagttaagcagctgttttcttatatgcatgaaagatgacagcattgagggaatctatgaaaccctgaaagagtgtgctgtaataagcaaatctgctggaggaattggtgtctcagttcataatatccgtgctactgggagttatattcgaggaacaaatggatcatcaaatggaattgttcctatgttacgtgtctttaatgatactgctcgctatgttgatcagggtggtggcaaaagaaagggtatgtttcttcattatcgtcgcttttagttccttcatcttcagaaattctaacgagcttctaaaaacttaggtgcatttgctgtatacttggagccttggcatgctgatatttttgagttccttgatctgagaaagaaccatgggaag

SEQ ID NO: 191268 - DNA, 404 bp, Zea Mays
acactaccaacatgaccaagatgctgtttgaacctgtgtattcctcctgtgctctcatggccacaaagtagacacttcactcggttcttgtcatttggatcaactaatcgcccccattcccatcctatgtcacttgatttcctctttaattgactctcaagctcagtggttgcatcaacttgaggctcagatgaagtcatcctacacaaagcatgtacatgtactaattaaacatccaagccaaagtgtccatgttaaacattgcatagaacataacagaagaggtggaggagcagcagaaaaatagcaaagtagggagagggaagaacgtctggaatactggattattgggggaagaggagaagggttgtgctgacctggacgattggggaagacccgaagag

SEQ ID NO: 191269 - DNA, 280 bp, Zea Mays
gtggtgtgttgttcctcatccaacagatcaagacgcaacacacatatacccaagtttagactatcgatgattcttctaagcacctgtgtacttttacatggtattcaaatccatggcaagttcatcttcatacctgcatgaatcctctcttggcctacctgtgttcgagaagtgatgaagtaccatgtgctatggcatgcataggtatgtatgttgccactacacaaagttgctcctcttcctggttggtgacaccaaggtgtcaccgaccaaaatctcc

SEQ ID NO: 191270 - DNA, 350 bp, Zea Mays
ctcgcatgctccagtcgcacccaccatatgctccgtgttgaagaccaagtcctctggtccgttagtcttagctagtttataggatcagattagctcttgtaactgaagtccctattcttgtgcctgagcacagtcctcatgtatatgtaacactccttcactgaatatgagaagtactctcagccatactgtttctctacatggtatcggagggctcctgatccaattctcctctcttccgctgcatcttctctcctccaactgcttcctgccgtgttcctctcggatccatggcgtctcccaactccacctctgcatccgacgccaccaatccattcgccggtcccgac

SEQ ID NO: 191271 - DNA, 332 bp, Zea Mays
tctgaatccagcggcgcgaagagcaccgcgctcctttccggctcgcaccgaagccctaataccgtcttcttccgtccggcgcggactgctgggttcccgttcccgcatcgcggactgctgggttcgccgtttctgcacggtgcggacgccatgtcgggtgtcggcccacccccgtgaagcggttttgccgcccatgatcccggaaaaaacccaatcgaggcgtcaagtcgatccctgtccccaggcgatcggcggcggcggatcgtttccgttgcagacagcaggtcctagagcgtcaacggctggcctctggatgcgatgtcccaagaatg

SEQ ID NO: 191272 - DNA, 587 bp, Zea Mays
ccatctaaaatcttctgcaaagccagttgaggaaggcttgctgaaaaataaggatattttaaccagcacatcgttagaggagcatgttcgcatgatagataaggaaataacagctgttcctcatgaagtattagttgcaagtgaacagattccccagaatgatattagaggtctccatacaaaagatattcacactgaatctgaagtgactggaaggaaggatcagccttcacgatcatttggaaaggtatctggtggtgttaatcctaaaccaaaaacatcatccaattcccgagctaatgttaaaggctcatctggtagggctaatgtcaaaggctcatctggtagggatgagattacctttacagaaactgagttccgtgatgttagtttgcagcggaatcgtctaccacggaaggcagaggatgtagggagaaaggttacaggtggttctgattcagattcttctggtcgccagggaacaaatttgagcaggcaatcatccattaccatccaggaactaaacttccaggctagagtgatgggaccaggaaaagggaaccaagatcggcatggcgaattgcaaa

SEQ ID NO: 191273 - DNA, 570 bp, Zea Mays
cagcaccggagtgggagacaacgggttgccgcttcgagtcccaggagacgaggttggcgtcctggaacacggcatagctggatgtaaactggagcgtgtcggggcagctagccgagtcaatgtcggtgtagactgtgggaaaccctaactcagggtttagggtcacggtgaaggtggagccgctatggaggacgagcggcggggtgaggccgaggggggggggggggggggcgaaagagaggaaggcagcaggaaaggcggcgactagccctagagagcggaagtgagataatctcgtgataccatgtaggaaagtatatgccgccaatagtaggttgattatagaggtagaaggggtgtacaatatatagacaaggatcgtctaaggttgatagaaagcactcaatcagtggagatccttgcctagcctctgatcaactaccataaacaccaaggcacatatgcgggcagggctgatcaacacatatggcaagcctgatcatcctaattacatagtcgaacatgttaattgaaacaatggttaacaatatggtacctgaattcagacaa

SEQ ID NO: 191274 - DNA, 579 bp, Zea Mays
tgatggagctttgaacattgtgaaatttaatgatggaaggtattgtgcttaccagttccttgacagtagaagctgtttctttcattacttgaatattatggattagaatagttttttctggatttctgattctagcccctagtaccagcaatgggtaatgaaagttgtcattgcaatactgcctaataattgtaccgtacctcatttttgcagggagtgcattgttgatctcatgatagatcctggtactcttatttcatcagatggtgctgacctgggtagagaattggaagacagcttagtcgtagataatcaacatgttaacaaagatgacactagcactcagttactttcctctttcagtgaagcttcaagttccatgcacagttcatttgaaaatggatcgcttgaaaaaggatttatttgcaatgctgggcattttggtccatatgaagcaacaactgcccatagtgacaatgatgtgcttgggtctggggtatcaagttcatttgatgagctatcggtcagcacatatgcatgtgaaaacatacctattattcatgaatctaatacagatca

SEQ ID NO: 191275 - DNA, 324 bp, Zea Mays
aagcctggcgaggttgagacctgcaaaagacacccacccaaggcagaaataacgaatcatttgtcatcatctgaagattcttgattcctgtctccctcatctttcttgcctgacttgctagagccaacacagccaggcggattcttctttttcttcagaactttgtcagccaaatcttcctctgacagattacaaaagcgctcacctaagcgcctgatagctctagcagaaagcgaggggggccctcacatttgtgctgacacatcaaacaattcttcttttggcaagagccttgcctgaaaccagcccgggcgtcacgaagcc

SEQ ID NO: 191276 - DNA, 1049 bp, Zea Mays
cttgaaatgttccattgctggtgttgcttatggaagtaggcctacagaagttgaaacgtgttatggagaaatagttgaaactaatggcagttttgggcgcaaggacactactgaattcaagagatcagtcaagggatttaatttcactgatagtcatttgatgaatggaagatgggccaaagaatgttctagggatgctatagaaatgtttttccgagtcttagctgtttgccatactgcgattcctgtggcagatggaaattctgctggtatgccttatgaagctgagtctcctgatgaagcagctcttgttacagctgcaagagagtttggctttgaattttatcataggacacaaacaactatatcagtgcatgagtacgatcctgtcgttggtggaaaggttgataggtgcttatcatttccactgttcttagtgattattctttaaaagtgtcaacgttgccaacgtcatgatgctatttttgtttcagaacatataaactactcaacatcttagaattcagcagtgctcgtaagcgtatgtctgttattgtgaggacagaagagggtcggctatttctgttctgcaaaggagctgacaggttcaataattgtttttacatgtgatgaaaatcttctatgtttgacactgcatttcccgtttataagtacatatctaattatctatatcatgatagtgttagccttaaagttgtgcaacatatttaaactattccagctattctgaagtgtacctttcttcagagttgtaaacatcacatgctaaaattttcaaccttcaagtcctgttcaaataagtatcattatcttttcatctctgtgctccagtgtaatattcgaaaggctctccaaggataatggaacagctcatctgaccaaaacaaagtgtcacattgatgagtattctgaggcaggtctccggaccctggcacttgcatattgtgaacttactgaagaacaatatgttgtatggaatcaggattactcgtctgccaagaattctgtacatactgatcatgttgcag

SEQ ID NO: 191277 - DNA, 823 bp, Zea Mays
agactgaagtcagctagcgatacaaaggctgagagtgaaaagatcatcaaacagacacaggcacttttcaggaaccagggacagaagaaaggtgtttttcacgttgcacagcaggtggagcttgttaggccaatgcttgaagctgtaggatggcctttgcttgcaacattttctgtgaccatggaggaaggtgacagtaagcctagggttgtatcatgcatggaagggtttcgtgctggtatccatcttactcgtgttcttgggatggacaccatgcgctatgctttcttgacgtccttagtgaggtaggtttatcctttgaacttcttcatatgatgcaactgcatatacttttcatatatcaatatgaatataatgctacccttttcgttcataatcgttttgcaggtttacatttttgcatgctcccaaggagatgcgtagtaaaaatgtcgaggcactgaagactcttcttggtttagctgacactgatatggatgctttacaagatacttggaatgctgttttagaatgtgtatcgagactcgaatatatcacttcaaatccttcaatttctgcaactgtaatgctgggatcaaatcaaatatcaagggattctgtagtccaatcgctgaaagagttggctgggaagcctgctgaacaaatctttgtaaacagtgtaaaactgccaagtgattcaattgttgaattcttcaccgccctttgtggcgtttctgctgaagagctaaaacaaacacctgctcgtgtctttagcttgcagaagcttgtagagataagctattataacatggctcgcatacgg

SEQ ID NO: 191278 - DNA, 514 bp, Zea Mays
gaaaaaggagaatcgatgtgcggctggatccccgtggcgaagaatacccagcaccgatggcttgaactgggaggaggaaaaggaataatgacaccaccaaaaacaattacttgaacaccacgaacaccgccgcagcggatggggtggtgggtgaggcgacgaagaagggaaaggataggggtgtggcggagattggcgaagccgcaagccaggaacagcagcaacgggcgtgtggcgactgctcgaactgggattattacccacgcgctgcggagatggggattgggttcggatcgctgctgccattgtgtgcagccaataaaaaccaaacccccttttttcctctccgcccccgttcgttcccttttcgcctggggggtgctggctgagaggctcaggcttcgtatttcttttgttttgttttgttttttctccgtgggagagtggagtctggagtgtgttttgtgttgcgcggcagctgctgttgtggtcgagcagtcgagctgctgctgct

SEQ ID NO: 191279 - DNA, 289 bp, Zea Mays
ctcaaacaatacctcctctaacatggtatcacaaatctaatgttgcttttgctcctcccctggtcgccgcctttctagggcagtggcccctctagggctgttgtcaccgttgtgtcgtgtggtcgtagcaacgtacacacatcttctccctctttctcccgcacccatgacaggacctcattgactgacgaggagcgcaccacgctgaggatgaggttgtggcctttcgcaagaagatcgacgacatgttcgctgcggctcaggatgcggacaaggaagctgccaatgc

SEQ ID NO: 191280 - DNA, 515 bp, Zea Mays
agcaggagcacctgatgtgcagactaaaatcaaaacattgagctcgatagcagaggagcacaacatcaaatgggagccaaaagcgtttgaggagaaactgcaacaaccaactgaaggtcatctggtaagtaaatgatttagtcttttcacctttctgtccttatttggatattgtggccctaacgattcgttatattatttgttagtatggttctgcaacatattctggaggaaatacttcaactatgggatcatctacttctagcatatcaacaccacagcctacatattcaggtgttagtgcggcacctgtggactcagccactatccatgtgccagcaaataaaactgcatatggcagtgccaattctaatactttttcgaaagaaagcattcataatagttccagtgcatcagtacctcctatctcccaacatgggccgtctgcttactcttcagcacaggttcctggttctaacaatatctcacatggaaatccaggaggtccaccttac

SEQ ID NO: 191281 - DNA, 439 bp, Zea Mays
ggagcctggggccatggatctccaatccgacggccgtaatagcgtaccaattcgtcagtagatctggccgttggatctcgatcgtacgggtggattcagggtgcgtgtgtcgattcagcagagcgcgatctggaccgttggatttgtgctggtgggctcagatttgagaatggcgcagagctacctccgaccgtagatttcggatccaaggggggtccaattgcgtaccagttcaggctttgcgcggtctaatctggaccaccgattactgatcgtgcggtcgtgatcccgcgataccccttcgcccagacccttttgcatatgagtccctagattatttcagaatgaacccgccatcctcgtctgtgatgccttgtgtcttgggaacttttgctccgaggcccatgtgcttctctgaaattagtgcacaggccagtcg

SEQ ID NO: 191282 - DNA, 630 bp, Zea Mays
gtgcttgctggtttgatacaggttactacttggcttctaagtttattttcctcttgaactattgtattgcaatcactgccctgattctgcatttatcttttggatgaagttgactgttatgaccgaagccgtgatgattggtccacatgcccatcgttgacttgtgacaaggggagccttgctggggttagtgtcaacgggagaatctatgcatttggtggtggagatggaaccaagtgtttctctgatgttgaaatgtttgatcctgtgcatggaaagtggataaagaatcaacctatgctggaaaaggtatcagtttctaccattctttgttctagaatctggaagcttttcttctcatagattactgaagcacatagtagtatgtgcgtagatttgcctgacacaaacaacttggggaaataataaccatttactcatggaaaactgtaattctgcactgaagctgtgaagcaaaccagttcctggttccatttcaatttcatgtacccttttcgtgaaaatacttgcttcagacacaaatctccacataatatgattaactccttagcttggctgactttgcacactatttttcagcgctttgctctagctggtgtagcactaaat

SEQ ID NO: 191283 - DNA, 796 bp, Zea Mays
gaaggctactaccgacagggtggcggcgcgtacgaccgttcctaccctgatgacccgccgtctgtctacacgccgtcgcgctcggaccggtactggccggaagacgacgacgggggatacaagggtttcggtcggtatggcagcggtggccgcagggacggccgtgacatgaggggttcataccggaagtccccatacaggggcggctacggaagcgacttctccaggaaccactcagagcagccccctccgccaccacccaggaggtctcccttgaggtcagttgccgttccgatctgctatgaccctccgggcaatagaattaacagaggggacagggacaacctcccacgggtgacaccatggcggagaagggagagcagatctgaagtagccgatgctgatggaccgctttctgttggccaaagtactcggctctctgcttcagggaaggaggcttcagctcagcctctggccgcggcaggtcctcacgggacggaagacgaggcaccaaggaagaaggcacgccttggatggggtcagggtttggccaagtatgagaagcagaaggtgcagggtccttcggatcccgctgaagttgttgctgatgtaagttcaggtgatggcgaacagaagacctcccttgcgcctgcgccttctgttgcatctgtatttcctgctgcaccactgcctgagtctgcaccagcacctcctgctgctcttgcactttcgtctgctcctatgcgatgctcatctccagttactgcaccgccatattgttcctcaggtatgcaac

SEQ ID NO: 191284 - DNA, 352 bp, Zea Mays
gagctgctattaagatgtttgacgtcgcagatatgcatggacatcatggtgatggacgtcgtgttgctgctgttcaagtcatcttcccacagtcccaaattgcccgagggaaggcgtcctctgcggctgaaactggcagcacagatcatgttccatcggcgtcgtcaactgctgcagactcaagcacgcttgctgacaaggcaatagcaggtctgcctccagaccttgctgaacaagctaacgattcgaagcggaaggctaagtcacaggaccctggctggaagttcggttggtggcctgatccgtctaagaaggagttcgtgcaatgtatcttttgcatgaaagtggtgcc

SEQ ID NO: 191285 - DNA, 339 bp, Zea Mays
atcggagctccatccctccctccctccctcgcaccctcctcttagcctagccccaagtgggcagctaaattctagccctccgtactcgaggctccaaggcaaacaggggatcaggaaacaggaagagggtgcgggcgtgcagcagaagcaagggcgctttccacatccacagctagcctcttgcgcttacggaaagatcagaggggcaggggcggagcgtctgttgcaaggacgcgcacgagactcgtaagggagaaaccaaacaagtagcagggagctcaatcgccgcggaggggatcgatgaagtcgccgctgcggaggttcaggggcttcggccac

SEQ ID NO: 191286 - DNA, 378 bp, Zea Mays
gcatgccgggatatgaagtcgacggagggggagcgacaggatggctggtttccaaatccggcgagaaatcgtcgatccatcaaggccacacgcgaactaggaagcctgccaacacgagctccgcacaagggcggatctccaagacccgtcagcgaaggcgtcacgagttcaacggaggcagcggggagcaacagcagcgacccacactgtctctcctatctaactctcgtttgcgctcggcattgattcacctgtatgcggctatgcgtatgcactcgtcggaaagggagggggtgcacaggaggctcgccatggggaatagggaggtctggcagagcagtcctggcaggggccctccgccgtgggatgaacggcgcc

SEQ ID NO: 191287 - DNA, 541 bp, Zea Mays
ccctggtgtgcgagttgccccgagggcttgggtaaggcaagcctccagttgttgtggttggatgcaatcgactagtgcaagtttgaccaccttggtgactagtttggcgcaaacgccctggagaggtaacaggggccaccttggtgagtagtttggctagtgcaagttttgggtcgagattggcgaccacagttgttgagtcagagtcacgacaagataggatgtcgatcgccgaattgaggcgcctcaggtggtactccaccgtaaagtcgaagtcaaagaacttgttgatccaatggtgttggggcacaatggacaatcgttggtcgagtagggacttcaggctatagtgttcaacgtggactaggaatttgtggtgccaaagatccggtcaccagtgtcgtacatcctgaactaggctgatgagttcatgctcgtacaccgctagcttgtgggggcgagcgacgtagggccgactgaagaaggcctggggcccgaccccttggtgtagaacgacgttgaaacttgtgcctgatgcgct

SEQ ID NO: 191288 - DNA, 821 bp, Zea Mays
ttttagtagcaatgaaaagatctattttagtttgcttttgtatagttctattcttctgaagtgtttgttctagttgtataactattatcaaagttttactgtgtccgttctcacgcagatacatataccatcaccttttgggacatgaagttgagcatcaaataatacgtaataccctaccaagacgctttggtgcacctggacttccagaactaaatgcttcccaggtacattacatatatgttaattttgctatgtttccttcctcttttgcttgtcatgtcttcctttaacatggtacttccatgccttcgactaacatgcttgtcttttgttctgggacaatctgtgtagcgtgtatattatattttttcattttgactgcagcttcgcgaagtttgctgctgttatgatctgtgtatattgttattgactgatctgatgctgtcttgtgtattatttggtgtgtgttcaggttttagcagttaaaagtgtcctgcagaagccagttagtttgattcaaggtccacctggcactggaaaaactgtcacatctgctgcaattgtgtatcacatggcaaaacaaggtcaaggacaggtataggaataggattactaaaaatttgttgtttgatatagtgatatatatagcgagaattgtctggcctctaattttttcaaatttgtaggttcttgtatgtgccccaagtaatgttgctgttgatcagctggcagagaagataagctcaactggtctgaaggtatgcttggaaacttattttaatttctgcagttctccaacttgctttatatttgaagtt

SEQ ID NO: 191289 - DNA, 663 bp, Zea Mays
cctgtctagagcttcaaaagcaaatctatgtgtctttagtgcttcatcccatattattaatgatgcaacttgaactaactcagaaagcatcgtgccacatttgatgtcacatactgttgtttcttctaattcacattgaattttgaaacaagagtgtgttgttcgtcctcctggtagaagtaaagaggccacaccagatgaagctacagatagaactatttgtttgcgactacgtaggaatgttatgatggaattccataaatatgttttccctgtaccgccataacccaacacgaaatagaagcctgctttgtttgccaaaacattttctgtaatagtcttgaatgcatgcaactggtcaatatttaatcttgatgtcaacattgtggattcagtttgcataatggaaatgtcatatgatagttcatcatcaataaagcgatttgaattcactaaacaaggtgagtcagatctagttggtaaattgaaatcctgtattcgacttcctcttctgctgaataatgtagtgagttcttctatcagctgattttttagggcctcatcactcatttgataggctggatgatttagtatttgtctcgcgttgtcctgaatatcatcagccagtaacgtccagactttttcaaagaaagtaaattcatc

SEQ ID NO: 191290 - DNA, 976 bp, Zea Mays
atgccattgaggggccacagcctatggacttagacattaaaaggggatctactgagaaccaaaatgagcatcgcgaacagttacgccggaagaacactttcatggctttggacgtgttgcatatgatggctgctgatagaaagattcaatcatttctgagcttgatattcctgaacatgtatattttctcataccctttctcacggtggtcgtctatgtattacccacctatggataaatttaacttcaactggttgcaactaagggtgaagttaggtacagaacattagcccagcatttcacatgcaacaagatacaaggcgttttaagtgtgcccaccttattaacatgttgaccatgaagatgttatatccatgatctaagtatttctgttctttccatgcactcaaacattgcacttgggaaacatcttggtcacaatatctgaaaaaaattattttcaacttttcttcagtatacatagggataacaataggcttaagcagtaaattttatatagtaatatattgttcaaaggaaagatagatttctagaacttttgtcctgatagattactatttagtcttttttgatttccaaacagttatttgattagaaatcaacttctctggcagctgtcaattattatagtagtaggttttgttacctaaacgttccatacttattgacaggaccttgcacaaaaactttcaaaacttacatccctactcgttttgtattttctctgttgctaataaccagcattacaattgtgctaaagaggaatttttttctaggttaggcctgaaaagttcagttctctacgccagaggttgagttctattgaagcacacaaggtgaccttggagactctactgccttctggacacaaaattaatgacttgttaataaacatctggagagtttgcaaagcaggctatcaaccaaataacaaacacattctgggtgttcttgg

SEQ ID NO: 191291 - DNA, 350 bp, Zea Mays
cccttggcttccgacgaggtggacgaggcgtgaggctgacggtggcgctggtagtccgcaaggaaccggatttggacgcgctctccctcgtcgctaggtaagagacccaggtaaggaacatataagtggttgttctgattttggatattagccaatttccccctccaatctgttactgatttatatgcccttctagggatcagcagatcccacacctattacatgatttgtccttctagaatagaatccgctttctatcttctgaaccggcactgccttcttcaatatcggccaccggtcggtccacctcttcaataatcgtccttcacttcagttgtgagttgtgacat

SEQ ID NO: 191292 - DNA, 684 bp, Zea Mays
caggaattacctgaggcctttctgagtaagacaccttatataagggaggctcttcttctaccagctttagccaacagaaatgagaaaattattgctggtcttgcctgtttgatgtgtgaagttggccaggcggtaagatttttcattatatacttttctttcagtctacttatcatacatgtcttttttacaagcaaaatcagaaaacatattaatattgtgttgggacgagcttttgacttttcatataattcaattaattgaaatgtaataactaagaattggctgtttcgaggtagtcgataagatgaccatgtagaacacaccaatgcaatgagctagtgcgttgttatatgtaaaatggttctacaatcagcagaagggcagaaagtcttgagcggagttataatatgaaatagtgtattaacgcattttcaaaagttgattttcttttctcattggttcgaatctattaaacttgacctgatagatgttcaactttcttaggcacctgctttggttgcagaagggggtagccaagcacttgctctcaccgatggacttttgaggtcaatttattgcattgtttatgtggtacttttcctttagtttaatgttaactttcatggtttccaaataattttacactgcagtttatttttaccacattatgtgaagtgctcc

SEQ ID NO: 191293 - DNA, 483 bp, Zea Mays
ttcctcctctactcaggttattctaaatggctgccccgggaaaagaattcagcatagaaggggactaagacagggagatcccctatccccaatgcttttcattcttgtcatggatgttctaggtgtccttttctccagggctgaggaggctggtttacttcaacagctttacttggggaaaaatcttcacagaatttcaatttatgcagatgatgtagtcttgttcctgcaccccactcagtcggatatctccattactctggatattcttgaactctttggagatgcctctgggcttcataacaatactcataaatccaatatttaccctataaggtgctctgaggagactatcttggacgtccagcatatgttaccttgtgatattgcctccttcccctgcaaatacctgggcctccctctatcccttcatagattatccaaccaacaactctggcccctggtggataagattgctgacag

SEQ ID NO: 191294 - DNA, 451 bp, Zea Mays
cttggtccatgggtttgcgacatttttctccatgtgccacaacatttctgctgatgtccatgaggtggcacgacgtcagcgggaaactgacgacaatcttcgtcgtcaagcttccaccatgggtatgccatttgtccctcgctcgcctgacgtgcctctccatcctcctcccccggagatcaatgagtggcaccagcaggcctacggggtgccatttatgtctgcagacgacgaagaagaagaagaagcctatgttgatgatcgcgagcagtttgccccgcctccctaccatggggatccgggtcaatcatcctctcaccctccgcctccctacccgggtccgggacccattcctggtgatcctaggccatccggctctggttaccatcaccaccctccacctcctcctgatcatcgtacatcttcggcatctgttttttctgcggctgat

SEQ ID NO: 191295 - DNA, 284 bp, Zea Mays
aaggactacttcaaagcttcagacctaacttcgtttcattaaccttcagcgccatcaccctgaagaatgacgaagaacagggtaatgaggaatctggtaaggaaaaatttaaggtaaataataaaggtaaagagctatactttgttaaccaggtttcgggcttcgtttccagctaactcgcggccgcccttagccccattttgagtgatgaacctgttccatattgtaacatcccactgatcccacacaatggatgttactaaaaacccttcctacaaaactta

SEQ ID NO: 191296 - DNA, 304 bp, Zea Mays
caagttggggatgctgaattcagcttatttagctcttctccctaagaaagttgatgccttgtctgcaagagattttagaccaattagcttaattcatagttttgctaagttggtcaccaaaatgcttgctaatagattgggaccttacctacaggagttggtggcaactaatcagagtgcctttgtgagaggcagatcgattcatgacaacttcatgttggtgcagcattcaattaaatctctccacaagaagagagtctctagtttgctcttgaagttggatatctccaaagcatttgattcg

SEQ ID NO: 191297 - DNA, 401 bp, Zea Mays
gtctgaaagcagaaataccaggtaacaaaggtatggcatgatcaaacgccctcttgggtggtaaaccttgaggagtagcaaacaactcttgatgcttgtttaccaacttggctatactgtcaggcatctgctgaccctcctttttagtggtaattctcaactccaacatttgttccactgcttcttgcctgactagaccccttagttgtgctttcgacaactgattacatgttttcaggttggggattacaccctgcagatggatatcttttcctttatacacaaatttcatccacttctcagcccagtgtatggatatggggctgtggctctcaagccaatccatgcctaatattagatcataaccatcaagagacagcaacttgaagtcagtctgaaac

SEQ ID NO: 191298 - DNA, 315 bp, Zea Mays
ggtaggcagtgaagcagctttgactattccatcctgtttgtcttccatattctccctttgaacagcaacgtcactgacggccacctcagttttcactccaacagtctgatcttcagcgacatcaccacttacttgcaaaggcctgaacgatccctcttcgtcaattttgaaccctgaatcctcctcctggccagccgcattgctggtttccacatgtttgagcctttgcgggtcatctgaagcaacctcaactccatgctccacaacattgaactccaccgtgccccaatcgccatctggatgcaccgagtcccc

SEQ ID NO: 191299 - DNA, 320 bp, Zea Mays
ggcggctaaggtgttttgttcccggcgatcccaagcggttcagtctgattaaaggggtcggggagcatcactaacatgtaagggtgctagaacaagaacgagaagggaatgagcagacctggggaaggctggccgcggtgaggtgagttcacggtggcggagagtggatttggggcgaatccaaaattcacgagttctagcgaaggactgccagcgattaacggtggttgggtggatgatgatgttatgcagctaggggagggctcaatttataggcagcttcgacggtggccgggaattttaacggcgatgtgtggcgg

SEQ ID NO: 191300 - DNA, 321 bp, Zea Mays
gtgcgactagtgttcaataacggagtgagtaggtatgccaccgtcatagaacgtgataactactatatgttggcaagagttgcaaggacgaataggacgagcatgcatcatgacatacaattttaagttaaaccccctatgtaatagcttagtacatgtttcatccatcctactcatgctacctatctttgatttttttatactaagttttcctacttgaaactcatttcatttgattgaaatgtagtttataaggtacagttgctaaaggatctttccatagtgcacaacatgtttcacatatctcagttgaagaaatgt

SEQ ID NO: 191301 - DNA, 703 bp, Zea Mays
gttgatcacatagctatgtcgcattgctatgttgctttgacctggttattgagtgtattttagccttattaccttatttattgttttttatttgaaatgaccgacctcaggtcagagaaattaacttgcttcgtgaaagcaacatacaacttagggaggagaacaggcacaattttgaagaatgccaggtaatatattaaattggtaatgtttaattgctggttcatatctggatgtgcataattttttattttaattttgtgcgttcagaaattccgtgaagaagctcaaaaggctaaaatggaatctgagaggttgcagaaccttctactggagaaggaggtagacgctgaaatgtgcaaaagagaactggaaatgcagaaggcagaaatagctaatctcaaccaaagtatttctgaggtaagttttagtccactttctaacagtaatgataaaatgccatgaaattcctttggcttcattaagaacagcagctgtggtttttgtcccaagcaagttttagtctgttggtttgtaatatgcaggttattgccataaaaaaattgtaaacattgtgagaaaacaatatgtgcataaaaatctatatattaattcattctattcttcatatgttgagttctgcagttgtgtattaatgttttcttggcagctgattgaaaatagcaaaggcattgatttgaac

SEQ ID NO: 191302 - DNA, 327 bp, Zea Mays
gtttgtttgttgctatgactatcctatgggggtgaaatgggcgggagcgaaacctaggaggcaaactcgacaccgaagagggcggcaacgagtggggtgggagaggaaaaccctagcgcgtcaagggtgtcaaaggggcacaggtgtggacctccggtttgctaatgacctgcaaaaggattaatatgctcagaggccagaataaagaatataagtaaccacaagtttaaaaagaatgatattacatagaaaaagctggcaaattaattaggatcaaaaagcaagacactgaacctttgtggctcgctttgctgttggtagtggtgg

SEQ ID NO: 191303 - DNA, 329 bp, Zea Mays
ctttgagtttggttctcctgctatgctcctcaaaggagagttgcttttattttgttgatactggtgggatggagcaaattattaatctgctttgctggaggacaccaaaatctgcagctaccacattgcttctcctaggtattgtggagcatgctactcggaatggttttggatgtgaagcttttctgggatggtggccacgagctgagcacaccagcatacctgttggcagcagcgatggttattgctctttactgaagcttctactggaaaaggaaaggcatgatattgcctctctagctacatatgttctacagcgcttgcggttt

SEQ ID NO: 191304 - DNA, 413 bp, Zea Mays
gttgtgcgatgctttgcaagggagcatcttttattgtctaggtggttaggatgcttgctattcaattcttacctaagagacctgtctatgagttctggcaaggcgatggcattatgttttttcttgtgcatttgtttcgtccagcagcgtatatattttattgtgaatagttattccacatcaaggatccagtagtgtccttcatcgaatttatacttgctaatctgctatccatacttctaagatgttatcatttaactctgagtatttcacttgattagctaatggtgtaatggaccgggcattgcaacgagcacacaagatatttagtggttctctctcaaacagctattagtgtggcttacttaattttttattgcacacaagaatgcatgctcggctctcctcaccag

SEQ ID NO: 191305 - DNA, 302 bp, Zea Mays
ttggactgctgaaagagagggatctgactgtagaggctgtggttgctgattttgtcttcaagaacattcagcctttgaaggacagggcatacccggcctatctgtaccgaggtctagctgactcaacccgggtcaccaacagaagaattcccgctgtagacttggtgaaccggcttgaaatgatacttagaggcaaggtatcaaatgttggcgcccctatcgcatactcggtctggaacctgcctccttccaaggcctttgctcattttgtgtcgaatcctcctgctgctgatggcggtttg

SEQ ID NO: 191306 - DNA, 470 bp, Zea Mays
taggcgatgcgttcaagatgaacaaaaagatctcaggtttataagaacagcttatgtttatacttactatgtcgccatatttaccagacatgtactacatgttacaaccgttgatgtcttgactagtgatcacaggtccacagctgaggcctaacttttctatgagttgatagtacgtataggtgttaactgaaaacaatatcgcttgaaagcagagacactgtgcataaatttttgctctggcgcaagtcaacatgactgtgtagaggtgctcaactgatagattacagtcctcagcataagcttcatggcaagttacagtagtaacgaagttgatttttccttgcaggtaacaattcatttgcaagttcataacagtccatttgtgtcccatctcacaaaaacgttaacttcttcaatagcagactagtacactacgtttgtgttctgaccatttttgttactctctc

SEQ ID NO: 191307 - DNA, 372 bp, Zea Mays
aaacaacaggagactcatgattgtcagtacaagtatctgcaacaggttctacatcaggactagcgtggggatagagcaggaacgatgactgtaggtttgggtgacaggtggtttagaggattaagatggagatgatgtggaagtggaaggaggcgtaatgggaataagagcatctggtttggttataggagaagattgtcacacagatgaaggatcttggatgggaggaagacataggaagcatgaggagtgggtggacgagttgtggaagaagggtcgtttttcattaaaactcacatcttgtgaattatgaatgcgacaagatgggttataacacttttttctcgaacgcgcaggaggactacacgtcat

SEQ ID NO: 191308 - DNA, 654 bp, Zea Mays
tatggagaactattgaaggcaaagagacatgttaaagaggcccttggcaatgttgagaaccgtttcaaggatgttgttgctgttattgagaagatggatggaagacttgattctccattgcatttgacagcttatttgctgaatccacactacagttatgctgacccatcaatctttgatgttccataacagaaagttttatcaattgtgtggagactttttattatcatgacgacgaaatgcaagaacaagcagccaacattgaactccagaagtttcagaatagagaaggcccatttagcaagaagcttgcaaggacttttgaaaacttcgattataatccaggtaacagttgtttgtaaatagagaggttttttatttcagcattgtaacaagcaatctgttatactactaactaatagagaggtattttatttcagcatcatggtggcggctttatggaactgaaacaccagctctacagaagatggctaccaagatcctatctttaacagcaagttcttctggttgtgacttgtgaaagaaattggagtgggtttgatggggttagtacctatctgttatcaaaattacagcagcattacaataaaattgcagaactaaaagtgctcttatttttaatttataggtgca

SEQ ID NO: 191309 - DNA, 313 bp, Zea Mays
tatggccctattttactataaggtttaactttcatcttatttattttgtgtagcagagaaaaacatttgatattctgtaaaggtacaacagataagaaatgtccactcaagatgatacatatcgcactctggaatgcatgctatgtgacaaaaaaggaaagccattgagtcttaagcaacacttcttggaaagaataacaaacaacttctccgaggacaaccttgttggccgtggaggatatggagaagtttacaaggtatgcgataatttttctatccagtcaccaacgcatttcaaaacctaataaaaaat

SEQ ID NO: 191310 - DNA, 460 bp, Zea Mays
gctagcgtcatgaggatgacgagcgaggcgggggcaccgggaaggggtggggttgtgcagtgtcgcgacataaggaatgagacatcgaagcggactggatcaggcggtgtcgataagaatgggactgggccatagtcaaaatgtttctgggtcgattggattgaggagcggggtcatgggtcgttggtcgacattttaaaaagggaagtatacatctatgggacgggaatattatgaatttgatatgttgagtctaatgggccgatgatctcaggttgattctatgggtcaagggtcgtgttctaacatttcaataacaacctaacaccagtctaatatcatctcattctaccattgaaactttaggctatccctatcagattccctatcttatactctattttaaacctttactttacaaacagtatcatctacagttatgtgtcccctattttacact

SEQ ID NO: 191311 - DNA, 389 bp, Zea Mays
gtcaagcatgagccccatgctaccattgccgtgcaccagctaccgctgccacgcagtgcgcttcatcatgatcgtaagaccgaagtacaatctgccttgcagcagcaactcctcttcctctgaccgatgatgggagccatcggcgatgacggttgggggagtagtagttggcaaccacctccctcaccgttgggtgaggtgctgctgctccagtgctcgcctggacaacgtccaagagtttgccttgcttggccagcgacaggtcgcacatgatacatctacaatatcatggatccatcaaaatctcagtccaggattcaatatattacccaaaagaaattgaaggaggcgaaagagttaccagaagaacaagtagagaaattgacagg

SEQ ID NO: 191312 - DNA, 498 bp, Zea Mays
tcttttttgtgctcttctaaatgtgatttcttttaaactaactcaattaaatcttccagtggaaagcatgggcctctgaagttatcctctaccagagtgatcagcatttcagagtatttcaaggaagtgtctttgctggacagggcacctaggaaccgtttcattgaagatattgacgatgacctcccgttcttaactcatgatagggttcacaagctactgagatctggattacccccttgtatttcagcaagacctgtggcttatcgattcttgacaccgatttcattgaagaaaaccttggtgtgctgcctgagttggatttactggtattcagatcactgaacatgagtcgctctgagtctgaaatagataattgctacaaaccattcgtgaagctcttcaaggctcttgagggtaagtatgctggaagggatgcaatcttcaagctacccaagtcacttgatctgcatttgtagtaccttgagttgcctattg

SEQ ID NO: 191313 - DNA, 359 bp, Zea Mays
gttaacttctggaagtggttcaaccaattgcacatcgggagaacattgacgatacgggacctgctgtcatggatttcatttataaacgtgactgaacaaaatcttgggcccgagcaagctttgatacatggcctgtttcttattttgcttgatgggctctcattaggtctaaatgtttctaaaactgaggctactgagatgaggaatacttgcttgtccttccttctagaagaattgcagaaagttgggggcacggcagtagattcatacttgaatgatctaaataattatggctggggtgacaatatgaaaaaaaaagatatagatcatggttgtttggaagatcatttcggcattgc

SEQ ID NO: 191314 - DNA, 314 bp, Zea Mays
ggtatttgcggcagtggcacgaatggactcggtgtgcctgctgctcgccctggcagccacaaaggactggagcgttcatcacttggacatgaagtttgcctttctcaacggggagcttgtcgaggtggtcaatgtgcgacagtcgcccgtattcatcgtcaccagagaagagcaaaggtgttgcgacttcggaaggcgctgtacgggctgcgctaagcgccatgagcgtggaacttgaagctggatgctcaccacgctcggcttcatggagtgtccatttgagcatgcattatatacccgacgcacgaaggagg

SEQ ID NO: 191315 - DNA, 598 bp, Zea Mays
tgcggggagtaaatatttcagaatgtgagcatagccctgatgagcgggtggttcagttaggcatggaggaaaccctaagcgtgcagcgccgcatagccctgggttcccctccaaggatcgccgcgtgatgtttgagaagacgacgcctgcttctggaatctggcctcgaagctcgttgaaggacaggttcaaactagtgagcacggtaagattagccaggtattttgggatggctccggagatattgttatgggagaggtctagagttttcatgctgatcagcttctcaaaagagggcgggatcgggccgtggaacgaattgagtgatatattcaggtaggtcatcatctgaagctgtccaagtgaatccggtaggctgccaactaagaggttggcggacagatccattatgttcatttgcttcaaaattatatcaactggcagtgtgccactcagcaagttctgagacagatctattccgatgagcctatcatgatggaacaggctcgctggtatggtagacgtgaactggttttcacgtagtcctaggagctctaggttggagagattaccgatgccgctaggtatggagccggag

SEQ ID NO: 191316 - DNA, 428 bp, Zea Mays
tgccgaacaagtgacttgagaaaggcttgctggctactcatgatgatgccgctgacgggttgcaggaggaacgagtactcctacaccattttgattcaggggctctgtgaagcacggtgtgtaagggaggcacttgtgcttgtgttcatgatggtacaagatgggtgctccctgaatctgcacacgtatacactcttgataaaaggtctttgtaaggagggcaggattcatgatgccagggggttgcttgatgaaatgcctttgagaggggtggtaccaagtgtttggacttataatgcaatgattgatgggtattgtaagtcaggaaggatgaaggatgcattggggattaaagcactgatggaacaaaatgggtgtaatccagatgactggacatacaacagtctgatttatggcctatgtggtgg

SEQ ID NO: 191317 - DNA, 489 bp, Zea Mays
tcgaacatgcacgcatttctgtgcttccaaagctcccaagagactaaaatgaccaagaaattcttttttaaaatctgtggatagcaacagtggccttacaccaccaggtccaaaacgggatagaggaattggggcgtggaaccatatcaagattaagtttcctcaaaatcccatcccaaacttctctgggcagcacacaggagaaaaggatgtgatgtatggtttcctctgactgatcacaaaaagggatgctgcttgatggggtaaccctcgcttagccagtcgatccgaggtccagcactatgcttggccggttattaagaacaattttatggctgccttagggatgatcttccatggggatgtttctaaactgcagctccttgactctgcttatgtgattttgctgcctaaaaacaggaggccatagaggttatagattttcggccgattagcctaattcatagctttgctaagagtgaacatatc

SEQ ID NO: 191318 - DNA, 311 bp, Zea Mays
gaaatatacaacaaggggcatgaccttcttggtgatctcaagattgcctctttgctggagaaaggtgaagatgaggatcatatcaagatgcaccctatggttcgtgccatggctctgtggattgcatcagatttcggcaccaaggagaccaaatggcttgtccgtgctggagttgggctgaaggaggcaccaggcgcagagaaatggaacgatgctgagcggatttctttcatgcggaacaacattcttgagttgtatgagaggcctaactgccccttactgaagacattgatgctgcaaggaaatcctgg

SEQ ID NO: 191319 - DNA, 380 bp, Zea Mays
tgttcctacgtctcctacaatcgaaagacagtggcaggatcacctctacacgcgcatggttcgttctctctggtccatcccttctgttcgtttgaccccaaaactaagggaactgtatggaggattaaatcccctgcaaggcaaaacccctctcaaacctctccaattcccttgattttgtaatcaaatgaacacggcaggctgctttccctttgcaagttcaatggagtaaaaagctctgctcatttgactgttcctttccagtgaatcttctgacctcctctctcgtagtttaaattatgttcaatatctttctttgtagttgcttttgctcacgaaaggcatacgagagtaccattacgcatcatttgaaattttct

SEQ ID NO: 191320 - DNA, 2116 bp, Zea Mays
gttaatgtggaggatgaggagacactttcaagcgttgctcaatgtattgagcatctacgacagagttcttcatcctcacaggacaaagagagctctttgaagcagttattagatcttgttcaaactcgtgatactgcattcggagctgttggatcgcattcacaggctgttccaatacttgtatctcttcttagatctgggccatctggagttaagatgctggctgctactgttcttgggtctctttgcaaggaagaggagttaagggtgaaagtcttacttggtggttgcatccctccattgcttgctcttctcagatcgaagtcagctgaaagccaaactgcagctgccaaaaccatctatgcagtttcacaaggtgggataagggatcatgttggatcaaagattttctttacggaaaatgttgttcctgtactgtgggagcaacttaaaattagtctcaagaatgagagtttggtggatggccttctaactggagcactgaagaatttatcaaagaatacagaggggttttggtcagcaactgtgcaatgtggtggagttgatatacttataaagctggttagttctggacaaacaaatacccttgcaaatgcttgctatctccttgggtctttgatgatggaagactcttctgtttgttctaaagttttatctggagaaacaactaagcagctcttaaagttacttggtcctggcaatgaaacttctattagagctgaggctgctggggctctcaagttcctttctgcacagagtaaagaggccagacgtcagatagctaattctaatggtattcctgctcttataaatgcgactattgctccatcaaaagaattcatgcaaggtgaatctgctcaatcattgcaagagaatgcaatgtgtgcattagcaaatatatctggcggtttgtcctatgtaatctcaagccttggtgagagtctcgagtcatgttcttcgcctgcacagattgcagatactcttggtgcattggcctcagccttgatgatatatgacacaaatgcggaatctatcagtgcttctgatcctgttgacattgagaagacactgttgaagcagtttaagcctaaggttcctttccttgtgcaggagcgcataattgaagctttggctagcttgtatagtaacccggttctctgcaagacactagcagattctgatgcaaaacgcttgcttgttggtttaataaccatggcagctactgaggtgcaagatgacctcacaaaatcactgtttgctctctgcaaaaaggattgtgacctatggcaagctctgcaaggccgtgaaggtgtccagctattgatttctttacttggtctttcatcagaacagcagcaggaatgtgctgttgctctgcttgcgcttctttcaaaggagaatgatgagagcaaatgggctatcactgctgctggtggcatacccccacttgttcaaattttggaaactggatctcccaaagccaaagaagattcagcaaccatccttggcaatttatgcaatcacagtgaagacataagagcatgtgttgaaagtgctgatgctgttcctgctttactatggcttctgaaaaatggaagtgataatgggaaggagatagcttctaaaacactgaatcatctcatccacaaatcagatacaggaactattagtcagctgtctgctctcttaacaagtgaacagcctgagtcaaaagtttatgttctggatgctttgaaaagcttgctttctgttgcaccacttgatgatattctacatgagggaagtgcagcaaatgatgcggttgagacaatgattaaaattctaagctcacccaaggaagagactcaggctacatcagcaactgctcttgctggtctatttcattgccgcaaggacctgcgagaaactcatattgcagtgaagacactctggtcgctcatgaagctgcttcatatgcagtctaacaaaatactaatgggggcctcatgttgccttgctgccatttttctttcaattaagcaaaataaggaggttgctgcaattgcccgggatgccttaaccccacttgtctcacttgcaaattcttcagttattg

SEQ ID NO: 191321 - DNA, 350 bp, Zea Mays
gtctacaacaacctgcagctccaccgcggcgtgttctccgtcgatcagaacctctacagggacggctctacgcgctggatggtcgaccagctggccaaggttctcgttaagctcagcgaggtcaacgtgctcaccagcgtgcagggggagattcgaaaggtacttatgcagcaggtttaactaaccagaacacccgtacctccattgtcggctctcctctactacatttattaatttcctcttgctataattttggtttagtcaaatttgaatttcaattcattcccttttatatatatcatttgaatgaccaagctctttgagtagtaatgaacaaactgttgttttcc

SEQ ID NO: 191322 - DNA, 349 bp, Zea Mays
gtagcgagagcgctgtcggaagtgatagggatggacaacgtctgtacaccggccatgggatagtgcgcatgaagcagcaactgccaaggagcagcgctaggaggcgcgatacagcagcgccggagaggcgcgctaaacagtggaagagtgaggaacgagaacccaaactcgtgataccatgaggggagatatgctgtagatatggttgatgaatagatgcacagaggttcacaggatatatagagatcaaacggcttatagaaatagggtctgattgatctcctagaaccaggactacctaaatagaaaggatctcttatctattagacccccaatcagagaaccttcc

SEQ ID NO: 191323 - DNA, 461 bp, Zea Mays
gtcacaaaaaacagttcatccaaccttgtgttatgcacagcagcctgatatctggcctgttcgaactcatgcacatatgaatccagagtatccacctgcttcagatttctcaattttctcagagccttggcatacgcatctgccccaaacttgccctctactgctgtcacaaactccgtccacaccctcgctccttgtttcaatttctgcacctgccaccatctcgctgcattctgttccatgtgaatagaagcagccgaaacccacagagacgatggaacttgatacatgtgaaaatattccaggcacttatctatccaaacagcaggatcatcaccagaaaatctagggaaagacatcttaggcagtacctgcgtgttcgcgtgcccgatcggcctctcctctcgatgtcgatccaccctcggctcggaatggtctcttctctgaaatcctcgctcaaa

SEQ ID NO: 191324 - DNA, 831 bp, Zea Mays
ctgggccaagaacaccctattcggcccaacaccggattacctccactgcggcccaatttcacccccctgcgcgcgctcactggtcgaccgggccctcgactcagtccctctcacgtacggcgtctagtcactggatggtgggacctacctgtcatctctatctcttcccccttcttcgttgtttctgttcctatccgcgtcaacaactcagactccgcgcggagctcacgcagtcggcgaacggagtccgcgacccgacctccaaccccgccgagatcttcgatgggcgacctataaggtccggccacctccgctcgtccagagacatcatgctgtgccagatatcctaacagacaaagaagttcgtcgtcttctccgcaattccgccctcaaattccactgcgtcgacgacaagcttgccccgtgctccttgtgtagatccccgccaacttcccccatgcacccgttgttgtgccactccctgtccatggggtcgcgacaacctcatcgccgccgccctgtgattcgccgtgaatcgcactgctcgtgtggacagccctgtcggcctcttcattctcggtaagaaatccactacctgcttcgtcctcatccaggaatcgcgtggcacatgcccctttcaaattagaacaccgtagcgccgggcgtggtgctcgccgaagtacagaggtggagccgtcgtcgtcgatacctgcatatccagaccacatagggcaggcatggggccggggtgattcactgtgccctcggaattgcactcgtatgcttctcagatggggagctgggcggcgttccgtgcgtggtgggcggtca

SEQ ID NO: 191325 - DNA, 338 bp, Zea Mays
acctactctaccattgaggcggactaccggaagcacatcatgccgcccaagactcggtgccaatactgcaataaattgttctaccccaacaagatgaaggtgcacttgatgtatcactgtgggcctaatgctaaacgcacagaagctcaggctaagcagcagagcaagaggaagtgggacagcagcaaggaaaaggtgaaggagaagaggagggttcataagaagggtgatgaggtgaataaggattttcaagagttggctgatgaactgggcagacagttaaggggccaatctcctctgcattctgtgcggtgggagcgtgttatcctggatgaggt

SEQ ID NO: 191326 - DNA, 431 bp, Zea Mays
ctcttcacagtaatgctactactgtttcggatcgctgtcccctaactcttagagttagagagggggtttggggaagagaagatttcacttcgagagtttttggcctaagttccctggttttttggaggtggtgtctgccttgtggaatctacctttgtaggattcttgccccttggagaggccatctctgaagtttaaaagattagccaagtgtttgcaatcctgggggcataaagaggtgggtaatgtcaatatctagttgggtcttgctcgtgaggtgttgcatagactggaaatggcgcaagatatcagatctttgtccagggaggagttttggttatggagacagctgaaacaacattgtctggtgcttgcgtctttgcaaaggacggttgcacgtctaaggtcccgaattcaatttctgaaaggag

SEQ ID NO: 191327 - DNA, 745 bp, Zea Mays
ccggagtcaatcagcataaccagcacctgatcttggatcaaggatagcaccctcatacaaccatcacactctgtcccctttatggcattccaggacagctgatgtaatccttccactatatgctcctcctcctgttccagcttcagcaacacttcgtcagttagaactgtgctcatatcctccactgtcaactgatgtatttgagtcactactctcttgggacatttggcttgatgcccaggttcaaatttgtctccacatatgtaacatagcccattggcccttctataatctcttaactgcctttccttattcaattcaggattcaggattccacttctaccccctattgtttgagtcttgattcccataactcccttctgacttctcatcctattcttctcggcaatttcctgatataattgagctaatctcatggccttatccactgtcttggacgtccgtgccatcacttgggactgaatctcagacttcaaacccctcacatagtgggtcacaaataaagtctcatccaactccggattatgcaaggtagctgcatatctgatatcattgaaagcctgggaatattcttctaccccatgctgctgtttcacattgaccaacgctctcatagcatgagggtactcttccaccccaaacttctccctcaccgcatgggtgaactgctcccagtctcccaaaccatgtttcagtttatacacctgcagccacttcgacgcat

SEQ ID NO: 191328 - DNA, 615 bp, Zea Mays
gagggtgcaacacttccaaaagtcccttcagaccttcaacttgagaagccgaattcttcctcaagatactatcagcagaatttgattgaatttcaaaccattgaaggggaaacttatggagctggatgcatcacaccttgccttaatggctctgcaaatcaatctcattcaagagatgacataattcatgaggaacatgcacactgtcattcaagatctgacttaagttgggaagaatatactggtggaaccattgatgtatacccttattccacagaagcttcaatgtatagtagctgtatgccacctgtatgcatgactgttcagacacctaaaagttcacttgccagtgcgagaaaaagtacaccaggaaatttgtttttttccaataatgttcacatagatgaagcaggtggtggaatgtcaaaggttgataatgacgtccttgacttggataatggttggaatcatatctcagatgaagattctgtagcaatacatgatcacaacggtaatcacaatgaatattttccaacatctgacagtccacagagcattttggtttccttgtcaattgcatgccctctgagaggaattgtatgtaagcagtctcag

SEQ ID NO: 191329 - DNA, 583 bp, Zea Mays
cactgcaccagtagctgttcgtccatatcgttaccccaattgcaaaaggatgagttagaagctcaatgtgcggatatgcttcgtcgtggtataatccgacacagtacatctgcattctcagccccggtcctcctagtgaagaagcttgacaatacatggcgtttttgcattgattacagagccctcaatgaacacactatcaaggataaatatcctataccagtggttgacgagttgctagatgaactccatggggctcgattctacactaagttggacctccgttcagggtaccatcaggtccatatgcacacaaggatgacattgagaagacatgctttcgtacacaccatggtcattttgaatttttggtcatgccgtttggtcttaccaccagcgatgtttcagagcttgatgaattatgtactgcagcccctgttgcgacgttgcgtgttggttttcttcgatgacatcttgatatacagtccgtcgtggtcaacccaccttcaacatgtcagagcagtgatgactttacttcgcgccaacagtttatttgtcaagaaatctaaatgcagctttggag

SEQ ID NO: 191330 - DNA, 473 bp, Zea Mays
aggaatgtaaagattctgatggaaacaatgcaagtgaatcgagtgttgcccaaaagctagtgtctgttattgtgctccctgcttcagacacaggcgatgtgagtaactttgtagaaaatgatgttgagaaatctagcagagatcaggagaaggtagcaaagaaggaatatgaagattctgtcgtggcaaagaaggatcacgaagatgctatcctcagaagggcacggtatatagaggtatacctagtatctaatcccctcctttctcatagtgctcttttttgcttctaaaaaggggaaacacattacttgggacaggcaaatattaagagggctggtgaatggtctctctgcaatatttctctagagaagaagcagaagagccactgggattttgttctggaggagatggtctggatggcaaatgacttcacacaggttcttcctcaagtgttccttctataaactgaaata

SEQ ID NO: 191331 - DNA, 354 bp, Zea Mays
cccttcgctcgaccgctcccgcgcctcctcgcgctctacgaccccgacaccttctcggacttcgggcacgtcttcctccccaacggcacagatcccggcctcgatgccgccgccgagccggcgcccaccatgttcgacaactgcatccctctctcggaggcggagacctaccgcctccgctggacgctcaatgcctccgccggcaccgtcgagatcggccttgaggctgccgtgggctccgagtactacatggcattcgggtgggcggaccccaaggccaactcacccgcaatgatccacgccgatgtggttgtcgccggcttcacagaggaaggtactccatttgccgaggac

SEQ ID NO: 191332 - DNA, 275 bp, Zea Mays
ctttcctcggaggagatattccaggtacggggtctgccagttcaggtttggtgtgaccccattccgctctatctcgatgcgcagggcctcaccctcggcggccgagggtacctcgagctaggtcgaggtcccttcgggttcgggtgtgtcgttgagtttgacggatggttgatatatgtccctggagaagacattcgggggaaccgtcatccgtcccgaggctattttagccagctcatctgcagtctcgttgtaccgtcgagcaacatggttga

SEQ ID NO: 191333 - DNA, 507 bp, Zea Mays
caaaattgggagtaaataaccctgcaaatcactctgtcaggtcggctgatgatcttcgccatggtacagtgacaaaagatctgaggtgccgtgcatctcaccgtcggtgactcgccgccgcgattcgtgtcgccaccgttccaatttgggctcggtaaggaacggataacgccggagttagataacgcatacgtggcaccatttctcgagtccagccggagacctcaccggcagccaccgtgacccagtgactttgccgcggtgtcacccatgccgcgatctccctcactgtgtcttctaccaacgtggtaagcatgcgctagcaaagctatccggggccggagatcgtctgccgggtcgccgtggctataaatagcacggtggtccacggtggggtatgaacttcgcacaaacggtgagtttattgatgcctaaattcgcactatctctgccccctccttccaaattggttgagcacggtaaaactagagtcccttgtcgtcgtat

SEQ ID NO: 191334 - DNA, 933 bp, Zea Mays
cagattcgtactctggggatgctgcgatctcgctttgattcaatacctttagcctttaactcgtgcctaattcctgttgaaacatctgatgcaaaaaggaagaaaggtctgaggtcttacttacacaatcgtttcaaagaggtgtcattctgtactcttaatatatttctggcgtttttctagctttgaattgcttgattgctaattttatggatattttttgttattgatgctacttttcagatggaacatgctgacaaggagaatatagcagcaaggttcgcacaaatgtggaatgaaattgtcaccagctttcgagatgaagatcttatagacaataggtgattggattatatgggtaaacttaatttccagcttgatttgtttttgctgacctaagttgatgcccacaatttttgatatagggagaaggagctgctacttgttccttatgtgtctgatcggacccttggtgtcgtgcagtggcctccatttttgcttgccagcaaggttattttccgcttttaaattttatggctttgttgtttgtattacatcatgttagaggcaatgctcattcatacattgtttgcaagttaaaaagggttgacctgttgttaacatcatgaatgtcagatcccgatagcagttgacatggctaaagatagcaatggcaaagaccgagatctgagaaagaggcttgacaatgattattattttaagtgtgcaattgaggaatgttatgcatcatttaagaatatcatcaatggccttgtacagggtgaaccagagaaaaggtccctcctatatttcatctattaaactctgaagaaataatttaccgatccatggtctacttgatgctgtttatttgctttcagggtcataaataagatatttgtagaagttgaaaaatgcatctctgaggacaaa

SEQ ID NO: 191335 - DNA, 452 bp, Zea Mays
ggcgggatgagcgcgaatctgggcgcggctcgtcggcggcgagctgagttgttgatctgatctatttcagttgcagtactgtaccatgggacttcctcattcagttggactgaccgagcaagtttggcgctaattttcttccgattttcaatggcaaccagtggatcgaccagtaacaaagttgttgtctgatgatctaacaacaatcttgctatagcaaccatagccaaattcttattagatcaaggttgatttccagttcaaagttgactcagtaccactgttagtctgaatttcatactccagacagcctgaaagttcaactttgagtgcacttttctccaaattcttcacaacaaccatgcttactctcttaagcaaagttattcacctaagatagatctacatagttgatgtggtgacctagggcaaattctccataatttggaaga

SEQ ID NO: 191336 - DNA, 400 bp, Zea Mays
ggagggcctcctcgatcctctcgatctcacgctccgccgcctcatcctgctctgcggcgacctctgccaggtcacctacgattccttcaactccgacacccactccaagtactgtggcagctgccgctactccaggtccacgctcttcgcccgcacgctgttcccggccgccgccgacatcttcccggcggcgtacctctacgcaacctcccagtcgtcgttcccgggcggtatcatggtgttctcgctctcccgcgaggcgtggaacaaggagtccaactggatcggctacgtctccgtgtccacagacgccgccgcggccgccacgggccagcgcgtcatctacgtcgcgtggcgcggcaccatccggacgctggagtgggtcgacgtgctcaagccg

SEQ ID NO: 191337 - DNA, 461 bp, Zea Mays
cgctacggtggacgatcggaggcgagggctagtgttctggcttcgtaactacctagcggagctaacggtgcactcaatttatagcctctgagagcgatgggctccgaattttgaaggggaaagctggcggccaaagagaggggtgagtcaccaccgaacgctaccgtggctttcaccgaggcaatgttccaagcaatgagcaggctatcaacaacgacctactgtgacgtggtaacacgtctaagtacgtggcacggctacgaagggcggcgaactccagcgaggacacctcggttaatcacgcggcaagtgggtacggtgaacagtccggtgataaggctccaatcccttccctgcgacgagatctttcaccgccatccgttatcagcacaccagggcgcacgaatcgcgacgccggtaaggatcgcggagcagagtttaccggtgacggtgcactgaac

SEQ ID NO: 191338 - DNA, 417 bp, Zea Mays
ccgaaatattgctgcagatgtccacgaggttgctcgccgccagcgggagaccgacgacaacctacgtcgtcaagcttccgctttgggtactcccttcgcccctcgctctcctgatgtacctctccaccctcctcctccagatgtcaacgagtggtaccagcaggcatatggggtacctttttcaacagccgatgacgtcgaagaagaagaaacttattttgatgatccggagcagtttgtcccgcccccatatcacggggatccgggccaatcgtcctcctatcctccgccccaggacccgtctggcagtgctcctcctccggctcagtctggagaggaacactttgcctccgacctggcgcaacacttcttcgctcctcatcatcctcctcctcactggtgatcgttggattggcg

SEQ ID NO: 191339 - DNA, 384 bp, Zea Mays
gaaggggaaaacattctcatcaaagataacatgacgagagatgatgatgcgatgggtgagaagattgagacaccggtaccccttgtgatcaggggaatatacgaggaaaagacaacgggaggatcgaggggcaagtttgtgaggagcggtggcagaggtgttgcgatagcaagcgcacccgaagactcgaaggtgctcataggaggaggtggtgccgaagagggcgaaaaacggagtgggatggggcgccttggagggaagacaattgaggaggtaggtgactgtgttcagcgcctcagcccagtagcgggtgggaagagaagcctgaaaaaggaggcaacacaacatgctggtggtggtgtgaatcatacgctcgacacaacc

SEQ ID NO: 191340 - DNA, 317 bp, Zea Mays
gcatagcagaagccgaagctactaggctggaggatattgatgtactcgaagaagaacggctgaacacagtaattcaatcagcacgataccagcaaactctgagacgctatcacgacaaggccgtgcgacgatgatccttttcagtgggagatcttgtcctctgccgaattctaacgggggagggacgacacaagttgtcacccctatgggaaggaccattcatagtagcagaggtcactcggccgggatcatatcgtctcactcagatggacgacacggaaattgggaactcctggaatatagaacacctcaggaag

SEQ ID NO: 191341 - DNA, 718 bp, Zea Mays
aataatgctttccttcaggggaccttgtcagagactgtttattgtgttcagcccactggttttgaagattcccctcatcctaattattgttgtctcaatcggtcactttatgggctcaaacaggctcctcgtgcctggtacagcagattcgcttcccacctgattcaaattggatttgttgaggccaagtctgacacttcattgtttgtctatcacaagggtgcatatatgatttacattcttcacgaggatgacattgtgttaactgcctcgtccatgccccttctacgacgcactattactgctctccaacaggagttttcactgaaagatcttggtcctcttcatcatttcctgggcatgcatattcaacagtctgcttctggcatcactctctctcagcgccagtatatgattgagatacttgagcgagctggtatgagtgactgcaaaccctgtacaacccctgttgatatcaaccccaaactctcagctgatggtgaccctgtctcagatcccacggaatttcgcagtcttgcaggcgcattacagtacctcactttcacccgtccggatattgcgtatgcggttcaacaagtctgtctccacatgcacgatcctcgggaaccccatttggcagccctcaagcgtatcctgcggtatgtccgaggcactcttcagttgggccttcacctcagcccctcttcgcagatggaac

SEQ ID NO: 191342 - DNA, 411 bp, Zea Mays
cagccatatcaaggaaggtgggtacttcgattgaggatactagcggtgacgctgttgaaggggacgattggacacaacgccatacgcctatgaagatcaccaacaatggtaattactatccaagtttatatggatcttgcaagacatcgatagtatgtagtctgactaaacatgtgcttacatcatcttggatccatttaggtgatgacgatgagggtgtcatattcgaagacgatgaggatgagaacgagggatacctattcgctacgcaatgtactattttcgatttttattatcctagcaaggcttatgtaaatattcatgtcttactcattgttttcaaaaaaatatcagatgaggataccgatgaggatatcgagatcgatggtactcaagaagaatctactgcca

SEQ ID NO: 191343 - DNA, 305 bp, Zea Mays
cgggggcggaggttaggaaggaaagtgcgtcggcggacagaggcggcgcggcggccatggtggggcgctgtagtgttgatggcacaatcgtgattgcttatcagaaggtaggaggagcaattcagactggaatggaactctggattggatggtttatcaggagaaatggtatggcatggtatggaacagaaggtcgcggcggggcgggacgaagcgtgtataaatcggtggcggcgtggagggtggagacaagcggaggaggaggttctgggaggttcaggtgccaacgagcacttccgtggagt

SEQ ID NO: 191344 - DNA, 919 bp, Zea Mays
atcaagtgttatctttctggcgaccgcgtgctccatctggatatgccatttttggcgattatctcacaccaatgtttgtgactagtacttcatgctctgatttctttcttattttgatgttggtggaaggatttttattagcatttaatctcttttttgtttttcattttaggaacgagcctcctactaaaggagttcttgctctgaacacaaacattgttagggtcaaaaggcctttatcgtacaaactagtgtggcaatctggttctccaagaacaaacatttttcatcagaaggacttggaggataagatctctaatattgaccagctctgctctgtttggttacctgtggcacctgcgggttatgttgcaatgggttgtgttgcttcatctggaactgctgaaccacctttgtcttcagctttctgtttaactgcttctttggtttcatcatgtaatctaagggattgcattgcactgaggtcaaatatatattacctgaacctgtttctgtatttgatgtatggctatagatatttgatatttcacactcatgcattatgtcctttaactgaatttttcagggataacactaacatgatattctggcgagttgataatgcttttggttcctttttacctggagatcctgcaagcatgagtgtggatgggaatgcttatgatcttcgacatatgctgttcgacagtgcagactcatcttccaagactgtctctagaaggcaagatagtagaaatgatttctctcaactagagagatcagaattgacctcaggtcggctatttgatgctgtggcaagctttaaactaatttggtcaaatagtgggacctcttcaccaaaaaagctctcaatatggcgtccaatgttgtctgaaggaatgttttactttggtgacat

SEQ ID NO: 191345 - DNA, 333 bp, Zea Mays
atttagttgtggcttactacgcttggtacacttgtcaggatgtgtgggatcaaatggctcgccacagaaaaaacatggtccattggctttacgataatcatgtagttgtcgttcacaccacaaaggagttgtggtaacggaacgctgctcaggtttaaccggtgctatagcagtcttatgaggccatatctttgaatgtttctgtcgactctggtcctgcacttgctcctgcaattgggccaaaagcattgctcggtcgagatcatgaggcacctgagcgagcactggcccttggatctcaaattttaggcccttgacaaattgtgaaacaaa

SEQ ID NO: 191346 - DNA, 622 bp, Zea Mays
atcaactagaaaagaatcggtccgattggatactgagccatctgtaccctatcaacaagttccagatgctggttctggcaggcactctgatgacgagcaatttcatgcagtctcctttcctccagatggcgagcaaacgttcactatgtcatataacaagatcacccggggaaggccagatgatcttgttgaaatgaccgcttgcatagtagaaccttcaattagctatgtggttgactcttgcaatttgtcaaatgatttagaaatggattatgtcccagtaatggacagtggcacaaatgctaatgttgtgaaagaaaagatgaacctaccaaacattgcagattccggcctggagtgtgctgatagtgcttatgtggttgatcatcagcaacatatcccaacatgccctcccatctctgaaaatatttgccaggatgaaaactacaacaagaggtctagcacacattcagtgtcaagcgaggaagcaccttcccctgactatccattcttaagggtatccaacatcaaccttccagcagcacccatcaaagtacaaccaccaccgatgcccccatctaaattgcttaataaaaagggaagcaacgaaaatggagattct

SEQ ID NO: 191347 - DNA, 1223 bp, Zea Mays
cggacatggcaagagaagaagttgcgctccgtcgagcattatttgtcactgttactggtaccagacccgctgttctcggctcggaggtgctggaggaagtggcccgtcgttattgcatcaatattgatgatatgtctattcaccagtccaagccagaagacttccttctgtttttgccggatgaggaagtggcgacaagagtgcttaatgaaggaaagccattcagaggccctttgttctcgctcgtgttcaagcaatggacaagatttgcacatgcctcagctacgtctttctctcacttgatggatattgagatccgggggatcccagcgcacgcgtggggtctgaacacagccaagaaacttcttcatggctcctgtcacatcttggagttgcaccccgcctctgcgtgcaagacagatctctcctcactcaagcttcaggcatggtgtctggatccgaagaagctttgcagggatatggacctccacatcattgagcgagagccatttattcaggaggcgagatgtctgacctacaagattagcattgctgctagtccggctccccttcagttaccctcggacagcagtctgcctccttcagatgagaatgagtttcatggtgaggaggatggagatgtccggggtccgtccaatccccggttccgacaaccacgccctttgcagcgtcagcctgtccaccatcgcctcagatcacatcagggcgtgggcagagaacggtctgtggctgtgcatggaaataggatggtggcgccggtcctagcactggaagatggtgctgctgtctgtgctggtgatgggctgctgacctcacctggaccttcctcgcctcagcacagatgtttggctgagccgctggagaaggctaggttgagctcgccccttcctgccactcatgtgccatgcatgacaaccttgaagaatatcttagctgggccgtctgggtctgctgttgtgggatcgctggattctgtcctccccgtttcgccccagcgacacaggactgttgctgttgctgggtcgctggaacaggctggtgcgaattcgcccctaccaggtggttcatctaatgctgtggcccccctgagagtctactcgagaagcagattccgaagcaaacacgccccaattcaggaaggacagttgatacaggtcgtggaggtcaacattacagagaggccttgtctgaatcattcggag

SEQ ID NO: 191348 - DNA, 444 bp, Zea Mays
ctcaaatgcgcaggagagtgcgagccatttattgaacaggaaagagtatccaagtgtacaacaccactcacacaagacagtaggtcctagaaaaggtttcaaatgtccctatagccctgactccctgagtgcgcactgtaaggctccctcctctgctgttcacaccagcaagcttgtgctcagagaaaaattaccaaagagttaagtcttcctctatgctgtttgtccaccatcttgattgcatggcaccaccatcatggaagctaactctgtcagtttgaaaatctagtgcttttaagaccaatttttgcagaataagtaaccacacctgcacctcccttgaagttgcgccaggttactgtagttgcttttctggtgtaaggtcgtatgatcaagcgtgctctgaattagtcagtggagcatgatatactaggtcgattcatg

SEQ ID NO: 191349 - DNA, 1708 bp, Zea Mays
tcgcatggtctcgttcaggcggacccttcgccggcgaccaacacccaccaggtatgcgcatcctctcttccctccgttgctgcgcgaaaccgagtacctgaaccctaacttattctatttgcgtatttttgttcggaacggatctaattacaagtttatgtatgtagtgttcctaagaaattcgatttttttaataaagttattggtgtcgtccgcttctgctcgaggatttagcaaatgccttctcttgatgatacgatgaaactagagcttagttgtaaaccttctttttggagataaaagtaagagttttagagttcaggcatcgtgtcatgttgcagcacaaggccacacactagcattgtcttgcagtcttgctgtcttgctattattgatgtaatcgacatcctatgtagaatagtgttttttttttttgcagcttacacggtatacatgaatgttgatttgcagcaatttactggaagtgtggaaccacttctgatgctgtctttgtaaatattgatggagctagctgagtagaaatggactgcagtcaagatccccaagaagaaagccatcaaagaagggagaatggtgaagaagcagaaaagacggctgactatggaaatgctttgagtcgtaaggaggtaacagaagagcttcttggttgtgtggttcatagtgaggaagaggcgtacaggttgtactgtgattatgggcatcgaatcggttttagcgtgcggaagggcaaacagtcttactttattggtaccaagaatattcgaacaaaggattactactgctcaaaggaagggcttaaatacgatgagcctgttacagaagcaaattttaatcgaccagacacaagaactaattgcaaagcaatgatccgctttagagttgacgagaaggggcggtggacagttatacgctttgttcctgtacataatcaccagttggcaaaacctggagaaagacacatgctgagatcagccaaatcgcttgctgttggcaaatcaggtgttatagatccattagcatctacagaggcacatccaattaatggtttctctgatatgacaggtgatatagttgagaattcagggtatactataagggaatgttacaatcaagtgggcatgcagagtataacagtaattgaggcaggggatagccaaagtcttgtcagctatttcaagcataaaactaatgaggaaggcatgttctattgggacgtccaagttgatcaagaagggcgcatgacgaacttcttctacagggatggtaaaagtagaaatgattatggctgctttggagatgccattatatttgatacaacctaccgcacaaacaaatataacttgatatgcgccccatttgttggtgttgaccaccattggcaaaatgttgtttttggctgcgcgttcttgttagacgagtctgtaacttcctatgcctgggtatttaaatcattcttggagtcaatgggagggcgatcaccaaaatcaatattcactgatcaggatgaagctattatgcaggcagtcaaacaggttttccctaatacgcaacattgtttttcctactggcatattctgaagaatgctcaatctcatttaggctcactaaatacgtctcaagcatttcaaagtatgtttaccaagtgtatgcaaggatctgactcagaagaggattttaaggaatcatg

SEQ ID NO: 191350 - DNA, 433 bp, Zea Mays
gagccatcggttgcgttggccacgcaccggcagcggcggccgcactccgcaccgatgttgtgggtgtagtaggtcgtaggctactggctcaggtggtggctatcgggtcaacacaagccacatgttcgacgatttacctggccgacgacctcaacttcactgacatctccgttggcgcgctctgggaggagacgatggaacaagcggcaacgactctacaacctagttttcctgagaagaaatcggtgctcctctcctcatccactgatggtaaactcgaaggtatgaaggcctatcatctctggttcgacccctccgtgttggtcatgctgctcaccaggtacctcgttgagcggatgacgctctactacgacaccaacaccgatgactaccacaatgcaccccgcgtcaagaccagggtatccgactttgg

SEQ ID NO: 191351 - DNA, 291 bp, Zea Mays
ttagatacatggcatcagggcgtaattgtggtttgcaacatcagagtaggaataagcatgtggaaatcgttgattcatttcggagtggaaaggtctgctgcttatgttgccctgctgttgttgtgtccgataaatatttgtactgatgataaaatgatacattgtaggtgcatctgattattgccacacaaattttggaggagggactagatgtgccaagttgtaacttgataatccgttttgatcaggcagcaactgtacgcagctttatacagtcacgtggtcgagcta

SEQ ID NO: 191352 - DNA, 330 bp, Zea Mays
gtttgttgtccagctgttctttcagttttctcctctctgattctctccggctgcatacagtcatggcagctttttggatgcgtaaaagcctagcttgagccttggtcttttcagcttccagcaacctcagtcgtttcttctcagcagcagcgcgcttcagagaaattgcagagcgcacctgctccatgtatttgctctctgattttgccttctgcaccagggacctcgctgtcctctccttcagtgcggcccgcttctgcatatcggcatgcagaaggcgcatgcggttctcctctgcctgtcggacacgagactcaactctggtctcga

SEQ ID NO: 191353 - DNA, 285 bp, Zea Mays
tcttaccacggtttgggtagcagtcgatggcggacacggtggagcgcggtccgcggcggggaatagaatttcggcgagaaatcaaaagcgctccaaccctcaatcgagcacgacgataagccaaacgggttagaaagacaccggtgatcacatccatggactatgcaaggcatctgctcccttcctcctcgaattcaacagcgacgacatcctttctctctctgcgctcttccttctttgtcgccggtggtgcccggtctttcttgttgcgtaggcagatcaaag

SEQ ID NO: 191354 - DNA, 283 bp, Zea Mays
gggactgttcctcatccaacaaatcaacacgcaatgcacacatagtcgcacacccaagtttgatctgtcagcgattctttcaagtgctctatacttttacatagtaatcagagccatggagggttcatcgtcatctacctcccaaattctctcattggcctacccgtctccaagaaactgacgaagtccaactatgcgctacggcatgtgcaggttagggtcgctatccacaacacaaaggtgaccagttttctaaacggtgacagtggcaccatgctgccag

SEQ ID NO: 191355 - DNA, 540 bp, Zea Mays
tcgctgggaactctctccggggcgcccttcctgcctccttcccgccgcggctgagggtgctctcgctcgcttccaacctgcttcacggtgagatcccgtcttccctttccacctgcaaagacttggagaggttggatctttcaggcaaccggttcactggatcggtgccgagagcacttggcagcctgcctaatctgaagtggcttgacttgtctggaaaccttcttgtcggtggcatcccctctggtctggggaattgcaggctgctccgctcgctgcggttgttctccaattcattacacggttcaattccagcagggattggaaagctgaggaaactacaggtgttggacgtatcaagaaacagattaagtggcctggtgccaccggagctcggaaattgctcagatttgtcagtgctcgtattgtctagccagtccaattcagtaaagtcacatgagttcaatctgtttaaaggaggaattccagagagtgtgacagctttgccaagactccgggtgctatgggtgccaagggcgg

SEQ ID NO: 191356 - DNA, 566 bp, Zea Mays
ccagaaacgatcaaccgcccctagggccccatgctgatgagcaaggcctggatacagcagaggaagagtatgtgggcacaggtgatcagccacatggtgcagtttctgatgagaagagcggtgcagagactccggagcaagaattcagccttaccgaccaccgaaacgtagcagttcctgacgccaggaacatctcggagaccagagaagatgaggaacaagccagtgcagatgatcattcggacaatgcagtcaccgggaaggcaaaggtatatgacgaagacggggaggaccgggaagcgaggtggaaggatctgacagacgaggaggaggacgagctggagtcgctgtgggagcaccaggatctggtagagcagctgaagctcgagctgaaaaaggttcggtcgtcggtcgggctgcccacgatcctcgaggagtcggacacaccaaaggctccggtggaggacctcaagccatggagtatggatgctaagttccttcgcgaggaccccatggacgagctgaacaagttctacaagagctacagggagaggatgaggaagttg

SEQ ID NO: 191357 - DNA, 1317 bp, Zea Mays
ggcccgaccacgagcaagtcgacgcctcccgcgaacttctccgcttggccgatgctgggaagaaggcagacgccaacgcggacgtgaagacgaaggatctcgacgaggagaagctggccaagtgccgggaggtggtgcggctggaggaggaccacgaggcgtacggcgccctgctgcgcgacgcggaggggaagctggagcacgtgtaccagatggcgatgcacgggagggacatcaagaaggtgggcggcggtgatggcaaaggggaagagggttccggggcggtggacgaggaggtggtgcgggtgctcaaggacgcgggggaagggaaggtggtggagcgggtgaacctcgccgatcggcagatgcgcctactgccggagcccattggccggatccgcggcctcctcgcgctcgacgtctcccgcaaccagctcaaggttagggactcgtacctaagcattcgcgccgtctccctacatcatgcattgtgacgtccacgaattttctgaatgagttgttgggattggtcgaatggcagtattttgtagtgatcatatcgaagttcattctcccttgcacattgcacaaagtgctttgaaattaaagtggttttctgtggaattaaagtggttttatgaaattcttaaaccgattcacatgaaaaggtctgtacaatttcggttaaattttcgcgttcaaacggatctaaattaaactacacatgtggcgctgtggcagttcagttcacgggcgaattccctgtttggcgccttcaacagtgatgttccttgcttgaattcgcaggtgattcccgacgcgattggtgggctcgaacacctagaagaactccgcctcgcttccaacgacttggtttctcttccagactccattggccttctctccaacctcaagatcctcgacgtctccggcaacaggctgagggttctgcccgacaccatctcgaaatgcaggtaaacagccaaccaaccattgtattgcttcttgttccacttccaccaagaaacgttcgttctgatggatgtgccactcggagcttcagatcgctggtggagctggacgcgagctacaacgccctggcttacctcccgacaggcatcgggcacgagctggtggacctgcagatactgcgcgtgcacctcaacaagctgcgctccctaccgtcgtcggtctgcgagatgcgatcgctgcgcctcctggacgcacacttcaacgagctccacggcctaccggccgccatcggacagctgtccgcgctggagacgctggacctgagcagcaacttcagcgacatgc

SEQ ID NO: 191358 - DNA, 481 bp, Zea Mays
gttcatgtggttggtgtataaagttgccatgtatttgacactcatggcaccttttcgcgaatttcatgcaatcatcgaacatggtaggccaataatagcctaaatgtttaagttgataatgtagtttaggtccggattgatgcgctccacacactccagcatggacttcttttaaggcctctatcacttcatctccagcaaggcaacggagtagaatgccatcacttgaacgccgataaagcgtatcatttatgcaggtgtagttaatttatcttttcctaatcctagacctctcacttgaattgaggggcaagtatccatggagtaaatattcaaggaatggtgttcgccaatcccccattccaatctcacaagtttctatatttgttgcaacgatggatgatatgtcttcttcctcttcccatataggaaggactctacgttcctccacatgtacatccattgtgtcatatggatttag

SEQ ID NO: 191359 - DNA, 376 bp, Zea Mays
caagccttttaccttttatttacagttacactgtcatgcctgtcttttataggattgcctaggcaaccttcatatactactggatttgggactgctttaaatatagagacacttgttgctgccgcggaacaaagagatacaccaattgaggttggttttgttttctgagtttcctcttttgggttaatacataactcatcccgtgctaatagacttctcttaacctagacacctccacctgaagttcaggacaagattctttttatgatcaacaatatatccatctcaaatatggaagctaaggcaaaggaatttaatgaggtcatacaggaacagtattatacttggtttgcacaatacatggtcatgaaaaggt

SEQ ID NO: 191360 - DNA, 806 bp, Zea Mays
tcgaattatcaccatgtatcttcggtgcctggcaggggatagaccaagagagtggctttaatggcttccatgggccgaattctgctacaacacttccttccaaactgctctccgatgctctccatttaaggtggtatatggccgagaacctcctgctcttctgccctatcatccaggaacatcacaggtggctgctgttggcaaacaactacaggcacgtgacgaattcttggtggatattcgtgatcgattgattcagtcacaggtgacaatgaaaagctactaggacaagcaccgactggaagtggagttccatgagggcgattgggtatggctgcgcttacaacaacgcatagcagttggtgtcacttctgctacaccccacaagcttgggccaaagttctttggaccatatcaagtgctatcgagggtgggcactgtctcctacaagctgcaacttcctcccagtgccagaatacatgatgtgttccacgtttctctactcaagaaattcatagaggaggctccaacccaagttataccgctgcccgagctcctcaacggcagagtcatccctacactagaaaaagtcctccgtgcaaggctgaatcggggggtgtgggaagttctgatcaagtggacaggccgagcagagacggatacttcttgggagcaactggaagatttcaagcttagatatccggtcatgacgctcgaggatgagctcttcgtcggcgaggggggaaatgttgtagacacctttgtgggtcggtagtatggcagatgccacaaaggataagtcctag

SEQ ID NO: 191361 - DNA, 461 bp, Zea Mays
attacgagcggctagacaagggtgccgaaggacaaaaaaaggaaaagagtggctgatgttctgaataaagacgatgaagaacaaccaaagaagaaaaagttggaacctgagccaaaaacaggtgtttcaaagaagagaaaagctttgactccaaagcaaaaagcaattgacgaagaagaaaaaactgctgcatcaccctctaccaccgatgtggaggaaattttgaaggtaatgtctaaatccttgcctgtcaagctgagtccattagggccatatctgacgaagctttttcagaaggacaaggagctcgcgaaaacgaagaaggcggctagaccaaagaagcaaagaatcattacagtgacagaagccatcgaagggacaccaccagaagcttcagctccgaaggccccagctattgagagcacaacaactactgaagctacaaatgccgaagctgccgg

SEQ ID NO: 191362 - DNA, 531 bp, Zea Mays
atgttcggattttaacattgaggattctatcatattttgtgaagatggatcaacgtctaatcacagatgaggagcgaccacacaagaggcagagaacagaagtttctggagaggaagctgttgctaaatacgctaatgtatgtcttgtgaactaatacttttatttgctattttcttggcatgcctctaatgtttcattgaaatcaggttgtggatattcttttgattattgagtcaatgccaatttcagtatctactagccgtaaaattgctatcttcatttctcggatacaaatgagtttatcttccaagatggttcatgatgattacatacctcctctcttacatggtattattggcatattgtacaatagatttagtgatctatggccacaaacactggattgccttgctgttctcattagaaaacacaaggagcttgtttggggtcagtttgttccgttcattgcaattcaccaatcaaaaggactgactgtgaaaaatcaggagaagctggaagctgcaacccaa

SEQ ID NO: 191363 - DNA, 433 bp, Zea Mays
ggggatggtatgctgagcttcatactacatgggtcccaagtgattcctgcaattgctcccaaaatcgtgccacaaatggtgctcctctgtctgatactatagtccttggtatcccatgcaaacgaactatctggtcaatgtagatctctgcatacttctctgtccggtgggtggtgtgcactagcaagaaatgggtggtcttggtcaatctgtccacaataacccaaattgaatcatggtgcctggaggtattgggcagtcctacgataaagtccatgcaaatgtcctcccatttccaagatggtatgggaaggggttgcaaagggcctgctgccttcaaatgactagctttgatcctctagcaggtgtcacactcggatgtgtacttggcattttccctcttcattctggtccaccaatataaagatctgag

SEQ ID NO: 191364 - DNA, 591 bp, Zea Mays
tggaagagcagcacatgcaaaattctgataaatattatggacctatgtattttgatggacatcatgttagctgtagtgatgacgcaaaagaatctacatccccaaggaaaaaattgacaaccctagttgattctttgggagcagataagaatgaagatcataacgttgatgagtgctgtaatgctcggtcttcttccatgtatagcatggaagtgctagataatgagcccgtagactttgaaaacaatagcttactttgggtagctccagaacccgaggacggagaggatgatcacgatggtgaacatgatgatgatgagggggtggatgctacaggagagtggggatatctacgcacaaacagctttggcagtgggcactgtcgaagtagagataagtcagctgaggaacacaagaaagccatgaaagacatagttgatggccactttcgggcgttagtttctcaacttcttcaggctgaaaaggtaccattagttgatgggagtggcaaagaaagttggctagatatagttacttctctgtcttgggaagctgcatctcttttgaagccagataccaccagcaaaggcg

SEQ ID NO: 191365 - DNA, 675 bp, Zea Mays
acaaaaattctctcccttgataaggtatgcactcttcattgtaatcttttatgttcttttcgttttagattatattctggtgtttaacctgtaacattttcccaaacgacagtcatgtcaggttgaattggttaaagatggaggacatgcatattttattaagtttcttgacagtttggatgctttcccagaacagcgtgcaatggccgcttttgttatagcagtcattgtggatgggtataggatgggtcaagaggcttgtatgaatgctgggcttatggatgtttgcctgagacatctgcaacctgagaattctcatgcacaaacagaacctttgcttttgcagtggctttgtttatgccttgggaaactatgggaagatttccctgaggctcagttacttggtctgcaaacaaatggaccagaaattgtaatatgcttattgtcggagcctcaacctgaggtatgatgccttcatattctgtgtactctctttttcctgcttcacaagatacatattaaacttttggtcttgccaggtcagagctgctgctgtttttgcacttgggaatctccttgatactacatcaaatagtcatgatgatggttccgatgatgatgaaaaggtgaaagctgaaataaatgtagttcgaagccttctgcagatctcttcag

SEQ ID NO: 191366 - DNA, 308 bp, Zea Mays
tgaaaatagctgaccctacgggagaagcagctcgtaagagggatctaaagccaagagaagcgaaacctccaacatctaatgataatccaagactagaatcaaagaaacaaaataaaattggaaaagctacagctgaggagaaacccaaggattcttctagcgaagtgggcacagataaacctgctaaattacagacagatatctccaagaaccaagaagatggcagcaaacctgcattcgccatgccaaaacctcaatggcttggtgacaaaaggatcataaaacctgaagaaaaccttataaatgaa

SEQ ID NO: 191367 - DNA, 339 bp, Zea Mays
gccatgcccaatgccttgctcctcctcctcccgtgtcgccacctgccgtgtcataccatccatccacccacccaatcatcatgcactcgcattctttacgaatcatatcgatggactactcttccggttgatcggaatcaagagcggtggtgggagcattgatcagagaaggagagagacgtaggtgatcccttgtttgtcacacgcgcgggtgcccaagatgctcggttcgtcggcgtccaggcgggagagcaaaaccagcaacctcttctgggccgccgccatggccttccgggacgccgccaacaagaccactgccatcgagccggccaaggcggt

SEQ ID NO: 191368 - DNA, 271 bp, Zea Mays
accgcaaagactatccgtgcagaagtcgcctaagggtgcagccggactagcacaacaagtgcgaaaaatcgaagtctaccacgaagactatccgtgcagaagtcgcctaagggtgcagccggactagcacaacaagtgcgaaaaaccgaagtctaccgcggagactatccgtgcagaagtcgcctacgggtacagccgggctagcgcaacaagtgtgaaaaatcgaagtcctccgcgaagactatccgtgcaacagttgcccaaaggcgca

SEQ ID NO: 191369 - DNA, 438 bp, Zea Mays
ttcttagcttgctgaagggtcaaatcgtgtccatgcaaatggggtgcaggggtgtcagagctaggctggggtaaagcattgggagggcggtgcttgcttgtgtagggttttgtccaaggttggaggcttcctcctctctctcacataggctttagctataggccgtgtgatggaacttgagagtgctgtggtggggagtgacattgcttggccatggccttgcccgcacgatgccagaatcttggtctggctggcctgctgcttgcgtttttactaccagaggatgcagttgaaagtagagaaatatctcgtgcttatacgagatctcttacggatccacttgtcgtactttgacaagacatatcatatcatcacggtagtggtaaatttctggtggtgccggttagatatccttattaccggccttcttttctttaa

SEQ ID NO: 191370 - DNA, 318 bp, Zea Mays
gtcgctcccactgcttgtccgtcgtcgcagcgccctatatcgctccaaatcgtcggctagccggccaacgccaccgagaagctgacccgagtgtccgctcgtccggtgaactagtaagccaactcattttaccgattaatcacactagttgaccaataaatcaggataggtcgcgactaaccgtactgtagacgcactgcccttcgcctaggtgcaccaccggttatcaccggttaatcactttagtgatgtggctacctgatggagaatgctgattaattggcctgatatgttgataagccagtagtcaagtaggag

SEQ ID NO: 191371 - DNA, 2283 bp, Zea Mays
ccccgcacatatcgatctcgtcgtcgtctcccccggtggcatgctccgctcccgctagatccgatctattatctatggatccccgccgtctccccatccttctctccctcctgcttgccttcttctccgccgttgtcgcctctgacgagatccacggatgcggcggcgtcgtcgaggtcgacgttcctcatgttgctctatctccgtgtacagtgtgtttcgctttggttaggtgtgacttgttacactgatgcgacttggggttttgggtggtttcaggcgagctctggcttggccaagtcgaggaaggcatcggattccaagctcgattactccgacatcacggtatgccgtccgctcccgccatcgtcagtttttatatcttaggaccgtctcatcccatcacgtagacaagcttcgtagttgcactcagctgtcctttcctatcgagctttgactggtatttttatgcatgattcgtttagtctaaacatacatttgcttgatgccgttcacttgaattggacctcatggagagctgaacacgttctggttgcatgatgctgagttaccgccgctgctctaacaactatcctagtttcggattgcctgttgtcccatggtattcagatcactgccctatgggtttgcatggttgggtttagcgactctacactctattcagaccatttagaattaccattagggcacaagaggttgccctgccggtgttttgagcacatactgatttcttgtttctggtagctttggtgattgctggaccttaattatgctggggggagcgatgggggatgattcaaataatattgtccattagatttgagtaagggagagagtttatccagcgatctgaaacgttggttttcatgttttgttaagtctgggtgcaatttgtttagtggaggttgtgggtgtgggggatgatttggttgggtgggttctactaagtttaaactgatggatattttcatctctcatatagtgacatatgcaaactgtagcatgtagagattaatatcatttttaatacatggctattattctagtattgctctatttgtgtctgtgtatgttccgttaatcatgcttgtgctttggttttgatgcatatgtttttatatttatttatgatttgcactaagcctccaactgattccctcttaactttgtgtatcaggttgagctctgcactgttgatggtttggttaaagaaagcacacagtgtgctcctaatggatactattttatccccgtctatgataaggtatctttgtgttttttgtttactttagttctggattatcttttatgtgttctcattttatttacacatacaattttattgcaagtaggagcaaaggttaaagggcactactccctcctgtcacaaaacatgttatgttttggctactgtcagcatgatgccctgtttaagtttttgtcatcaatatcctttttgatatttcaattgaacttctagaaattgtatagcctgatcttccttcaaaaaacagttccatactattacatcattgatatattttatacatatttagacaattagactactagttattgtgatcaaggtatgtaggctcctaatgaatattacaaagaaatttattttttgactgtatgacatccaaagcagcacctatttttttttgtactggaggaagttgctaagatcataattttgatattctcttccattgtttctaaaataaaatttatgtctactatttatgcttgtcgcttctgtcaacacagggttcgttcatggtcagagtgaaggggcccaagggatggtcatggaagcccgaaactgtaaaataattccttaactgaatctttcctttgtttccctccttactttgtctttactaagcactaagtgcatttgttcttttactggatgacatgttcacctaacacttcaggttcctgtcatcattgatcacaatgggtgcaatggaaatgcggatataaatttccagttcactgggtttgtttctttagccatttagtttaatttttttgtgtgaacatgaatcacattgaaacttcaaatgttaatgtatgcatgcaccgtgcaggtttatgatatccggtaaagtagtgggagctgttggtggtaagagctgctcaaaacggggaggacctgctggtgtgaaaattgaactgatgacagattctgatgagttgattgcatctgctttgacgtcatcatcaggagaatattcatttacaaacataattcca

SEQ ID NO: 191372 - DNA, 279 bp, Zea Mays
gggagtgtggcgaacatgaccatgggcacaacatcggcacaagggcattagagggcgcggaccgtggtagagtggcccaatggtggcgcggacttgctccggcgagcaatcgtgcgaaggatagggaaacaaacggggaaataagggcatggggaggttgctcacctcgagaggaaagtctagagtgcttgagcaacgacgggacacagggagacctcaggtcgatgacagtggggcttcggctgcaaggggagaacatcgatgagcacggaccgggcg

SEQ ID NO: 191373 - DNA, 697 bp, Zea Mays
cctagtgtatgtgtggtcgtaacgcccggccatgacaagctcactaaggggacctcggttccccctaccacttcacaagctctctatagcctcggtcctattgggttgtctccgcgcccaaggcccccaacttctatcgctgggacctcctcgcctcgtcctcctgccccctctgaccctccttccaactatggtgggggcatccatcattggcacaagcgtggtggtggaggtcatgctagaggcagaggtggtggtgctggccagggtggtgcaccctggtcgtccctctagaacccatggaccggccaaatcactgtggcctagcctgtccataggtggcccgctgtcgcgtccattgtcgactcagcatgcgctccttaccacttcatcctttggtggtccaagttgtcttcttgagccctcgccttcggctccaccagcactgccccaggcaccgcttctccctcactcgctgctgacgccccacatggctccatcctggatgtcgtggtctgaggcgtgggaccaagtgtctcttgctaactcgtttagcacgatgaccttgacccctcctacagccatcactgactggatgactaactctggtgcctcgttccataccactccggacgccggtatcctcttcccatccttcatatccttcttccatcattgttggcaatggttttgttct

SEQ ID NO: 191374 - DNA, 2608 bp, Zea Mays
agttggaaagtcggtaaatcagacaagaccagatacaaccatatcacgaaggatatcgagatatcttagcactgtgcaaaaccatcctaaaaaagtttctgattctagccaccttccaaaaagcttgtccacagaaagtgcaatatgtggatcaggagcaagaagtttggagaacagcacagcaaacagaactatgtatggagctggaccactttcatcttctgtagtaacaatgacaaacgacacagagccagagaaagtctggcactacaaggatccttctgggaatgttcagggtccatttactcttttgcaactttcaaattggacaagttacttcccacgtgatctgagagtatggcttacatttgagagtgaagagagatcattgctgttgactgaagtgctttcaaaacagcagaaagattttactcaggctgcatcacatacaagtagcaaggcaacactggttggcactggacatacaaggaacaaccctagtgtggatcagaccaatgctttctcccctgttggtcatagcgtggttagttcttctggaatacctgttcagtataataagtattctgttccagaaagggaaagtgtgtactctccagatgatagcttgtcgctgtcaactagttcggttccaccaaaggatgcttatactgtgaatagccaagcacactgccagaataagcattctgttttcattcaatctcctgggagttcatatgggcacacagacttgaaccatgatggaatacagggaggatgctctggtgaatcaaaccaccatcacagcagtagagccctatggagtcctacagtggcacatgtgagttgtggacgtggtaacgtggaatctcatcagaatcagcatgtttcctggtcagaaagtcaacatgaatctaaaaatggttcacaaggaggatttgttaaagatctgaattcaaggcaggatctatcgaaaaacctacctgctcaacgtattgggaaagatgtttccagtcctttgtttgcttggagtccggccgagtcgaggacagcttcaagtcaacaggaagggtcttgcttaagttcaacaactaacccaagctttctcgatgaacttcattcttctattgcttctgcaaagcctaagagctgcgctccagcaacccccattgaagacagaggttctagttcaccatcagatatgctaagtcatgaagaaagagttccaatctgcagtccacaatcagcccctttagcatctgcttctgatatgtgcaagatggaggagatcatgaatcagcaaagaacacttgtggtggatacatcgaatgcttcagttaaccagtctcctgaatcaagggcttttcctgtatcctctcctgataaccaagatattgaccgcgagtttcctagtccagttccaagatctgagaataaggacattgctgtggacagctcagaattagcaccagcgtcacctgaaaatattactacgaatttgcctgtttcagatacatgcaagatggaggaggtagtgagtcaacaacaagtaattggggctgttgtatcgaattcttcagataaccattctcctcaatctaaagtttcccctgtatcttctaataatgaagatacgaaacataaataccccagttcaaccccaaggcccgagaataagaatcctgcggtggatagtttactttcaacgtcagctgctcctgaaaatctaacgacaacttcaacccatgattctgatacatgcaaaatggaggtagtgaatcagccaaaaacatttgaagcggatgcatcaaatgctccacttcatcaacttcctcattctcacagtttcctggtaccttctgacaatcaagatattgagtgtgaatgtccaggtccaactccaagatctgacagtgaggaagctcttatgaacaactcagcgacaactgcatcagcctctgatacaagcaaaatggaggagtttgtgaatcagcaaaaaacccttgaagcagattcatcaaatgctccacttaatcaatctcctcattctcacattttctcagtaccttctgacaagcaagatattgagcgtgaatgtccaggcccaactcaaagatctgacactaaggaacctcttatgaacaactccgtgttaacatcaggaccatctgaaattcagacgacagcctctgcagcctctgatacatgcaaaatggaggagtcagtggatcagccaaaagcgcttgaagcagatgcatcaaatgctccacttaatcatcatcctcattctcacattttccgtgtatcttctgataatcaagacaatcagtgtgaacatcctagcccaaatccaaaatctgacagtaaggaacctcttgtggacaactcagtattaacatcagtggtgcctggaatgctagcgacaacttctgcctctgataaatgcaaaatggaggagtttgcgaatcagcaaaaagcacttgaagtggatgcatcgaatgcttcatttaatcagcctcacattttcgctgtatcttccgataatcaagatatggagcgtgaacgtcctagcccaactccaaggtctgaatgcaaggaatcacttacggag

SEQ ID NO: 191375 - DNA, 1217 bp, Zea Mays
gtaaggctgtttttggcctcgcgtgagctacaacacatgttttcatggccgaacaaccaatttagtgtccaaccatagtacactagtgttaaaaccatagtacacatttttgtccccggaggcctgtaaggctatttttggcgtcccgcgacacatgttttcttcgtcgaacaacaatttcatgcctcccgcccgccaaacatgttttggctactggcatgggaaaggttgtttttagcatctattgagctacatcacacaaaacacttaaatcctaaaccccgagccccaaaccctaaaccatgaacccgtaaccgcgaacccttagactaaaacccgacccccaaaacacaaaatcacaaatcccaaactccaaaccctaaacattaaaccccaaacgctaaccctcaaatcgaaacccgaaatctcgaatcccaaaagcctaagctctaaacctcgagccccaaacgctaaggcctgaacattgaaccccaaaccctaatttgtgaaccctatacctcgaaccctaaatcaaagacccgaccaccaaaacacaaaactccaaaccccaaacttcaaaccctaaaacacaaccctaaaaagtaatgtaaggctgtttttggcctcgcgtgagctacaacacacgttttcatggccgaacaaccaatttagtgtccaaaccatagtacactagtgtccgaaccattgtacacgcatttggccccggaggccggtaaggctatttttggcctcccgcgacacatgttttcgtcgtcgaacaacgatttcatgcctcccgcccaaactctaaacacagagccccaaaccctaaagcccgaaccctgaaccctgaaccctaaattgtgaaccctataccccaaaccctaaaacgaaaacccgaacaccaaaacacaactccaaacccaaaaacacaacactaaacagtaaagtaaggctgtttttggcctcgcttgagctacaacacacgttttcatggccgaacaaccaatttagtgtccaaaccatagtacactagtgtcactgtaaaccctaaactccaaaccccaaactccaaaccctaaaacacaaccctaaaaagtaaagtaaggctgttttgggcctcgcgtgagctacaacacaagttttcatggccgaacaaccaatttagtgtccaaaccatagtacactagtgtccgaaccattgtacacatttttgg

SEQ ID NO: 191376 - DNA, 654 bp, Zea Mays
cactcgttgcagctttgcctggagcatggtgtgaaggatccattgcctccatttgagcctcccgatttgatccggtctcagccattaaatatttccacagacattaagcaatctgctgcgtgctcagaacccatcattagtgttggtctggtgaagaccaaagatgccggttcgtcaaacgagtatacaggcgatatcaacttccagtcatgccagccagtagatgagtcacctggaccttcgccatacacatcaccggaggatgggaaatccggtatcgaccaagtgggaagtacaaatgaatcagatcatactgacgaggctataccaatagatctgcaagataatagctgtacaagagcaagtcggcgaactgaggttgctgtgcccttgcggcggttgagaaatcttgactcatcgtgcgagccatctgaaaagaagtgcaaatttgttgtcaagttaggtgcctcggcagatattcggcggccagaggatatagcatctaactctagctcagtttcagatccgatggcttcaaagacttgtcctgtgtgcaaagtatttgcttccacttcgaacaccacattgaatgcccacatagatcagtgcctttctgttgagtctaatactgagcttgttgaaactgtccttgta

SEQ ID NO: 191377 - DNA, 412 bp, Zea Mays
atgcagcttgcggtatggtgggaatcggtgcagagcccatagaccgtggcccacgaggcaagcgtcgcggtggtccaataggcatcgaaggcgtcccaccgacctagcgcggacgcagagtagggagccaaggcggttgcaatctgaccaacagatgcattaggggtggcgagtccagggcactaggtgttgcacgtgtctgtagcgccaaaagctgcacatggcgtgcagtaaggaatgcccctacaagcaacaaacatggtgatggtgcaaagggaactgacacaagattagtgaaatccttccggaaatcaaaagtcgctcgaatgagagaactcatcgaagaccacatggcgagagatgataagacgatttgtgtgacaataaaggcaattcaaaggtaggtgggagt

SEQ ID NO: 191378 - DNA, 334 bp, Zea Mays
cgagatatggccgcttgcttcttggatttccaggcaataggagaggatccaagaagaatacagtaacctgtagtagaacaacggtcaacagggtcacttgcccaagtggcatcagaatacacatgtagctgaagaggactagcagaatcatagagtaaacatcttgattgtgtcccacgtaagtatcgaagcacacgaagcaagtgaccataatgaactgaggttggtttggatacaaattggctcaacatatgaacaacatgagcaatatcaggtctggtgatggtgagataaacaagactacccacaatatgacgataccgagtggggtctg

SEQ ID NO: 191379 - DNA, 508 bp, Zea Mays
ctggtgatcggtgtctgggcggctctgcctccacccatatccccggagatcttctgtcggaaacagcatcccctcctgtggtcaaccagattacgacgcacttggaccaggaggatctccagaacgcgacaccctcggatctccattcaagtaacctggggttggttccttccagaaccctgtggtgtatgcccccgaaggtttattccagaagatgccgggttttacagcagcatccccaagtttcgttggtcgactctcagttagttcagagctctgaaaacgtttcggtggatgtctccatttcgccttcggattcgcccatatcagatcagctcagatcttccttcagatgcagggttaccaagtctacagtgcatatcttgcctgctcctcagactggtagacctggggctgcgaactccactgttgttcctcctcgtcgcagccggcgtattgccggaattggtgtcgagaaccttgccacttccagcgatggtcagacaag

SEQ ID NO: 191380 - DNA, 631 bp, Zea Mays
ctagtatgcagggattgcagggaccacaagtctggaggctgctactcttgctgaaggcacaacgcatcttgtacaagagatatggagatgtcttgggaccattcaaatatgctggttatcctatgttgctaaatgcagttactgtagataaagatgacagcaattttctttcatttgataggacccctcttctgatagctgcttcggagctaatttggttgacgtaagctaacacagacttactttattgggtttatacattttttaaaaactgctcactttgattattttagatgttccccttctttgttatctgatgttcctgttgtaatgttatgttagatgtgcatcatcttcattaaatggagaagaacttataagggatggtggtatccccttgttggcaacacttctttctcgctgtatgtgtgttgttcagccaactacaccagcaaatgaaccagctgcaagaatagtcaccaacataatgcataccttctctgttctcagtcagtttgaatcaggaagagttgagattcttaagtttggtggccttgccgatggcattgtgcattgcacagaacttgagtttgttccctcagctgtggatgctgcgctgctgacagctgcg

SEQ ID NO: 191381 - DNA, 302 bp, Zea Mays
tcctcggagagagggaccgtcttgtcggggagctcaacgaggccaagagagtcgctgatgagactcacgagaagctccaggatgccctcatggccaagaggtgggccgaggaggccactgagatcgagaagttccgcgcggatgagctggagcaggcaggcatcgatgaggcacagaggcgggaggaggagtggcagagggagattgagtgcgtgcatggccagcacgccgcggacttggagacgttggtcaacacaacggaggagctggagaggctcagacgtgatctttccatggtgaac

SEQ ID NO: 191382 - DNA, 418 bp, Zea Mays
ggaagagtgtgcaaataccaagtctgataatgttcccgaattagaaaatacaggattaggaggaactcatgggccaatagaggatactgatggtagactgaaggaaattcatgatgtcaatgcagaactggataaacacaatgtgcatgagagcgatattgatagatccgaggacatcatgcaaatcgatccactaacacaggataaagctacgtggctggcgaaggaagaaactgaagataaaactacaaaagttcaagaagtaaagtatgaacaattaagaaatgagccaccgattcaagaggattccaaggaaaagccctgtgctgatagcaaggatctatcagagaatgttgtagttcagtccaaagaggtagataaattgaaacaagcaggagagggttgccaggcgttaatg

SEQ ID NO: 191383 - DNA, 496 bp, Zea Mays
tctggagatgatgcgcagtttcagcttcatgcaggcgaccgaggaggatttcatggagggcatgaccgcatacgagcacaacggcgttggcgacggcacagcgcacgggcctgtcgcgccggagccgcctgcgctgacggcgactagcctcagcttcaggtttcagcaccagatgcccgaagttccaacggagacggcgctggtttcgagagaattcactgcggcaagacaagagacggcggtagtttcgagagaactgacagcagcgagagacgatgatggacgacaacgagaggaagagaaggaaccacactttcctttggaaccattcgctccgttgcagacggcggcagacatgcaagaacaccggcacgacgaagcagaggaaacagagttcctggcggaggagccggcagaagagcggagcggagaggttgcgcaggaggaggcagcgccacccaagaccgtcgcggccacgcacaactatcagttcctg

SEQ ID NO: 191384 - DNA, 1515 bp, Zea Mays
cactgttgggctgctggccccattagagttagggttctgagtctatatatatgtaaccatcctatgtaatacaaacaagcctttacttcctacactttgttcctgtcgctggcaacaaaaccacttactgcacatgatccatacatttaaactggagatgaattagttctgtggtgccacagtattttttttataattgaacacagcgcgttgcacacattataaacaccattttcttcttttgcaggttacgtaccaaacagatctgttcttggataagaacattgattatgctgtgaatgagcatcaagttttgttacatgcttcgagatgttcgttcgtttccagtctttttccacatgaagtatcagctaaatctacgaaatttacatcaataggttcaagctttaaggtaaaatagagtgttgcttgttccatcttttgtagctttgttatcaggaaacttattgtttctgataacatcacagcaacaattacaagctttgctggaaactttgagcgcaacagagccacattacatccgctgcataaagcccaataatgttctcaagccagcgattttcgagaacagtaatgttctccagcagcttcgatgtggggtaagacattgttacaagtattttcactggaagtacatgttttgacagatatagaatggtttaatagaaaaataacgataggcttattctggtaaatcaaaatgattttgaaccatccgcccttcttccctattcaaccatatatggaggctgctagacgtttgttcatttgaaactgatctaaggacatagacaatcatgtggacaaaacaatatagaatatacagcatacatgcacttctgtcctgaaaagagtgcacatttagatttgtcaaagtcaaagtatttcatgttttactaaatttgtcgaaactagtgtcaacaattataattccaggtaatactataaaaatgcattccatgatgaatctaaggacacttatgtcaacaatcatagttccaggtaggtatacttataagggcatgcccacccacctggttacctataaatgcacccacactgtacacttatgggacacacttaacaaaacaccacagttccctgcctactgttttgttgagcacctgaatactcccgtgtcctagcgcttgggcccacttgaccacgtgtcagttggttccaacagtcttcaattagttctgtggtttgaagtgcactctttctaggacttctttttttcatcgaacttgcaggagaactgcatatcattgtataagaaggtaaagaagggggtatattataaaatattgactttctcctgtgcacatgatggcggtatgcccagggatttttatgcttttaaatcttgctccgatgcagttttttatgaactaactgttgaagatagagatgctaaactgatacattacctaatcttgtaaacagggagtattagaggcaataagaataagctgccttggatatccaacaagg

SEQ ID NO: 191385 - DNA, 469 bp, Zea Mays
cgcgcacctgctgctctccccggcgcacccctccgcgcccatcgccgccgtgctgctgcgtcgcctcatcgcgccgtcatcccagtccttcgtctaccctgcgctgtcgcccgccacgcagtcctcgctccgcgcgctgctgctctcggccgcttccgcgcctgcgctccccaggtctgtctctaggaagctctctgacgccgtcgccgagctcgcgtccttcctcctgcccgccaacgcgtggcccgacctactcagtttcctgtacaagtccatagattccacgtcctccccgccgggattgcaggagtcggcgctcaacatcctggcccggctggcctcccacctcgcggccagcttccccaacctccacgggctcctccacgccgctctctcccacccttcttccgccgatgtgcgcgtcgcggggctcaatgcggccatcagcctcatccagtcccttccttct

SEQ ID NO: 191386 - DNA, 307 bp, Zea Mays
agctggagaagctgaagcatccagcgctgcatgcatgcgtgtgccaccacccatgcatgcagaagttgtattgtggcacctgatattagtcactgaatatgtcttggtaattggtatcattttttgccttcgtctattacaccgttttggtctatattggccgattgcgattatgaaatcgtgattcttaactagcaaattgcaaagaccgttatactcatgcatctgatttgacgagaggtggggataattgacatttttctctctcttgtcgttatcttctcacaccagctaagatagtgtccat

SEQ ID NO: 191387 - DNA, 676 bp, Zea Mays
tgtgtccacgtctcctgaattcttcttagccgttggattcgacaaacacggccatgagacatctcctcaggctcagcagccagcacgacatcacgggagactctggtaccttccagagacgagttgaaaaaacacacaatcaaaaatttctatataatagagcgcgacgcaaagctaacaccacatgtgtccacgtctcctgaattcttcttagccgttggattcgacaaacacggccatgagacatctcctcaggctcagcagccagcacgacatcacgggagactctggtaccttccagagacgagttgaaaaaacacacaatcaaaaatttctatataatagagcgcgacgcaaagctaacaccacatgtgtccacgtctcctgaattcttcttagccgttggattcgacaaacacggccatgagacatctcctcaggctcagcagccagcacgacatcacgggagactctggtaccttccagagacgagttgaaaaaacacacaatcaaaaagggtgattctggtagcggctgtcttctccgtcggcggcggcgacgaccctggtagcggtccccgccccgttggccctccttccccgaacgtccccgctcttctccacgccacgtgattcttccagtgagaggtcacgccatcgacaaggggatatagtag

SEQ ID NO: 191388 - DNA, 314 bp, Zea Mays
aagatccatgcagctggtttttcaaatcccactccaattcaagctcaaacatggcctgttgcgctgcaaaaccgggacatagtagctattgctaagacagggtctggaaagacgctggggtacctaatccctgcttttatacatctgaggagatgccacaataatccgatgctgggccctacagtattggttttggcccctactcgcgaacttgcttcacaaatacaagccgaagtagttaagtttggtcaatcatctagagtttcttgcacagtaagttctgacctgatatcttttgttatgaccttatcttt

SEQ ID NO: 191389 - DNA, 382 bp, Zea Mays
catcacatgaacacatatataagaatataaaaaacttacaccactataatcacatgcgcatgataagctaataatcagttcataatagctccacaacatgttcattacagctgattaataggtctaaaatagattcgaaacagtctgaggtagttgctattacaatacacacacaaatatgtatatataatggtgctaaacattcagctatgagcagcaccatccatctccttaagccttattgatcagcttagaagacgtgcaaaagaatgaggcatcaccaccgccataaacatcacctggccactgagcaaaataacaggcaaccacctaaggaattcacaccaaaacagccagccaacaacaccacccttccatccac

SEQ ID NO: 191390 - DNA, 367 bp, Zea Mays
gttttttggacatttgttgttttggtgtaattgagcaggtctgtgaattgaagtagcttggaagagcggtgttatgcactgggatgggagacaatgtcctaaaattcagggtggggttgttaggataaactgcattatggattctggcaacagttcgtgctctagaacacgaagtgggcttgtaaggaaaaaagacacatttgctctcagtagatcttcatgttcaagaactcgaagtggacttctaagagtaaagagctctgtggattccagtgatgtttcgagttccagaactcgaagtggccttctaaggataaagagctttctggattcccatgatggttcattttcgaggtcacaaagtgac

SEQ ID NO: 191391 - DNA, 383 bp, Zea Mays
ccgctcccaaactacagcaatcgacagcatgcagcaatgaggcccaaacaacgaaaggatgcgaagataactgagatcatttttcattggggcgagcctatcaatcatatctgtacaactagatgccaaacttcgtttgtgtaatgtggtcgataagtaaatgtcatcgattgcagcggatctggagatcagttgcaatggaaaacaaacaagagaacgtacctccttaggaggttgttggtggttggatcgtcgagggagaagagtgcgatggcgaggtgctcgggcgagacgaagctggagcccatgttcttggagagcacgacggccacgtcgaagacctgcttggtgggcgcggcgaagggcacgtccgtgtcgagccc

SEQ ID NO: 191392 - DNA, 304 bp, Zea Mays
ggtttttggcaggacagtcatatgccgagatctggaaactgcgactaaagttgcacgtagcaatggtctagattgcatcacacttgatggtagtcttggttttttacgttgagctgtcgttgttactttaattctaaatttctcaattgaatctgtagttaacttgttattgtatcaggtgatcaggtagggaaaaaaggtgctatgacaggaggcttctatgattctagacgctcaaaactaaagtttgtgaagataataagggataacaagacagcaattgatagaaagacgggtcatctag

SEQ ID NO: 191393 - DNA, 425 bp, Zea Mays
gcagatattactgcctgtttcacggtgaagactgcgcgcacccaacaagggattgcccagaaacgaaggccaccagggacaggatgtctcgagcacaacccgctgacaaccaaagagttgtcgcgcacacatatcaacaccaccacccacaaccatacaaccacgaccacgcccagcatctacccaaccacgcatatccgcaccaccatgaggtacaagtcgtaccacccccactcccgcctccgcatcaaccaaacctacaccaccaaaatcacccccaagcaccaaaacaagaagacttcgccgaccagccgtatcacagattcattcacatgatcaccggagggtccagcgtcgacttcgacacgaagcggcaaaagagggatcactaccgaagcgtcaaccacgttgccatcaccggccca

SEQ ID NO: 191394 - DNA, 690 bp, Zea Mays
caggtgatgtgatcttcctttgtgattttttggtagtcgatttgtgtttcaattgttaagtcatggtagatgctggtatgatactatatgcttttaattgttcatgctttatgtgattttactctgatggttgctgatgatgtcatcacatttcatgattcattgttcatgatatggttacttttgtgatcgtagataccgaattcaatgttgtcttcatggtattttttgaccaaggcaaattcaacctatcgagaacattgccttattacaatgctatgatggaccaattgattttttagctttgggtttcataatatgcctgtttttatcattgcatacattttgtacaattttcctgatcaagccaaacttgagaatccatgataagctttgtagcttgcatatatttgggttccataatatgcctgttttatcattgcacgcaattcatagtttcatactgtctttctgttcaaactaagcttgagaattccctgatgagctttgtagcttatataggtgtcccaagtgtactgatatttttgttatgaacaaaacatgatttgattttgtacttcattcatactgtgaatatattactatttctcttgtatcggacccttgaattttaagtgttgttttaaactaatcaatcttctctacacttggccttgtatgaagtatcca

SEQ ID NO: 191395 - DNA, 727 bp, Zea Mays
agagttcgatgctctgtcgggaagcaagatagcttctattgaccttggtgcccgtgttgttcgtatggcatatagccctacaactagtcatgttgtcattgctattcttgaggtatgtattagagcttcacttgttttttttcttctgaaaaagcatttccttttattgctagaaccgaagtgccttcaaagtaaggcaaatgcttatgatactgttcacagaaaatcataagagtgacgatgcttcgttcttgttagtaggaaactaggcatacttttagcacttttatctagtcatctgccatgcagagtgaataatattattctctagcagcctgaatgcatgcactgctattggctaatggctgcgagttttgcatcttttattaatagcttgttcaactgttgacccctttgttatctcttgttctgcaggatgctacaatcagatcctgtgatttcgccacggagcagacacttgtgctgcattcgcctgagaaaaaaacagatcatgtttcaatagatactgaagtccatcttgcattgacacctcttgagcctattgtattttttggtttccacaaaagaatgagtgtaacaggttactctcttagcttggcaggttaccttttgtgtttgcttgggaggcttaaagtgatcctccatttggttttgtttttacaggttgtatttccacgtgttaacctcttgttttgttctagttgta

SEQ ID NO: 191396 - DNA, 272 bp, Zea Mays
aaactatcttggcacaagggggcctaaattgcagaactttgtcattgtgtccttaattcagctggtctgtcgaattacaaaatttggatggtttgatgatgacagattcagagagactgtcaaggaagcgactgattttttaggtcttgtaagtatgtcttgcatgctttatgtgttgagataggaattctgtgattgtttgccacgtatttaagaattttgttatcacataagaccttgccagtttgatgactgaaacatgtttttgaaat

SEQ ID NO: 191397 - DNA, 506 bp, Zea Mays
ctctcctgtgcaactatacttcttcatcaagttctgctcaatcaaaagattctacacgagattactgtaaactagtttgggagacttgcaaaaatgtgacaatagtgaactctcctttccaacctcccttgcaaggaagtgcaagactgcctagttcatcgtcaaagctcacagatgtctggcagtcagaacatgacttctgcacatcatttggtggctcatctggtgagcagtctttatgtttcaatggaaatggaattttcttcaacagcacagaaccatcacccacacctaaagggatatgccttgagagaatcagcaatggatcttatctgaacatggcttcacatcctgatggatccaacagagttttcttgtctagccaagctggaaagatatggttggccagcatcccagaacaaggctctgggggcactctacaatatgatgaggcaaacccatttcttgacataactgatgaagtttatcatgattctcagtttggc

SEQ ID NO: 191398 - DNA, 283 bp, Zea Mays
ctgctgcttgcttgatttcttccatccctgcttgccaattgctcaatcaggaaggggactgtgatagtggtggatctgaggctgcaggacagtaagggaagtgaaaggaagtggagaggttgtgagccgtggcggagcatctggagaaggacagatagggaagcagggggcagggcaggggtggaggcggaacgacagctctgagattgagagagcgagagatgcaggaagcagggtgatggcactatattcttctggatggtgatgtatatctaggggaggg

SEQ ID NO: 191399 - DNA, 478 bp, Zea Mays
attaattaccataaaagtgagttattttgtttcggtaaggcaatagaggaggaacatcaatatcaacagatttttggctgtaagaaaggggggtatccgtttaaatacctaggtatcccgatgcactacaagaggttaagaaataatgattggaaaatgatagaggaaaagtttgaaaagaaactcagtggttggaaaggaaagctgatgtctgtagggggtcgtcttgttctaattaattcggtacttaccagcttggctatgtttatgttgtctttctttgaggttcctaggggtgtacttgagagattggattattttcgatctagatttttctggcaaggtgaaaatcataagaagaaatacaggcttgctagatggaatatcctttgccaacctaaggatcaaggggggttaggtattaagaacttagatctacaaaataaatgcttgctgagtaagtgtcttttcaagctag

SEQ ID NO: 191400 - DNA, 646 bp, Zea Mays
ctaggttccacgggggctcttttgaaagaagtgcacggtgaaggggtatcgttgattcagagtcgtccgatcctggatccagggaccagattagatcccaacccaccaatacacccgagccgcggatcacgagatcgacggccatcatcctacacctgagttgggctgctatgatccagttgtggccgtccatttgcgaaccaacggatcagataccccaagcccaaaccggtaagagttatgcgatccggaacgtcccttcatgatccgatggtttaggttgcatcacgcgcagagatacgattcctcctaatctggcctgcccattacaagaacagcggacaagagccatcacccatactttattcctcagtcccaattctccaccgtcgatccaaggaccaacgaccactactcatgtcccccaaccaagctctcccaacgacggagcacagggcctgtacggcggcggccatggctagcaaacagcgccgatgaacccagttggcccaaaacaccgatccgaatagttctaggcatagaggaagataccgcaaactaagtggtggggttctcaccgttgcgtgtctcgacgaccagtttggccatggtggagcgcgaatcccctgcaatggcgagcaattgc

SEQ ID NO: 191401 - DNA, 454 bp, Zea Mays
ctcaaccttacttcttttagatggtggatcagttgcattttgcatcacttttgtatcatggcctgtgaagatgacagccccatatatgtagtcagtgttccgtagttttgagtctcgaagaagaagctgtagggatgacaggggatactgctggcctctccattccattgaaccgacaaaggagtagaggttcgcatttgggtcttcgcattttattgtttgtctgacttccctgaactttatgtcctcatgtaaatccaatgtcaccttgagagcttgtttaattttcaaatttgtttcaccatcgaggttcatggtctctacataacagattccatccggatagttagatgaaagcagaatcatatcagcggggaagaaattatccttctccacctttattacatctccaactttgatattcttccattttgactcttcaaaatgaccattc

SEQ ID NO: 191402 - DNA, 458 bp, Zea Mays
aggtataaacagcaggatatacaaaataacaggcagaggtacaagtcactaatcagcagtcggcttaggattagagcagcaacagccattagtgtttgatcactggtgggagacacagacagaacagaactacagagatgggggagagggagcagggggaaccttgagatgacgagctcatctcgtcactggtgctggagacactggtgatctggagtagccgtcgcccaccggtgatctggactctagagttctgaactggagctgtggaccaggcaagcaggcagaggggcacatgtgactggagcaggcgagcagctgccggtgatcgggagttcgggcagaggggatcactagtgctggagagtggagacgccggtgatctggacctctagagcagccgcccggcagagggatacatgcagggtttaggcagccttagggttttagcagaggag

SEQ ID NO: 191403 - DNA, 584 bp, Zea Mays
ttatctccagtgctcagaatgccttcatccagaaccggtcaatccacgacaattttctgtatgtgcaaagggtgattatgaacctgcataaaaagggtaatcctgctctcttcatcaagcttgatatctccaaagcttttgacaccctgaattgggcatacctcctggatgtattaagggcctacgggttctctcagaaatggcgcaattgggtggcggacattttgggatcatcctcctcaagaatagttatcaatgggcaacgttcaaatgcaatcaatcacaggtgtggggtgcgacaaggagacccactatccccctaccttttcattttagcgatgggtccattacaccggatgattgagaaagccgctggcgagggattgcttggacaggttttacctagaggggctaagttgcggtgctctctctacgcggatgacgtgggtgtgttcattaaagctgacaggtcagacttggaggtgctcaaagggattctcaacgtgttcgaggggtgctctgggctaaggatcaactatgacaaaacagaaatctacccaattcgttacccgacaccattatgg

SEQ ID NO: 191404 - DNA, 390 bp, Zea Mays
tggagtttcttcaacgatttcctcattagtgtttgggtccacgctgaagtagatgacaacacgtatagttccgggtgcgagttggtctgaaggcctcggggtctcgttcaaatccacatctagtgactcaaagaatgttacatctggccgctcttgttctattacttcaattgcatcattaatctccttgccaatcaactcgggccaactggtcttgtcctgcgtagccatgatcacgtactatccttagcttttctctcttttgaaactgttataatatcaataagaatcaataatcgagcaacgtcagtgtaatgaatagaaacataatatgttgttttgtgctaatgctatcatactttcatagtaagcatgtcttaatcgaatgca

SEQ ID NO: 191405 - DNA, 617 bp, Zea Mays
ttaaatgttgtagaaatgcattagttgtattgttattatgattgaatgctccaagaaggggtgggtcaggttgaatagggctctaaaagaagttaaagcttatcaacaataacctatgcaattctacttcaagcattgcatgaattttcatagaaataataaatagagatggaacaagaagggtccttagcttcatgtcaagctgaaccatatatatgaagattgatcacaactaagtgcgtaaatgcaaaaccaaatctacttgtcaatcaacatcttaaaggcacaaacaaattgcaaaaagtaaattcaagaaaataaaaagatggacacatgacaatcaattgtttgtagtggtattaacttgttgccataacactctaatccactttagatcacttgctaaggtttagtctcacctgagttaaaggctcaagattcactaaacagatccattatccattctgggttggcaggtcctaaaccaagtaccaagttggagcctatcaaaagaacttaaccatagaagtttccttgatcctctagactatttaggtggtagcaaacaccaagaataacaagttttgaaccttcacttgaataaaatacaagtcaag

SEQ ID NO: 191406 - DNA, 321 bp, Zea Mays
aaatctattgacccactaatataagcctatctcttgtagaaagtatggtatgtgtattgtaatgaaggtccatacaaaatacttcttgacatgggatctgttgtgcaagaggttctggaaatatatttggcatggaccttgccatgttcttgttttgttcatagattatttaagagtctagatcgtcaatatgaactaatataggcacaggctatgcctgggagtattatatctaatggagagaattaacacaaaaattgttgtaactacacataaatctagggctagataattctacctttctaaatggctacatattac

SEQ ID NO: 191407 - DNA, 471 bp, Zea Mays
cctctatccagcagcactcgctcagacatagagacgagagggaggaaaggatcggacgcccgcgcgcggcagcatcagcaacaacgaatgaactttggctgcagtgcagtgcagtgcaggcgtgcagcacagctctctctctcactctctctctctccacatcgaaacatctgccggtgcagacgacatgcgcaggcccatcgttttgcaggcacacggagagacatgcttgcgtgaacggatctgccaaaccgaatatatagtaacgaacagcccagtcccaccagcttccaatcaatccacacacaatgatcacgcagccctggtttaacacatgcactactggcatgtttggttgtctggataggtgggcctggctagtatctaaagaacctgactcttaacctggttgagagcatgtaatatctctacgtttggttgcttgtatgagcttagcctgacccatgcgag

SEQ ID NO: 191408 - DNA, 1422 bp, Zea Mays
aaggaagccatccaaccgcggagatgtgggagcccaggaggtcgtagcgaggggtttccttgattggtgaatcttcgatcaaggatggagcaccgggctttgctgctcggcgtggcgctggcctttctgctggcctctggctcccagggcttgaaccatgaaggttggcttctcctagcgctgaagagccagatgaacgacactctccaccacctcgacaactgggacgcgagggatctaacaccatgcatctggaagggcgtcagctgctcgtcgacgcccaacccagtggtggtgtctctcgacctcagcaacatgaacctgtcaggcacagttgcgcctagcattggtagcctgtctgagctgaccctccttgatctgtcctttaatgggttctatggtaccatccctccagagattgggaacctgtcgaaattggaagtgcttaacttgtacaacaacagttttgttggtacaataccccctgagctcgggaagctagataggctggtcacgtttaatctgtgcaacaacaagcttcatggcccgatacctgatgaggttggaaatatgacagcacttcaggaattggtaggatacagtaataatctcactggctcactacctcgttcacttggcaagctgaagaacctgaaaaatattaggttgggtcagaatcttatatcaggcaacattcctgttgagataggtgcatgcctgaacataactgtgtttggtcttgcgcaaaacaagctcgagggtcctttacctaaagagattgggaggttgaccttgatgaccgacttaatcctatgggggaatcagctttctggtgttattcctccagagataggaaactgtacaagtctgagcacaattgccctctatgacaataatctagttggccccattcctgcaacaattgtgaaaattacgaatcttcagaagctatacctttacaggaattcattaaatggtacaattccatctgacattgggaatctttctcttgcaaaagagatcgacttttcagagaatttcttaactggagggataccaaaggagctggccgacatcccaggcttgaatttactctacctcttccagaaccagcttacaggccctattcctacagagttgtgtgggttgaaaaacttgagtaaacttgatctgtcgatcaattcactgaatggcacgattccagttggatttcagtacatgagaaatctaatccaactgcaactcttcaacaatatgctttctggcaacatacctccaaggtttggcatttatagccgtctttgggtggtggatttctcaaacaacagtataacagggcagataccgaaagatctttgcaggcaatcaaaccttattttgttgaatttggggtctaacatgcttacaggaaacattcctcgt

SEQ ID NO: 191409 - DNA, 303 bp, Zea Mays
cagtgatatagcaatgttcagtccatgaatcagagcttcatattctgctgcgttgttagaggctggaaataacaactgaagggcatatctgaggtgctcgcctccaggtgcagtaaagaggatccatgcgcctgctccttgcagctttaacgagccatcaaaatacatttgccatacttctacagtttctgggttatctggtacttgttgttcggtccattctgatacaaagtcaaccagtgcttgagttttaatggcagtgcgaggtcaaaattcgatgtcatgagatcccagctcgcaggc

SEQ ID NO: 191410 - DNA, 967 bp, Zea Mays
accaaagtccttgctaacagattggcaggaaggttacatgagttggtctccctgaatcaaagtgctttcatcaagggtcgatccattcaagataattttttactagttcaacaaacagctagatttcttcaccttcaaaagcaggctcacattctcctaaaaatagagattacaaaagcttttgattcagtttcatggtcctttttgcttgaggtccttcagaagctagactttggctgatttggcgggttgttctcagtgatttgttgacttcatctacaactcagatccttattgaatgggatcccaggcaattctatctttcacaaacgagggcttcgacaaggggaccctctctcccctatgttattcatcctagttatggatgttctcagtctgatttttgttaaagcttccgctgttggtctgcgatagcccctttcagcaagattgttacatcacagagtttccctttatgctgatgatgtggttattttccttcatcctgctgcttcggatttgaacctagccctggatattctaaatctctttggtgaagcctctggtttgaagaccaacttgcaaaagagtaatgtttttccgatacaatgtgcagaggcagatgcggctgtggttcagaacagtttgccatgtgagctgaaggatttcccctgtaaatatcttggtgtgcctctttctccgtgcaagcttacaagggatcaaattcagccatttgttgatcggattgcagaccgtctccctggttggaaagctgacttgttatctcgggaaggtagaagaatcctagtgcaatctgttttgacctctatgttggtgtatttgctaatggctgttgagtttccaccgtgggcaatcgaagaggttgacaagatcatgaggaggttttgtggagaggaaggaaacatttcagcggtgtccattgtaggcttgcttggccaaagtcctg

SEQ ID NO: 191411 - DNA, 401 bp, Zea Mays
cctgatatcaagcgtgccattgtaaatacccatgtcattgaaccacaggtttgtcgacttcagttattttcagatatctttttttttatgttttgcccattaacaacttccttggacaggcacttgttgagttctttggcacattgtcaagagagtgggctttggaatgcatgaaagaccttctactggttaatctgaggggaaatcttcagattgttgtgcaggtattcctgttcagtttcttatgccccctccccctctgtaccaacccattggcatttcttttcttccttcttggttctaattattgtgaaatcttgggggacatctgcaggccgcgaaagaatactctgagcagctaggggttgatgcttgcatcaaattatttgagcaattcaaat

SEQ ID NO: 191412 - DNA, 314 bp, Zea Mays
cctgtcttactgtagcagacgtcctattgtagctccagcatactgtagcaaccggcctattgtagcagcgcccttgcatgttctataaatagggatgtaatcctctcttgtaagctaagcttgagaataaagcttctacttcatatcagatctactcttcatcaaaaacagtgtgtgagtggtgtagctgaggggagaaggtgttggttttgctaacattcgtaagcaattgctaaatgctcccaccactccatacatcgctgatgtgttgtttgccttgattgctgaagagacacatattagttccctatcac

SEQ ID NO: 191413 - DNA, 295 bp, Zea Mays
ccgcacgactcttcgtcccttctccactgccacgctactgtctcttccttctccgtcgcggccagcctcatcccttccgtctgactgtcgctgcctctgccgctgccagcctcctctcaaccatgcctatcatatccgctgcattgcagctgcatttcccatctccatcaccgcccatagactgcctttgctgctcgacgtccacatctccctggcacccaccatacatgcctcctcccccgccgccacccactgttccaaccttctcccatgccgctcagcatccggatctgca

SEQ ID NO: 191414 - DNA, 671 bp, Zea Mays
aaggcatggccttgggaagcccttgctaagtgcctctcatctacaccagaagaaattcatgaggctgcctcgttggttgaaaaatcctatatcgaccttaggaaccatgctacagttggtaacatgtgctctttgcctactgctgatgtgaaacacatgctcgcagaccactgccgattgaaagtttggagtgtaactagcatgacatttgctctttggtatacttcgataaatatagttgtatctaacagcttcctgaagttctctgtcccttattttcttacatgttttatacagggatgctaagactagggagcttttaaaagtatttggcatcgatggccaagtcgacttagctcgtcctgaggccccagtaatgccggaacaattcatagaggaagagattaaagcaaaacccacaaaaaaggagaaactgcaaggttctttaagtttctttcggaaatctaggaatgccttgatgggcgcagctgatgctgtacgcagagttgcaacaaaagggacatttgtggaagataatcggcgaaccgaagcggtggctcaagcaatgaatgggactatttggtctggttgtacagatggttcaattattgtgtgggatggaaatgggaatagactgcaagaatttcattaccatagctcttctgttcaat

SEQ ID NO: 191415 - DNA, 1120 bp, Zea Mays
gacctcgtggacaaggtatgatgttgcacttgcaaagacatctgcatagttcatcttttatttattcatggcaatgtgttaaaaaaggtttgcaaatgtcgttctcattacaatcgtcaagccatccgagactctgttttcagtatttgccatcttaatcagatatatctccttcagtttccgaatccgtctatggaatggcatctctggtacagtcggaatgaggcggtctgtaaccccataaggctagaaccacacatcatttggagcagaaattgtctcacccttgatcttgtgttaaccaaatccattttcttaaaaatatctaacttcgttattgttgggtccttacaagtaagtatatttgtctgtaaactgccggctacttgtagtttgcaacattatacacaccacctttattggtttccacataagcaggtatgcacctggcacaaatgtttgccaaaaggaacacagagtatcccttgttaatggactagttaacttgagtaactagtagttgtttccgtggcttagcgagcttagctccttgactgtattgaaggcaatatttccacttcactatcatcacaatcaaatttacattgaacttgcatattttgggctgaggtagtacatgtatagtttttcattttgtggtaatactgtatgaatttaggatatttacctgaatatccatttcttgtctgtttgggagtaaatgggatccagaaactgtatattcttgagtcttgactaacctgtgcattctatcatttgtaggcagttgctagtgaaggtgggactgatgatgccaaaagacggggtgatgcatttgcacatgccttttctgctcatctggcaaggtaaaaaatgctattgcatggcattagttccgaggtttttgtttctttgtgtaccactattggctgtggatagaatgctagtctcatatgtcaatattatccgttctctttgctacctaactggtgtctaaggttagattgatggaggagccagctgcttatggaaagtttggtttggccaacctgttggaattgagagaagaatgtctgagggaatttcagttcgttgatgcatatattagcatcaagcaaag

SEQ ID NO: 191416 - DNA, 537 bp, Zea Mays
ggagaaaacagtgttacaaaagcattaatacaaagagatttagtttcgaggtatcatcaaagatcttaaaagtcataagatttaatacgaatgattacactacaccctttagaattcttttaaccactaagaattatttctccaaacacagtttacataaatgcatattccataagtagctcatcaggatctaaataataaataaaaaggtgctgagatgctgaagtacatccatacatgcactttcgtgtcattttgtgggataacaaagtattcttagtggaaaattcagaacaacagaattaccaactgtaaagagattaatgagggctcattttgagcaatcaatgtccacagtttctccttcagaatggcaccatctgcatattcatcaaaccatatttgaggcaaaatatgctagcaagcatacaaaaaaggcacgtggatacaagaaattgtggaaaacctgcttttgtatcaacaacactacaacagcaagcctcaatactgcaaagagtgcatagattccatccaact

SEQ ID NO: 191417 - DNA, 356 bp, Zea Mays
aaatcattgaaaataagctgacaccagtcaatctggtggaaacgatccatctgctcggttaaaagaacctcatggttcgttattccccagctggcagtagggaacaacaacctattgaacaatatcaagaaaaagcatctgatgcttaaatcatcgtcagaacctttcctcaaacgatcttgttgagctgtaaccccaaaatcttctttcgatagcccaagttcagctctcaaattgttggcaacaacagcttcatcgatgcccaatgcagttcctcccccagcattcggtaaacccaaaattaggtgcaccgtatcctttgttattttcagctcctttccagggccagctcgaat

SEQ ID NO: 191418 - DNA, 525 bp, Zea Mays
tcggcggaggggccagtgattcgcgctgtttcagccgtcgctcacaggcaagcagctaagctaagctagttatatacctataagtaattcaccagctcatcatatttatacacacacctctatagtttctactttctagctggctagctaggttcacgcacttcacatctgaaatgctccatgctaagctacacgctacatatgcatgcatgcagggatatttcattacaaaatatgcttatttttctacgtgtccgtgcgtgcatgttctggcaaaaataactaaagagagacggcttatgcgacgacgacgaggagaacgtggtgatcaacggggacgacggggcgatgaggtcgtcgatttccaccaagaggagccgggctgctgcgacccataacgaatctgagcgtgtaagctactagctagatccccattcctgcactcgtcatacgcgtacatgtagataggtgaaataaaacgcatgggctagcattatggtacgccatatatgtcaaacagtcata

SEQ ID NO: 191419 - DNA, 297 bp, Zea Mays
accctactagccagagagtcagctggaagtgccaactctcttcgtttgttggcagcacgactagcgcgcacattaaaagcttgtttgacatacttcttgtgttgtgggtttctctttacccactcttgatactctggccattgtgcaaatgcttcagcacgccgcatgatctcaccattaatatcatctccagacattgatacccgcgggagtaacttattcaaatcttgacatatggttctttccaaggaagcctgcatggctcgtcttgccgcatcttgaattctatgacaactt

SEQ ID NO: 191420 - DNA, 389 bp, Zea Mays
ggaaaataatcataatcttctaaaaaaagtgggcagtacgcatcatttgatagggcgcggctgggtgaagggcgtaattgctctggaagatggcggcgccatggggtaacaagtcaataagtgagtatacgacgccgacgtctgttcatcgaccaaatcaatgcttggatatcgtagcaatggtgcaggaagaacaacaaggagggaaccagttagcctcagatgcaagtacgcatacaaaatcagctactgctgtagatgcaattactccaccagcagctttgagggccccgggggttgatgatcagaccatatttgaggcatcgaggatgacagtaaatcaaggaggacaacaccttaatactatgcgtactattggtgatcatgaa

SEQ ID NO: 191421 - DNA, 271 bp, Zea Mays
agatgtggccgagtttgattgcaaagtgcaaggagggcggcgtggatgcaattgagacatatgtgttttggaatgggcatgagccggccaaaggccaggtacctcattgactcatttgttcacgtgaaatgacagatataatatgccctcgattgttaatttatgcttcttctaatgtgctctgccccagtattacttcgaaggaagatttgatattgtcaggtttgctaagctggttgcagctgaaggtctatttctttttctgcgaatc

SEQ ID NO: 191422 - DNA, 500 bp, Zea Mays
tcacggtcatcttccatgtttgtggactaggatggctcagttttgctgttgtgtaaaccaccaaccaaaaattcagcatataagagcgatgcacgtggcttaggtgataaccctactataggaaaggacataaacccacccgagaatggaggcggctgcatgcgactcgtgacgtgcccgatggtccgaacgaaatttcggcagcataaccccgctgttctccgaacacacgcctatcatggtgcgacagagaacaactgggttatgctgctgaaatctcgttcggaccaacggacacgtgcacgaatcacatgcggccacacccattctccggctgtccaaatacgtggacaatcccggaaccacgcacatcacaagtaatcttgtgtttggaccgaatgaaactatacaatctatgcatccatagattgtctaggtgcattaggcccaaacatatgaataaatgtgatgcatgtgcatgcttccggaacgggtgacgc

SEQ ID NO: 191423 - DNA, 553 bp, Zea Mays
acagaaagtaatcctcacactgccggcgccagatacgtggatcgcgcccattaaactctggaaagttcaacttgggtgtggtacgacgatacccttgcatgccttcattccaatcgcgaggaataactggtgggggcgatgatgatgatgctcaccagggtggtaaccagcgggacggggtggacgctgatgcagagagggttgcgcctccctggagaactgtgaggaagtgtcccactccgccgaaggtcggcgctcgcgtgtgagaagatccaccgccttgcctgtggcttcgagttgttgcgcgaaggtggcttgatctttgagaacctgctccatagccttcacccccaagtcctggtggatctgcatctgctcttgcgcgcgcgtgacgtcgcctagccttgtaaacaacagatcaatgctctgattgaggtgattccagcgttcctcctcagtcctcacgttcccccgcggcggccatcgcgtctaggacgaaacgagtctggacggaaggtttcggcggcgccgtggtgactacccgcaaatcgga

SEQ ID NO: 191424 - DNA, 418 bp, Zea Mays
caagtttgctcttctggttagagtccaagttgcctcagcaactcccagtcagtgatagctatgatcacctctcgaggatttcacagctttcaaacagtgagaatatggaggcattgtttaatattttgtgggaaatatctgttaatcctgtggatgtttgtaatgcctttgtgagtgaaggagttaattgtttttccttaagcaacacgaatgtcactagatcttggaaggacataagatgtcctgtggttgagtgtgataaaattattactgaaagaagtggagaggaacatgaacacagacttggctccaagagattgggacagggattcgctgaaaaagcctcttataatggtgaagtgttgtatgaaactaaaaggagggagttgatcatacaaaaagagtttcagagcccaag

SEQ ID NO: 191425 - DNA, 620 bp, Zea Mays
taaattacacgaaaagagttgctgaggaacagaggtacaagagggcactatcacgtgaagaggtaaaccagtagataacaatttcaagtttaacatgaattgaagcatgtcaccttttatatctcagcatccagatatgaaaatccactgtgataaaacttcaaaatgtaaaggaaatgttggcgcctctttctgtatggaaggtccctgtttttttacacagtagttctttttatgatgttcaaaattaagtcattgttaggttaaattcgctgctattaattagtggttatggtgtgatattggcttgcgtccgtaggcttctttacttggcaacatattggcattaatttgatatgtttctctggttatgctaacatattcatatatcaggttgaggtgcatgatgtgggcaaggagatggagctggatcttattaaacaatatagtcaggttgactgttgatctacactgttcattgtcgctttgcatatcttctgacattaaatcttcaggttgaacggatatttgctgatagggtcagcaaagctgatggagatgatctggttcctgaatatttagtcaaatggcaaggacttccttatgcagaatctacctgg

SEQ ID NO: 191426 - DNA, 469 bp, Zea Mays
cacaagtgtgttcaactgggtgacatgaagaggaaggccgttacccaggggcagggtagcagcagtattcgtcctcgctacgttccgccctagggtacaccagctcgtccaagaggaggaccgtgcccagctcagtacgctccacaggggactccatagacacccacactcgtcaggctgcccccactggcaccccggcgaggcctataggacagaggataggccctacatgcttcaagtgcagtcagattgggcaatatgcaaatgcttgtccggtggggatttccagcacactagctccaaacaagcaaccgactcctggcaagggattcaacattggcagagttaatcaagtcagtgctaaggccactgttgacggagaggacatcgctatcggtatgttttatattaatgcaattccagcagcattattatttgattctggagctacgcatttgtttatttctgc

SEQ ID NO: 191427 - DNA, 644 bp, Zea Mays
gcagtggcttccgtgagcggagtacgtcttcaacaccgcataccagagctccctccgcgacacgccattcagggtcgtctacggtcgtgaccctccttcctcctatgagccggaggaaacacgtgtggcagctgttgcacgcacgatggaagaacgagaggagttcctggctaacgttcgacatcgcctggagcagactcaggcggtacagaagaagcactatgataagacgcaccgcgacatcatctatcaggtgggtgaatgggtgttgctccaactccgccaccgttccccatcgtcgctggccaccgatgtcgccgacaaactaaagccccagtactacgggccataccgggtgacggagatcgtcaacaccgtcgatgtccgcctagagctgcccgcccgtgcccacatccacgacgtgttccacgtgggcgttctcaagaagttccatggcactccaccagcgacaacacctcccctgccggtcctgcaccatggtgcggtcacccctgaacccgaacgcgtcgtcaagatccgagtcgcccgcggcatacgccaagtgctcatccagtggaaggatcagtcccctgcgtcagctacatgggaagacgtcgactccttcatgaccaagtttccggcgt

SEQ ID NO: 191428 - DNA, 501 bp, Zea Mays
cgcccccgatattgttcaaaacctcatttcagttcggcggtttacttctgataccaaatgttctgtcgaatttgaccctcttcgcctttctgtgaaggatcttcattccaggagcgtgatcaccaggtacaatagcttcaagaccctctacattctcgatgctccaacatgtcccccggtgtcccgtgcccatgttgccaccgtctcctccacaacttggcatcgccgcgttggccatcctggacataaggctctgtccaaactcactagtacttctgccattggttgtaataaaaatactagtgattccatatgtcatgcttgtcaagttgggtgtcacactcttctaccttttgcaaactctacttcgcaagctctcaagaattttgatttaatccaatgtgatctatggacctctcccatttctagtgtgtccggttacaaatattatcttactattcttgatgactgctcgcattttctttggacgtttcctcttcg

SEQ ID NO: 191429 - DNA, 530 bp, Zea Mays
catttgtcagcactcctctgtataccttgcctggaaccacaagatgaaccagttgcacaccataaaggacaacatatacttgaacagttaggtttctaagtctcgtgttcttggatgaaaaatatactttctcttgatttatggtatagataccataactgtgaatcaggtattgtgaacacgtacctgcaataccctgtccaatgacgtttgatggactcaagttttcagttgctgtgtatatttctttgatcgacatcggcttgcaggtagtctcctcatactcaagggatgccaacgcgacctctgcaagaaaaaaaaacatgtgcaacttcgtattgctattagtgggtaaaaaaacatctatctcagtaacttctatatgcatatggatgtgcaattaattagtgaaattaccaatatcgtttcttgatggttgggacttgctggctcttcttctcctaacactgcagaaaacagctatggccccaattatcaccccagcacagaggcatcctagcaacgcttcg

SEQ ID NO: 191430 - DNA, 1125 bp, Zea Mays
caccactttgctgattgcataagcattttgtctaggttctttgctgcctagaatggtttaggccattatctctatgtgagagtgggagtgtgggacagatgggagacagaggaagatgaattgcggttgtggaacttgtatacctgataatgtcaatttaattgttttaactaataggcagatttgctgtgggacactcggaaaacatggaattggctatggcacaccaccaactccagtattggccaagtaccattatgaaaccgggtttgtttgctgtaagacaccacccccataaaatatgatttccattgggttttggagagagaggcaagggaaataacacttttgctctcatcctcttcctcttgctcatcggaggacaccggttgtaacaccccatgccccccctggcggggcgcctcagccaccttggacgccagcttctgttgttggcatggcgaggcggagcgcattggagactaccgccgaggtggagcgccttggaattctgcttgctgctactggcctcagcagggcttcttccctacgctgtgggaggagatggcgtgtgagctgtcgccgggccaggtggcggtcggtgtccaacactggtgttggcgggtgagttgggccaccttggcagacccagcatggtggaggtgctcgtgccgctcatggagggtccagatctggaggcaggccatggcttagcctgtggcggtggcacgtggagggaggtgtgaggacagtcggtggctcggtgcatggtggcactgttgtccgacgagacgggcttgagttggcgagtagggaacatgggtggccgacaccagtagtccaaggcagggcgatgtggagctcctgtctagtgtcaccgagtgggtgagggccggggcgaggaggtgagccacgagtctgcaacggcgcaagcacatgcctgagatgggggcacactgtgtgatctgtttgtcgcgttcctggagaaacagtgattctagctatgagggatgctcgacggagaagagaccggatgatcggtgaacaaccagaggttgaagaaaagggtagaaaagacattcccccaccttgaactctaataatcggtgcgatgtgttatggcaa

SEQ ID NO: 191431 - DNA, 606 bp, Zea Mays
tgctgctgctactactatattcatattctgctctatgaaacgaatggtgtgcttctccgtcgtcttctccatcgtcactgcataatacccgccttctgcaatgtaactgaacacggcactctgctccccggtctcaagctcagctagctcagtagctctacctaaacacgcacgtcgttcgcaattataagtatcataaggaaaggatccctcgatatattacccggaactcaaaccaatcactcctactagtactactgtacctatcgattttttttttctgcaaacaaaaaagaaaagaaaagaaaaagaaaagactctgaccttactgctaccgtgtgccgttattactgctgctgtccacggattgattgcgattttgtcgaatcaaaatatctttatatgtttcagtccacactggtcttggccagtcgttgtcggccatcacgtttgcccgctcatcctcatccatccaccaaaccagatgcgaatagtcccctctccatccattccttctttcatcactagtaccctgtctttctctcggttcatcaattgaatgccctcattttcatcaaggcgactgatgtactcctcacatgcggt

SEQ ID NO: 191432 - DNA, 1066 bp, Zea Mays
tctactatgatgtcagaagcaaaaggctcatcccaacctaccctcaacaattcaggttaagtcggaatgcattttaagaataattttcatgtattttttataattaaactgttttcatgttgtaggccttccatctcatccagagagacaattgacatttcagtcacttggaactactactccggccacaaatcatcagaaatcctcaactactgtcacaattgaattgttgccaacttctgctccacccccacccccactgcccccaccatcatcagttttcagttctaggatttatcatctgcctccatctccaacttctttcagatctccagcgccagctgcaccacaacctccacctgtgccacccccacctccacctatgcctaggcctttttcctgtaaggtctcatgcaccacaaccgctgaccccccaaccacctgctttgagttcatctcttatactgtcagggacacctcaatccccaccttccccaccgccttctaggtgctctctcagtaaacctcctgcaccaccaccaccaccaccaccacctccactacttgcttctacttcatctaccattagacctgctgcatcacatctgcctctatttgcatctacttcatctcctgttaggcctgctgcaccccctccaccgcctgccccaacatcatcacctattagagcttcagcattgcctccacctccaccacctggaacgagctccagtccacgtccaccccctccaccatgctattcatcaaaacaatcatccagccccatgggcaaatcgatgccatcacctcctgttccgccaccaccctcccatggaggacgcaatggagcttctggtaacattgtacccccgccagcaccccctggcagtaatgctaaactgtttggtcctcaggggcgtggacctgcacctccttcaggtccaatgtcaaagagctttcaatctggccaggctgtgttgagaaggtctaatttgaagccacttcattgggtgaaagtaacaagagcaatgcatggtagtctgtgggcggagtcacagaagcctga

SEQ ID NO: 191433 - DNA, 357 bp, Zea Mays
acactcaggatacaacagttgatgatgatgatgatgatgatgattttggggttcctcctccgcctcctatgcctccacgctcacatgatcatgaggctgggagttctagtgctgcccctgctgcccctccggctatggaccctgctcttgcttcgattctccagtctatcactcaacagcaggctcacctggcagccgagcaggcccggttatccgagaggatgctctcgatgtttcagaacatgcaggacaggcaggatgcgctttagcagcagctactccaggatcgggctgagagcagggcattcatggctcttatgctacagcattctggtgtctccgtacccccagttcagt

SEQ ID NO: 191434 - DNA, 308 bp, Zea Mays
catttttacttgttaaagcttgttggtccacaatcattgtggctttctttgcctaattttgcggccgcattaaaatgtgtcctataaggtgtaacgtatggtttaatttattctcctactgcataaagtgtttagcgcccgatagggcgcttcctttttctagtaaagattaaagccagaacgacagccttggggctgcgccatgtctagcctcgttgaccgccctctcccatgaagttcaatatcaaaggcaaaagctaagaatgcaataattcctatggtgtcatttgatagcttgctatggaaca

SEQ ID NO: 191435 - DNA, 444 bp, Zea Mays
ctttaggaagcccggcaatggccacggcgggcagcagagggtggtgaaccagcccgacacaaccggtttccaacctgcccccgcgcctgccccccaccaaactcctgcgcgaccgccacctgcacctcagaatgcggctgtgcatgttcccatatccgcaccatggccgcaacctcaaggtgagtgagtgaggtgtcctgttcttctgctatcttgtattgcctctggaatggtgcaaatacgaaccgatgtgttcctttgattgcatgtgtttttctttgactcaccaggtccacaagtgtcatcttcatcagctgccagcgacaggccggctaatccgccattacctaaagctactcatgctgctccaagggctccaccaaaaagctctaacccaccccttcctcagggaggatcgaaaggtttgccacaattttcttcgat

SEQ ID NO: 191436 - DNA, 294 bp, Zea Mays
cgagcaccagaacacggggatcaacttcgacgcgtacgaggacatcccggtcgagatgtccggccgcgacatcccgccccccgtctccaccttcgccgacattgacctcggcgacgcgctcaacgaaaacatccgccggtgcaagtacgtccgccccacccccgtgcagcgccacgccatcccgatctcgctcgccggccgcgacctcatggcctgcgcgcagacgggctccgggaagaccgccgccttctgcttccccatcatcagcggcatcatgaaggccccgtccgcggg

SEQ ID NO: 191437 - DNA, 789 bp, Zea Mays
ctccctcaccccgcaggcccgcacttcccccagtctactctcttttcagtttctctctccccactttccccatttttaccgcacatctctccttcctcggcgtctcgcacaccccagcaccttcgtctcccctcccctcccccaacaatcggaaccggataggaagttcggcttcctcccggacgactcggcgcaaggtcgcagcttttctctcgatttttcgcgcttccccgttttgacgcttgcttcgcatggggattctggagatctttggggcggttcgctgctgagatggttcgcctcatcacgcgctgctgtgactcccaacaggtaggctccgctagacctctttctagccttctcttggtgcacggaacagctggggagtggggagtacgagtcactagccttctcttggcggctgagagcgtgagctcggtggagttctgatctagcggaagatgggatttttgcggggctgacttgtgttgggtttcttttgttgcgcgatttggtggtgtgggcttcattccttccatatatgtagcatctgttttgtatgttgcttccgatttggtgggattccatatctcgcactagtgaattagtgatgacttgcttgactagtttcttgactggtttcctgttctatttctcattgttgcttcagttcttccgatccgaggagcccctgttatgaacggcatgccgatctctgcgtcctctgcggcaagcgtcgacagtggcgcggtggcggccggcacgcccatgaagaatgcaacggcggcg

SEQ ID NO: 191438 - DNA, 788 bp, Zea Mays
gatcaaagggtttttctaaatgataaaagtacccccaaagaaatttctgttactgctacagaaggggcatcaccaactgcttatgatgttgctgctcttagtggtgctatccctagctttccttcacatggtgaccctccagcacttagactattccatgccacttctaatagctatgctgatgtgaacaaacctttgacatatccagaaaatggggatgcattcagttcagtatccagcagctctgcaaatgaccttgaacaaggtacaagtatcaggcccaataatgctgagaggttaacatcactagtccaagggccactaagaaaactgttcactgacatgttacgtcaccagaatatttacttacctgttacatcattgcaagaggcaaatgatattagtaaggaagtcagggctgaatcaagtcaagaaactgttattaatggtttccataggccagagatagaagagtctgtggtttcaattgaaaatggagattccataaatgatgcccagaaacaagaaattgctcaagcaataatgccaagaggttcttctgcaaatgataaagatgcagaatcgtctgttatgggagacaatggggcacatagtacaagtatcattatcaaagagaaatatgtcgatgatgatcaagctgatgatgcacttgattctcacagcatactgattttgatgtctagccagtgcccggaaaagcaggttatctgtgagcaaagtcatttaacccgtataaaatactacgggagttttgatgtgtccttggg

SEQ ID NO: 191439 - DNA, 424 bp, Zea Mays
gatgaagtgaatgaggaaaatgggccacagatacttgttccttctgaatctattgatctagtgacaagtttgtttgattcagaacctcctacatcctttgatttctctaaaagtgtcccggttgttcatagtagacatttaagtgaggatttaagtgcccttacaattaatgatctacgcttgaacaatggagacaacaattgcaatgaccagattgaacagaatggcataaataatcactctagacattttagtgaagatttaagttgccttgcaactaatgatttttatgtaaacaaagaagaggagaatgatcattactcgagtgaacaaaaggtagaaagtctccctaactctgctgaaagaaacatttataaggcagcagagattgctgagaggttcattcagtctatgaataataggg

SEQ ID NO: 191440 - DNA, 1251 bp, Zea Mays
gactcgaagaccgactggaactgcttaataacttgggcaatccttgggtctaattgggtatctgtatgggtatcagcagcggaatgcagcaaataaaccacatgtagtaggtgcttgttatcagaagaaaagttaccctgtaacactgcttgcttgccctggtaagaaaatggcagccacctttctgaccaatgtatcttcattggactaaacttttcaagccagtccatgcccagaactatatcataagattgtaatggaaacactcggaaatcagtgacgaacacatgaccttggactgaccactgtgttgacttgaatacttgattgcaaggaacgacccctccatctgccacgtgcaccaacacttgtgtaggcaaaagtgacatcccagaaagtttagcagccagagatgtactgacaaacgagtgggaactgcctgagtccagaaggatgataaccatgtgaccttggcattcaccaataagctgcatcgtgtgccgcctggacggaccggtgaccgatgacaatgagagagacaacaattcttgtgttggggtggtctcagcgtccactggagaagattgagtattatcttctaagagttgccacatctcctcgagcacatgtaactgcactgtaggggagcaacgatgcccgggagaccacttctctgcacacctgtcgcacagtcccctcgcacgccggtaggccttcagagacgaaagctttttgtccagtggacggggacatgcagcctctgttgggggaggacgaggtagaggtagaggagtctgtgtgtgctttggcaatgagggtggaatgaacttgcgagtttccatccgaggtggctccgagacctcctcctgcaattgagcgagagcacaggcagtatcgagagtaggaggtctatgtaaaattacagaagacttaatatgttccttcaacccatcgatgaaacgcatggtataaaataaggggtcagttttgctctggtatgccgctagctgatccactaatccagaaaattcttcaatgtaagcagctatggtagaagtctgtctaatatggaatagctggcggatcaggtgttcatattgatcacgcccaaagcgttctaagaccaagtgactgaattcagcccagctacaatgtttgacaggagtggccatggactgaaaccaacgcgctgcggcacccgtgaaatgcattgtcgcgacacgaatccacaccttaggatcaacaaagtag

SEQ ID NO: 191441 - DNA, 306 bp, Zea Mays
ttggtatgaaaaagatgattcagcagtggtgtcaaaactgtccaatctgtcaacaagcgaaatcggaacgggttccgtacccaggattacttcaaccgttaccagtccctgaaggtgcttggcagttggtctcaatggattttatagaaggtcttccgctctcggatcattcaaactgcataatggttgtagttgataaattttcaaaatatgctcacttcattcctctccaccatccattcacagcgttagctgtcgcgcatcaatttatggataatgtcttcaaactgcatggatttcctcaag

SEQ ID NO: 191442 - DNA, 1087 bp, Zea Mays
atggttctgatccttatacaatacttttgatattatgtctttactgtttcttataagaatctgaggctcgtgaattgatggagcactttgtggagttacctccagagctatgctctttgaagataattgggttctcaaaagatatgggcagttctttgtccttgctaccatctctaatgtatcgcttggagaatttgttggtggctattgagttgaaggatgtcatgtcatcttatttcccagaggcttctcaaattagtgcctcgggtgtaagtaatactaacttttgcactgttgaggctgaaacttctagtttgattttgctatctatgctgaagtaattgtgatttatgacattcattacagatccttgaatcattgactactgaaaggtgtttagagaggatctctttggagcgattagaagtcctaggtgatgctttcttgaagtatgtagttgggcgtcataactttatttcatatgagggacttgatgaaggtcagttgaccaggagacgttctgatatagtgagtaattcgaatttgtatgagttatcaattagaagaaatttgcaggtgagttgattgtatcgatgatcccaatatttattttatgctaagttttatatatttatagcagttatttcatactatcttattgtagaagacatccaatgtgcttgtccttgtgctattgacatggttggttgaacggttgaacctcaagcacaagatggcaaaagtttaaattatgatttttgtcacgactatttataaacagacccacgttgtggcttgggacttagtgttgcattttttttaacatgcaggagtacaatatcaaatatcccatgcaaaataagttaaggcatcgagaaaaaaaagttaaggcatatgcctcagtggttgagaaagaaaacaaacaaaaaaaggtcttaaagccctttgtgtgtcataatagccatcttgcagctccttttttctctcgaaccacacaggagaactgcgtgtcatttcattaagaaaaaagaaaggaattcaaatccctgagaggttagcaaccccttagggctagtttggaaactca

SEQ ID NO: 191443 - DNA, 285 bp, Zea Mays
taatgagggtctcggaattggtttccaaatcgataaaacaatgcaactcttttgttgcaaaactgataggatagaaacaatggacaactaaaattcaaaactctataactcctgctatactcaacttaaaactacaacgaacacgcgttggaaaagtttgaaaattatccacgacttttgcaataaagttgcacccaaatttatctttatagccctcaactctgcatgacctacagctaaactcagcctgagatactgcacattagagattcaacttatatccgg

SEQ ID NO: 191444 - DNA, 922 bp, Zea Mays
gtttgctaaatgtgcttgggaaaataagctccacactgcgatgagaacagtccagattaaagcttagataacgcagatgcttcatctgatcgatagatgctgggactaacaacgctcgttcatggtactgtctcgttgtaacgaccagcgcccgcagtttcctcaggctcctgaacattctgtccaagacttcctcgttaactaaggcgcgacctgaccgttcctcagcatcttcagctgcaaatgttttcctcttgttttcgctgtactcttcgacgatgatgagagtgcgtagatttaccagacctagaattttctttgtgatagctgatctactgtcagtcccagtgccaacaaagagatggcgaacctcctgcggaatatgttttggtgagctatttgaaacgactctgaagcattcgcttccgctgaccctctctgccagctcgtgtagcaggtcatgaatcgtgaacgcctccgtttcagtgccaaaaactgttctttctatctgcagaaatgagaaggtccgcagttcgttaatgtagtgcaggcctatatcttccggttgctctgttgcattaaccctggtgtttatgaacccttgcgctatccagatgtgaaccaactcgtctcgtactaacctgtatcctctgggaaaagtgctgcagtatgcaaagcatcgcctgacgtctacacctagctgctgatagctccaccacagagctcccattgtttcgtccaacatgtcaaggttcgctgttgtctcccagaaatcgatgctgctgttgctccgaagccgtgctgccactgtgactgctgcaatgggtgatctgccgagctttttcgcaatttttctccctattgctataaaccttccgtcaccaacacgcttacatcgtcataaagttggcttgcaaatccg

SEQ ID NO: 191445 - DNA, 327 bp, Zea Mays
gtcctgaacttcaatggttgatacaagtcctatgttcttagaagattgaaagggttttaaaattccttttgaaactgaatttgcctgaccttttaaaagataacgagtacatgaccaaaatatgattttctgtttcaagggaaaacactggtaagaaactggcaccgtcctctttgttgcaaaacaatgtatataagcaaatcagattgatcttgcaaattgaactgtgtcatagactagctcattaccggtaggtgtaatatattgttttcatcgattatgattttttttaaaaggatgtgttattgctctgctgctggtctgttt

SEQ ID NO: 191446 - DNA, 564 bp, Zea Mays
ttgcgtgagtgaactgtccaaacataggttaaggttgtaaggcaattttttccaccatacagttgctaaaaagttggaaaataaagaattcaaaacaatagatcaccttttaaacctcaaatgacgtttctgtgatatttagggcattgtattcacacgagagggtattagagtacaactagcagatgaaggcgttattgggctagttaatgaccttttgtgataccaggtttcctataatccctttattcaaggcatatctagatggtgtttatgtccactcaagttcaacatcgcacatcattatgccacatcatttctcaaaataaaataaagaccatgagaaattttgccaaattgcacgagagaactttccaaacataggttagggttgtaagacagcttttttccaccaaaaagatgctaataagtaggaatataaagaattcaaaactatagatcaccttttaaactaaaaatgacgtttccctgatgtcaagggcattgtattcgcatcagagggtattagagtacaactagtggatgaagacgttattgggctag

SEQ ID NO: 191447 - DNA, 372 bp, Zea Mays
ataacttccagtttacagattgatattttacttgttcatctctgaactgacactctgagaatggttgcctgcaggcttgttggcgttgccatagagatcatttgaattaccttaaaatgaaaagatcagtgttaatttatcagtgtgcatggagaagacggattgctagagaagaactcagaaagctcaaaatggtacttgagtaattgtatcattgttttaatcattttgattcttctgtatttcacttgtacacccttttatttgttgataccttttgtaggctgcgagggacacagaagccctgaaggtggagaaggagaaacttgaggagcacgtggaagagctgactagccgtttgagcttcgaaaa

SEQ ID NO: 191448 - DNA, 505 bp, Zea Mays
gtggtaatacatttgagctccaatgtctagcaaagaaaattgtgagcctttgttgttctgcttcagaccgtgagcgcagttggagtgcatttgctaatgtatgtgtaccttttgtttgcatattttgtcttctctaaattgcttaggtttcctttttttgtcgttatgtagatccataccaagaaaagaaaccgtttagaacataaaaggcaggacaaattggtgtatgttagctacaaccgaaagatggcaaatagatttcaaagaattagagagtttggctcaaagggaaagaaaagcaacccctagatcctacaagagttccaaagggaaaatgagtgggttcatgaaaatgatgaggacaataacgttgaaaattctctttagagggttgttgatgaagctgttggtgcaactgagcatctaaggggtagaaatctccctagagctgctgttggggctgttaacagaacatacactagaacaaggaagtgtattgctcgtc

SEQ ID NO: 191449 - DNA, 396 bp, Zea Mays
gtgtgaaccaacaggcaagggatcgaacgagacaaactagatgcagtgaaaagcaaaagatagattagtactggatacctacgcgttgaagagaatgaacgcgtcgattagcctgaacccatccttccacccatcagtaatcgtcagcaatagaaattgagatacatataagatctagcatctgtcggctcacccgatgcagactgcatcactcgacgcacagatgaacactaggcatcgtgtcgttcacgaccaccggaggcgggttgagagagacgacaaatcacagggtcaccaaccagtgtatggaagaccagatgcgatgcatgagatgactggggagacaacgaggggaagtcgctgccgtcgtcgctgagagcccaagcctgagcgccg

SEQ ID NO: 191450 - DNA, 341 bp, Zea Mays
ctagaatatggatataaccaagatcctgccaccaaggaattgctatcacagttgagtttacatgatgggcctatgggacctttcactttacatcagggtgtcattcgacataagggcagactttggcttgctggtaatagtgcattgcaacagaaggtgctgacagctatgcatgacactgctattggtggacattcaggtgtacctgttacttatagaaagttgaaacagtttttctattggccaggcatgaaagctgttgtacatgcctatgtgcaatcttgtgctatttgtcaacaagccaagcctgacagatccatgtaccttggactacttcagcc

SEQ ID NO: 191451 - DNA, 644 bp, Zea Mays
gagaagtaggtgagggagatagagcatggttgaggatggcgccgatcatacttcaccgtgcgttgtccttctccatcccgttgcttcatcgccgtgatgtgtcgtcgcccttacaggtcttgatctgatcatcttctacaaccgatgaatccatggatatggagacctggattgtaatgcaaaggaatggatggattggccaattattgatctgaactaaatttttacaggcctcggatgtgtcgaacagacctgaaggcctggcattattgacgagaattgctgaggacactgactgctgcgattctggacctccattgccagaccactcgccgttggagaaaagcctcatcagcaagatcctccgtctgagaggtgttttggatctgccatgtcgaagttcatgcgacgcgttggatcaggttcatgccaaaacttgacaccatttcccgttttgacagacatcgtgatgggcgtatacaaattgttgttctccacgcttaatgcagttgcttctggataccctgggggttctgaaggttgcatatcccaaatgcttatcaggtgtatcaggaaaccatacatcttctgtacgggaggtctgtcgtctgaattgaacccctttatctgtaccctacttgcag

SEQ ID NO: 191452 - DNA, 278 bp, Zea Mays
gcttagtctcttcaacgcgacgcggactcatctctggtcgcctgaaccgtggggtcagctggtcagggtgttcttcctcctctgtgacgaattccgccccgctccaccattcccatcgccgtgtggacccatgccgcatgcacctctgctcaatccaacgcgccctcaccaaccattgttgggtgggaccagagcgtcagctctttcccctccgctgaaaccaaacaaagccgaagcagccaccaaaacggaatccgcggaatcaccggtaaatcgag

SEQ ID NO: 191453 - DNA, 1173 bp, Zea Mays
tggttatggaggtgtgtgtctgcatgacagggagtgggggggtggaggctctccactcttctcactgtcgcatgcgacttagcagcaggtcaaggcgagacaggagggaggggcacaagtgtcaactggggcgagacatgccccaactcatgcatttctagcgacccagcaggctgaggtgagacgacatgagggcgggccgtctccggcggcccaggaaggtggtccaacagtaaagcatcagagggctggggcgattcccgccagctggatccagcgacccagttgccgggtattaggcatatatctatagccggctgtcttaccttgtaggcatatatctatagccgtctgtcttaccttgtataggtgacagccttcctagtttagccttaccttgtataggtgacagccttcctagtttaggagattgtatccttgtacaccaggccacttggctatatatatgagaagtcacccacctgattgggtgtgcggtgctttcccctaaaccaactctctacatggtatcggaggaccaggatcaattcgatccaggccttccttccgctgccctctgcttcctctcctctcctccatgtctgagccgaccttaggcgccagcgccgaccttgacgccatccagcagctcatggtgccctcgtatgcacggttttcggttcaatctcatgtaccgaccaagctggagatgaaggcctccaactacccccggtgggcatccttcttcaaatcgatgtgtggcaagttcctccttcgccaccacatcgacggctctgctcccccacgcccgcaagacccgatctgggatcaagcggactgctgcgttcgcagctggatcttcggctccgtcgacgactccatcctcagcctcgccgtcgacggtgacaaccagaccgcccgcaacctttgggtcgccatcgagggtctgttccgcgccaacaaggccccgcgggcaattctccacctccacgacttccattccatgacccaaggcgactcctccatcgacgagtacgcaatgatcatgaagcggaaggccgtcgatcttcgggacgtcggccatcccgtcgaggactcgcagctcgtcctcaatcttctccgcggcgtcaatccccgcttcagcaacaccgcagacgacatcgccaactccac

SEQ ID NO: 191454 - DNA, 400 bp, Zea Mays
aatatagctacaggttgttcgacgaccaccgtgatgaagatttttatgggctacctcggaaatacagtattgtcgctcgggtagaagttaaattcccgattgaaccacgttatcgtgatagacaacattttattttatctgacatcaatgtaagccaacaattatttaagtttcatttacaaagttgcatgatcttcataccattgcctatactcctactgaaatcctactgaaatactattagggagccaagatcgaggccataacatatgtgtccgtgacagttaaacatttcaacaatttgctacatgaaaagcatgtttacaatatgcataacgtaaagtttggtcttcatccgggggaatttaattttcgacatctaaatggtcccatggaattg

SEQ ID NO: 191455 - DNA, 377 bp, Zea Mays
gtggttgcacagctggaggcctctctcgtcagggctcagaaagtgggtgctgaattattgggctcgtatctgtagtagtgtttggtggtggttgagttgtaagtacgctctgcttctctccacaagctcgaatcaccagatgaaccgcatgtgtagtagtatgtgacatgtcctcactcacctctttaggcgcgtaatctgtcaattgcatagaccctaatctgagcagcaaggaagcaaccgttctggaaactgagatggtttggcctggacacggtgtgtgtgtgtgcgtgtgtgttgtttgttagttagttagttattaggaggcagcaatgggctgttcttcttactaattatgagccaacaatgggctcttc

SEQ ID NO: 191456 - DNA, 399 bp, Zea Mays
ccttgggccattgtcgacgggctcctcacatacgacggccgcatcttcatcccatcggcatcaccactcctccaggagatattggtcgctgtccatggggacggccacgagggcatacagcgcactctccatcgcctccgtcgggattttcacttccccgacatgcgccgtgtggtgcaagacttcgtccgggcatgctcgacctgccagcgcaataagtcggaacacctcctgccggctgggttgctgctacccctgccgatcccgacggacgtatggtcggacatcggcctcgatttcatcgaagctctaccgcgtgttcgcggcaagtccgtcatcttgacagtggtggatcgcttcagtaagtacgcacactttattcccctggctcacccgtac

SEQ ID NO: 191457 - DNA, 803 bp, Zea Mays
ccgaaccgctagtacaagtcaagttacggttcgttgtccgattcttgacgtgtgagcgtttttgtgcgccacctccaccgccctttttccacaaattccttctccttcggcttcaccaccatggtcgtcacgcatgtgcgtaattgcctactttgaccgcgtctgcggtctgctaggaagatttctcttcttttctttcttcgcggagtaggggtacacgccattttttatgcgttctcattacgctgatacctcttagttctagttccgaggaaagtttagttgatgacttaatcatgttttatttgttactgctattatcgctaagcatcttgcactgttatggataattgattgattatacaagctagagcgcgtggctgctaaaaatcatattgcaaactgattgtgactatgggcgtggtagggaaacaaccccaggaatatcaacgtgccgtgtttggtttcggtacctacagctttcttgacttggttgccgagttactgctcttttggtactacataagaccaatctgtggtatccaaacaattggtgctgtttcagtctgctgtctctgttggtcaatgtctacttgtaataccgaactgcagtaaatgatagttttgtttgactgcaaaattgactagtttacctacgccttaggtggagggtaggagctatctccctgcagaggtcaggaacggcctcgagaccctgaagcggaggaggctcgagagagtgcgtttgagtgctcagaacgaagctggcgacaatcctgctgtggctgcgagaagtggcggtg

SEQ ID NO: 191458 - DNA, 2694 bp, Zea Mays
caacaaggttctaagtttggttgacagtgtcctactcaaaataaatgtttggtgccgcagacagctaggcaattatcatgcacactatagtaaggtttgttgttgtccctatgtcccttgtttgcaactgcatgtttttaagcagacgaattcttactgtacacaatcaactaatttcttgatgtgctttcctgtttttttagaaaacgtaggagaactgcacatctttatagataatagagagaacaagacttacaaaaaaagagaaaaacaaaaaccccacggacacacacaacacactacaacccccacggacacacacaacgcactacaaccatcagagactacccaggtgccaagagggtgtcagctaaagcaagactacctagctgcttatctccagccatcatccaacaagagagctcatcaaggaagtttctcagcactgagctgatagagggggatatcttatcaaaaaccactctattccgctgcaaccagagacaccaggcgccaagcatgatgacactgttgacacccttcttcttgtctttatggaccttagagcatacctcatcccaccaattagcaaaggaggaatcatccgaacccagaatgagatgccctaacccgaagagaggcaagatgctgagccaaaactggcgagcaaagacacacggagtcaagagatgctgaattgtctcatcttcctgatcacacagagagcatgtttcagggtgcggcagaccattcttgtgcagcctatccacagtccaacatttgtccctcatggccaaccaaagaaacatcttgcattttggaaggccccacgatttccataatctcttccatggctcaaacgtgatggagcccataaataagatcttgtagtaggaagcaggagagaaacagccagaggcctcatgcctccattcgtgtttatcctcatcatcattcagggctgcctcctccaaaaaatctcacaaaactagatataagcatgctgattaaggaaatctgttaacaaatgctatatattttactctgttatgtgatctgattacattgaaaatgtgtgcctagcgcagtggtaggtaagcaaaagtgcaacctagctcaaatccctgttctcacaaaaaaggccactcgtggtattttcagtgaaatacgtggtccactaacgtttgcagcgtgatacacagctgcaggcgcgttctcgccattagtggcacgtgatgagtagtcggggttcgtagccttttcttgtccctgcagaatataatcttctacctttccgtcaatgcctcaggggcggtcttacccctagggtcgagttatttttgatctgattacattatttcttatcgttgtggttactcattacctaattagcttatctaacagcttaaacttttaaattttctgtcatataatttgacaaaataatcacccatattctttctataagttcattgtggacgaagcatgtaaagacaaatagaattccattgataatagacagtcacctaatttcttgttaccatggaatcacaagtttagaactcacaaggctgttgctgatgtaggtaggccatcctttattgtttgcatgatgactatatgttgtatgaggtttgtccatgcaagttatgaattaaccaaaactaaaagtttggtaatgcgacctgcatgatatgaatataataataccatagtaggacagtcttgatagtcaattggaaaagaagggcttggtgtttcttcttaattaattccattggtggtaattcatagaaggccacaatactaccataaaatgtttttcttgacttgacttcctgcaacagaataactactcgatctttgaggccacactgaacttggtcttgctattggtgacaaactccagtgaggacgattttgaagaaaccatggttagatttctaatgcttctgctatggtactcatatttctgaagtgaacactagaattttgggggccaactcctatccattaggcttcaaccctcttaccattaagatgacactatgcattagaagaaacataattatggttacaatacattctattcaatcagaaatgattgtgtttcatcaaaatcaagtagcgtgaaagaccttgactgcaaactatattgaaactccatgttgcccctacagctaggaactttttagaaactaaaattctctaggaaagctctagttttcttctttagtttgcgttggaacttggaattctttactggaatgtatcaatactagagcttcccttaaatgttttattctgagtttgtactaataattatttgcagaacaggagaagttaaaaaagtaataaaatcttcacttggatcagaatgtcatgtgtagtgtgttctaacatatttcataatctaaattgttgcttctcattgttttttatcaatgttagtatttgatacacaagtcttcctttttgtccctcaatccttctatcatattcttggtatctgtttattcttgctttgtattaaataaatactgagtgacctcttattcacccatccgatgatgtattacggttcattgaatgctgaatttaagaattttccacctttgaagatctgtgatctattttgggtaattttcagttcattgagagcccagtagggagtacaccagaactgaagttgat

SEQ ID NO: 191459 - DNA, 531 bp, Zea Mays
agcaagacctggtatactacccccgtaccgtggtgttcggtaccatcttaaggagtttcagggtactagacgaccagaaaatccaaaggaagtgttcaacctacgtcactcatctcttagaacaacaattgaacgggcatttggcacacttaaaaatagatttaagatactaacaagtcaaccattcttccctttgaaaactcaagtgaagatagttttggcttgttgtgcattacataactttataatagatgatggtcctgatatttatgtatatgatgatgagacctggtttcaaagccttccaagaagcaatcgttcccatgttgacatgaatagagacaaccaacaatgggctaacatgcgtgatcagttagctcaacagatgtgggacgatttggatcacaattgatgtatttgtgtggctgctttgtagtaatgtatttcagacctattttttgtattgtgtcgttgtttgtattgttgttttggaccttaagcagttgttttgtattgatattaagacctaaa

SEQ ID NO: 191460 - DNA, 376 bp, Zea Mays
ccccgcgcccccggcgggggcatcaaaccgtcagtgctcccaaatcgtcgtctagctagggcgaccgcaacgcaacggttgttggagtagcaaacttggttttaaggtggagggaaaaattggctgggctgaaagcagaaagccttgtaatgtacatgaaagaaacggaacggatggcgcgctacaatctgagctcgccattgccgcatatatctgctttaagagagcattgcgctgccttgcctaatcgaaacgaaacgacacgaaatgttgcctgcaagtttttgaacgtgtgggtgagtaaatcgcacggttgggtaccagtactgcgaggaaataataatgcagccagccagtcagtgcaaatccggcgcct

SEQ ID NO: 191461 - DNA, 289 bp, Zea Mays
ccactacaggcacgctctcccgctcccatccccccattcatctcatccttcatcgatcgttgttgggaacggttccactctgcctatcacctcagtaggtgcctcggttctccctggaccgttctacctcaacgacgttctcatagcccccctcatcactcataatctcgtttctgttcgtcgtttcaccactgacaactcttgttccattgagtttgacccctctggtttctctgtgaaggatctggccaccaggactcccctcgcccgctgtgacagctcggggccc

SEQ ID NO: 191462 - DNA, 467 bp, Zea Mays
ggccaaacagattattcgcaccaccaacaacatgatctattgcctcctctttgaggcatctcttcccgccaactattggacagaggccttgaacactactacccatctcctcaactatcttccctccagggcagtgagccaccccacccccagttcgtcttgtatggcacaaccccctcctatgcccaccttcgtgtctttggttgtacatgctatcccaatacctctgtcactgctcatcataagctctccccccgctccactcgctgcattttcctcggtaactcctctgaccacaagggataccgatgcgttgacctcctcacccatcgcatcatcatctctcgtcatgttgtctttgatgaggaggttttcccccttgctgactagtgactcctccccacccccgacctcgattccctcctcgatgtcgattgcgtcgatgttcctcttttgctgccctgttt

SEQ ID NO: 191463 - DNA, 288 bp, Zea Mays
ctccatcgtagtgtgtgtcaggcatcaacctgacattatacgctaccggtgaggatgagagtcctatgaagaacgagctcaacacaacaccaatacacacgagaacacttggaacacgaatggttttggtgctgcctgaaagcacaacttttctgaactcctattgcttcttttattctgaatacaaagagcagaaatgcttggcgcttagccacacatcacgctacaaacgtgtccatccccatgtccacgatgccgctaattcactggtcattccagggctgtgtg

SEQ ID NO: 191464 - DNA, 942 bp, Zea Mays
gcaggattcacttgggaaaaatgctactcaactactgcggcactgtgtgcgtttgcttgtgcttgtttccactgatctggtagctgtacgtttatcaggtttgtgcagttctatgcctccatgtccctttaaatgatgctagggagtgtctctcaacataaacaaattttcatgttcctccctttcagcctgatctttggaagggtacaaaaccatatgttatcaaattcttataggaatctaatttaccttaccaatgtagcaaacccctccctaggtcgatcgaagtagaacaaataaacaaatatctgacattactgagagaagagtatctaagtgcactactacattgatctatgtttgttataactagtgcgccccgtggatgtttgtacaagttatttgtcgctgcagcctggcgacaaacctaatttttctttttcaactccatgtaggaattgggaagactgtaaaggaaaaggtttgtgtgcacacaagccgagatattcgtgctatagctcggcagttggtcagtgtgtggattgaagtttttcgtagagaaaaggatagcaacggcggactcaaattgctgcgtcgaatgccatcaattgaatcgagtaagaccaagagtaaggatctgcaatcaggaaagcctaccttacgtgtgccaaatggaactttggacaacaataaagtagtgtcccagcgccagcgtacaagattcgcaagtagtcaatcaccaccaaagataaacaagaagtatgataacaaggaaatgaaattggaaactgtgacagctgctatgtctgatggcaagttgctttcccaaaagcaacaacatggtattgaatctaaggtggaggaatgtggcattcctatgtctgaggaagaagctgctgcattcgctgctgctgaggctgctcgagctgctgctatagcagc

SEQ ID NO: 191465 - DNA, 553 bp, Zea Mays
tcaaatcaaactttgacatattcatcccattagttgaaatccaggtcccaagttgaaatcaaaagaaaaagtaggatgcatgaaggaaatagaatcataaacgaaagtatatgacagaaaagaaagagacagaatagaaagagaaatattatgttgaacggctcagatttaccccaatatcaacacgacacatcctactctaaatgaacttttgagtaggattgttcatttggaaataaactggttgcttgtatatggtacaccaccgccacggcaatgagacaatcagttgcaaactggttgcttgtatatggtacaagccatccaagtttaacattgtattgagcacaataccaaaccctaaatcctaaaccctaaacaattcaagtggatggggcatttgacatcacagccgccgaagagtagttccaaacaagaaaggaagatcaacagataagcgacaaataaatatctagaaaataaaggaatgcatagggtgtttggtcatcagtcatcacagccagagaagaagagttccaaacaagaaagcaag

SEQ ID NO: 191466 - DNA, 1196 bp, Zea Mays
cgctcggaaaatcgtgcctggctgggacgatggtaaggtttccaaacccctcgagctcccttttttagagcctagagctcagagctgtgatgttttggccttcccccactcttcccttctgggtgtttgcgtgcttgcctgtgattttgatttcagtttaattggtcgaaactgcgacttggttgcagcttccagcgaagtgcgtcaggcgtataaacaatttatcggggccgttgtggagttgttgagcggagaggcagtgtctgaagaactctaccaagttgcgcagactgtatatactctatttggtggcgatgacacggagtatgttggtgctaaaaaagtcctttccaaaaggtagcaaacaaacatgccatgtctctcttttttcaagcctcacaaacttggcaattcgtttggcttttgtgctcttaaatgaggttcaattctatgcattgcaactcgggagctcttaaactgccagtagtaaattaccgaggtctagatggcagatggccataatctcctgggcaatagtttggttgcatcaattatttgagccgtgttacatcatctttcagaatactatcactctgcgtggttttctgtatcatgtggatgctataagatcaagttctttctgctggattcacactacttacatggtttatgtctcatcaggaatgagttggagagccttgtgggctacactgtacaagactcagttttgaaaaagctagctcagttagctcagaagctcgattcccttcaacgagcaagtgcctatgaatctgtacacagaatagcggatgatgtaaatgaaaatgatagaattgaatttggagcagacttcgatttcaagccacttgcccgtttcattgttgatgtttctcttgacgcacccttagaaagtgctgaattgggcagtggtccatttgaaaaatggcagtatgatgcttggagcacatccacaactagtcattcaactgctgttaggggttctgtgagtttgaggtggctgaaagatcagtgtgctttgataactaaaagtggtggctcaatgctctcaggagatgaacttgcaatgaccttgtgcagagtgctcctatcaaataaagcaggcgatcaggtttttaacgttctactgaaaattgcctctgttttaatttttgtttctgcaatcatatggtgctccc

SEQ ID NO: 191467 - DNA, 388 bp, Zea Mays
ttgggaatgcatcctcaaacgaaggtccacagtctgagcaatctgggattgcatcgaacattgaatctgtcattaagcagtacattggacaacgttgggttgctaaggattcgctgccaggaaaagatgtaaatgggagctcagtaagtttggattccttactttaatgagatctaatgatataagaccttctatatatcacatttcttattattaactcacctttttgcagtacctcgtggagcctgaatgtgtaagctctcttcaaatcatactagttgcaactgcggacagttctgaaggaatgcaacagtcaattagaagatgcttccgctatgagatcgacatgaagactatgaatgaagaacagagaaacaaactgatatct

SEQ ID NO: 191468 - DNA, 407 bp, Zea Mays
gctagacttgtctttgagaaagctaggttcgctcgaagtagtggtgcaagtgaacatggcaatgggtgtggcatcaacacatgtaggcatggggtggtagagcgatcatggtgcagtgcgacttaggtgaggtgtgcatatgtgtggcgacgatgcagggggagagggtggactgggatggcatacgagtatgggaatgagaactcataacatgtttagggagctgagtgcacaacttaaaggtaatggtatcgggatgagaattcggaacaagggagttaagtttaatttgcatgtaatcggactagaatgagaactcgggacaaatttaagaacgttaggtgaaatttactctttctatagcctgatagagagagaaaaatagagcattgtattgagggtaagag

SEQ ID NO: 191469 - DNA, 279 bp, Zea Mays
ccgaaatctcctcggcggcacgctgaccgggctagaatttcccttgcattttggcctgttccgcctgaatcgttcgccgcgcgctgcaattgcagtagatgttgagtggccgtgggatcgtacggccggcggcggaatgatgatccgtttggtccatggatgcacgattcatggcgtacttggagccaattgtcggcggagactttgtgtaggtcatcacttgttggtggagcaacagtgcttttgctttttcgccctagttgccgtcagttattggca

SEQ ID NO: 191470 - DNA, 408 bp, Zea Mays
cctgaacagagttgctatcaggccggctgctcttttgccaaacccatgcatcaaagtacacaagaagacatcttctccactctcatcgctggctgttccccgaagaagtcgtagagtggctggggttggagttgaatttatcatgcaggacctaggaagaagatcaatgaaaaaagctttggcaaccctgcacattatttcagaaactgagggcataaatcaggaggctatggatgcatacgccaaactgttttcccaacccctgtctcagtgtcatgtcgaagcccttgcagccttgtttggctggagtgctccttctgttttggagccttgagtaggttcttgtgctggttgctcccttgctgtaattctttaatggacccttcaaaaatccttgtttggaatgtt

SEQ ID NO: 191471 - DNA, 475 bp, Zea Mays
acaactgtgtttcaggggacgtcaaacctgcacaagctggttgcgaaacttgaatgctagttatgtgagaattgtatggcaagagcaaggacatgaagctaagaagcagctcattgtttgtgtgcctctgggattgatgcagacaggaaagaggcaccctgatccctttcttgtaaatgttggtgagcatgttggcattggcatcttgatctgtttccataggtaaggtgaagaggattgtgtaagataaaagggacaagctgtatgtaaagacaagccaaagctgagtgaatttcaggcaccttattgtgtggagggtcctgtgtttgttgagtaggcaacgctcgggctggtgtgagatgatgactgcatttgtgttgtgttggtggtattttcactgctgacatgactgttgtatcggatgacatcttttctgttttatgacagtggcagtgtgatactaggctgttaggag

SEQ ID NO: 191472 - DNA, 304 bp, Zea Mays
atgggccaagacaactaagaaataacagaaaaaagaaacagaaccaaatcatacctgagttattcctgtccgtggttgcgacctcgaggagaagatcgtttcgtacctccaggaaggtaggaagaggtcgcccacgttgaagatgaagaccgatgctgctgaaccgttcgttgaggccacaaatgacattgatgacgagagtgcggtcgggaacgggctcgccaagatcaccgagggcatcgaccatccctttgaacttacggcagtagtcggtgatggagaggtcgccttaacagaagttgtg

SEQ ID NO: 191473 - DNA, 537 bp, Zea Mays
gagatctctcatccgtgcagctaggtcggcatatgatatgtcacgcggcaatatgacaatccttgtctcgccaccaacatatcgaagacagccatcaagtggtcggggaaggatactacctccaaagctgcagaggaacttggccatgcgtggtgccccctcagcctcagagatgcctggggcagcggcagagggcgccatagttgtgtcagagagactgtaatcaagttggtgtggataggttcactggatcagcactactaagtctcagtatatcagacgactgaaatccagcaagtcctatgcccagcaccaattagctacttcctgttggaagggggaaaacagttattagtgcattaaaaggaaggcagcaaaaaggtgaagtgtgcatccccatcacccagataactgatctacacgaaactccgtcaccaaatcacacagttaccacaaagcatataggagtgctttattctgcaagtccatccaatggcaccttaggaaatcctaaggctaccgcatacctagttctcc

SEQ ID NO: 191474 - DNA, 350 bp, Zea Mays
actcgtttagcacgatgaccttgaccccctgctgtgcccatcactgactgggtggtcgtctccgatacctcgttccataccactatggacattggtatccttcttccaccattgttggcaatggttctgttcttccagtcacctccatcaacgactcaaatctttttggtccttttcgtcttcgcaatgttcttgttgctcctgacaacattcggaaccttctatctattcgtcaattgactactgacatttcctgttctacggagtttgaccctttcggtttgttcatgaaggatcttgccacttggagtcttctcgcacggtgtgacagctttggcccctatacaccc

SEQ ID NO: 191475 - DNA, 553 bp, Zea Mays
gaatggaggagtcgccaaactcgtgaccgttatcacactggacaacacgaacgttgcgatcgaactgggtggagacccaagacaagaagtgcgagaacgtggtgaacgtatcggactttaaacgcaaagggaaagtccaaagaaaatgagagaaatcatccaaaatcagcaagtaatacttataccccgagatgttgaaaataggtgacgtccacatatcacagtgtacaagatcaaaagcctaagaagccatagaggaggaactatgcgaagggaagacgaacatgtcgacctaactgataggcatgatacagactatcaaaattgtccttgccatagcatataggagatgacagagctgctagatagcttggacatgacatcggacccaggatgaccgagacaatgataccaggtgatggacgaagtagtagcagtcaaggcaagagaagaggacatggcggtagagccgcacgtggacaatcgtcctatactcctagtctcctatcgatcgaacgcccatctcccagcatttccgtttcccaaaacgcct

SEQ ID NO: 191476 - DNA, 414 bp, Zea Mays
aaagaagaaagcatttgtcccaccaccacgattcttcaatatcgatgaggcgaggtgacatttttcttcttgagaattgatctaattgtttatgttattgtttgctaatcttgtgcaaacagggagatgcatattcgtgtggaacggaggcgagataaagaatctggggagtactttgagtgggttgataatttgaagtttaaagatggtttcttgtacaaatcagtctcaactaaatcaatccacaaaagtaatattcaaccgactttcgatgagcttgagaagtttaagaagcctggtgatgacatgaatggcgacatggctagtttgtctactctatttgcaaacaggaaaaaagggcattttatgaagggtgatgctgtcattgttattaaaggcgacttgaaaaatctg

SEQ ID NO: 191477 - DNA, 433 bp, Zea Mays
gctcaagataggaacaacccctagcactgagaacagagcaaaaactgtgagtgcaagtgtggcatcaacttaggctgtccaagggtatgtgtgaacatggggatcaaaggtcagctaccagcgtgagatgctcacatcataggacccaagaagcaatgaacaaaagggaactggttcacaccaggcgccagtggaagaagcaccaatgcaccctccaccatgccatgtctcacagtggccatggacctttcgttgtaactggaaagtgcaagagggaagagcacttcaaccaaccgtccctcctagtcctaggagatatcgtcttacctgcaacaacatgattgcatgaccatgagagtggctgatgcagttcaggtgtgttcacccatctgctgctcatcatgattccaattggagggtgaggcacttcgag

SEQ ID NO: 191478 - DNA, 480 bp, Zea Mays
cctgccaagaccattataaacaagctgtctgaaaaaattcaagctctgagggaactcccacggaaagtggatcacataaggatgaaactaataataatgagcaaagttatacagcagattggcacagtctaccttacagatgaacttgtgaagagttggattggggaggtccggaaggtggcttaccgtgttgaggatgtagtagacaaatactcataccatcttcttcaactggaggaagaagggtttctgaagaaatttttcgtcaagggtacccattatgccattgttttcagtgaaattgctgatgaggtagctgagatagaagaggagattcagcaagttattcagatgaaggatcagtggttgcagccatcccagcttgtccctcaccctgagcaactcgctgaaatcgaaagacagcgttcccaagacagtttcccagaatttgtcaaagatgaagatctagtaggaattgaa

SEQ ID NO: 191479 - DNA, 644 bp, Zea Mays
aaaaagtattggtgcaagatggcaagtagtaggacagaatggtgatgtgaccaagacaagtaaagggccattgatcatgaagtgtagcaaaatagctacaaaagagaccaagagagtatagttgcatcaatgatgatttgctaaatggacgagactcagctaaccaaagagaaaaaacttggcttacctgacaataaatttgtcagacacgcatggcatggacaaactgttgtgtagaatcggacatggatgcaatggaatttaggaaataggcctcaatatacacagaacaacacccagtatggacagagaagtagcagcgcaaagtgtagtgtaccagcacaacaacagaccgagcatgcagcagggaaggagccacagccccacaggcatcatggcagcaggacaatgtgactctctgctgctgcctctacttgactgacataatagatgaagaatccatggtagaatcaagtctgtgatgaaagaggatgggatcaaggacggagctcaacttgcccacggatggttgtgggcacaagcgcacagacctgagacctggcagagacgggtacacaggtggcatggacgagcactgcataggattcctccatggagggagccgcctgcggagtaacgagacc

SEQ ID NO: 191480 - DNA, 360 bp, Zea Mays
agggtatccgacattagctctacagcttctagtgacggcgggcgtgctgtcgtcggtattatcaaggccgaagccatgctcgggcgagatagaagtcttctcgatgccatggacgagcctgctctggggttcgcagtcgtgtagggaacagttgaaggagtggccgttcgcggaattcgcggggggcaggtggttgaggccgaggttggtcgaggtggagtttgttccgaggctgaggccagcttcgggcgaggcgtagattcttcccgagggctagaccatgcttcgtcgtacgtgcgtcccattcggatttgtttgaactctgttaacggcgtgggggagcagtagcctttatcccgg

SEQ ID NO: 191481 - DNA, 436 bp, Zea Mays
agggcattgaaattaaatcatcagttcaatggccttacaataaaggtttatctttctgttgctggctaagggtggaaagtttccctgagaagggtttgatgggtctttactctttcttcactgaaaatggaaaaggatgtttagctatgattgggaataatactctaatctatgaggtaattcctgccacctccctacgttcactttttattaaattttgccagtgctccttttctttcataaactataatatatcctcatataaattacctccacatgctttgcagtctgtcaatccaaagcatcagtgtgttttgttatctctaagcctccctatcaagcaatggaaattcctttgtgttactcatacaattgggagaaccttctctggagggagtcagctgagatgctatgtagatggcgatctagtatcaag

SEQ ID NO: 191482 - DNA, 452 bp, Zea Mays
ttcctccccaggcagaccccggtcagcggcaagcgatccccacggcggagatccaccgacgacaactcgttcttcgcccagtgaactaaccttcgattggagacacacaacacgatgcaagagcggaggcaaggacaacgggtaaggtattaccgacggaggtgttgcggtgatgccggtccgcagcatgaagcggagctgcggcgaagctagagctccgatgaggaattatggcgccaccataatgccccgcacccggaccgactgccggtgagattccttgagcactagagacgatcctcgcgaactctccatgacgttagcgacgatgagcagtaattcataggtggcggccctctctcttctcaggcactcctcccagagcggcggcaaagcttagcggcgcaactagtgatggctcatggacttgatgccagcgccgtgggtactgc

SEQ ID NO: 191483 - DNA, 808 bp, Zea Mays
ctcacaacatctttctcacagctcacaactagaatcggatttttcatgattctatagctaaaccaaatagagcctcggtgttcttcacacttcgtagctaatgttgtgtagtggactctaacattattgtcgactcctttgttggtcgacagtataggcaccgtcctaagcgcccttcaggctcaggcgtgtgaggggctggggtggtttaggagagattatagatgtgttcaattattgttaggcaagtgtacctacactacaaagggcactttagattgtaatcaagaattatcgaagaaggaataaacacccacacaagcatgtgtggtttccttcaacagtggcgacacagaactctggcctcgccattgttgacacccacgactggcctcgctacccccaacgctccaactctcagtcttagccgctcctgtactctcccttgtgcacccagctctgtatcaatttggtatcaaagaaaagcactagggcatttaccaccatgtactgatcttgcggatattgcggcaaagttggattgcatcttagagcagctcaccacccttggcaatcggatggactcccacgacaagcgcattgcgcggatggagaagttctagtctatggaggatgacgtggacctcaccgagaactccgtgcaaccataataacaggattgtagcagccatggtgttgatggcaaaggcgaccatgcccgggatcccttctgtgacaacgacttccatgaagacggctactgtatgcccttggcgaccctagcgatcatcgtttccctcacggacac

SEQ ID NO: 191484 - DNA, 293 bp, Zea Mays
attgatctctccattatgacctaaaacacgcattggttgtgcacggtcccagctgggaaaggtgtttgtggagaaccttgagtgaacctgttttaatatatggattttagaaatcatattactgccatagtttgcagctttaagatgctgaatagaacatcagaatgaagcactagcactaccaaaaagaaaatgtcagttgcacagaatttcatgcaaaacagttgggagccctaagctacctcaaaccaaacacatttccttcccaccacctaatcggaggtcacatcctg

SEQ ID NO: 191485 - DNA, 622 bp, Zea Mays
ggaatgaccatggtatgccacagcgtacgaccccacaactatgacaatataagagttgttgagcctctgttgtgtgaggtccgccatcctgcaggctcgtaactctctctcccttggcttataaaagtagagtagcgtagagggggtgaatccaaccaacttctaaagggcagacatagaggtgaactagagaccgatagtctagaactataaccaaaaccacatgaaaagggggagctaggaggtcgtggtgctcaattgatatctgagcttataatcttcttcatttttgtgtttatcaatccatcatacacaagagaaagtaggctattagtgtattacgcatagcatgacccaaacctctataaactgcccaactgtctatgtggtagtaaccaggttgcactcaagatcagtgtacatacagtaccctcactctatccacaaactcacatgcccctcttttggctacatacagtaccctaatgtcgtatcacaacgatatttggcgcgccaagtaggggaccacctctttcttgaatttcagggcgctatgttatgttgtgcagctatgcagacgccaacacatccgctcaactagcaactccattcgcgagtcgca

SEQ ID NO: 191486 - DNA, 274 bp, Zea Mays
gcacgtgcatcggcgtgccgtcgtttctgcacttcctgatgcctcatgcctgtttgtctatctcaatccaatgtatgcgtaattttcactccaatccactttagatacatgcacatccaaataaagtctaaaaatgaacgtctactctttcctcatgctctgttcctgcgtgtttatcgggcgctagcaaagaaccttgaaagggtctaccatgtgagatatttgctgtggcgctccctcgtttttcttgcatttgcaagtcgccgaaccttac

SEQ ID NO: 191487 - DNA, 576 bp, Zea Mays
ggaagccctcgcttagacaagcgatccactgttcaacatctgttcttgacagccaatcaaatgaagaatttgcactggagcggagctcaagatttccaaatcctttttcatggggcaaacttctctaatcccaagaagaaagcattgtatgcagattttctagtataatgctctgaacgagtgagcttccaagtgtgttgatcattgatgtctggctgtagagtgaagtcatctactaattcccataaattcagatttcagatattgaactatcacctgggtggttagagctccttgaatgtccgttacccacctactgctcaaagcctatgacaccatgagctgcaattttgctctttgggagatctgttaataagattaggagctagttcagcaacagagctaccgttcaaccaccggtatgtccagaactcggtcggtgtcttctcctttcctgacgtgcagcagcagcaaagagagcctgggcgttgtgaggcacctgtattggtagaccttcccatgagagataggaatctgttttattcagccaaaaccacctgatgcacaaggcccaac

SEQ ID NO: 191488 - DNA, 406 bp, Zea Mays
aggagatggagatggtatgaagctttgggatgcttgagagagtcaattcaatttttattaactcaagctatcaatctacagtgatctacatatccaagattgacccaaggttatttcaaattattatgtctaaaactcatatcatctcgggaagatattaatgttgtaggaaataaagaattaatcctatgccaaaaagtcaagacctacaacatggaggaaagccaaaggatggtaacatttatgcttttaagtgcaagtattttagaatatcatttcttatgtgtcttatgtagtcacatagaaaaataaagcacttcaagtatctttaaattatatcaccattctttgaagaagttcctctcatatggtagattgtatattcatcattcctatactatggcaa

SEQ ID NO: 191489 - DNA, 456 bp, Zea Mays
tacaatccctagacaggatccatctacatgtggccagggtcatgaccgccagcacctcgtccaccgacctcagggcctcttgctccaactcaaccgcctcaggcctttcttgctggtcctcccggccagtgggcaggctcctggccccccctcaggcatatgggccggcccctgactacactggcgctgctccaccccctcctggttgggatctccaacaactcgtcaccaattcccaaaccaccactcttcaacatccccagtagcaagagtggttcttcgacacaggtgcctccagtcacatgacttccgacgctggtatactttcccacctctcctcttatcatcatctaccctctaacattgttgttggcaatggcaaccttcttcctgtcacttccactggcaccactcaactttctcacaattttcgtcttaacaatgtccttgtttcac

SEQ ID NO: 191490 - DNA, 304 bp, Zea Mays
cggagcaatcggcttaagtcggcaatgacttaagatggtgcaacatgctcgcgcttactcgacttagggtgaccactataccctactaacggagcaatcggcctaagtcggcaatgacttaagacggtgcaacatgctcacaactactcgtcatagagcgacatctatgccttagcagccgatcaattggcgtaaatcaggaaaagactccaaaaccagcacgccgcacttacttccacgatcgttcataacgactgttgaattctaacaacagaaacaaaatgttagagttttcagcaccaag

SEQ ID NO: 191491 - DNA, 1780 bp, Zea Mays
gagaactatgccctatttcagacctatgcctgcattaagacaggaataccatgaatgtgcaacttgccatgcccctgcaaagactcgttgctccagatgcaaggctgttagatattggtaattttttttcttgtctgtatccatttctataatcagtttatgtattgaaagaaaccatgcctgatcaggcttatttgaaattcaaagatctggtccatcactcatccttctccagtttatctaacctgttccacttagcaataaaaacaattctactaaagctagtttagattttgtttttttgcactgagatattagtttatggcatactgacatagtgggactgcggaaggtggcaaattaatttcatataagagagcgccattttttaaggaatttctgatttctgtaatgaaggagagtttttaaaattgatcttctgggtgtcccaatctaactcctccccaccacaaacaggaatttctgatttgtgtaatgaaggagagattgtttccccaatttttatcattcatgttgttattggccatgttgataatctaacggtctaagctcatgattctaactcactcttatgatcaaataggagcacccttgcttttcatgcgtgtgatatggattcgtaactaaggtccaagcagttttagacgcagctttgttgattagtcatgaaatatgattaattggctttttactctctaatgctaagcaatagcaacgaaattttcagattgaaaagttttaatccttgatttatctatatatccaagttgtatacttgtatgtgcctagcaactagtcaacaaatttgtctacggataagcactgttgcagcacactactagtattttggccgacttgacatcagtgtcagtacttgcggttattattttcaccttcatctggtagtgagtgggttgcctgattttgtggcctatttctatattgaaaaaccatgcagatcattatgttgtttagatagtcacgggctcatggccaacttgaagcttagggactgacctgtttctgtggacctcaggttgatatttagcaataagatttttgtctctctagtctctactgctttagccctccactgtgtggcattaatctctcctggctagaatttgtattagactagtaagtaggcttgaactgatgacttattgtctaattatatctaattcaccttaggctagttggtcaagatgttaaatgtgcctactaagatgttaaaattaatcacctcatcatcacagtagatccagcacatggttagaagtagcattgcagatataagctctttgacataatgcaatattctttgtgactgattgattgaatttgttcttgcaccattactgtgttaattgtcttcattgtgtactaactactgtgtacactatcttgcccttatgtcaatgacacctcataaagtcataatcattttgaatgtgatgcagctctgggaagtgtcaaatagtacactggaggcaaggacataaggaaacatgccaaaagtggcttggtagtggttctagcagctttggtggatctagcactgaggctactgaacagatgccgttcttgactaacttaaattcacctcttccgggtggtgacattcacttgcgtgacttgaacttcgatactttatcagaaccatcctttcccacaactgatggttataatctagatactgatccatttttggcagacagaagcaacatgaataaatcaaatcaaggtattcatatgagcg

SEQ ID NO: 191492 - DNA, 580 bp, Zea Mays
ttgacttggccaactttcttactagagtacctgtatgtgatggggtgcattaagaacctaggggggcagagttttgctagaagccttctagccgctgaatactataaactttctgttgccacgaagttgagggtgctgcaaatactctgtgatcatgtccttgaatcacaagaatacaaaactatactggaagatcgagtaggctacaatgaggagatggaatatgagatagattctagcacctttttggaggctggttccagagcagtcttgactagagcctcaaaggcctcagcttacaaaatgctgaatgatttacagaactttgaaagtggtccaaatgtaacaaattcagatgttgctgtagcagatgtttctcaggacggtaatagtgatgattgccgaatatgtggaatggatgggactttggtatgctgtgatggctgcccatgggcatatcattcgagatgtatcggtcaaaataaagctttccttccccagggggactggttctgtccagaatgtgttgtcaacaagcttggaccaacttcatcaagaattgaacgtggtgcaagaggag

SEQ ID NO: 191493 - DNA, 318 bp, Zea Mays
gtaaaaaactcagccaggaaagctgctgaaactgttctgttggttattgatgaggaaggagttgaaactttgatacctgagcttctaagaggaatcactgacagtcaggttggttggcctgagtttttttcagaagaaatgggaatttgaataacattggggcttgcttttaccatttttttgttcgtttctaaacatattatttgtgtgcaggcatcaatgaggcggggctcagcctacctaattggtttcctctttaaaaacactaaactatatttggctgatgaggcttctgatatgatgtcaaccctaataatt

SEQ ID NO: 191494 - DNA, 457 bp, Zea Mays
agaacccctatgcctactatatccattgctttgctcaccagttacaactagtggttgtttcagtctcaagatgttgttcttctatggaagatttttttgagtatgtcaacatgattgtgaacaatactagtgcattttgtaagagaaatgatttgttgttggaaaatcatcgtataattcttttggataagttggagagtggagaaaattcattaggaagaggacaacatcaagaaacatcattggctaggcctggagatacaatatggggttctcactataagactttgcttcgtattgaaacattgtgggacccaataatagaagttctatcagtcatacatgatgatcaacataatccatcaagggcaggaggtttggtgcatatcatggagtcctttagctttgtttctatcatgaagatgatgttgcagatccttcgcataacaaatgaatt

SEQ ID NO: 191495 - DNA, 487 bp, Zea Mays
ggaaaccgtcaggtcaatttctgaggtacgtggttctgttgataatgctctagagaagctgattgaggttgaacttgagagaacatctcttgctgaattggaacagaactactctgtgaaagttggcagaattactgagcagcaaatagctcttgaagaagctgctgcaagaggtagagaacatctatcatgggaagaagcagaggagctagcttcacaggaggaaatctgtagggctcaattggaacaattacatgaaacatggagacagaaagatatgcgtattttgtcacttatgaaagtagaagacaatatcatgaattcgctgctttcttctaaacagtatgtttcatctttggtggaccatgatcaggaaagtgagtttcattatggacaaattaaggccctcctttcaatcttcgcaaagccctttgctgacctggaatcgctggaccatatgctatcatcatctggcatgtttcctcac

SEQ ID NO: 191496 - DNA, 441 bp, Zea Mays
gttctttaaattatgttttgcatatagtgtaatggagttagttgttttgggatcattattaaaatgctctgttcatatgataaatatgtatgattgcagaaatgttgaagtgtatgttgtgtctcagtctgcgatcataataggcaagccgacgtgtatgctgatagtgggttgtgtcgttgctctagttagtcgacttgttagatgacttggtttagctcgtaatcacggtaaattacttgttgtggtctaaatgtatatggttatggtcgcgggtaaaaagtattagtgctcaggtgaggtataagttaaaatgcaaattattgtgggaacaacacttcgatatcgattatcggggagaatgcgttgttaattaaatatagtacttctagtgctcataatgatacggataaaaatttgtaagttcacttgttagttctc

SEQ ID NO: 191497 - DNA, 440 bp, Zea Mays
gaagctcggcttcagcactagaacgagatatggccacttgctttttggatttctagacaataggtgaggatccaagaagaatacaataacctttagtagaagaacggtaaacaggatcacttgcccaagtggcatcggaatatgcatgaagctgaagtgggctatccgaggcatagagtaaacatctggatcttgtcccgcgtaagtatctaagcgcacgaagcaaatgaccataatgaactgaggtcggtgtggatacaaattggctcaaaatatgaacagcatgagcaatatcaggtttggtgatggtgagataaacaaggctacccacaatatggcgatattgagttgggtctgctagtggtgtcccatccttcggacgaagttgtaaatgaatatccattggtgtcgcaactgtgcgtgtattagtaagtccagag

SEQ ID NO: 191498 - DNA, 574 bp, Zea Mays
gccgaggaaaccaacctcgcactgcctctggtgccacatttatgagccaatctggccatccaggttttgcatgttcatctaataataatggcctagcttcatggggcatacccaattctaacttattcccatattttcccattattccattatgcccgctgctgatccatattttcagtctatggtgcatgcttgatttcgtatggtggccaacagctgaaactgaagtctctgcattgtccaacttgtaactaggagcaagaaccttttcttctacctgagaagtatttccaccattggcacttgctacatttgcagtatcattactagtagatggtgtgaagaaccattgccaacatgtgcatccagtggtttggcttcctgaagttgtgtcatcatgtttcttagaacacttaggacaaaggtggctcagaagcacatttatgcccttccacttgactgaatgcatctgatctctattaaacttggcagatgattcttggtgaatatcttcattaccataaaagttcagtgcatgaagccaggtactcttgatccaacagtagacttcacg

SEQ ID NO: 191499 - DNA, 432 bp, Zea Mays
atgtgatatcgctctttgaagatgtgagggtgaaggaagatctaaacagcgtaacaagcaaaaacttgttcagagaagagctagtggcttccctagtcgaaagttgtttccagctatctcttccactaccagagttgaagaattctgggacagagagcagagttataggagcgttagcctatggaactggttatggtgcccttaactggacagaacctgctttggatgtggtggaagtttgcaggccatgtgttctttgggactgtgatggtcgtacctatgcaattgattgctatctaaagttacttgtgaggctttgtcatatatatgataccagaggcggtgtgaagacaattaaagctggtgcatctcaagatcagattctgaatgagacacgacttagaaatttgcagctgcagcttatcagggacc

SEQ ID NO: 191500 - DNA, 1010 bp, Zea Mays
cagatggtgatttgagttgacacaagcgatttatcctggtttggactacgagaggccatacttccagcagaggtgggatgatgcttatattactcacacaaaagtgctcgtggtaggggttacaagcatagcgggagaggggtggatcctaagtcccagctggtgattgaggcaagtcccaataccaggtaggggagaagaatgatcaagtgttcgcctgccttgtgtctccctgttccttgtggagccgtgaactatcctatttataagctcggggagagttgccttgtagatgggagccaactacatgctgtgaaggggtgtcttcataacctatagacaatatggccttgtactttgccgttgacttgggcttgcttgttttctgctgagagcagaggccgaggctgagggcttggtcacgtacccgagccccctggcgtgggatttcccataccgtagtggttgacatagtgcctgtcatgggaaaaagcttcttatgggatgcgtcagctctactatttctgatgatgttgggaagtcctctgccataggtatcgagggaagaactgagctcgggcaaggcggaggtccgtctgaggttgcgaccgagtcttgtcttgagatttgatgacgtgtgccacactcgatggagtggccttccacgggattcacaggggacaggtagccgaggctgggttcgagcgaggcggagcctacgcccaaggtcgagttctgtattgggcgaggcgaaacttgcgcccgaggtcttggtccgcatcatgtcatattacgcgtcccatcaagggttatcaagcggcatgcacatgcgtaatgatgttggtgaatctttgataagaccgcggtcctgttgaacgattcgcctgtagcccaacgtgaggtaggtgtccgcattgaatgcggttgtctcccaacggccctcgggaaagttttgtctttatcgcctaaggcgggcacggacaaggtggacatggctgccctaggatgag

SEQ ID NO: 191501 - DNA, 1084 bp, Zea Mays
gtgttattgatgaagtatttgaaaatcagtggtaccgaccaattgcagggtggggacataacccttcaattggtcacagaaaagacttaaagcagtggagcacaaaggactgctcatactcatctaaggtattttttagatatgttactaatggaagctgtttttcgctataactaagaaaatcaatatcgttgttctcttttttggtttatatcatgcaaacatgttcttaataaatcataaactgtaacctaacagaatttatgcatccttttgtgaaggcattttttgagcctggccttccatctggttggaggtggacctcaccgtggaaaattgaaaggttgaattttgtagataatgatggatgggcatatgctgcagattttcaaaacttgaattggccatcatcatcctggagatcttctaaatcaccacacgacttcgtgagaagaaggcgttgggtacgttctagacagcagtcgcaagaacaaagtgcagaaattcctagaaaagtacttgctactgtcagtcctcattcatctactgcgttgccttggacatcgatgattagggatatggatttatgcttgcaagttcgcccatattctgaaaaatcagaggaatcatatagctggagccagatttgttcactaggttctgagagtatacctaaacagcagcactcttcactttctaggcaaagcaccgtaaagcagtcagtggtatcatcaaggaattctgttcttaagcttgctgaactcgagaaaaaagatgtgctctcatattgccatcctcctgttagcactgaaagatatttctggtttagtgttggaattgatgcttctgttgttcatacagatttgaatgtacctgtctatgactggagaatttctttcaattcaattcttagacttgaaaataaacttccctatgaagctgagtatgctatatgggagatttccactaaaagtaatatggttgaaaagcagcatggtattgtcccttcgggtggaagtgtatttatctattcagcagatatacggaaaccaatttatcttacattgtttctccaaaacggttg

SEQ ID NO: 191502 - DNA, 654 bp, Zea Mays
cacggatctggggatccagctcctcgccctcaagtgcaggaagctcaccagcctggatctctcctacaccatggtgagcgctttccgggtttcttgatttctctgttcgtttcttgggaaaaaagggaaaaaaaaggcgacggaaggttctgtttttatttccttctagtatgtttatttttttatttaaaacatcagcctccctctttaatccaccggagcaaaacggccttcagttatgggttcctttgctaaatctgctatcttcatcagttactagaccatcattctgctcaatctaatttattcagctagtgcttagggcattgggccactccagtgtataggtattaggtagtatagtattcttgatctgcggacgttcttatatctgtaagcaagacaagtcatcgttgcaacaatggatcagcagaaccgtactagtagccaactctagtttctcttgcagctttgtgcctagtgcctagcgacccacttatcttatcgtgctggagtaataataaaatcgagatgtgtcttctgtttcagatcacaaaggatagcttgccttctatcatgaagctacccaatcttcaagagctgacactggtggggtgtattggaatcgatgatggtgctcttgttagtcttgag

SEQ ID NO: 191503 - DNA, 554 bp, Zea Mays
tccttcatcaccttccattctgcacttacagcagcagcagcagccgccgccacagcttgctgcgcttgttgtgcgacctcagctcgctccatggaccccttctgcttcagcttgcaggtcagtcggcatattactgatctctgctctccactgcaagaagaattttgctagaaagaaatgcatagttgttagctcgtttcttactgttctgtttatattttccctccctttgttttctagataagcggatgtatgtcagttgcgtcatcatttatcactgtccaatgtccatagacatcacaacaagcactcgaagatttgggactgttccaacaaggtatgttctggtctttccatggctttgtagcttctataggcgtataccatatattaccatctcagtaaaagacatttcagcttcctggcccaactcagatgccctgcaggttcccaaaactcatcaaactctgaccatggacattatattgttatttagctatttaggctggtcatcatcatcctgtcacttgttttgaaaagcatgggttcacgat

SEQ ID NO: 191504 - DNA, 559 bp, Zea Mays
ttttggagtttgttcaccagctattgtgctttgctcaagaggggttttgttaatttgaaacaaactaacatgtggcggttcccatggaggaaggtctttctcaaacttccctgccaaagcatcagtcaatagaatggaatcgtcctgcttctcactagctttccatattttcaaactaggagggaagtagccattgctgttccatttccgcagctgtatgattgagaaaggaccttggattttattagaaggatccatgtacagccagatcttctcagactcgttaatggctgattgaggtgcagtttttgcccctgaacatatgttattagctaaaattccagaagaggcaccaggtgacccttgtggagcactgcgtgtggtgccttccagtttaactgtttgtgcaccagtgtttgggctctctgatttacttgtataaccagcactttcaccttgagaagaaaatgtggacctccgtggaaggggtgattccatatgagaactcgattcggcccatgtatttcgattagattcccaattagtttttgaatctcgc

SEQ ID NO: 191505 - DNA, 735 bp, Zea Mays
tgccgtcgtcatcctgcagttgggtaaaccacatctgggcgacgtcgtccaggtagtacgacgccagtgccacgcgctcctccgccatagttctgtgttggtggaaataggcgtcgcatttgtggaggaagagcatgggatcggtcgtaccgtcgaagcgaggaaaatcccactttctatgtttgtggtggaagtcttgatcacgtaggccttccgcacgtcgggcagcaacgttgccgccggaggatgaagacgtgtccttgatggccgccatgtctgacttcaaggtcgtcatctccgcggtgagggacttcagctgtgccatgatctcggcgagggagggttctgccatggtgttgctgttggtgtctgaggcagtggatggtgggctagcgatggcagcagctgcggtggaggagcggctggggcgggtgggggaggatcggcgtgacctctgataccaggttgtcaagggcagtggtacccaaggcagcaggaccccggctacgtagttcgtagtcgcgatccgtcgtcgccggcagggttatttcccccacgccgtcgccgactattgtcaaccgggttataccccctggttgccgacctagagaggaagggagaggagataggctaataatacttgattgatttatctcctttgcggttacagttttatatggccagaggcccaaccgaaaggagcaacaaactccataatctaaggaactccctaat

SEQ ID NO: 191506 - DNA, 309 bp, Zea Mays
ggccggggctcgggtggggagacgtgagccgcgcgttatgcttgcgtattttgccgttattggctgcgtaaatgcggcgcgggtcgacgtggcagttggtgggtctacccacgcatgcatcgattctaggtggggcgattatgcatacggaatttgaatgaaaaagatgcataaatggtaacgaggggccgggggtcgggtgtgtagacgtgggacgcgcgttatggttgcgtattttgccgttattggctgcgtaaattcgcatctgacgggacgagagtggtcagatcgggtagtggggtgacgcgc

SEQ ID NO: 191507 - DNA, 354 bp, Zea Mays
gatttgggtcgtaaattggaggagactggaagggtagtagcacagatgaggttggaacagttggggaaggaattaggtgaatcttctgggggttctggttcaccatcattggaggtgcagcatagtgggtctctgtatacgagaggtcgtcatgagaaggaggtggagggcggtagagctttcagaggtgattcagggaggatgcaaggggaagacagacagtcttgggatccacattatcagggtttacccaagttaccttttcccaagttttcagggggtgatcctgtagtatggttggatcaatgcatggaatattttaccacttacagggtttccaatgctatgtgggtg

SEQ ID NO: 191508 - DNA, 317 bp, Zea Mays
tctgtctgttaaatatcatttgaatgatttatgagacaacaattaagtgtccaggcgtacacctggcgtggtggggtgatggaacattacaaggttctaggcacactatttccttggcattgacttgatggaacctgccatgaactttgatctggatggccctaagccaagcagcctgacatcaggcagccagagcacaaagacaggggtagaagggggctaagcctaatggattgcttatcttttttgctttcccctaatggttgccagctgctccttttataaagctaccatggccctaacagttcaaatataac

SEQ ID NO: 191509 - DNA, 492 bp, Zea Mays
cacgaaactacaatacatgagagcaacagaaaagtacaatagcaattcactggtccaacattctctatatacataaacacatttgcacaccatccatatcttttagaacaaatccagactgggactatgcagtaggaataaataaaccacaggcacaagaaaaatagactgatcaatatgtggccaagaaggaagctttcaggtttcacagtttattattggcacgatggctgcataactgatctttctaatcggttagattggatcgaatagcactgaagaaataagaggaagcaaacagcaccagtcactaatccttgatatcgtaacgataggaaactgacactctagagctcaaaatccccagtggacgacagtaccttttcaaccttcaaaacaggtttctttgggtgcctggcaagttgttcctccacatctgtttttactatgaaatcatcggaacccttaatctggacttccttgagttcagat

SEQ ID NO: 191510 - DNA, 274 bp, Zea Mays
ataggttaataacaataaatcaagcactacatgtgatgacaatgataaagttgttcagcctcctgctgcaagggccatgagaatagaacatggtgtgcccatggatgacagtaatcaaatttcttctctttcaaaagtggatgatacctctaaaatgcagagcaacagttcattcacagatcatatacaaaaaccaaatgctgattcatcatatttgagtgcaaagtttacagagaaaactggcggctcaacttatgaaagcaaaaggaactca

SEQ ID NO: 191511 - DNA, 339 bp, Zea Mays
gcagctgtgtaaagatgactgagggcaataaagtgggcatatttagagaaccgatcaaccactgttaatatgacagacttaccatggaccttcagtaaaccctcaatgaaatccattgagatgtctgtccatatttgtattgggacttccagcggttggaggagccctgcgggatgcagcgactctgttttgttcctctgacaggttgcacatgatttgacccaatcctgtaccagtgtcctatccttgttaatgaagaaatcagctcttaatcgatgcaacgtcttttgtactccaccatgtcctgctgagtgtgcggcctccagtattgagggaatg

SEQ ID NO: 191512 - DNA, 374 bp, Zea Mays
acgatgggcaccaaacgatgaatccacctcgtcgacaggtttgttttccactaataataagtgttttattgctaacaatgatgatggagacaaaagccagaatgaggaggaaaatgaggatgatagcgaggatgaatcctcatcaccacaaggtacattttcctatattgcttccactgacgttaatgacagggaaaatgagaccgatgatgtggaagaagaggagattcgccatttctacacccatctcaacaaagaagacaaagcgctcttgattaagctgttgagaaggaacaaggaacaaagcgagatgcttctcaggctagaggagactctcatcaaaacaaacaacagcctggagaagatgaccaaag

SEQ ID NO: 191513 - DNA, 612 bp, Zea Mays
ggcctttgttataaatgcggcttgcaatatgccaagggacatcgttgtgctgatacagtccagttacatgtggtggatgaactatggaagttactggatctgtctgaccaacaggaagatgatatatctgaagcatccgcagaacttcagttgtgtctgtctcaagctgctgtgactgatatttcagcacctaaaacagtaaagtttgtgggtggtattcaaggaattgatctgctggtattattggattcgggtagttctcattcatttcttagttcccgggtggcccagcaccttacaggattaacccctatgaccaaggaattgtctgttcaggtggccaatgggtgtcaaatgcagtgtactcaacagttggtaggggctgtttggtcgttggggcagtgcgagttccagtccactttacgtgtgttaccactcgtgacttatgatcttattgttggtatggattggctggagcagtttagtcctatggaggtgcattggactgagaagtgggtggtcatcccttacaggggtactcaagttaaattgtttgggttgcaatcttctaaaggacattgttctctgattgaggtgtgccatttgactgag

SEQ ID NO: 191514 - DNA, 346 bp, Zea Mays
gatgaactggagatacgaatgcagtttccatcggcaccgcttggggacaagccaattataaaggaggaggagatgtcagcaacctggcgggagcagacaaagcacataaggaggatgtccggtctggcgccatagcggaaaggcggcccagacgcagcaaacgtctcccaaagcccaacgctaaatactacggcccacaatgggataattgaacccatttgtaatagattcatatataaacccttgtccgattcggtgaacagtaggctgtacgaatacagcgaactggcggcgaccgcgatccctgatcatcggtctgagatagcgagcgaattgcctcgtcatg

SEQ ID NO: 191515 - DNA, 401 bp, Zea Mays
attcaactcgaaaactgacctgatccagaaatcaacataagatatgaaatcagacacatgaaatgaaataactcagtggacattgctgatttcattacatggcaagattatagggaagatgttatgaaatccttagtcctcaaatacttaccagagacaatgaaagacactcggtagagaatggcctcttcacgctcagcccctagccctagaccatcatctcccaaccccagccccgtcacttccctccttggcgtcaacgtccaccacctcaacccctcgccggacctcactccaaacccggcgaacacctccacgaacccccctcttcctgcatcagggcccacagcaaacatcgttttggcttcctagtcttggcgggctaagttccagagatggag

SEQ ID NO: 191516 - DNA, 501 bp, Zea Mays
gtgttgtcctaactgcagatgctatctttagatgctaaaggtgctgtcttaactgcagatgctatccttagatgctaaaggtgttgtccttagatgctaagggtgctgtcctaactgcagatgctgttcttaaatgctaaaggtgcagtcaaactgtttttatatgctaaaggtacagtcaaaaccgtagatgctgtccttgtgcaatcaaaactgcagcaaggttgctgtccttggctgccaaaggactgttgtcatccacaaagatgctcaaagacttattccatcattctcctcctaagtcttgtgcgttgtcttgtgagaaagttgggtcatcccggacctggagcaaaactctaggaacttgatccttctagggggcgtgataagcaggtccgcaagctggttcttggtgctgatgtagcgcgccttgatgccctcttttgccaaacagtctcggattaagtgctatctcacccgaatgtgcttgctccgtttgca

SEQ ID NO: 191517 - DNA, 1088 bp, Zea Mays
cagaaaatcaaaatttctattgctcgtgctgtgctttcgaatccatccattcttttgcttgatgaggtcaccggaggacttgattttgaagctgagaaggctgtacaagaagcattagatgttctgatgttgggaaggtcaaccattataattgctagacgtctttgcctcattaaaaatgctgattatatagctgtaatggaggagggccatcttgttgaaatggggacacatgatgaacttctaaacttggatggcctttatgctgaacttttaaggtgtgaggaagcaacaaaacttcccaaaaggtaaagccttctttccataagcattacccgacatgtggctaagcatatttagcagtacttgttgaaactaacaaatttttagatcctagagcattgatagctatagtatcattcgaaatactttatgaatatttgtttgttcttgggtttttatttgaatgtttgttccgtcatgtctgctgaaaaagtgtatgctttgatttggactaccttactaatcctatctttattcatgacaggatgcctaccaagaacagcagggaacataagtcgctccaatctgaggatgcattggtgagccaatactttcaagaatcctcctctcctaagatggcaaaatcaccatcactacaaaggacacatggtatgcttcaattttggcgatcagatgccaacagaaactctcatgattcaccaaaggatctaagtccaccttctgaacaaactatggacaatggaatacctatggttgcaattgaaactgaaaggacaccgtccattaagagacagaatagttttgaaatgaaattacctgatcttcctaaagttgatgtacatcctatacagcggcagtcatctaagaattcagaacctgactcacccatatctcctcttttgacttctgatcctaagaacgagcggtcacattcacaaacttttagcagaccgcagagtgaacaagatgatacgagttctgaacgtagtgaactggatgaggttcagcaccagaaacctccatctttttggcgtcttgcaacacttagtatcgctgaatggcct

SEQ ID NO: 191518 - DNA, 318 bp, Zea Mays
aacttttgatccctgcatttttggtcttggactgctgcaacaaactaatagagctatagttggagaataatcttggttaaaagggatgggtgtgttgtcgaggggatttgggtgatagaggggcttaaacagggaggtatgcagagggagcaccaggactgatggagtaaattcagagttggatttagtaaactgaagaagctttattcctccttgttgtgcccatctgatgctatggatcgtgatatggatggatataaggatgtatggtctaactcaggttctagagttttttcccactgaaatatccacttttgg

SEQ ID NO: 191519 - DNA, 348 bp, Zea Mays
gcggaaatgcggattgagcagcaagaaaatctattcatttcacacgtctccatctcgttgagcatttaattatttttgggcaggaaagaacacataccagagatgaggttgttggtttaatttgattctaagtcctaatgaagaagattgtgagctccggcccggcggtgccgccctcggggttgtgcatgtagtacgtctcggagtccttggaaccgacgaggcggtcgaaatgcgcgcgcatgtaggtgagctcgccgtcggacgggtgggacatatcggacggcagcacgccggcgcccatggacgtggagtggagcatccgcatcacgcagtcgtcccgctctg

SEQ ID NO: 191520 - DNA, 292 bp, Zea Mays
catccgatcatcgccagtgagtccgccacgatattctccaggaatcaactgcaccagtaaccttcttcttctccggccaccgcacgtctcaatccaaattcaccggccaccgctcaagcctgctataaattgccgaccccacctgctccgctatgtaattgtgcaaccagtgaagcaaaccgtgcctcgaatcctccactagagctcactaatttctcatttcccccaaacctgctttccaccgccgtggtatagccctcaccgtggtcagcgaatcccaggtctgttcatg

SEQ ID NO: 191521 - DNA, 447 bp, Zea Mays
cgggaatgttgttgtaccatatgccgacataagaccttgaagagttcttcagggagaagaagccaagagcaaagacaccaccgcctgagatgagcacctcgttgggcaagagtggctttgcaggtgttagcctgtcatcggattggcataagacaaccatgaacaggaagacgaaaacggggaggtaagccatggccatgaagccttccttggcaagttggtgtatatatggttgtggagaagacaaacaaaggagatagcacaatggtagaaccgttagacagttcaaccccaaggataagtagtagaaaatggcgcagatgctgagatttttctatccctccaactcagatgctgctcttgtcagttgtcaaatttattagatgggaaaggaggaataatctggaccactgatgaagctgtcgtatgtagaaacataggctaata

SEQ ID NO: 191522 - DNA, 640 bp, Zea Mays
aggaaatacttcagaaggaaatgttgcctcatgttggtgttggggaattctgtgaaactaagaaggcatactattttgggtatgttctccttgtcaagccttgtggacttgtagctggcatctgcaaaaattaaagttctgttgaaagtagcaaggttgatctaccctttattttgcaggtatattattcaccgcctactgatgtgcgctcttagtcgaagagctgaggatgaccgagatcattatggaaacaaacgactagatcttgctggtccactgcttggagggctgtttagaatggtttgcctaaatatacaagaatattaaatgttgtcaaccctttttttactggattaattgcctgatttttcttcttctgcaactatagcttttcaggaagttaacaagggacgtgagatcttatgtgcaaaaggttttctgctgtctaaactgtgaaattttctattttccccacccattcgatccttgtggttattaactcttccttttccttgatcctagtgtgtagataatggaaaggaagttaatttgcaatttgctataaaagcaaaaactattaccagtggtttgaagtactcccttgctactggaaactggggacaggctaaccaagctggaa

SEQ ID NO: 191523 - DNA, 309 bp, Zea Mays
ggcccgtggttttcaacagactcaaggacttgattatgatgagacttttgcacctgttgcgcatatgactactgttcgaaccttgattgcagttgcagcctcatcttcttggaccatatcccagatggatgtcaagaatgcttttcttaatggcgatctacaagaagtttaatatgcatcctccctccaggggttgatactccctcagggcatgtttgtcgtcttcttcccgcattgtatgggctgaaacaagctcctcgtgcttggtttgagcgattcatctctgtcatcacagctgctggtttttct

SEQ ID NO: 191524 - DNA, 334 bp, Zea Mays
cttcccttgcctgtgttttggctccgcccctgaaaacaactatcatgtatgaaatattatgccatgaaagatgagtatacaatgcgttaacatgtacaaactggtctggttaggctggatcctgtgcaactggtccttatcgactgccatgtcatatcaatcatactaccaaccacgctatcaaccgtcatcagcttttatctaccacatccctcctatgcctagtctatatcatcaccctacagtcgccttagcaccatatccgcttttcttttatagacttttatttaaaataaaacataatgttttatattgaaataaaaattcatccgag

SEQ ID NO: 191525 - DNA, 343 bp, Zea Mays
ttttgtttttgttgtgaatttatgaatcctaacatagtttcatttctaaaatgcttcattttttccctgcatgattcaggattcatggaactgatttagcagaaatgccattcataggcacaagaggcatgtataggcaccaagggatgtgtcgtcgactactgaatggaattgaatcggtaatttacttgcccttcccagctgtgcatttgtgtgagtactagagcttgcagtcacttgctgtcaactgtagtttctccttgttcatacttcacatgtcttgcttactatgtctttaaagatatttctgccttgttctgtttgactttaccttcacataggc

SEQ ID NO: 191526 - DNA, 667 bp, Zea Mays
ggtctaaccgtcaagatgcacccacgcttgttaaacttgacagaatgttttgttctccagattgggagcaactttttcccaactgtcttcttcagagtgcgagcactgatggttctgatcactgccctttgctgttgggcctccatgacttgaaacctggtcgtcgccggttccactttgaaccccactggactaagcttcctggttttcttgaggcagtagagatcgcttggaactcggtttctccctcctttgacccttttgttaccctttctagaaggtttggagccactgtcagacaccttcagagatggtctcataaaagggaagggaatattatggctcagcttgggatggcgcgtgaaattatgcataaattccagattgcccaggatagtaggcctttatcggtggtcgaaaagtggttgctggaccagcttgatggtcacaccgtggccctttcctccttgcagcgctctatggctcggagccgctctaggatcacctggatggctgagggggatgctaatactgctttcttccacctgcacgctaagtatcgcaaaggcaagaattttattggtaatcttttatcctcggatggtcttattttgtccagacacgaggataaggaggagttgcttaatgatttctacttcaatctgct

SEQ ID NO: 191527 - DNA, 1112 bp, Zea Mays
aatattttaaatgcttgggatatcagcaaaagtagattgcacttcttgatatcaagcttctttcactgtaaacaggttttaacagaaagcagaggagagctgcgtcctgatccacggtttgatgccattaatgctgtgtctttggccatcgaagatgatgctgacaatactgttgatgttcatgtgtttatacgtggcaacaatgtcaaatcacataggaggtctgaagccatttggaatttggtctttttcattttggggtcatcagagtatcagactaaagtgcccttagattttagatggaaatccacagaggcttcaaagtttatctcagacagcagcttctttctatcttcaattttctttttaaaattaacatgtcagttgtcactgggataccaaaacccagtttccagactctggctagagtcaggagccaggagttggaggcttctaggcaggcagttaattgaagctaccagccaaccctgccaaacgattgattcccttagaatatggacaagtgagattgacaggagggcatattggctgactaggatggtgacaatggcaactgatgtatgttgccttgtatagccaagttactaaatgatctaatgtagaatttcttgattcatttagaaagtgtgcgcttgtgttggcttgtgatattttctcttcttagatgctcatagatattagatccaaatgtctcaatcttctttcttgtatatgcagaaatctggatggtattgctggctgtaatataaatgtcttccctgaagaaaaggacgttttgaacaatcttattagtgcaatatgttcaattgatcctgatatcctagtcggatgggagattcagttaggatctttaggatttcttgccgaaagagctgcttatctgggtataggcttactgaaaagaatttcaagaacaccacatgagttgaatcatccacctaagatcccagttgataactctagtcaggtgctttctgaaacatcttctgcggatgatattattgatgatgtcagtgagaatgattggagccatactcatgcgagcggtatacatgttggtggaagaattgtgcttaatttatggcgtctca

SEQ ID NO: 191528 - DNA, 566 bp, Zea Mays
agtgggataccttgagagaaacatggttcttaacaaacttgaaaagaaaatagaggtattgactgagacatctggaagaaacatgcttttgacatgtaacatggagttattttgtttgtatcttgtttttatgtttcgttcttcataaaatgtgttgggtgattaaaaatagttttcattaaccaaccatatttattatatttggtgaattttgttaatttttttgttggataggtttttaacatggatgctagaaggtttgttagtgcaatatattcaagcaagcacgtgcaaccaatcacacgttattatatttggtgaattttgttaatttttttgttggataggtttttaacatggatgctagaaggtttgttagtgcaatatattcaagcaagcacgtgcaaccaatcacacaaatagtgatgaatttgcccaatgacgctgttgaatttttaggtgggttcccatttccttctttactggcaaaattccttcattgcaattggaatctatattgataccttttatgccattggagattacatgtacggcttgtagttgca

SEQ ID NO: 191529 - DNA, 705 bp, Zea Mays
cctacgagaccttgagaatgaccgtgcagatttccaatcgacaccacatgaccctcattctgtggctggagaagctaatttgctgcaacataatgtcccaagggacagtgatctgagtcctcttggcttactttggtctgagctggaaggacgtccaaaacaacctctctcatctaatgtacttagtgtaaatgaacgtagaaatcccaagcctacaacacccaaggacattccacctgtaaacatgagacaagggccacttagcagaatgaatgaagtttctagtgtgcgcgatgagtggcctgcaaactttggtcggctggacaacatgaatgatgcaaacatttctggcagaatccatcaggttgaagcggagcatcatttgaattttgatgggcacctgctgcttcaacagatccgacgggagcaacagcaacagcggcaggagcaattgatggcccataataatttagagttttctggtgcatttcccgggcaggtgtttgatcctttgaaccaacaccgacagcctatgaatcaacagattcctgatgtggagcatcttttgagaatccagtttgaacttgagcaacagcagcaacgccaactccaacaagagcagcaccaacggcagctacagcagcaacggcaagcccagcttttgcaacggcagcagcagcagcagcagcaacagcaacaacaaat

SEQ ID NO: 191530 - DNA, 273 bp, Zea Mays
ctgtgtttcatgagcgaagtaaacacattgatacaaggtaccattatatcagggagtgtgttgaggaaaacaggatgaggattgagccgattgacactaataatcaattggctgacatattgacgaaggcattggggcgcggtcggttcgtccatctgcgttccaggcttgggatcgtcgacacaaggctgttgtgcaagacttaagggggagaattgttatctgttgattaagtcttgcactttagtaggactgcatgtttacttttcagtt

SEQ ID NO: 191531 - DNA, 321 bp, Zea Mays
tggttctcaagggaaagccaggcgatgcgggcagtggtgccacgttgcatgaccatctcagcaagttccgggaagatggaaccggagatccacgacttgacaatgcaatccttgcgtgcctagtcggggaaggtaggcgagggagcatcgtcgaggatgtggctgtccagggagtacttgccgacgacgaggagaatctcattgcgccaatgagagtagttgttggaggcgaggtcgagggtgacgtggacgagactccggatgttctggacagcgacaacctgtgagtgaaggttgacgatggcagcagcctcgtggaga

SEQ ID NO: 191532 - DNA, 448 bp, Zea Mays
gtgactgcgcgtgtggcgctgcaggcgtagggaaggaagcggacaccgaacaaacctgatgagggcgtcgcgaccgatgcagaggtataaaggaccgacgtggagctgctgatggccagagtggagatgtagggacttcccatgactagggaacaccgtcgagtgggtcagcgtggttgctggtggacggagtgtgggcgcaaggtgggaggcagcgtggtgagcgaggagatggatgtgggcttgctgtcatgaagagacgacggagaagacgacagtggccgtcgagaccaggggtcctgactaagggaggtggaaagaaggctggaagacgaggtaggcacggagcggtgtgaagggtccaggagccgcacgcgggatcgacaccaagacgcagagatgaggcatgagttcgacgaggaaggggatgaggaggcgtgtccgagcc

SEQ ID NO: 191533 - DNA, 682 bp, Zea Mays
gctcaggagcagcttcagctggtgttagaagaacaaagcaggtatatgtgcttctgggtttgagtacttctatgatccatgaccttttgttaaggctggaagtatggagaataacatttgcatttcattctttatcataagtgtcagtgtgggttttgtcctccaatgcctgaatctttttttttttcatgtctaggttcctcatattatttttttcttgaaaggttcctcatattattcaagactatttttctcacatatgatgttttcgtgctaacgtttcctattgtatgattcaatccattgccattatgtgtttgttttggctctcacagtttgttcttttcctagatttggacttgatattgatctggatgcaccaaaagttaggattcctttgaatgctaatcaacctttgctgggcaatgagtactttgttcttgattttggccattttacattgcatacaagagtaagtttttggtcccaaaatatgtcataatgttgagctagctgttactaactgttctttcaactacaggatggtaagcatgatgaagaaagacagagtctgtattcaggcttttatattactgggagggatatggctgctttccttatttgtgatttagctcagaacatatactcaatacctgaaaatttagatcaagataccctccta

SEQ ID NO: 191534 - DNA, 326 bp, Zea Mays
taaaaatctgcatgtgctcaattaattgttagttcacccctttgactaaaaatgcttagttagcacttaacgaatatagaattgtaatggctaaacttaggttgacatgtgttccatgattaatgtgcttgcttgctatagttgagggtggataagagttccgtagttattaatgtctatgttgtattcaaacttacgttgtcttggttggacttgtgtggtcggtgatgcttttgtgtgataaatagaagaaataaggaaaagccatagcaagttaaataaatgcgtgtacttgtgattgtcgtagttgtgttgtgtaaatatac

SEQ ID NO: 191535 - DNA, 271 bp, Zea Mays
cgcctccagaatttatcacctatcacaacagtttcttaggtaattgtgttgaatttgtgatctattttatgtttcttgtgatttttattcccttgaatatgcgagacaccatttttattctcttgactattcgctggatgataggcgatgtgtgccgccttccgttccgcctgtccaccacgctgtggtcgcgtggtagtggacgtgccggttctattccgtcgtcgtcgtgctggttttcatgcgctgctacgagtagagtacaattcat

SEQ ID NO: 191536 - DNA, 354 bp, Zea Mays
ggcccatgcggccatgcctgctgctgaattggctcatgcgtcaagggacaaaagcttatgctagcgactgaatttggtggcggtccaggaatatgacttttatatattctagttgatgattctgagcttgccctggatcggtcttcttatccagacttatccccaactgagctgagtcctttactatggccttcgtaaaccagaactcacgtttggctcaatccatccattacggaggaggccggacaggaacatctgcctggatactattatgggcctgttctccatttttagtcttattcagttaggaataaaacagagattaaactgctttagggcatgtacaaccctgag

SEQ ID NO: 191537 - DNA, 1832 bp, Zea Mays
tagcccttctgctggagaaaaaattgcttgatctaccaaaattgttggacatatgtgctatatatgagcatgacaacggcaagttaacaagttcactggtgggtccctcaactagttttttttttcttgaacacaccctcaattagttttttatttgggttttaggtgtgtatatatatattggaatcagaatgtatttagttcattatttttagctaaaatttcttaattgtgaaatcttatgctgacaaagactctttgcccaggttacgaatgttattaatgtgcagccgagtgtactggatgacattaatattgtcattccccagttcctcaacattttccacacgatgcatgataggtgcatgacatctttacaggtgatctttgtctcttttttccccgatccttgtgcttactcttagtattgataaaaggtcctgtttatttctagcaatattcgatagcattttttaatagttactgtttgtatgcccagagaagccacatataggcatataggacctctcataattaattaacatcttgcactctccttttggatccatgattgtcagtttcattgatcatgctggaaattattatttactgcagattccttaatttctgagtttctacctattgccttgaagtgtgaagtgtctccattccatggtctctttgttgtgtgttttatacatgtgttcactgtggtcagccttggcataatgtatataatctcatactcttctacctcattattgtttactgtatatgtgcatctctactaatcttataaaaaaacttagttccttgttcctttcagcattactgatgctaatttggttaagggatcatacttggcagctgaaaatgataattagaattgaatgattttctttaaagtgtattacaacttcatatgctcaagtggttacttattgtgcttaatctttatgagccaataatagcaataatgaaatttccatgcattctcgactattggataatagttctttcctgataccctatatgtattggacccatcttaacaacaattgaattcaggtgctcacctcaaccggatcaattgataatggatatgttcagcttcagaaagatttcatggaggttacttctatccatgcagtacttgttctgatttgcctgctttatatttttcctctctccccgtaattgatgataatattgattgaccacaggtgttagattttataaatgatgcgattgttactctggattcttttgttggtgcttatcaacctgccgctttattgttctgtactaattttgaaatgaggtgagcaagcttcttgttcatccattgatgcttgatgacatcaagatttttccctgttttatcactctgtaatagcccttgtttccctgattgcagctatggagttgaggaattgctgaatgctcttgcaaggctgtatagttcattgctaccatcattgctccatgggtttaaagttatgcccaagtctcagagcaatgcagaggcatcacttgacagcacacttagtgacattcctcttgctataaggatgttgtcaaagagaacagcgagatttggttggagattgttgcactactgttatttgaatgatcaagttagggagcatgatgctcaaacttctactaagatgtttccagctaaagtcgaagatcctatgatcaggggagacatcttggttcaaacacttaaagatataaatagagaatccacttactcttctcaagtgaatcatggaaatacttttctccaagaacttgaaagtgaatttcaattaatgagccagattggt

SEQ ID NO: 191538 - DNA, 480 bp, Zea Mays
tgcatgcagtatgcccttaggctcctggctgatttggtgattcttcaaaatatactcaagaaattcctcacataaggatttcaccttctcctgcaaaatttgttatgctccatccatgaaagcaatcaacttcgattgaaaattgagtacatgaaataaagtaaagtttcagttttgttatttgacagaaaattttagggtaaaatgttctatgatctggatgcatccttgctacaaataccgcatgtcattttgtatgttattatgcaaggagactgcaactatctttaatagtaacttcagtttaaactcattttatttgtgctaatccaagttgcaaaccatctccacggtcactaattgctcgtcgggacgcgatgaacacgtacgtccccgacacaacgcgcccaaggacgaaatgaatatcaatctcaacatgcttcgtgtgtgggtgctggacagcgttgacggagaggtaga

SEQ ID NO: 191539 - DNA, 626 bp, Zea Mays
gtcatatcctcgacagccgccaagacacgttcaaggatctcgactcaggagactgactttgggggccaccatggagagaccaaggctcctagggcccgtggcctgaggacctaccttggtgatgattacggaggggccagactctgagtcgattcatacatggggatccctgagactaagtcatcaggacaacatcctgtgacatgcaaacattagcccctagggcactcacggtataagccctcgggtcccctcgcgccttagggcatctgatggtggtataagcccttcgggtccctcgcactttggggcacctaacggtataagcctttagcacccctcgcaccccgaggcacctaacattataagccctcggggcccctcgcgcttcaaggcatctgacagtataagcttatgaaagtagcctgaaatttctcaccaaaaacttgaattcaagtcaaataaacagttgcactggtgcaaaccggttcaacaggaaaaacccggttgacccaccttgaaccatctcaactgtgatttagactaacaaatcgagaacgacgccgagaataatgagagattcttttctaagacaaattcaagagtcgatctacgagaataagtgg

SEQ ID NO: 191540 - DNA, 605 bp, Zea Mays
atttctattattttgttttcattcagctctctaatgagacaaaaatagttcaggggcagatatgtcattttacatgccaagacagagaatccatttaaaaaatcaggattgccaaacattcagcttttctagacaacaaattctctggaaagcgtcttctcaggaaatcaggcttttcagataagcgtttctcagaaaagtggatccaaacagggcctaaattagtgtatctacatgcagctcaatcaaaaactggatcttggatttaaaatccattattcacttctcaaaattagcaaatttaactaagttttactatagatggttcagtgacagtaagctaattgatgcaaataagtgagtctagatgtatgtgcggacccatgttcaaaccgcgcacctgcaactaaacatcacattcccacaatgtgctgttgaatggaatcccagaagaagccacatttcataggtgtgacctttggcagggtgatcccttatcacctatgttatttattctgattatagacgctttggtttatttggttaaaaaggctgaagaggatgggctgcttcagcccctgtcttcaaaggttcttcaacaccag

SEQ ID NO: 191541 - DNA, 399 bp, Zea Mays
caaattaaacaagtttctgcaattaatttaatactaaaaatctatttctaatttaatttccctagttttcctgctctctggattgggcctcaaataccagaaagagcaggggccctggtgcaattaatcctaagacacagttgacccacaagctagactgcgggttatttcttctactttccaggggggtctttaggaagtgttatcggcgaagggggtatctagcatccagggttgttggatcaccaaccgaaggttaggattagatcttttactgtaatgaaacggtacgccataatggccgcaggatccggaacgcgcggcccagatcaacactcgatgtgaatcatccgatccccaatctaattccagatccgcgcacgcaccggtatgagctag

SEQ ID NO: 191542 - DNA, 639 bp, Zea Mays
tgacgggctacactgccgtgtgtggcatgaccgcgagaggcttgggtgaggggctacatcgccatgcacgagagaggtatgagagggctatgctgccatgaaggtagaggtgtggtctaggggatgcaccgccatgcgaggagaggtgctgccatgcaatgatttgagaagagataggagagaggaaatatttatgtgctgctcttgcttgcagcaataaagaaggtaatcgttttattgtattacgtatgaagtcgctgaaatccaacatagccataggaaggaagcaatagggaggaaggattagggtggggccacatgacaagggcacaatcatagtacatgaggtcaatgccgtcgagtcgagtgccatgaggtggaataggagacaggacatcacatgctactcattggcagtggtgcaagcttagaaagagtagggagagggacacaacagatgggcctgcgtgcaagcatgggtactcaggccagtgttgtgggatatggtgtctaaacagccatacaaaaccagggggggcatttgaacattattatatgctttgagggctacaatatcagttttcatagttatgggggttatgtagtcaacccttcacatgttaggggttatggagactt

SEQ ID NO: 191543 - DNA, 338 bp, Zea Mays
ctgaacttgaccgacaacatcgctgaggaagtgagcaagtcaatgacggcgcgcggtcctagtccggggtgcaatcacacgaccgcaatgagcaccgatgtacgcggtgaccaccggtgaagggatgaaccacgcacaggacaaccgttcccgcgcctaccctcacgctcaccgacgacagagacttacagtggcaatcacaggctgcaacacccgatcgaccgagtcgacgaccaatagggctgacgattttatagggcgagctaaggcggaggaatcacggttggcggttgcggcgtgcgtcccagacttggtattctatgcgcgcaatacggagt

SEQ ID NO: 191544 - DNA, 321 bp, Zea Mays
gtcaagcatgagccccatgctaccattgccgtgcaccagctaccgctgccacgcagtgcgcttcatcatgatcgtaagaccgaagtacaatctgccttgcagcagcaactcctcttcctctgaccgatgatgggagccatcggcgatgacggttgggggagtagtagttggcaaccacctccctcaccgttgggtgaggtgctgctgctccagtgctcgcctggacaacgtccaagagtttgccttgcttggccagcgacaggtcgcacatgatacatctacaatatcatggatccatcaaaatctcagtccaggattcaa

SEQ ID NO: 191545 - DNA, 494 bp, Zea Mays
aaaaattgcaacagcagttcgtgggaaaccataacgatctggaggttcaatagtaccacgatcacgaagacgatatccctgattaaaagcatcattagacttagagttgttagtacaagaatcaggtacatgatcagtaccaggaccagccgtagggatagagcgggaacgacgaatgtaggtttggatgataggtggtttggaagaggaagaggtggatgacgtggaggtggaaggtggtgttatgggaatgagaacatcagatgtggatgtagaaggtgatggttcagatgcaggaatggaaggaagacacatgaaagaagtagattctgtgggataataggtggagtgagtagactggttgtgaaagaaggggcgattttcattgaaactcacatctctagaaatccgaatatgacgagtagatggatcataacaacgatagcctttgtgttcaggactgtatccaaggaatacacactctacagattgag

SEQ ID NO: 191546 - DNA, 606 bp, Zea Mays
aacactacatattgcaatattatatacacacatacatgctcgtacgttgcaacgagatgtacaattgtgaactaaaggtacctgaatgactggtgactcagagatttattcgacgattatgacatgtgctccaattcttcaaagaatcagactctaatcatgcttagatgcacaatgctttaactcgtataagcacgggaggcatggagattatcgattgtatcatgcgcgctaattcgtcttgggatcaaactcaacaccatgtctacacacgctactcttactcgtagcaaccacaggggtggcacgccatgcaaatgtaacatcttccaatttgtctttagattaaactcttcactgtgtctatgacacgagggagtgaaggagcatggaaatgttctatactttgatattaggtatagacatgcacaagggatacaactccctcatcattctagaattgatcagcatgatgggaagaaacatattgcaacggccatgcataaggaaatttgagtggttcttggtgtctcaacaatttggaaccatcagaccaatgtcatcttcaagaatggctcctcccttacagaggatgtaagatgttca

SEQ ID NO: 191547 - DNA, 381 bp, Zea Mays
tgcctggcttgcggctgttttggagcctcgtggggtatgtgaaaattttatatcggtgacagagtggtggaatgaggttgtacactcaaaactcaaaagggtgtcctagaaaggcattttgttcgatcccaattctgtaacctgggaaatctcgaaggagcgaaatgcaagaatttcaatcggagacactctttggcaatctatcttgtgacaaagataaaggagcaggccacgacttggggcagtgcaggtgcaagacaccttaaggagatcctacagagcacttagctttttgctgtaaattcttgttagtctttccttcctctcgtatttatgcatgtttaacaatgtatacagttgttggcttaagcctcttcccct

SEQ ID NO: 191548 - DNA, 287 bp, Zea Mays
caatgaagagtgtctacggattggtccctcgtgttgagcactattgctctatggttgatatgtatggaagggcaggacttcttgatgatgcgatgcgatttatacatgattcgatacccggagagcctggacctgaagtttggacagctatgcttggtgcatgcaagatgcacaaggatttcaatcttggagtggaggttgctgagcgattgatcgccctcgagcctgagagtccatctcaccgtgtgctgctttctaatctatatgctttgtctggtaaaatgaac

SEQ ID NO: 191549 - DNA, 282 bp, Zea Mays
gctggcagattctgtcagaaaatgacagttttcttattgcgtcatctgatgggatctttgagaaaatgactatgcaagatgtttgtgacctaatgctgcatgcaaaaattcgtgttaaacatgattttggatcctctgccataacacaacgtaatttggcagattacgtagttcatgttgctttacagaaaggcacaacagacaatgtggctgctgtggttgttccattgggatcacctggtagcactggtactacattaaaagattcgtcccagttcgaag

SEQ ID NO: 191550 - DNA, 282 bp, Zea Mays
tatccatactcatagagctgttaacaatttccatcttatgctgccacattcaatttagaccttagcaatgagcattgcattgggggagaagctgttgcatgcagatgggaagtgttgcataccttaggctggggcataattccatcatctcactgactgagcatgttacctgttaactgatacttacatgaaagatgtgtttatgtcaaatttactgcaagcttaagtcctacttaattatctggtagtagtatagattgagtcctatttctttagtgcctt

SEQ ID NO: 191551 - DNA, 498 bp, Zea Mays
gatattattctacacattgactgttcaaggtggaaaagccggagagcactgcagaggacaattgcacagaaactagggcttcctcaacatgtcatggctgtttttgatagacaagacgaagaggacgatctagttggagtacatgaaggctcaagaactgagataagagacatcgggagagagatatatcgagtcctacaaagacagagcttcttagtggtcttccataacgggagtgataccatggttgacttcaatgactttggcatccctcgagctgctgcagatccttggtcaaacattatccggaaggtattgtggaccttccgtggaaggcttcatgccatcaaagaaacggaggaagtttcaggtcatctcaaacctgataaacgacaaccaaagggaactgagaccgtggacacttcatatctttgctttcgttcgttattttctggaggcccatcagatgtatcttcgtacaggcttcaaatactgtgt

SEQ ID NO: 191552 - DNA, 2098 bp, Zea Mays
ttcgacgactccgctcactgatggagggtggtagaagggcgagcgagtccctctcggtactttcccattcctccttatatttttcttcttcacgcgacgtgcctcgtttttgtgccgcagggtacgaggcaagtagtggctcgcccgggtcgcgcgcgcagcttggtgggttagggtttgggatgggtggcacttgatattgttttcgggtagttttgaaggcgtagttacgaattcctgcttgactctgggaattgggatttggagccttttgttttcagtagcctcatgtgttttttttgcggtcagactggtttggggcttggttcaagttcaatccgaccgctgtaaattacagctttacttgcttagagtaatgttttgctgggagtttagtgctagcgagctcatggtcctgaggtcaaagtgcaccacacgtgttctattcatgggacaggagggagtacggtcttagttgactgagaatgttctgctagcaaatgtagaatttgtacttcccttttggctattttaaaacagccacaccagtctttatggttcagtcagtactgcaattttggtgcgggttatttgttatacaacaagcatcattactttgtactaggtggcagtcttgtagagtcgtctgagatgctgcctactgccttaaatttctcacgtacactgatacacactcacacatgatgttgtttgttgcaatgatgttcacacatccgtggccgtctgagtacttttgctcccatatatgaattatgttatatataaatatgatgctccaatatatttagcttgcttgctgcaaagttgctgatttatgtttgacttgttggaactttgactttatatgttttgaactctctattttgcaggcatacacccatggaccatgacgatactgattttcagagccaaaattttcaactagctggtgtaggaagtagcaaattcccatcaggtttgcgaccatttgcactgccaaaacttgatatcgaggaccaactacaaggccatcttcgatttgataatttgatagattcagaagcatttttcagcgtacaagggcacgagaatagctggattgaggttctgtccactggaagcagtgttgttgattttagctctagcgcagctgaatcttgctcgatatctaaaactaataatgtctggtcagaggcaacgtccacagaatctgtcgaaatgctattgaaatcagtgggaggaaatgagacaactggtaacatggacagtaatgctcaccttcagttaattggtatggacagtcaaactgatcaatcgagtgttcatcctaaatctagtacctccccgacagatagtactgtagtgccaactgagaaagatcagtcttggagcactcattctagaatgactgctgacctttcaaacactgagtctcagcttgaacattttgtgcctttcttactggacaagaaagctgcgcaggcagcagattctgttgctgagaagtgccttacaggtgagaagttgtcctcttcaaacaacacaccaggaagctgcccaactgttggcaactattttggggcaggccatgatgataattctttggacaaatttaatgtaccctcagctgaagtagattcaaagaaattgaataatgaatctttcccagagttggctcccctgcagaacatatatactgattcatatcacttcaagaaagatattaaagaatctgaggctgttgttactcctcaagattcgaagttttgccatatcaatgaaaataaagttgaaggtggactacaagaactgcaaaatttgtcatgtgctggtcagtccttgggcgctgtaaacttgtccagtccaccaagcaatgaaactctattgtcaaaaagttctgatggattactagaagccatcacaaatccagttaagatgctgcacaggagcgatgatacttgccataaagtgaacatcactcttcaaccatcttttttagcagtgcaacatggaactgaaggcctgaaaagttcagttcacaggagcaatgagcttgttgttaaggagtttagtattggttcaaattctcttatctctc

SEQ ID NO: 191553 - DNA, 376 bp, Zea Mays
ggcatatctggataactggataaacttgtcgcggtactcgctgactgtcatgcttccttgcttcagcgatagaaattccttcttcttaatcttcatcaatccagctggtatatgataattcctgaactgtgtactgaactctgcccaagtgatagtatcagcagcatcgtgggcggcagtatatgaatcccaccagtcagcagcaggacctgtcagacgtccagaagcatataaaaccttctcccggtcagtacattgtgcaatattcagcatcttctcaacggacttcagccaatcatccgcgtccagtggatcaggtgagctagcgaatgtaggtggcttatgactcatgagctccctatgcttatcacggggt

SEQ ID NO: 191554 - DNA, 389 bp, Zea Mays
cggcgagatgtccagtgagcgcgaacagagggaactagaggggatgggggaaaccaaagggtgtcttgagttgctggtaaggaggcggagctcatcggggcaacggacgcaacaggagctcgacggcggccgtggaacggacctgaggtcaaggcggacggcgacagtgctccatgggctcgtgcgcagtgcgagagaggggtacgagggggtctgcataggagagctactgagcgaggggagtgagtgagtgggcgcgggctcaaaaggaggtcgagcgcgtggcgggagtggccgggaaatgcgcgatgtgggcgcgtccacggcggggtgtgcgtgcaggaggtcagggtaggggaggtggttgacaggtggggtccgtgggccag

SEQ ID NO: 191555 - DNA, 594 bp, Zea Mays
gtcgggggttcacgccccggccatcgatctcctactcctatacatacaacttacgagtcatagtaggatttcaaattctatcaatctggtatcagagatgtcgggtgacgatgacttcgagaagcagctgccaattccaccaccaccggccattgatgctaccacgaatgccttggcagacatagcgttgttagtggccaatctccccatccgcatattgtcactagatcaccaacatgtttcctccactgtaggagccttgtctcaagattttccttacgatatgttggggtacggggcaacaatgttcccttccttctccaccataaccactatgctgccctccacaccctgctcgtcgtgctgcttgccacccttttgcacatcgcaatagccacccctaccctgtccgtaccccttcccatccgctagaacccgcaccaatgtttctgcagtggctgcttttctcatctgtgtgggcaccctcaactatagacgttgcccgagcatctgctggtttgggcgttctctatttcagcaagcttgatttctatggctcaaccattatgagtagttattctatgggcatcgtac

SEQ ID NO: 191556 - DNA, 882 bp, Zea Mays
gggagggtgtctgggtccgtcttcgaagcatgaacacaaagaggggatgtcatgcccttactgtccttggagaaagcctgtcagtaacttcctcttatgcttctgtctttctgacacaattgtaagctcatcttggtattgaatcctggcaatgtacttatccagaggtttgacttgtgtttcagatatgcaatgggcggatacaatggagacaagatggtttctagcgttgagatcttcgaccctcggctcaacgcctggaggatgggagatcccatgagcgccccaagagggtacgccgctgcagttactctggatggaagcgcgtacttaatcggtggcctggagtccaatgtgcagatcctagctaccgtacgtaactgttggctcctgacaattctacatatatagatgtttgtgctctttcctgaagatgctcttctcttctgtcacaggttgaagtttacaacgcgagctccggctggtcagttctcggtttgagttcactcgggaagaggtcctttgcatctgccgtagtcatgtagttactgatcacgatgttaactactgtcgataacatcaggtttaacatagtcgctgcgttatgcaaggagtagttagggtaaggtgggtggggctagatcacccttccgatgtgtaatgtgttgagatcttcatcaggggaaattcgcatggtatgggagactacggcccgtatacctttgaaccctcgtaggaagtcttgagaacccttgcatgcattcgctgttgtatgcgtgccatgctgttgaatttagctgtactacaccagatagtgatacccgaactcacggagtttaatggaaccggatagaaagctgcccatgtagtttggtgtttgtt

SEQ ID NO: 191557 - DNA, 332 bp, Zea Mays
tgaaattggagctctgatccggttttctcatcagggaaaggtatgccttggcttaacaggtgttttttaattgttcaatatttttttctacttgttactaatgtgattaacatcctcttggtgaagttggtcaagcaatacgttggatacttcccgtatgtcaacctatctgcaaccgtgagcccaatcactaggacagttcttaaagtaagagtttgttccagttaagtattgtgtgccaattagaattttctatgatatgctcttatgcaaccacttattgtatttctgtaggtggacctgcatataactcctgaatttgtgtggaaaga

SEQ ID NO: 191558 - DNA, 544 bp, Zea Mays
ctctcctctcttacaggatacgcgacactcttctccgtcgtgcgagcgccttctcctacatcccgacaacgccctgcacctcccttgtcacgcagacgctcccctccactaccctacgcaacatcgccatcaccttcaacctggacattggtgccctaagtgcagcccctggccctccggcgggcacctccttccactatgactagcacgactctaacgagttctaggcctcggactccactgtgtcgtcttgtctgcaacctcgttcgccccgagcaccgtcggtaacttccacccctgcacgaccacgcgcacgcccactggcgtcttcggtgctcccatggttgcgcgcctgcttagcatgtcggcgagccttccctcatctgcaaccccagtagctcccgatttcccccgcccgcacgcggccctgactattcatggcattccttttgctgtcgggggccctgcctttgccatggccgctttccctagtagcacgaccctcaaggacgatgcgagccttcttgcacttgctccctcgatg

SEQ ID NO: 191559 - DNA, 587 bp, Zea Mays
ggggaagggtgctaggatttggggcgaagatggctctagtggaggtgcggtgttgatgggaggcgcgacagctgcgttgatggctcgggcgctgttggaggtggccgcgctgatggctcgggcgcagttggaggcgtcgcacaatggtggtggacaagcggggttttcaggttccactcgctcgctacaagagcaataacccactcgctatcaaggacctcctccagttacccattgatccactcgctcgctacaagagcaataacccaggtcgtctgattgtcatcgcgcccgggacacctgctcaagtttggcctcgctcgccgccatttcctctagttggttggggtcggcgtgaggtcgggagaggcgatgggggaagtgggacggaggatggtgggtgaggcgatgcggtggtcgccctcacttgtcgccatttcctctggccggttggggcagcgcgaggtcggtcaccagcgcctcctcctgcgtgcgcgctagatccgtgtggatcgactccatggtggcagcacgggcgtagacagctagggtttggtagaggaggctgcgatcgagattgtgttgca

SEQ ID NO: 191560 - DNA, 312 bp, Zea Mays
ggatcgaggaggctcagaaggatccattggttattctcaatcagcaggtcggaaacccgcccctcagaaaatcccttatcatgaagcatcacagcctccaaacagcaagatccaagccgcaaggtaaaccaaaatcaaagtgtacacgaaaacctacataacgcatcaaaccggagaacgaggagaatgagacagctgcacaggtgaaccaggccaaagagaggcggcggatggtagggagagaggcgagcctgccgaagagccagagtatatatagcgaggggcggtctcggctagggttattcggtgact

SEQ ID NO: 191561 - DNA, 495 bp, Zea Mays
gtttagttccagagactaatgtttagtacgtgtcacatagaatatttgaatctcattttactatgggttttgtatatcatagtgacatttgtcgttatgtattgatgttttatactcacgttgtttggttgctggactagcgttcggctgctgctcctgctacgtcacgttatataaaaagtaaatattgtagcatttgcagctgtcacaacttttataccatcaccgaataagtgtactaatttttaacttacgtagcgaagcacgggcacatacctagtatatatataatcgtgtttcaataaatgtcttatttaaacaaggtctacatatatgatatacagaaaccttagcaatgtacgtgaaactaactatccattgttaatatagaaaaactaattatgaataatacgcgtcactattcacacaatgtattcataagtatattgattagaaatgatcatgtcttatttccgcgtcaaacatagttctaac

SEQ ID NO: 191562 - DNA, 626 bp, Zea Mays
cagtgtaagggacttacacacctggctccttttgatcaagaaggcgctcggcacgcagtgggccacgcagctgactatcgcgttggaaaacgccgtggctagcaatgaagctaaagggccggcggtgaccttcgagtttgacggggagagctccggcttgctcgccccgggggacaaccggtggccattctcgaatggtcttgggtttgccacatggatatacgtagagtccttctcaggctcacttaacacagctacggccactgcagccgttgcagccgctgcagcatctgcatctgggaagtcatcaccttcagcagcagcggctgctgcctgcacgcttgcgggagaagggacaaagcacatgcccaggattttcagtttccttacttcggaaaaccatggtattgaggcctatttcaatgaccagtttctagttgtggagagtgcggctgggaaggggaagaaggcttctctccatttcacttatgaattcaaaccccggtgctggtactttgttggtctggagcactctagcaaacaagctttgcttggtaagtctgagagtgaattgcggttgtatgtggatggggaccttcatgagagctgtccatttgagcccccac

SEQ ID NO: 191563 - DNA, 457 bp, Zea Mays
gtccagttctatgaagattttctatacatctcttcttatgctggaagattgcagagtcagatttgataggtgtgtgtgatttctacagatgtctgagaacaggcgcagaggtgcgaggcgtgctcagcctgaacagcaggcaccccaagaggaagcagccccgcagcagtatttgccactgccaccaccaatgaccattgaacagatgttcttgatgcagacccaagcaatccaggcaattggtcagaccttagcagctatgcagcaggtgcagcagcagccaccatggccttagcctccagtgcaagtccatatgccacaagtgcccagagacaaccaggtagagttcatgaggggccatcgcccagtcttttcccagtctgctgatcccatggacgcggaagattggttgcgtaccatggagcgtgagttgcacactgccgagtgcaacgatcga

SEQ ID NO: 191564 - DNA, 501 bp, Zea Mays
gccttgctgctcgactccattttctagaggataggcaccacaatgtaaattttcttactttcttcattttggtcgctggtgccaaccttccgaatctgaaagtgttggtgacttggtgtattctattgcaagggagatgcaaccactctcagaatggttattggattaatgtacacaattgtgatgtttgtcggcatcaacaattgttcaaatgcgcagccaattgtttcaattgagaggatggtcttctacagagagagggctgctgctgggatgtactctgcaatgccatatgtcgttgctcaggtaaagaaatatcatagaagtatagagaacacaacggtaactaaggtgatatcttctctctacagacgttctataagcatatgttctcacttatttatgtttcctcaaacctgattgttagatactgtcaatgctctttgttacagacgacaatgtccatactaaataatatcaatgctctttgttgcaaacgac

SEQ ID NO: 191565 - DNA, 1163 bp, Zea Mays
gcaaaggttattgagtgtgacagttctcatctgatgtgaacccttcttcgtgatcactacaaacgtactagtcactcatcttgttgtcattcgttagaagcactccttacgacgaggtgattctacagttgatgagttctacagtcatatgtttgccatctggtgttaagcttgatactcttagtccacaaatctctatcactactcctataaagcaccagtttcgatggtcgtcctgcatcacgcacgaagcgcataagtttgttcccctccacccgataagttgattcccctcccacgcttctcgcctaacaaaccagactagtgtaaccaaccatgcaaccaccacgagcgcttcctcctcatcgttcccgtccaccgcttctcgcctaagcctttatctattgcttgattgcatgtgtaaccaaccatgcaaccatcacgagcacttcctcctcgttgttgccatagtatattaacccccaactttacatctcttttcctgtctccgcctgcctcaccaagattctttcacaccgccatagaggacatcgagcaggatggacttgctacttgccgccgccacgccccactcgtggcgccgcctttaccttccccatcgacaagcgtatcaaaccattgacgtgactcttcgtcgccatgcgcttctagaggcaacagggtaggaacaaccaagggagaggacggcaaagcgtcatcgccgccgatgcgtgactgaacaaccgagggagaggaggcgctctagatctcgagttgagtggtgttttgtattggttgtttgcaaagaatttgagatatttatgttgaggaggcagcgctctggattccgaattgagttcagttttgtattggttgtttgcaaagaatttgagatacggcaacgcacaggcattgtactagtgtctcctagcacatgtgagttttgtctccgtcagaagagtgaccatgagtttcttcgcacaaatgacttcttgacctgtttgtgtgatgagtttgagcctcttcatgcccagttacttgctcgtcgcccttttgtatctctggtggatgcccttgtcgatgttcgcaacgagactcatcttcgtacaggtggtttattgtcttcttcggtttcgttttggctacttggtctctgtcttcac

SEQ ID NO: 191566 - DNA, 380 bp, Zea Mays
ccacaatccatggatctaaccaaacctgcgatccgtaacttctggcaataacctctgaagttataccacagtgaacttgttttccagcaagcattatttgtcactgtcaactattataaaaataggaatgacgcttaaaaaagaactgcacttatttccttatcatctcgccgagctcattggacaataaccgctggcattaacttcagtatcgcccatacggccataccaatattgacattaaagcacaggaacctgatgacgaaccttgaaccccaaaatggcagcatgaggacgcggaatgggattggggaaccaaaaaaacagagatcgcagcccgtgcggggacagtggaagaactcaaagcagagattctagct

SEQ ID NO: 191567 - DNA, 372 bp, Zea Mays
caggaacacctatatgcgatcctcatggtgatccaccactggtgggagactgctggtacaattgcacccttgaggacatagctgggaaagacaagaggcaacgtctccgtaaggtgcagttctcatgcttttgttgtctctctgaaggttcagttcaaatgcataccgaacactctggactggtatagaagctgtatcatccatatccccatttccatatttttctgacttctgttttgttgttgagaatcatttaacaggcactggggcaaacagtagagtggtttagaaaagctctagctgttgaacctgtcaaggggaacctacggctcagtgggtactcagcttgtggtcaggatggaggtgtacaac

SEQ ID NO: 191568 - DNA, 617 bp, Zea Mays
aaaaactgaagggcaatcttgatggaggacgaggcaatgctgctgaatctagcgacactcaaattaaaaatcaatctggtaaaatcaaacaccatagaaggtggaaaataactagggtatgtctgcttttttctatttgagagtttgtgcgaccttgtgttgactctatgggctagtcacaaatttgactattttttccttgttgacagataaaagcagttcattggacacggtacctactacaatatactgccacagagatattctttgatgatgcaaacgcaccagtatttcttaacttttcatcccaaaatgatgctaaaagtgttgggtctcttttagtttccctgaggaatgatgctttgttccccaaaggaacaaccagagacaagaatagtttaatttcctttgttgacagaaaggttgcccttgaaatgtctgagagtgctagggaaagttggagaagaagagaaataagcaactttgagtaccttatgattctcaacactcttgctggacgatcttacaacgatttaactcaatatcctatatttccttggatattggctgactactcttcagaaaagcttgattttaacaaatcatctacattcagg

SEQ ID NO: 191569 - DNA, 509 bp, Zea Mays
agcgttatgtgcttgatttcagaggggctcttgtggaaagaagggcaattgtctcgagagagagattaagtttgagccactgccttgccctttctgcacttattaaactaacgagtaagttaaaccttgtgttaaattgcctctatcaaattggcctttttttcctagcgcttgccaggtaatgttaattgttcagtggcatgagccttcatactgtgcttgtttaaccttttggacattccaatttatgggaagcaagcactaatgctttattcaatttcatttaggccccaaagaggttaaggatgtattttcaatattgaaagactgtgcagctgaagcaaatcaaaatagcagtgtggagctccaggtttgaagtttgaacaaattactctggaatgacatgatggttgttgacatgttgtttgtgtgcatctgtataatctgattttgatacacaaagttactaactttatcattgcagatcacctatggacttctgttctttc

SEQ ID NO: 191570 - DNA, 811 bp, Zea Mays
acatacatgaagtggtggatggcctcttgcttcttgttccaactgaaattaaaattttggatcaaatcagtgagctaatgtaacaattcaaattaatcaaatattaaaatggtgaactgtgtccgtgaacctatttatcatgaacaaatttgttactaatttctatcttgcacatagagtttgcatgtacatgcagtcttagatccgttcacagaatatcctttagaggtgaaggtggaagaacatgcggctacaactaacccccgtgtaatttttaaagttgtaattagcgaagaacaaagaagaacaaagaacagtggtgagagctgtctccctgagtcaccaggtcgtggagcagcctctttgcatttgcggagggagggtgtggcttgcctcggttaatcctttccctagatgggagcttccgccattgggtctgcccttttcttttttcttttttaaattagcgaagaacaaaaaggtttgaccatgcataatcatgtctaactgcactagttgtttataaaatctgtttttttgctctttttatgatatataagcaattgcgtctggtagttaggagccaactatttgcttcttacgtgaatgagataactttgttacgtttaattttttgaaggcatcgaaggacagttttcttcacttattgaatctacagttgctaaactcagagatcctcatgtatattatttagttgaggggccaattacatctagtcaatcacatcgttctattatcttgcgtggcgatgatttaagctttgattcacatacacatggaaactcaagaa

SEQ ID NO: 191571 - DNA, 287 bp, Zea Mays
ttgccccctttcatcctctttaaagcttctttgacctctgattcttggatcctgcgtacaaagcatctatttaaatcatcaaaggagtcatctaattgggtgccatagtctcattctcaccattgaaaagattgtcaaaatacctctgccacctctgtttgatgtcttgtccttttaccaagagttgatccatctcatccttaatgcatttaacttggttgaggtccctcgtcttcctttcctgaatcctagccatcttatagacatccttctccccttcctttgta

SEQ ID NO: 191572 - DNA, 560 bp, Zea Mays
atcagttgatgccctggctctcccggaagtttcggttgcagagctggaggcgcctggtcaccctccagtgttagcgttggatctggcagaggatttggagttcagttgtcaggagggctggtcttcgcatgttgttatctcgccggctaggccttgcttggacaatcctttggtgggggaccttatgaccggactggcggaggttgtcactgctgggcagcatggttccgggttctcctatttgctgaccgatggtgtttctgctaatgtggaggaggcagtcactgctgggcagcacggttccggggtctcccaattggtggctgttggttctcctgctgttgtctctgccagggtgcggaggtttgagtcttgtcagtcttcccgggctgatagatggagatcaaagccacccgtgttcaaagtttattccagaagaagattatctcaggctcaggtggtccaggacgaccttttactgcaatctgtggtggaactggttccacctttggaggagttcaagtctgcggttactaagccttctgatggcttgttaccac

SEQ ID NO: 191573 - DNA, 286 bp, Zea Mays
cacaacattcattgccattacacagttgtgctgctgaaaaatttaaccatagccgaagctttcccatcgcattctcaagcaaagcaacgttttgaactagcttcatcataagagagagcttcgtcacaaccataaaaatcatcaacattcgtaagaagtgcaagaaattcaacacctgatggctagagtacgctcaaccgctagggtgacccacgacggagaagaggccgaaactacagagactgctccgatctctgaagtgatgaaacaatcgggaatggttgtg

SEQ ID NO: 191574 - DNA, 487 bp, Zea Mays
ctccacctcaccatgacagcttttcaatcggtcatctgtttgcttcgtgaaaccagcatcttcatcagtttctgcaatgctttccagaagagttccagatttactgcgtactggaggactgctctgttcaacccactcttcagtatatttctcgcagaggggagtccacttgttgagcaaagacttgtcttcctgctccctagcccagactgttataagcaccagaccacctcttcgaacaacacggattagctcttctatggccctcctccgcctatcatcagtactcaaatgatgcaacacagcaattgaaattgctgcatcgccaaaatcattcctgtatgggaggttgacagcatcagcaaccaacacctcatgccctctcccagcacatatctcaataagcggtgggcttatatcacatcctatgaataaacaatcagggttgaaacccaaatacttgccattaccacagccagcatccagt

SEQ ID NO: 191575 - DNA, 292 bp, Zea Mays
ggtggttggtaacccggcgcggtggctttcctaggaggagcaagacaaacgacgtcgcctgggcctctgctacaactgcaacgagaagtattctcgtgggcacaaccgagtctgccgccgcctattctacatcgatggcgtcgagctcgcggaagctgacgcggctgctgacggtttggcggacgaggctcctgttttttccttgcgggcagtagcgggcttgcatctgcaacactatgcaggtcgccgtctcacttggcgctgccacgccggtggcgctactcgacaccgg

SEQ ID NO: 191576 - DNA, 453 bp, Zea Mays
ataatttttcaaaagcagtaatatagtatttcgtggtacctgttagaaagaactgagaagagccgtgaattacggttgtagtagggacagatcatataagccattagaactctactccctcctcttgaaacagtatcaaaatgaaagccactctggtggcgtacacaggtaggagttctaggatacatcttagctgtttccacaaggacaggaaagccagaagattgtgcccataggaggctcagaaagttgtggtcatgcatagatatgttgtgtcaggatatgtcgaatccagttatcttgtgcttggtttttttgatttgcgataagttctcttattcaaactcatctcagcttctaagcctttagaaatccgatttgaggtctaaattggtgatgcagggtttatgtttgcctgaaagagtcaggagttcaggtccatgttgaggaact

SEQ ID NO: 191577 - DNA, 479 bp, Zea Mays
gaaacaaaatggcctggattttctgatgaagtgtcagatgtaaatcaagccagtaagagtacactattcattgagcaggccctacaaaaccttgggattgaacaaagttatatggataaggaggaagaaatagcaatcacatgtttacagaatgaacaatcatcatctatgttctgttccacaattacaaccgatcattttagtattgacagatacccttttaagaatttgcgtgaggcagttgatgtactctttctacacggagcatcagacatggtgattgcaaaacaagctattgtatccttcaatatttttatctcgtactacctttggtttctttcacttgccgcttgggatatcatatttacattgtttctcacaggcatgctacttcattaaattttcttgacgcttctcagttattgtattatctatttgatcgacattggagtaggccagattcagaatggaggtatctg

SEQ ID NO: 191578 - DNA, 330 bp, Zea Mays
gtttgctgaggggtttgatggactcgcgcgttcgggcttttgctgccgcggtcaccgccgctgctgttgtttagtgtgggactgtggcctgtgggtatggcttagcttattgcttttacaataagattttgggggttttgctctgtaaagctacaaccagtgacagcctgtgccaggtcatcttgccgaagggtgccgcttctactggttttgatcgcctgcttgcttgaattgcgaccggtacggtgttctacgggctgtaccgatctagttgcagataggagtatgtgataccaattggttgctagattccaaattaggtgacagggg

SEQ ID NO: 191579 - DNA, 514 bp, Zea Mays
atcttcaagaaccccctaagccataccaaagcaacaacatggatacaaaagtgggtggccatgctatttatccagaagagttgacattatattatctggatccccaaggaggtgtgcagggtccatttctgggtgctgacataatctcttggtatgaagatggatacttcggtttggagttacctgtacgtctgtctcagttttcagatgatgttccttttcgcccacttgttgaagtcatgccccaccttgtgcaaaagccgcaatcgcgtatacctgtaccttgtgatggaaattctgaatctcttgaatcatctcaaagtaaatttgaatccagtgtccgttctgcttcctctgtgaggggtgaccaattgtctaactgggatactgaaagcaatgctgttgatcctaaaagaggtgatcatgaagaatcaataccttctcgtagtggttggctatcttcaccggaaacaggaaaggatatatcaaatactagtaatcgccagcagcacat

SEQ ID NO: 191580 - DNA, 985 bp, Zea Mays
gctgaaaggatcgcaggcagagcaaatgctgcgtcctcaatggcagccacaaacaatggaaaaggctcctgttactactaattcaacactcgaaaagcaaatacaagaagatttttgtcaaagagcaatgtcgcaagatggagcacagcaaccattttcatcagattggcgtctttctaattgcactgcagcttctattgatcctgcattgccgaagcctgcagctggagggtttgaacaggtcaatggaaatatacattacctccgtcagataaagtggttgctgctactgtttcatgcaaaaacatgcacataccctgttggaagttgtaagttccatggttgtgttcaggtgcaggagcttttgaagcattttcagaactgccaaagtaaagattgttcatacaggagctgcagtaagtcaaaaatgatgtctcaccattataaaacttgtgtcgatgaacaatgtcctgtgtgcagcgttgtaaggaagtttttgcgccaatcaactgaacaggcatctaagcaaaaagctctcgagtctagaaaacttgctcaacaaaatgtgcctcagagaatcatgaacgggatagaaggtgatagaatggatgttgacccaatgtcagttgaagcatttgatgatcaaccattcgttccaaaacgcttgaagacgcatcctccatcacccagtggcctagagaatgatatctctgtagtctccaattatcatgtaaactcaggctttgcattgcaggaaacacagcctgagcagcttgaccacaataacaggacatcatatctgaaacgagaggtagatgcaaaggctgacatgcgagctcctcaaaagcccataaaaattagttatggtattgatggaaatgtgactgcatcaaggcataatgtgattcctggtgttcccagtgagattaattctcatatcaagcaagaaaacttgttggttgacaaagagacaagtgaaaccgcc

SEQ ID NO: 191581 - DNA, 1597 bp, Zea Mays
agctctccaacaactctgcatcataactcccaatgtctctgcacttgggaaaatagatcgatacatgcgtgaacagcatagaaacagcacaaacgtagagaagcttttcacaaacatgaccaaaaaaagcacaaccaagctcatgacaataatttagcatgtctatcatttggattgatcaatccagattgatcaaagccatggcacaaaattaggaccactaacaccaatgccagttacccaaagggatttccaagctagtgcctcaggacacagaagtaaagacgcattagggaaccagttataagtattggtggaagaataaaagtagtaaataagagtgtggagaagaaataaaatcattctttagaacaaaatgagcaactcatccagttaagcttgggcatcccaaccaaaaacatgaagaatatatgcatcaaatctacccgagtcaagaatcttatatgacatcaaatcgaactcagatttgtcccatcggtatcatgatccaggtcccaagttgaaatcacagcaaaagaaggatacatgaaggaaatagaatcatagacaaaagtatatgacagaatagaaagagtaatgtcacattgaatggctcagatttgccccaacatcaacacaacactcgcagaagaaacatgaactcctccctccacacgctaaacgaacttttgagtaggattgttcacttggaaatataaacgacaccaccgccacagcaatggcaacaatcagttgcaaactggttgcttgtatatggtacaagccatccaagtttaacaatatattgagcaaaataccaaaccctaaatcctaaaccctaaacaattcaacacattcatcccattacttgaaatccatgtcccaagttgaaatcacaggaaaaagtaggatgaatgaaggaaatagaatcacaaacgaaagtatatgacagaatagaaagagaaatattatgttgaacggctcagatttgccccaatatcaacacgacacatcctactctaaatgaacttttgaataggattgttcatttggaaataaactggttgcttgtatatggtacaccaccgccacggcaatgaggcaatcagttgcaaactggttgcttgtatatggtacaagccatccaagtttaacagtgtattgagcacaatatcaaaccctaaatcctaaaccctaaacaattcaagacgctaaaaagtaatagctcaatggggatgggacatttgacatcacagccaccgaagagtagttccaaacaagaaaggaagatcaacagataagcgacaaataaatatctagaaaataaaggaatgcatagagcgtcatcacagccacagaagaagagttccaaacaagaaagcaagatcaacagataagcaacaaaaaaacgtcagaaaaaacaaagagatgtatagaaactaccaaaatgaatcaatgctgcaccctgcacagcttcttttggggtgtttgtatgggtgggtgggtaagggggggagggatcagtttcgcctttgctcattcatcttaatatttgacatcacagccgctgatgaatagttccaaacaagaaaggaag

SEQ ID NO: 191582 - DNA, 452 bp, Zea Mays
ccatacaaccctattgggcattgtagcaatagttgggctagacttttttcatgctgcccaagctacccaccgtagcatatatatagatatgaattgtagtattacctactaacatagggtgttagtcctatactcatatgcattgtttataatcagtctatgaggctcaatgcaatatagctacaatttcagtggcataccttctctaataatatccaccttatctacaatccatccatccaaacaagaaacccaatcatcctaatcttgcctatccctcataacaaacaaagaaccaagatcccaatgacgcaaccaaacaagcaaatgggaatatgggattatcccatgccccaaagtaggaatggctctaacatatcccaccttccctcaaaccaaaaacaccctatgcaaccctagtacaagggatatatcaaatacaatcaccaaat

SEQ ID NO: 191583 - DNA, 305 bp, Zea Mays
atgattcaagtaaaggatatgttgtgaatgataaatgtatcatagaagctgaggttgctgtgcgtaaaactcttgatttctggaactatgactccaaaaggatgactggttatgttggcctgaagaatcaaggggctacctgttacatgaactcccttcttcagactttataccacattccttactttcggaaggtggggcaacatttctattttttattactgttgtttcttaagtgtggtgctgatactgaaattaatattttaggctgtatatcatatgcctactacagagaatgatacgcc

SEQ ID NO: 191584 - DNA, 442 bp, Zea Mays
ctgggtcatcagagtggccccaacggcttggacttgatctgagattgggtggaggcgagagaaaaattaagcgattcaggtgagggagttagcacctaggggcagcgcgacagagcatccttgtgcgcacggaggggttcaagaggaggtagcagcgcttgcgccgcacatcgacagtgcaggccgcagagaaggaaacaacacggagcacaggggcaatacgtagctacatgtgtggtagtgtatgcctctgtattagtctatcttcctcgtgcatctattaaaagaatatttagataaagaacaaaatgtagacacacttatagaaaatggtacatctcactcacaatattcaacaattaaccctaaaccccttggtacataaatgatatgaaataaagtaaaatgatgacttaggtctgttgtgtgacgttaatgatcg

SEQ ID NO: 191585 - DNA, 1325 bp, Zea Mays
cagtaatcctcgtcgagccgccaagtgctcgcggaaacgctccgcacattcgatttgttttttttcttaatggaaatgtttgggggctactgctctttctaacgctgttgttgggttttgcttccttgctctcgcaggggcccgctgttgtggaggaggaggttgccggagtgccggcgaggaaggggtgtctgaagcaaacgggcggaggtgccaccgaggccaagaaggttacttttggggcggaggtagggaaggccaggagactgaggtctcgggtcatatggtcgccggtcgttgccaagacaagggggaagtctgctcgagccggtactgattctgctgctgaagacggtatttctgcagatgtgggcgctgatgtcccagtgaggcggtccaggaggaattcgttcaatcctgccgaggctgaggaagcaggagaggctgttgctgttgacaggaagcccaagcgcaagaatcaggagaatgacgagggcgttgctgttatcgctcaggctagagttacgagaaggtcaaatttggagtggtctgctactgtattgcctcctgctgttgagaagaagagagggaggcagaatgcagctgagtctgatgtgcagaagtccgctctggtggaagtaacagctaggactacaaggtctcgctcaatcgtacctgttgtggtgccacccactgtggttgagaacaagaggaggaagactggagatccacaaacaactgtagagttgactatgctttcagatgtgcccagaagtgattttcctgccaccaggtctttaaggaacaaaattgtccacgttaacaacagcgtcgtggacgaaactcacactaccaggcagttggaaaacaagatgcgtccgtctactcgtaggcatcaacaggttgcatcttctccggaggataaaggtcaaaaaattcctgctaccagtaagtcccctctactgaggtggtcacggagaaactattctgaggccaatagtgcaaattcagtaaacatcaaattggccaaagactcgagcacagctcagccattggcacaccataattctcattctgaagatttggagaaacaaccagcagttaaagaaccaattaaacggtcaacacgtaaatctattgctttggctgcacttgagaaagagaaggatgtaattgaaggaaagaaccctgaagcacatgttaggcgatcaacgaggaaatcagttgtgcaggttaaagataccaaaagtattgttgaagagactcaatatgctaacagtgaagatgtggcgaagcaaccagcaactaaaggacctgctaggggg

SEQ ID NO: 191586 - DNA, 502 bp, Zea Mays
ttcaggatagcaattacttgactgagcttaaaagggacaaattgtggttcaaccgctggtcgtatgaattgattatgatacctgcaaactgaaaactatttatcaatttccgttatacgttatgctcgctaaaaaagaccccggaagtcacggaaaatcaacctcgctcctcttgctagcaggacagtaatgatatggtggaattaatcatggcttgccacaatctagtatcttctgctgcttaatcgctttgaaatgttgtcggggctaggcgcttgtctaaattatatttcgtatcactcttttactgtataacaccgatcaattctctattcataataaaaattgatacaaaacaagaatattgtacccaactgtttgttgcaggctgtagcatctactagcatgtcattctaattcttaatgtcattgaccacttaaatgtggcatgatcaccagtctttcaactagtatgttttggataaaaactaagcagtatttt

SEQ ID NO: 191587 - DNA, 590 bp, Zea Mays
gcaaaataaggatgaaaattgcaaggattttgttgagatagaaggtgccaaacatgaggaaactgcacaggaaaagagccagaacagtttgatgagcagttttgctgagaaagccatgtctgtggcaggacctgtagttcccacaaagggtgatggtgaggttgatcatgaaaggtctgttaatattgctattgttgtgttcctttgtctttacttctttttctttttttttccttttttgtgtgaaaatgtttatcatgttctgactttctgcaagcaggcttgttgcagttctagctgaactcggacaaaagggtgggtttttgaggttcattggaaaaattgctctactctggggcggaattcgtggtgctatgagcttaactgataggcttatctcattcttacgtatcagtgagcggcccttatttcagaggttagtcttatgttcttgtgcacaagagaacatcaattaaatggaaaacaagaacttaattggtgtgtcctcattagatggtttttatcatatattttaatgtgctgtttttattttttatactttgcgttctattttcagttcttagatgttt

SEQ ID NO: 191588 - DNA, 905 bp, Zea Mays
tgctcttcggagagccttgtttgtttcggtggttggcaccaggccgatggttcgcggggatgaggtgattgaggaattggcgcgaagtttcagcatcaaccctgatgatatgtctatccagcaggccacgccggaagatttcctactattcctgcctgatgaacacacagcgacccaaattcttaacgaaggacgacctttcagaggccctggattttctctcaattttaaaagatggacaagattctctcatgcctcgacgacgtctatggcggcactggttgatattgagattcgaggaattccagctcatgcttgggatatctccacggcaaaaatgttactacaggattcgtgctgggttttggaattgttaagggattcaggaacatcatttctgctacgcgcctggtgttttgacccaaaatatctgcattcagaaatggaacttcatatcgtcgagccgggcagtgatgagcagaagaaacgatgtttgtcatacaacatttccatgacagtgtcatcggtgccctttcagatgaccaatagcactgaaactctatccccttcctctgacgatggtcagtttgatgaaggaaatgacagtgatccagctgactcccagcagcgccgccttccacctcagccacctagggaatctgttcacctttggataggcgcccagtttgtgtctggaaggagtagggcgctgtgctcggttgaggaagctgaaaggatgggcttaggcgcctcttcgggacttaatgcacaacattcaatgcggccccttgaagattgcccgacctggggagatgagatgggaatgcagctggtctgtggcgcctcgggtccttccaggcagatatgtggcgccttgggtccttccaggcggatatgcggccagc

SEQ ID NO: 191589 - DNA, 341 bp, Zea Mays
cctgcacaagttcatgatatagaggctcttcgtatccatgggaagttcagtacaacttcagagaaatatgaaacagaacaatacaacaaaatccaatggttcttcgaagagtactaaagatgactcaattcaagtgataaattttcattgataccacctcttgctgttccctgtattgaccaatccatgcaacttgcgacaacagcccatcatccggtgacacattctcttctctccggccaccgattctaacttccaacaactcagtgcacaccttcacctcctaaggttcacaactctgtgacacccaattgtccttgactatggacgatacaacaaca

SEQ ID NO: 191590 - DNA, 580 bp, Zea Mays
acaaattcctatatctcggagcatcaagcctgaattctccacggaagcacaaaccatctgcttcgacttgctccttgtgctcagatagtcagtgggagccaaaagtacacacacgcacaaacgcccttctcctatctgtgcatctgcggcctttccgtgtagacgaaaatttgctgtcaccgtacattggccagcccagctaatccatgtagaactcgaattgaaccccattagaagcagattgaaaaggatctgcgaagcggacacacacagcaacaacctatcgctaaaggtgacggaagtgcaaggggaggtgagggggaacatgtcgctggcacacgaagaactggagcatccatactgcaataacagtagaaggtatagcggcagaaggtataccgacagcagcacgtataccttctatagatgtagcgacccatgcactattaaatgggccgtgcttcgggtcggcctgccaggaacaatccatttggccatctatagacgtcaatgtaaggagagttccatctctcttttggaaatatctttcactgctccatagactcaaacggaagagtct

SEQ ID NO: 191591 - DNA, 497 bp, Zea Mays
cggccctgctccccacgtcccccacgcgcgcggcgcgtctgcgcccagcctcgcacctggccgttgcacgctggatcccaccggtcagctccatcctccctacgtaactgcagcgcccacatcgctctctcccctcggcgaactgctctgcccgcgctgatcgctcttaagaagttagccgcgagacctacagcacaatccccttctccactcgcgcttgtacagccacagggtgccatgcatctccctcgcctctgtgccgccgtagttcgtcgcaccctcgttgttgtcgccgggtagtcgccgcgcacagagcctcgccagtaccctcgatcatgacgtcctgtcgccaaggtacttgctatgcttccctctctctcttgtctctcttctttggcgtagttggccacgaaggcctcatgcgcgtgtcccccgtgcgtcttccccctcgactctccctgcacgagttgcagcgttgctatcggtgaagcacgcag

SEQ ID NO: 191592 - DNA, 308 bp, Zea Mays
tagatgatggcctcaatctgaagtactaccctcgtcgttcgaccggcagtgctggaggtgtgattgtctcgccagttggtgagggcaatcccagactgaacaacatggtcaacttggccgccgtgctcaacatagagttggaccacgcccttgacgagttgggcaaggtttgggcggaggttgcggaattgtgtgctgagtgcgcagcacgccactatctggatggtggttctcccgcccctgtcgggattcagcacccttaccgttcaccgccccatggtcgcttcgactatggtaccccagactgc

SEQ ID NO: 191593 - DNA, 640 bp, Zea Mays
cctaactgcttcaaggcaatcagtagtgaggatgctgctgcttctggctcttttcagtatcctgacactcttagccaagaaaatcaatcccagccagtgccagttaatactaagatgtctcatttggaacaaaatgatagaacccaggaatttcctctgcagaatattgctagttttcaggtacctcgtgtgacttataaaagggagttctctttgcagtagatgtctttttgtgtattgattatgtatctaatgtctattatcacctttgtttctagcaaatatctttcatataacatttattcatatatcaggatatacctgctaaattagaacccaccttttagttgccacacaataaggtattgtggtgtttgctaagtattcctctaagctgggttgctcgaggtttccagtgctatttctgcattgcgttttgaattttatgatagaaaaaaatctctgcattagaatttatgtaaaaaaaaactactagtttatttcattctcttgaggtcaccagctcacacttatacccccaacttgataaacatatttttaggtggtcatgtcagaagaaggtaaagtagtgggatttcagccaactaacctcccagctgtgaaccattgggcaacaaac

SEQ ID NO: 191594 - DNA, 289 bp, Zea Mays
cataaacttgcagtaagataggtagaccttttttctgttgcggatggggctccgccgacgagatcgaaagctcagaaacaggttgagaaaaacataaagacaaaaaagatggtgacgctgacgatgagaaaccaaaaccagaaacagcagccgttacgtcgtccatctcttctccacgccccgcaaaaaggcaaaaacaacttttccagactgaccatccaatgttgcctttcacacacatttcaatctattccaccagatagcgctttttaatctatcttcaacgaaa

SEQ ID NO: 191595 - DNA, 1093 bp, Zea Mays
aatttgaccttttgaatgtgttttgaataggttgggtggcagagagtttctgcttcctgttgggattgttctcaaggtataacctgttgccatttccttaagaatgcttatcatttaaaacaagcaatatggtacataatcatgcattgagcattgtgtgtgcaatggcatgtgctgcatggataaaagctatgttacaaactagcttagtagcttatcgtgagttatacaggttagagcagtgtgcttactcccttgcctgtccacgttcggatcctggtacaatttcttattgcaacgtccagggggcatcttcccccctgtgttcgagttctttttatataagctttgtatcattggataccttttcatcagatgcaccctgctaatgtcgtatactcagtgtgcattgtataatcaataaagagaccttgggttctctgttgatgcattccattttttagctgttgaacttcgtttaactaaatatacaatccacaaacttattttgtcctgtgctccaaggttaccaatctgcttgtttaatagaatttatgtaatttagtatgtttctgcctctattctcatctactgttagactcagtctttccattgaagtaggtatcatgcaatttgtggacttgtgtttgacttgtcacatattatgcaaatcattatgcttctacctttgcaatattatagtttagttcaaaagtattgaattattgttaatgtagctttagcgttgcatttacatgatgatgaattaccaatgacaggcccttattgatgcaagtgaccgggaaatctttacaagcttgacttgctgctacagtgataaacatggaagaggaaagggagttgtcagtactcaactaattggtgaaagggcacaaatagttcttgacgaagtcagaaatctgtccattctgactcgcacacagtgtttggtgcatattggtacgttctgcgttttttttttctgtgcttaagatgccttgacaacctgttatgccctgacattgattttgatctttcaaatgcagggcaatacttccgatctgtgatggaaggatttgaaaatgatgactat

SEQ ID NO: 191596 - DNA, 665 bp, Zea Mays
agaataacgaagacgctgttcatactgcaaggtcggaaaaccggaccaaattacaaacacctggagtatgctagaagcagcacttgccctgtggcaggcataataatttattacattaatatatgactgctgcatatcggtttctatggatctgtctgtccagcagaagagcggctgtcgaaggcctttctgtgccaaattttcaaatgatctagaggatggggccttggtggtgtaagcctagctgagagcaccacaccatcagcctctcctaccaggctaccactgatatctgcttcgaagcttcaggtaagaagaaagctgctgcaacacagggcactacaaagcgggtgatgtttcagaaactgctgggcataacctgtagtggaagtgtggaactccatgccaatctaacaggtggttgatcttcccaggattgaatcaatgcaacggcaacttaatctttttatctggtttcggagtagcatgagtcaaaacacgcaaatgacagtatgatcaacactttatcctcagcaacctgcttcacaactctctgtgcttgctgaggcgcgctttgcgcactgcttcttggatattcttttcatgctccttgagcatctgctccacgtttccttttgctgtaatcattgaacctgagtgctgat

SEQ ID NO: 191597 - DNA, 284 bp, Zea Mays
agagccagaaagtaatagttggtgacttggcggggacatttatgttatgctacctaattattaatctgtggaaaaggggaagcttttggagtagagcttattttttgttcgggttactatttcctctaattgtgtgaaaactgaaaagtatggttcgtgtctgaaaagcaatagttggtcgaggcatatttttgtatggttccactgtactaccttctatctggtgaattagatcccgattctaaataagttgctctctaatcagattaaacactttaatgtag

SEQ ID NO: 191598 - DNA, 334 bp, Zea Mays
cggatactcgcagatctacatctggatatgctgtttttcttggggacaatcttgtctcctggtcctccaagcggcaaaacactgtttcccgctcaagtgcagaagctgaataccgcgctgtcgccaatgtagtcgctgaggctgcctggattcgtcagctcctgaatgagttgcactcccccctgcccaagaccactctcgtgtattgcgacaacatcagcgcagtctacatgtcttctaatcaaatccagcaccagcgtaccaagcacattgagattgaccttcactttgtccgcgaacgtgttgctcttggtgatgtccgagttctccatgt

SEQ ID NO: 191599 - DNA, 426 bp, Zea Mays
cgaatttgaattggccaggattcgaacttgggtagtgaaatgtaagttcattgtctctattttttgtcattcttgtaatacccatttctggcagttcttgtgctgcgtaagtactactaaatatattatagtagtacttaccatctaaatatagtatagcacttactaagcattcttgtactgtcatacttcacattcatggtataataataataggctatgtggctcactattatttggcacatcttgatccttaaatttactgtgcagacaatattccgaaatccaagtgaacttaaatcatatgtgcttccacattcagatcgttgcaatgttcctgccagtgctatgcttgtatcaaacgactctattgtagttgttgatgtaaatgccccagcagcacatgtggcacttcaccaatggcag

SEQ ID NO: 191600 - DNA, 447 bp, Zea Mays
ctactgatggcccaaaacaagatgattgtggtggttctcctccttgccacctttcttgtggtggcaagatcgttgtgggttccagaagaaccctcaaatgcggatgacataagaggtgcttgcatcgaggagtgcaccaaagaaaataaggctcctggcgacaagaagacatgcgaagtgttgtgcaccaagctcacaaaaaagcctagcgaagaaggcaaacatgattgatgaagtagcactccgataatatataccctagtggatgagtggtcatctttgtagccatgtctgccacacgatggccttgattatattgtcttattgttttgtttttggtttccactagtatcctaattccttgttcatgtaacctaatgtcactcaaagcattttatatgcttcacttaattaaataaatacaaaggcaaaggcatgttctgtttt

SEQ ID NO: 191601 - DNA, 414 bp, Zea Mays
gcgaaaagtgtattgttttaagcaatgtgatgggattcgtaattttagaggggatatatttattgatgtggcgagtagtttagaaaatgctcgtttgcgtggaggatgtatcgttaggacatgagtgtcggagttcatttatattagtgatcgcgccacattgcttgaagtgtctcgagtgcacgccatcatatggttgtatgcgagacagagttatgcgtatgatgagtttagtaaaaatcccatcggcgtcagttgtgttaagttgaagtttatttgtgcatgtaaagtagtaaggtatttaatgcttgcgactcttagtcgatggtagaaattgttttggcctaattagagaggtggtgacatgccaaagtagtcatcgctttctctatatttataagtcgagtcgtgtcg

SEQ ID NO: 191602 - DNA, 286 bp, Zea Mays
cttaccttagtatttattttttgtgtgagctgtattaatataatttcacttgtaaattgtgagacatagagtggaggttgctgtggcaaatgaaatgcctattagagtagtaataacaataagtaatcaataagcatgtttatatgatatacttgtcttatttctgcacttattgttcctgcaaaggtacttgttgaagtgtataagtggattcactagtcactaccttctattaacgacttaatcttttggattgaactagctagtgcgtgcactctaacatggt

SEQ ID NO: 191603 - DNA, 298 bp, Zea Mays
gcagtttgtgttgtccagtgtatgatatctttgttgacttgttaattttgtgcagagaacatggaaggcataaccagtgagattcttgagactgttcttagcaacaaggtgatggacagagaaacacctgtgggatctgaagatgtgcttagttcaccaacctgtacacaaccttgtttgcaaaatgaccaaagtaaaagtgtagttacctttgcagcttctgttgaagcctgcattggtgcaaagcaggaaagcataaaacttgccaattccccaatgcatgacaccaagagtgcat

SEQ ID NO: 191604 - DNA, 286 bp, Zea Mays
ggagcagcagaaaaatagcaaaggagggagagggaagaacgcctggaatactggattattgggggaagaggagaagggctgtgctgacctggacgattggggaagagcctaagaggacaatccggcaggcggcaacagcagacttggataaagtggaaatgcagcagctcccgcttttttccctcctctgtcctctccacagcagctcccaccacttttccctactctcaaatgcagcagcagctcccgagcagataaagtggaaatcccgccactttatttcccg

SEQ ID NO: 191605 - DNA, 901 bp, Zea Mays
atgtcgctgtgtttttacatcccactgctgcagaaacttctatcactctagacattctgcaactttttggagatgcttctggcctcattaataatgtgcagaaatcaaatgcatatcctattcaatgctcggaggagattttgatggaggttcagagtttgctgccttgtgagatggcaactttcccctgcaaatatttggggctacccctttccttgcataaactttctcggcagcagtttcagccctttgttgaaagaattgcagatcaactccctaattggaaagctgacttaatgtctagagccggaaggagaattcaggtgcaacatgttctcacaggcatgacagtttatttagcaatggcaattgacatcccccaatggaccttagatgccattgataagataagaaagggttttctttggagaggcacaaaggaagcaaagggaggacactgtttggttgcctggggaaaggtgtgtcgtccccttcatttgggaggcttgggaatctctagtctccctgagctttgttgggctctccgcatgagatggctgtggttgcagaaaacagatatggggaggccttgggcaaatcttccaatacaggtcccaaacaaagctagggcttttttctctatggctcttgtttctatgattggggatgggtcaaacaccttgttctggaatgatagatggctgcatggcactcgaatcgctgatattgcccctagcctgcacaagtcaattccaagaagaattgctaacaaaaggacggtgaaagaagcacttgtaaacaggaaatggatttcagatattaagggggctcttacagtaagagtcttggttgattatctaaacctttgggaatccctttcaggaattgagttacagcctaa

SEQ ID NO: 191606 - DNA, 1367 bp, Zea Mays
cggcagagagcacagtagccaagcgagtggaggagagttggagactcatcactggagagcatccgaagccgcccagtgctcgcacaaccgctcccgattcccaacccctccgtccgcccaaggggcgccgcaccatctccagcctccaggcctcgatccctaccggaccccgtggccctgctgtgttatctggctggagatccggccggagtggcattcctgctctcggtaaaccctagacgctgtttctcctgctctccagcccatgttttcgctgccaaaaatcgagtttttaggccgggggccagcccacttcttgcgcaagtttgtagctgggaaccaatggaatccggctgttcctttcttcttcttcttcttcttctctatggatggtcgtgtcggtttggtcgagtggggaatttcagtggccgtgttggcatgcggttcagtgctgggggatctgggaacttctatggttgtcattttgagattagggccttggccctgggcactctcgtcagaaatatctcattttcagattttgctcttgtgaatgtgctgacgtgcacgtgctagatttatcgttcctctgggacattccgtttttttgggaatctggatgtagtatgttggataaggccatgagcacatttcaggagctgtttctgttagttggtccaacaacattgcacggaccacagagaagaatgtctgtgtttttatggacgccttttcaggttttttgagtgcctgattcatgtgagaatatcggggcattacacttgtgatgtaaacaatccgtgacttttgttaggtttccaggtaatcagccacttacagtatgtagcaacggtctggagttcatagttctgctacttttccttttaggatctcgatgtaagaaattaagggcctacttagacctagtttcatcctgtgggcttgtgagctgaagccatggtcaaacgggtgggagcttcttgagatcatcatataaggttaggccaacgtcacagtagaaaccctaaatgttgtgaatccagcacaagcaagctcttatcaatcctgaaatgtagctccagtctgcttttcccaagaagctattttgggtctgttgcaaaaataacagtttattgtagaagcttaagctgggccttgtccctaaaatctttggaggcttcagctttttcttgttctattcagttttatggcaaaaaacagttttttttattttcttatatatgctctttcctgtaggtcaataagtattctggaatgtttttccgagctcaaatagagaacttctggagctggatatcagtattctgttagggatatgctccaaccaagggaagctgatgtgcctg

SEQ ID NO: 191607 - DNA, 273 bp, Zea Mays
cttgtagaagttatatccggtgtggcagaataggacgcagcagtgccgcacgaggctggcagcgtggctgtgctgtggagggatggtggtagtagcaccgacacgagcttgtgtcgtgggcacgcaagtcgatgttgcttctataatgagggcagatctgagcaagacggcgacctctgggtggagctgtgagggaggcttcaccactgcaggctgccgcccaaattggcaccaccgcaatcacctgcgagtgcgagggcacagacgaggtag

SEQ ID NO: 191608 - DNA, 575 bp, Zea Mays
aaaatgtcttaaataggcttgcccagctacagaaacttgggaaggttggtaaaggtactgacaggaggaagcgattgaaaggaggactggagctggagccatgcatggacacagtgaataatggttggagaaaggacatgctgcttgaggatgtggtggatattgacgttggctatgatgcacctccaccatcgtttactgctggtttggagttgcagaagcagaggagagcacgtattgaagctgctaagcagcgaattgatgcaactaggaaggctcctgctgctccagctgcaaaagcaaataactcagaagacgttgtaagaaaaaaattgaccatgaagaatcgagggggaaagaagaaggatgatatcgatcatatccttcccagtgacaatatgacaggttgttcaggtgctaggaaaaagagacgaagaggttcctgtgacagtattgattgggaagattgcatcattgagctcctgctactgcatggtgcaaatgaagctgagattgaacaaggccagtacagaagattgttggagttgcatgtattcagtgcagtaagtggggag

SEQ ID NO: 191609 - DNA, 503 bp, Zea Mays
ccggggtgtccaaggcgacgatgccaggtagtagaagatgtggtggtggcaaaaacagcagcagtgtcaggcgacgaggacgaagaagaggtggcatgcgggagccgaagggtgtagagggggccggtgctgtcacatctgaggagggggcaccgagttgccgagtccttcacagtaagaccagaagagtcaaactcgacagaacaagaattatcagcggtaaaacggcgaatagaaagaagattgtggaccaaagaaggagcgacaagaacatcgggaatgcgaaaagagccgagagggccagcggcacccacagatgtgacaggaagacacgagccattcaccaccatgatggacgaagggagagaggacgaaggagggcgaacagaggtgagtataccagggtcgggagtggtgtggtaagtagcaccggtgttcgcgatccactcgggacccatcggtggagtcagagtgggagtctggaaggcagccagggcggccgc

SEQ ID NO: 191610 - DNA, 489 bp, Zea Mays
gcttgtttccttgcccgcggtgggtagccgagttgtgtacttccctcagggccacagcgagcaggttagtgcacaatgctcaccatgcccgtgaatcctatgtcctcttccagttcggctgtcaagctcgaacccccaattagcctctgcctgtattttcaagactccagaatttctccctgttttacaaagttcttggtgaatttctactgcaggtagcagcatcaacaaacaaggaaatagagtctcagatccccaactatcctaatctgccgccacagcttatatgccaacttcataatgtgacgatgcatgtaagcttggagcctcggaacactttctccttaagccgggtaaccttagttttctgtttcattatctgtgtttttttctcttctttcaggctgatgcagagacagatgaggtatatgcacagatgacactacaaccactcaacccggtaaattacattgtttctgcctatttgtg

SEQ ID NO: 191611 - DNA, 307 bp, Zea Mays
tgagatgtgattaggagtggtaatggattatgtctttcacaatttgtttgaaccctttaattaattttagttcaaaagtgaataaaaataaaacataattctgatccgatcttatccttaattttatagtgtaaaatttatagctcgttaccaccctatatgtgattgagaatttaagattagtggatttgacttctgaccggttgttgcctgctaatgtcccgtttactggaatcctaagagaggactgaagaacaaacctaacaacatggtacatacaatatttgtagcctagacgtcgctctcc

SEQ ID NO: 191612 - DNA, 276 bp, Zea Mays
tgtgaatctgaagtatccactgtaagctgtgtaaaggaaaagaccagagtggatcagttttgcattagaaaacaacttgagttaggaatgacggtctcttgttggagtcgctattgaactaccagaatctaacgttatgaaaatccatgtgatgttgattattgcaaaaggcatgctcagtagtttgatgcaccacagttctcatgtatataaaactaaaagatagtgatcgaattatagtttaagcttttaaaatgtatagttgttttaatgaaa

SEQ ID NO: 191613 - DNA, 362 bp, Zea Mays
attagtacaagaatcgggtacaggatcacgatcagggccagccgtagaaatggagcgggaacgacgaatgtagatttggatgacaggtggtctgaaagactaagaagaagatgacgtggaggtggaaggtgtgttataagaatgagaacatcagatgtggatgtagaagatgacggttcagatgcaggaatggaaggaagacacatgaaagaagtagattatgtgaaataatatgaggagtgagtagactgattatgaaagaaggggcgattttcattgaaactcacatctctagaaattcgaatacgacgagtagatggatcataacaacgataacctttgtgttcagaaccgtatccaag

SEQ ID NO: 191614 - DNA, 315 bp, Zea Mays
ttatcttttaatcttactatagggaggtgaagatgatggtgatgttgaaatggatcaagattttgatgaagatcaagatcaagaggccaacccccttctgtttgctctagatgagcagaagccaactaaagagcagattgtaaagcaatggtatagtcaggatgtgttcacggaagcagcgaccggtgttactgagcggagcgacactgaagatgaaagggagattttgcagaggaataagaagatggatactggcaaaagggaaaaggtggctaaagcacaggatttgcaacatgatggttttgagattgtacc

SEQ ID NO: 191615 - DNA, 657 bp, Zea Mays
tccaactctctaagtttacttagctgagccagctttttcaggaagttcatatggtacatacacgtattgacatgtgtcagctcttccaaattttgcattttaccaatttcatatggtaatctggtgtcaagatcaatgaacagcctagccaattgccgaagttgaataatagccggaggtaactcactcaccccagtgtttcttatatccaatgtatccaagtactggagttttaccacttgctttgggagctctgtgatttctgtttctctaaggttcaagtatttcaggtggattagcctctctatattttccaggtggtggttttctaatcccttacaaccttctaggtcaagcacgcgaagagccttcatgtttgaaagagatggcagttgcttcccatgcccaaagatagtcactgatctgacatgagatagcgatgttgactcttctagcaccaaagctggtggttctccgtcaccacattggatagataatcttcgtatcttgttctgtggacttgatgtaagttctcgagagtctaacaaagtaacaaagttctcctctacagactttgttatgattaaatcaagaatcatgtcatgaactcgacaagtcaccacactcccactgtcatgatcgataaaccatggttgg

SEQ ID NO: 191616 - DNA, 891 bp, Zea Mays
gcttgggtccgagtttcagaattttgttttcacaccttcagttggggctagtggagggattctagtggcttggaagaataatatcagctcatgtggctctaggattgatgatcattgtgtctcggtgaatcttagccttgagacttggtcatcttggtggttgtcatgtgtctatgcccctcaagggaatcatgagaaaattcagttcttacaagacctcagattgattaggacccactgttctgggccatggctggttgttggcgattttaacatgattctgagtgatgaagacaagagtaattccaatgttgatcgtgctatgatgggcaggtttagaaggtggaaggatgatcttgccctgctggagcttcctctgattgggcgcaggtttacttggtcgaatggccatgcctgtcctactttagtcagattggacatgatgttttgtactgctgattgggaagatttatttccagattgccttcttcagagtgctgcaactcaagattcggatcactgccctctcttgttgggcctgcatgatattaataaaaggaaagggcgcttccattttcaggccttttgggtgaaattggagggttttcaggatgttgtggctaacacatggagttcgattcccgcaggccagtgccctcttgttagtctttccaagaaattacatgctacggcaaaggctttgcaacgttggagtgataataaagtggggggtttaaaacttcaacttgaaatggctcaggagctccttcataggttggagatggctcatgacagcaggactctatctccaagtgaggattggttaaggcgtacccttaagaagcacatcttggtgctctcctccttgtcgagatctatagcccgtcttcg

SEQ ID NO: 191617 - DNA, 715 bp, Zea Mays
gcgcatccagcaccggggcggccgctgtccgggctcgatcgagcccccgctacggtccccggaggccggaagccggaagcccctcttaagtttctgctataattttatacttgaaatttaaaaatgcgattttaaatacagaaaataaaaggaataagtccatcctccgtatctttctggatccgctgctcgcgtggtgtttttagtttgtgtgtgtgtaagggtggtcaccagcacgtctcgtaactggcggcgtgcttctttgatccgtttgcttatgtcgcctgacgtcaatacatcagctaaggtgccctttcccggttgtggatcggggttcaggaatcaggatatattcattctttctccaaaaactatagaattcattcagtgtcggacggaccttgacaaaatggaagaagcagggcgcagaggcatcagcttatttccacacgaccgcgtattttctatttaaccagcgcagcgcagcgcaggcatggaagcacagcggccgttcatgcagatgaaagatgagagagacctgaatgaaagaacaacaggaggacaaggaaggaggacgccgtcagccctctgtttaggaagctcaaccgggccatggagtcctcttcagcccgcaccatctacgtgagcactgagccgtcagataagaacatcagaggtggcactggatctggatggtccgcgagctagcagagat

SEQ ID NO: 191618 - DNA, 472 bp, Zea Mays
caagatccggacgtacctggcagtagtatgaagagatgcattttataggcgcgaatctgtgtctgtcgcatcctacatggaaggtttttgatgggggcgaggccggtcggtgccaaggcgactcaccttcccttgagagcacggatcgagagccggtgcgtcgattgcggctgggattgtgatggagtgggattgcaatggagttcctcgcggccggtgcgtcgattgcggctgggattgctatggagttcctcgcgactgggattgcgggatgcggagagacgagatcgggatgaatggtagacaggctagggtgacttaccagcagtcaacagtcgaggacgacaggatgcagcctcatcggagtcagatgacgaatctgtggcctgacagcgacacaagagacacatcaagggcgcgatgcgaggctagagaagggcatggcgtggatggtagggacctttcagcgaat

SEQ ID NO: 191619 - DNA, 653 bp, Zea Mays
gtagacgcggctacggatcctaaacggtacgatcgttggtgttgcccatccaaatttctagactagaggaccttggcaaacgcccaaacagacttgactgtgtagaaccactgaaccagcgtcgtcttctcgagttgaagtgtgctgcctgttcacccctgcgtctttccctcccctgttacgattatttgcctattgggtgaccgccgacgccgccccacgccaggtgctcaggtcttcggcgggccctttgctggcgaggagcaccaaccctgtatgcccaccccttatatgcccttgctgctgtgcgaaaccgatcatccaaaccctaacctacgctatttggctatttgtattcggatctggtctaattacaagcatatacatacccattaacttcgttattttcttcttgcaaaagttatatagggtatacatgtgtacacccatgcccttattggctccgcccttatttgtattgaccgtggcttacaatttctcattaacagatacggaggatattttggttgcgcataacaagttggatagttctgggttttcgctctgaacaaaatggacaatgctcagagtgagaaccgaattgataccaagcaagatgatgatgtgcgccagatcaaacatgatgatgaggt

SEQ ID NO: 191620 - DNA, 404 bp, Zea Mays
aagggcaaaagcatcgtcattggtgaccctcgcacgttgaacatatcacaaggagggattgctcggaaggctccggacaagaagactaacaagtccggaggcgtcgggggccaggctcaattgagcagccgagcacgtctccctgactcgagcatcgtggacggttcggcacctacgtgcggacggtttggtgctcgaacagacggtccgcctgactcagccggatagtccgcccatacccaggggcgtcggccttcacacaaaggaaaaaaggggacacaggcaaagcaaacataacacacatggtcggctggtcaaagtcggcctacttttgatcagttgctttccaaatatgcaagcaaggagggcgttctacgcgatcggccaacaaaaaaacctaggtc

SEQ ID NO: 191621 - DNA, 430 bp, Zea Mays
gacctaggagtttttaccaatggccaagtcatggccccctaggacccaaggtccttcatgaggaaaacatagtccctaattcagctacggagcacctaaagaccaaaagaatatggttggcccctgcccctacggcaagacggtccctcaaggtacagctatattcaaccctactccagatggcgttagcgatctagataagccttccatccatcacattaaatgtgacggacgatgttacagtcaaatagggacattgttgccacgatataggcaacaagaatactcaagtccattgttggatatgtgccatcatttatgtagccatgcttgaacacgtcagagtaccacgacgcattataaagtacagacggctataatgtttaccaactacgttgtactcgacgacatggactctggtacctgttcg

SEQ ID NO: 191622 - DNA, 652 bp, Zea Mays
ccaagtttgggtcgaggaccccggtgtcgcttggatcgacggggaggttgtaaaagtcaatggagacacggttacggtcagatgttccaatgataagacggtatgttggcaagtttcggcactgctaggcttgtatataaaaggcaaacggttaagaagggccgcacctatgctgaggcacaccttctataattggcaaggcacttaacagttatggatgacatgcacacttgagttttgaaacctggccctttgtttaggttacggtgaaagcgtctaatgttcatgctaaggatcccgaggaagcgccatgcggagtcgatgacatgacaaagcttgcctatctgcacgaacccggggttcttcagaatctgaaagctagatatgacatgaatgaaatttatgtaagttattaggataaccggtatagcctaaccatatgtcctatatattctccacagcttcttgctaactgagctggccatgcttttctgacatgtgtttgctaacttattcattattaaaccagacatatactgggaatattttgattgctgtaaatcccttccgaagactgccccatctgtatgatactcagatgatgcagcaatataaaggggcagaatttggtgaattaagccctcatcctttt

SEQ ID NO: 191623 - DNA, 319 bp, Zea Mays
tttttacattctctatttcctaagtgcaattgttactcaacattggaataaacaagcaattctagaagtgattttcttttggggctggcgtagtatttcttttaaggtactgttggagatgctctaactgtaactgtgctgattgtcacgtccaaatgatcttcctaggcagaaccacaaacaaaaagcgctgattaaatatgcttcaggaggatagagggtcagctctagttaggtactcgcagctgcctcgcttgctcaatggcatgcaattcaggaaaaggtagaacatccttgccttccatcagcaatccattca

SEQ ID NO: 191624 - DNA, 404 bp, Zea Mays
acacactaacactgatagcccctcttatgttttgcacccatctccctatagtgagggcatcatgaacactctattagctcttgaggagaccagcttgacaagatgaggtgccaaatggtacaaactcttgccatctaaccatttatctacccaaaacagggtattcctgccattgcccaccacagaagaaactgctgcaaaaaagaaggcatgaactgaaggatgcacatgaattttaaaggctgcccaaggccggtcaggatcagttttttgtaaccagagccaacgcaatctaaggtcccaactcatatgctataggtgggagatgcccaagcctccaagctctttttggtctagtaaccttgttccaggccaccaaacagtgccctcccaaagcctctttt

SEQ ID NO: 191625 - DNA, 660 bp, Zea Mays
cactgtccctgcatcgctggtctgccaagtattgccctcttttgccacctcctaggtcaactattgcagctgctttcagtccagatggaaaatcacttgcgtccacacagtaagtttattgattcactgtataacaaactgaaatgaaagacacgccaactaactcaatctgttttctcagtggtgaccatactgtgaaaataatggactgccatacagggaaatgtgtgaaggttttgagtggacatcgacgcactccttgggtggtatgtctatcataccagcatatatttttttcttgtgtatttagattagcaccctgtgcttcgagctcttgcaaagaaaggaaactagttatagtgtgattgtcgatttttcagtaatgatctggctagaacattagttttataatttcgtttttcatattatatatttttttacttggtgacaatctggctagttgacagcatttttttatcaaaatgatatttttgatctttctttgcatcccaatattacctcagaagtcagaaatgtaagctgctaacctattgcaggtcaggtaccatcctttacattctgacattctggctagtggaagtttggatcatgaggttcgtctgtgggatgctaatacttcagactgtattggatcacaag

SEQ ID NO: 191626 - DNA, 355 bp, Zea Mays
attgagtttgatccctttggcctttctgtgaaggatttgcaaaccaggaacgtgatcgccaggtgcaatagctccggtgacctctacccgttctatgcaccctccaccagcacccctgcattcctcgctgcacccacctccctgtggcatcgtcgtctcggtcatcttgggcatcaagctttgtccaaacttattacctccagtgttatttcctgtaataaagatgatgtcaaccacatctgtcatgcgtgtcaacttggtcgtcatgttcgtttgccattcagttcatctagctctcgagcttctcacaattttgacttaatacactgtgatttatggacctccccaattgtta

SEQ ID NO: 191627 - DNA, 277 bp, Zea Mays
atcgcgtgaggaaagatatttgtcgtcggtgggctggaggtcactccggtgactcaccgtcaccatctcccttctgttttgcggctgagcagataagctcgccggggaaccaccctcgcacggccttgcgccacgtatccgagtacctccaccgcatcgccatgattcgttttagctttccgtcgatcgccggagcaattgccacggcattggacacgaagcacttgcgccagtgaacgtttagtcctccgaccgccgcgcgtccttctccaaattc

SEQ ID NO: 191628 - DNA, 521 bp, Zea Mays
aggtcgtagtttgttcagtgtgtcatcagcactcgataatgccgacaaaaatacatttcaagcaacaattatgggggggacaaagttatgctcacgacacttgcctcaggatattatttactgtgttggtggtgtctccgtatttttcccactcttcactcaattttttgatgctgcaagtgatattgagaaatgttgccatacatctgttgtcaatgataaattggtggctgaggtcattgagctagttgctactgttctggatggaaatgtgtcaaatcagcaacagatgtatcttctttctgggttatctattctaggcttcttgcttcaatcagctaccccacagctcttaaccaccaaaactctttctgcactgaagtatatgtttgacattctgaggaactgcagtaatctctctctccctccctcccctctctcttttagttcgcatgcatgcaataagatggacattacttatacttttctgcatatccaggcatgtcaaaagtcctcctcaa

SEQ ID NO: 191629 - DNA, 622 bp, Zea Mays
attttctcaatccttcatcactagtggtggtgtggaagcactacttgttcttttacaacgggaagctaaagtgggtaacaaaaatattttggatcattctagtgcaagtgaaaataatgtgcccaaggatggaagttccaacagaaaagctgatagtgctgacacaagttgtcaggttgatgaaaatcaatcagctgaacgtcatgaaactgtcttccatgaagaagccattgaacatgaagccacaaatgcaaaagatatgctggactcaaatattggaagtaaagtgcctggttctgagaatgggctcttgaagaacctgggtggcattagcttctcaattacttctgataatgtccggaataatgtttacaatgttgacaaaggtgatggaattgttgttggcattattcacattcttggtgctctaattgggtcaggtcacctgaaatttgattctggagctggaagtgcaaatatacctggtggtagtcagaccacacttaatgaagaaggaaatactatgtcagaagatagagtatcattgttactttttgcattgcaaaaggcattccaagcagccccaaggaggcttatgacggcaaatgtctatatggctttg

SEQ ID NO: 191630 - DNA, 755 bp, Zea Mays
ctcgacgtcggcagcgcggcgtcggcgagatgaagaacctgcgccttgtgacgaggctcccgcagcagctccagctccagatagacggcgaaaccctcgtcgcctccgccatcgacgcagagagccgccgcgctttcttcgcttcctccgccaacttcatctacaccgtctcactgccctcgtcctccacccaggaacaggtctccaattccaccccatcccctgctgatcaagacgagtttttttttccttgcttctttgtttctttcactgtgtctacgctagaaagccagcaagcaacacttactaaaatattgctgtattcttgtatagccaatggtttaattttttcagtccaggaaaaaaagttcgctatgccaacaacttcatcttgtagctttccaggttgtgctgactatcttgctttcgtaccacttctgcagcaactactgcaatggagcaaaactgctactcaacactctgacatggaggaggttgttcttgatcctggagatcgcattgttgccatggattatcttatggagagggagtctctactccttgggtcgtcagatggttgtcttctcttatataacgtggaggagaaaacaactgaagttgtcggaagactggaaggtggtgtcaacaccattgcctctagccccgatggggcccttctctctgtcaccactggactcggccaactgcttgtcatcacacaggactgggaagtgctgtttgagacttcacttgac

SEQ ID NO: 191631 - DNA, 310 bp, Zea Mays
cgtaaatggttgaggttgagcgtcttctcggctcctctgtcgtagagccctctctagtggacctagtgccaccccctcccatagagtacgaggtcgtagtcctcaccgccctccacggtcagaacaactggtcgctcgtcttcgtcgtcctcgatctgtgtccacccacttcgcctgctggtgtgacaaggtgctcctcacccttaagcgctatgcccttgacgaccacgtccacgtctacgcaacccccctccccaactgctcccatcttggcacctgatggacagtgtggtcctctcgtggatcctcg

SEQ ID NO: 191632 - DNA, 475 bp, Zea Mays
ctaacaagtccagaggcgctggggatagactcaattgagcagtcgagcatggcaacctgacccaagcatcacagacgatctggcacctacgagcgaacggtctggtgcttaaacagatggtacgactgatttagctagacagtatgaccatacccaggggcgttagccttcacacaaagaaaaaaaggggacacatgggcaaagcaaacaaaagacatatggtcagctggtcaaaggcagccctacgtttgatcaattgctctctaaatatactagtaagaaggcctatctatgcgatcgaccaacaaagaaaccccagtcacccgctaaaacaaaacatccgaataaaatgacccgaaaggcgacgcaacaagcatcgcttattcatcctgtgatgccaagatacctttcactcacctactcatcatcggtatattgtcctattcaaatgtggaatggtacgacgaagaaccag

SEQ ID NO: 191633 - DNA, 398 bp, Zea Mays
ttgaggtaacaatcaagacgataagtttgcatgcactttgcctgtttctgcaaactaagtttattatgttaaattcttataagctggatggaagctttattattctagctgacaacgtcatgggttcaaccaagaatagcaaaaatggtgaacagatactgcactatggttccaggttgtaactcactcttaaacacatggttgctataaatatttatccagtaagtgtggaactctaatgccatgtttgttgaaaggtgtgggagatgcagactgcaaagtgttaaaattgttaatgaagggatcaattggacttctcccaataatgtctattggaagcatgatgtagagagatcagaatctgtaaagattattcttcatggaaacgcagaatttga

SEQ ID NO: 191634 - DNA, 956 bp, Zea Mays
gatgaacttgcggtagtaccctgccaagccgaggaagccgcgcaccgcccgtgctgatcgaggcaccggccagtcatggatggcctggaccttggtcgcatccatagccacaccgtctgccgaaattgtgtgtccaaggtaggcgaccgaaggctccccgaacgcacacttggagcgcttgacgaagaggacatggcggcgtagctcactgaggaccgcgcggaggtgtcggaggtggtccgcccatgacttgctgtagatcaatatatcgtcaaagaaaacgagtacaaagcgacgaaggcaagggcgtagtacatcgttcattagggcctggaatgttgccgaggcattgcacaggccgaatggcatcactaagaactcgtagaggccatcgtgagtgcggaaggccgtcttgtggatgtcctcggtcctcatgcgcacttgatggtacccggagcgtaaatcgagcttggtaaagaaccgggcaccatggagctcatcgagtagctcgtcgacgacagggatggggtacgcatccttcaccgtgatggcgttcagttcgcggtaatcgacgcagaaccgccacgatccatcctgcttcttgacgaggaggaccggggaggagaacgcggagtcgctgcgcctgacgatgccttgagcgatcatggcgtggcactgcctctccaactcatctttgtgcgctgcagggtagcggtatggccggaccgccactggggttgcgtcgggcttgaggacgatgcggtgcgtccggccccgctccggaggcaggccacttggctcggcgaagacgtcgtggaattcccccaggagtgcgtcgaggaatggttccctggcctcgacagagtggagacgaccaggggtcttgggagcgaggccctgccagcacacagatctgcccgcatactggaatgccatagtgccagccgccaaattcc

SEQ ID NO: 191635 - DNA, 897 bp, Zea Mays
aatccatcgggaaacaactcagcaactgtaatggaggcagatgaaagaaatgcagttccaaaagaatttggaagggctgccaaggaagtaattgaagctgtgccccagagccaacatgaagttaatgcaggtgttataaacaattctcatgatgtggtggctttacctgaggaggcccatccagttcagcccacaaataattctggtggatgtcccgtggtatcttgcataatggaagacagtaaagttgctggagattcgggcaaaattgattatgaatatttttgtgattttgttgaggaacagagggagattccttgtgtacaagagatttctggagaaaacagtcgaatgggtgagaaagagagagaagaaacctcccatgaatctcctcaactagagattgtagaatgtgtgcaagacatcgttcttagggaaacagactatgatgttaatcaaaagatagtttatccagcagtggaggatgtagcaacttccgatagtatgagtacatctcttctgggtgttcctgaaccagaaaatgcagaactcaataaacatccttatctagcaattaaagatgaggaagatatacccatggaagctgcacgaggagaagtagcagaaatggaacaaattagtacttctgcaaagggaggtgccgaggagcatggggacttttctgaacttgatcacatgggccgagcagatgctaaattgcatttacacttaaattctgaagtgcctgagaaaattgatgaaatagagtgtaaagaagtcgctggcactatgagactaactgggagatattctgatcagaagcttggagatgtgcctgaagttgggtacacagaagatgaaaacattagggggctggtagtgaacacaagtgatagg

SEQ ID NO: 191636 - DNA, 354 bp, Zea Mays
tgaaagcttgcattgtatcagggaaacgaaggagaaagagaaactcaattaatcacgaggaatttgctttggcaaattatgatggaccgttgtatcatgcaagggagttgacaaaggaccatcatcctaatagagaagacgagagaaaccgtgtggaggctgctggtggttatgttcttgagtgggctggtgtatatcgtgttaatggcgagctagcactatcaagagctattggtgatgttccttacaaaaggttaatggctgcccccattttgtttcatgaattatagtttttttgtcaaatgatctttatagaataaaatttcatggggctaaagcagtcatatttccaaa

SEQ ID NO: 191637 - DNA, 341 bp, Zea Mays
gcaaagcaaagaacatttattattgatgctgcacgagcactggacaaagctaagatgatgcgctttgatgaaaagagtggtaacttctactgcaccgaacttggtcgaattgcaagtcatttttaccttcagtactccagtgtcgagacttacaatgagatgcttcgacgtcacatgagtgaaagtgaggtattggtttacctctttcatgtctttgttgggcttgtgatgcttggacattttactgacatgcctgggtacaacctcagttgattactatggtggcccattcctctgaatttgagaatatcgtagtaagagaagaagaacaggatgaatta

SEQ ID NO: 191638 - DNA, 645 bp, Zea Mays
catgcatcatgattaaaattatactaataaatcttcccctcttatggagacatggtgcgtacaaggaaaactgcacgcaaatctactggacctgttggcgtgcctcgtcatcagctagccccaggacatgaggaaagtagttgcggcagcaatgacccaatcggagacttggaggccatggtggaacaactccggacagagctacgtcatcggaataggatatgggcgtaggacagccaacgtatagctgaattgtcagctgacgtcagccgcttgcagtacgagatttcagaacaagattcagccattgattgggccgtcaactcacgttcgatcgcttgggaccgcgaagcaaaagctcgagctcgtgtggcagagcttagtgcggccctcgacagcctgtaagtgtactataatactttacatgaggaagtacatgtaatgtatgctcgactgcacccagacgtgcctgccgatgttgttgtaatgggagccagaccatcggggacagtagatgaaggacctgatggggagttggacctttttaggcctcctccttccatgaaccttgctgacgaacggtctcctgcagcaggaaatgaagaaaccaaggatgatgaagactagaatagtatagtttagatg

SEQ ID NO: 191639 - DNA, 689 bp, Zea Mays
tgattattgaactgaaagtggctaccagcgcagatgcttcttttgatataaacaaagccaactctttgaaggctgatttaataacagacgctgctagagaaaaagaacaagttaaagttgaatcttctaaggttgaaggttgtcagagaaaaagggtcactagcacccgaagaagtgctactcacaacccacgaatacattattcgtcatgctttgggtgaaaaattaactaacgagcaaattgctgaaccttagcactatgccaaagatctaaagtatcatgtgagctctcttgtgtatggaggcaatgatgaagatggctatctatactgcctaccggatagtagagagattgaagtttgccgtgagatgatggacaagatgggctatccgaagcttgaacttggattatctgctatgcctaaggataatcttacgtattgtttagcatataatagtttgaaggtttgcatacatttctttctccttttttgccacgataattcgggtatttcttgcgttatttatcttctctttgttatgttgttatcagtgacttattctgagcaaaggtttgaatgcctagaaggacgtcgaggatgaaagtactcggatagccttcagaaaccttcaatcagagtttatcgatctttggcatcaagttgttgagaaagataatattttaatct

SEQ ID NO: 191640 - DNA, 277 bp, Zea Mays
ggtttaaaaggtgatctattgttttgaattctttatattccaactttttagcaactgtatggtggaaacctgttatcaaaaaaggtcattagctagcccaataacgtcttcatccactagttgtactctaataccctctcgtgcgaatacaatgccctcaatatcatagaaacactatttttgtgtggtgttttacttgagtggacataaacaccatctaaggatgccatgaatagacgggattattggaaaccaggtatcacaaaaggttattagc

SEQ ID NO: 191641 - DNA, 622 bp, Zea Mays
tccagtcatccacagagaattccagatcccggtgacgtccatcataaaaacgtcgagcgtgcttctgtgcttgaagtaatttatctctgacttcagcaagaaataagtcacactcttggagcatgtcatcaactgcctgtctggatgcggtgcctggctggtaaggaagcagggctggcggttctctgccatataccactctgaatggggtggtttgcaaggctgaatggtaagaggtgttgtaacagtattccgcccaaggtagcaactcaacccatgctcgagggcgatcccctgtaaggcatctgagatacatggcaatagttttattgaccactttggactgaccatctgtctctggatgaaaagctgtgctcattcaaagttttactccagatagtttgaacagatcacgccaaatattctctgtgaagaccgggtctcggtcactgactatggactttggaaatccatgtagtcggactacttcaaagaaagactgagccactgttgctgctgtataaggatgacttaaagcgatgaagtgcacatatttggaaaactgatcaacaattgtgagaataactgacttgccatgtactttagggagtccttcagtttt

SEQ ID NO: 191642 - DNA, 310 bp, Zea Mays
gaggatggataggaaggaaatggcatggttcaaaggtaaaattatgctgatgatcatttgaaagcacataatactttttttacaaggggctctcactaattaactgcttattttctagtattctgccaaggaagaggcatacctgtgctgacctccgagctgttcacacggactccaaaagccgatcaatctctgcgatccatggtcaccaatggaatatagaaggaaggggaatgcttgcattgatgtgccccactttctatggcctgcctccttcacctcgagagtctaggcggtcgctgtgttcaaa

SEQ ID NO: 191643 - DNA, 516 bp, Zea Mays
attgtatatcaagattgcctaaaatctcgatgataggagattggacatgctcgttcctccatgccaacattttatccaatcaatttctatatcaaatattgtcttataagtctagtattccacagcatgtaccaatattcttgattttccacctgtacacatcgaacctctatatccgtagcagtcaaatgtgtgatcagcgcactcgaattttacagcagtcagggaactataaccatttcaacaacccaatgtggcaatgtgaatatgagtgaaattctctgaaaatggcaggctcccaggttaaattacctccccaccaatcaaaattcgagcatatgaggatcaacatgactactttctagctcaatttcagaaggctccaatgcacaaatccaagctagataacttgacatagtcaatcattcctaacgaagccaaaggcaatgatttcacagggataaaaagccttgggaccatagctagtggaagcttcatgatgagccagtttcgaag

SEQ ID NO: 191644 - DNA, 305 bp, Zea Mays
gggagtgtcagctccaaggaaaatggtgcacgtgagggagcaggaagacgtccgattggcggtgagaatcagaaacagctgaagaaagaagtgttgggccgccgtgtgcctaggcccagtgggcgatatccatcggacaagtggtccgtgtaagagtgcaataaggaatacttaaactaagactgactacagtgaacgctaggaaatgagaaaatactattgctctccttccatctcctacctctggttctcctctgtaccgtagctgtagtaggctgttaacaggatagtatatgatcattgat

SEQ ID NO: 191645 - DNA, 336 bp, Zea Mays
tgacatattggacaggactacagaaggacatggattcctctcagatggagcatggagcagaagttctgaagtcagcggccttactcttttgtcaacagatgggcactagagacaacaggatggcgatcatttgagcttggtgttcattggggcaaaggatggtggtcttttgacctaggttcagcctgtgtacgtttatcaccaaacttgggtagcagttaaacatttgtttgtcgaaactttgttgtgggtaaggagcgtggaactagagttggaacacttgtcggttggataaacccgttgtgttcataacatctggagcagaagttagggttg

SEQ ID NO: 191646 - DNA, 380 bp, Zea Mays
tgaggccgagcttccaatcatacaagctactgattgatggcctctgtagtgatgactgcgtgggtgatgcacatcttgtcttgaagcaaatggtgggccaaggttttgttccccggatgggcacttggacaaaacttctcacatccatgttcaagttttagcttccgcatcggtgatttccttggcctaacaagacacatgaatgaaaaattcaaattttggcagactcttgactgaaggtcatcaagtttggttagaggagcaagtggaccaatggcggcttgagtttgtgcttgtagtcctgcataccattgctacctatacatgattatcgtttgttggaatagcttccacggacatcaacctgaattatataagtc

SEQ ID NO: 191647 - DNA, 383 bp, Zea Mays
ctgacaccagttgacactcacgccaagctatccgtgaccgacggggttcttctgtcagagaaggacgcatctgagtacaggagcctggcgggggctcttcagtacttgacgctgactcgtcctaatctggcctatgctgttcagcaggtgtgcctcttcatgcacaccccgcgcgagcctcaccgtgcgcttatcaagcgcatcctacgcttcgtctaggggactctctccttaggtcttcacattggcactagatctgtcgacacactgactgcctactctgacgctgactgggcaggctgtccagactctcgacggtccacctccggcttctgcgtctatctcggtgacaatctggtttcttggtcctccaagcgccagac

SEQ ID NO: 191648 - DNA, 573 bp, Zea Mays
ctcatgtcatattgttgagatccattctgataccctgatgaaaaagagtctctcatcctttacagtgcgagcatggtgttttgattttaaaaagttacaaaggcagatgacgctacacattattgagagagggctgcagagcaatgacaagggctgtttatcatacaagatcagtatcagtgcaaccatggtcaatcctgaggacacggatttggggggattgcactcctcgcccccagatgacgctcatcagccagaagattttgaagatcaggatattggcaacagtatgttccctcgtcctcctcgtctgggtgccccttctgctggtcggcagtcagtccattccaggctgggaccacagccgccacaaggaagaggaggggtctcgcgtgccaacagagagctgaacacgcctgccaccaccaaggatgcggctgatttcctgaagctggggcatttaaattccttggacaatgggaaggatgcggctggaggagatctcttgtgtattcccgaagcaacagtgctggacccaaggtcggctgatgaagatctcctggcgccggagca

SEQ ID NO: 191649 - DNA, 428 bp, Zea Mays
aaagttcagtgcatgagattgataaagtgcctttggctgttttggataatcatgcaccacagccatgcaacccagaaaatattgctgggcgagatgcatctgaaacaactattcgtcctgaaaattttgaacagtgcagctttctgtttgctcctgaagaattaaaccaatctgagttgactagtctttataccttgaaaggaaaaggccatgatgtaataactcaaacaagtctgaaccatgacattcctgaaggcagaagtaaagagaaactatcatctgaccctttcctgctagataatgttgttgcagctgattattttgattcacaggctgattatcaacagctggaaaactaccaggactgtgagttaagagctcaagaatttcatcgcatagcactcaacctatgcatgcaacaagaacca

SEQ ID NO: 191650 - DNA, 453 bp, Zea Mays
cggaagattctatacctaggtctttatcttcttatatggggtgaagcagcaaacatcagatttatgccggagtgtctttgctacatcttccataatgtatggtacacttttttacttatcatattttgaggcaaacctcattgcaatgaagtttatacatcgtgacatgccatcttcgatttgctcagatggcatatgagctgcatggtttgctagctggaaatgttagtattgtgactggggagaatatcaggccatcttatggtggggatgaggaggcattcttgaagaaagtggttacacctttctatagagtcatcagaaaggtactttgataaatcatcactgaaaaatgagcagttttttttgttaaatacggataattgtgattatttgcaggaggcaggcaaatcacaacatgggaagacaccacattctgcgtggtctaactat

SEQ ID NO: 191651 - DNA, 371 bp, Zea Mays
ctattcgccagcagatgggtcaggacatagctggcgcttgtggccagttggtggttagcctcccagatgaaagatcagctggtggagcaactcttttgtcagacatcgaagaccttcggatctgacctctcccccaattgttaattctaccattttctcaagatcagatcctcttactaattagcctcacatgatatggtaactggtgctatagtttcaagtcaagctttaaaacatgagatgtttagtttgaccattgttgtgttccccttttgttctgggatacacaattttgctgtacacaatggtgaagacccctgcagttctgctcttgtggataggtggccactgaaacggttggtaacttggta

SEQ ID NO: 191652 - DNA, 840 bp, Zea Mays
agtttcttcgtcttccagcgacttagctcgaaatttggtatcaatgggttggcttccattctgaagctcgagctcagcctcatgtatcattgcagagagatcaaaatcctccacaacattaccacaaataggtccttcaattccatcgtcaaagtccaagccaagaatagcattgccagatgctagggcttccttttcaaactgcttccaaagccgttctcttggcgactcggaatcactatctgagggttgcccaactgggctatgctctattccaagcatatccaggaattcattagcaacagaatctgttgaagcatccatgctgcgtgatctgcccttcctactggcagacatgtaactatcagtcacccctgtgcagctcaatcgccgagaatgcttatcttctacaactggtgattcaaattcctccggctcagcaactgagagctcgttcaaaatacattccaggtcctccagttcggcatctgctccaaactgaccctctgcttcaagagcagcggtaggcagtgaagcagctttgactattccatcctgtttgtcttccatgttctccctttgaacagcaacgtcactgacggccaccacctcagttttcactccaacagtctgatcttcagcgacatcaccacttacttgcaaaggcttgaacgatccctcttcgtcaattttgaaccctgaatcctcctcctggccagccgcattgctggtttccacatgtttgagcctttgcgggtcatctgaagcaacctcaactccatgctccacaacattgaactccaccgtgccccaatcgccatctggatgcaccgagtcccc

SEQ ID NO: 191653 - DNA, 336 bp, Zea Mays
gcaaggaagaaggacggccctcggccgtcgatcgtgtagcgaacgaccacgattagaggtagaaatacccctttacgtattgtatcccaaccgttgacgcgagatcggacggatgcgtgctgatctcggccaaataaaatcttgaccgttgatgtagatcggaggggcgtggttgagagtgggttcaagatctaatatcaaccgcgagtgcgtgatcgtgcggttgagatccttcgataccccttcgtgatgtacactttgctaaagagccctcgggaaactcagaaaccaacccgccgtccataggaatagtgcgatgagtctagggaattcttt

SEQ ID NO: 191654 - DNA, 442 bp, Zea Mays
gttggaaacaggtccaattaatctctcggatgactttgtagtagtctgtgatgcggcattagacacacttgataatgatgcacttggtgaaatgctgggtgatgaaactggcgagagtgtactgttatctttttcagtaagatccatgcttcctgataaggttctagtgccatctgatgcagctgttgttattggtgacacccttcttgatattgccaaggatgagagtttgagatctttacgaacaccgacctttttggacacatcatctgcaccgttacaaggtgactttcttggtgatcccccttgtgatgacattgacgaagagaccagccgatcaattttatcatctgttgttactggtgacacccttcttgatattgccaaggatgagagtttgagatctttacgaacaccaacctttttggacacatcatctgca

SEQ ID NO: 191655 - DNA, 421 bp, Zea Mays
ccagcgcacaccgatttcccactggtcgtgttgctgttcagcatagaatccgaaaccttgttaactgcccctgctgaatcctttgatgttcccttcaagctcgcccccttactccctctttcacctattttgtgatccttgttttgatcctgaaattcatcatcatcattttccccgatatgatccatatccatcggcaaaggctggtcaccttcagcttctgactccaccctgaatttcagttcatataagtagtctccaattaccacatcaactacttgcggaatcaaattcgggtcaagcacggccaccttcagccttgccctgtcaaatttccgagtaaacagcatatccacctcttttgagatgcctagcatagaaccaaccgcccagattactgagtactctctaagttccttag

SEQ ID NO: 191656 - DNA, 299 bp, Zea Mays
gggctacgaggcccagaagcatgacccagcatacgacaccatagggggtaagagacctagaagcaggaggccgaactccaccccaatagaatacaagttcttattgtaatgtttacctttgagctataaaagggcaagataaccccatcattcaagagacatctcacagcttcacacaagctcccaattgtaacacgctccaagcaatactactattaacactacactagaccagggcttcggcctgaaccactataacccactcgtctcagatccaccttcaagcccccgtagctcac

SEQ ID NO: 191657 - DNA, 566 bp, Zea Mays
tagagaataggcattgaagaaactggtagcctgttcctcaagatcatatatagggggaaaaaagcacaaaataaagaacgaactcatctgctgttctttcaataattgtatggtcatcacggatacaatcaaaagtcagtagcaagactgggaagctagctgaggagatggtcatttgtcgtcaagtgcagagattagcaagaaaaaccgcaaaaattggtctcagtgcaatcagctcgttcaagaagaaggccctgcatcttatgggctgtctttgctccaaaggcgccaaagaagatgccaatgccgcttctggacgcagaacgccgccaaggagaagtgagccagccactgatgcgatcgcgaaggacagcagcagttcagccgcgcttaataatgcaaagaccaaaggaaatctgtatggtgcagaaaaggtggtagtgtctctagatgctaggatcagcagtggaaacaacgcagagtttaaagggcttaatgcagtctctggctggccatcttggctcgtgaatgtggcacctaaagcagtagaaggctggttgcctcgg

SEQ ID NO: 191658 - DNA, 366 bp, Zea Mays
tcgaccaacttgtcagatttgtggcaaagagggtcacactgcagttcactgctggtatcgtcatgatgattcctacgatgaagtaccgccgtcggctgcattagctgcttcatcctcctacaacgtcgatcccgattggtacactgacacgggtgctactgatcatatcaccagcgatctagatcgccttgctgttcgggaacgttatcacggcaacgaccaagtccgagtaggcaatggcacaggtttgcacatcttacataccggtcattcttcaattactactgctgctcgtcctcttgctttgcgccatattttacatgttcctgaaatttctaaaaatctcctttcagttcataaattttc

SEQ ID NO: 191659 - DNA, 294 bp, Zea Mays
agaccaactggaagatgcaaaagatttggatgaaaatggcggcgttcacgttttgctgaagaccttgctgtcattatcttatctaagatcaattctaatgaagggtctggaaagtggccttagaaatgatgctccagatagtgctattgcaatgcgacaaaaggttattttgtcaaaacacaattgagaaagtatgtgttgaaattggatgcatgtatttcaattaaattcattgtcgaggttttgcagtggcgtctttgtgaaattgggcttgaggattattcgtttgtattg

SEQ ID NO: 191660 - DNA, 758 bp, Zea Mays
gcagcttccacgagctctttctttcccgtcgtttccctcctctcctacgcaacagctctcgcccagtttcccttctctcacgtgcagtagcagctcccacctcccgcgtgccttttaaacttttatgcgcttttccatgcgcccaatcccgcttccacgcacgtttttccgttttagcgcgtagagcgcaaattaagcgtcgcctacgcgcgcccactgcggaaaacaacacctatggcataagcgccgcgctaaggcatcgcttagcgcctaatcacgattaggccggcgcttaagcacgcttttttgaacattgatccagagacagggtgaagtatcctgagacggagggaagggtagagcgagacaggagagatcaagcgatgattgccgatcggacgatgtgtttttttgacaacgtggataggctcgtcgttgccgttttgcacctgctttaatatataggaaatgacgcgcacaaaagagaacaaaaatcagcaaggcaagaatgaaagaataaaaggcaagctgaggaggcagtatcagaccagtgaggcgtcgggggttgtcggatcggtgatacaagaatgcaagattcacttcttgagaaccgaaggttgtcggaacgatgaggtgtcgggaagtgatattagttgtccttctacaaaatttgtcatgcaagtggttagtactagtatatatgttgatgatgctgggcttttcttaaaaccgacaataatgctaggcttatatgctat

SEQ ID NO: 191661 - DNA, 496 bp, Zea Mays
cctacacccatgcctgtaccaatacggtacgcactgttgcgcatgcgcccttccccaatgccgccaccccttctccatcgtcgtcgccctcctctcttgtcgccctgttgtgctcaggcagccccctgctccagcaacagctacgccccctccatcgcgcgacagttgtagtctgcagaggccccctacaacgtgctcatgtcctcctcttttgtttgttcagtggctgaaaaggcgagtaggcgaccactcctctgtttagaattcagagaccaagatgaggacctctttagacggtaattgctctgatattttggttgttcggtgttctctgttcacttattgagtagtattgtgcccgccttggcctcctcttgagttgtgcttcacttgattgttgtgccactacagatgagaataggaggcagcataataatgttgaagtcatcttcccagaatctgtgttgcccccgacccagaactttggcagtggcgc

SEQ ID NO: 191662 - DNA, 1045 bp, Zea Mays
agcgagcgaggtggacgagggtggcgccgcgggcaaggagcggtctgatggtggtctggcgaatggggcagttgagggcagcagcattgcgggggaagtgccagatgtggctcctgtggtatctgaagcacggatggacgaggacgggggttgctccacaggcaatgagtactctgaaatgaagatggaggtggatggcggctgcgtagcagaacgagagggcgatggtcaggaacaggaacaagagtgcactgcagctgctgtggaaagcgaggttaagacgggggaaggtgacggcggagtggtgaatcaagggactacggcacatgctgggggtcttcaggttaaagaggaggtgggggaaggcttggtgggccgctacattggacgtagcgctccagggcgcacgaggattcttattgggaaggttgtgtcctatgatagcacagctggggtctacagcctggtgtttgaggacggacacgctgaggagctggggcttcctcagctccaggagcttctcatgtcggatgataatggtgcattaggcatgaaggtgagctgccggaagaggaagctagacttgctggtttcatcagggagcgccttggaggtcaaagagccaccaagtactaggcagagggttgatggatgcgagatgtctgccaggcctgatgagctgcagcatagtgcgtctggctcggatatgtctgaggatgttgagtcttcgagcaattcatcagatttcactagagaagaaacatctgagccatgccctcctgtacaggctgtggagttgcctccgtcgtcaggcgacattcctgtgccagaagagtccataagttctctcctctctgtttataacttcttgcggtcgttcagtgtgcagctgttcctgagtccatttggactggacgattttgttgcggccattaattgcagcgtgcagaataacttgttggatgctgtgcacgtctcgctactgcgggctctgaggcggcatcttgaatctagatctgcagaaggatctcgatcggcttcaaat

SEQ ID NO: 191663 - DNA, 284 bp, Zea Mays
tctaataataataaactaacttctaatgcttataacatacgcatgatggcttaaactaggatttttattctataaaataaacacctatatagttgtgccataagctaagaaacaaaaccgatcttctttttcgttgatgcgacgggcctgaccagtcttaaacctaatgttgtatacatatttgcttgcaacttggcatatatggagtggttaataatggaagaccaagatggaatcgtgtatagaggagatcgatcgaatcgatgatgggtatatatcacacc

SEQ ID NO: 191664 - DNA, 951 bp, Zea Mays
tattgttaatgaaggttgagggaggagcagatatttgtgctacatttcaatggtctcagaagttactttatgatagcgggcgtttctctgttgacatacctttccgttttccgtactttgtgaatccattaccaaaagtgttcatgaagaaggaaaaaattcagttgactgtgcacagtggtttcagtaaagagattttgctgcaaggaacaagccacccgttgaaggtgatctaattttattaactgtcctgatgtgtgtttggagcattaggaactctacataggtttgatcttccatattttatttttatttcaggaaaagagtaggcaaggagataaattgtttttccatcatgaagccattgttgagaattggtcgatcaaagatttcaatttttcatacaatgtgagcttttctgcaatgatgttccctacaggccgatgctgaactaccttgtgaatctagctaatcatgatattcagctgataaaagtttataatcttgcagaatattcttttctttgtctaatttaaattttatgttgctatgtgtaggtttactcgggtgatttgtctggtggtgtgcttgtgcaaccagcaacattatgtgactatgatgatagagatatgttctgcatttttcttctacctggaagtggcaacagaaaggttagttgctgctacttgcaacattaccttgattgatatccctgcaccaggaatgtcaagctgatacagctccttttaagctgcatgtaactatattatgagattctcctaaattgccattcatctctattctccttttagtacctgttttggttcattggctcagaagaagttcgccatcatgttgcccacttgccctctttgtatttcaagaaatatgccttcatggcccttcatctcatctgagctatttcaataggtatttggaaaagcagttgtg

SEQ ID NO: 191665 - DNA, 296 bp, Zea Mays
ggatactcgcaaacatacaattcgtataggactaaaatttaatgctcacaagtaccctggcaaaatgctcgtacattgctactgtttccatttatgcttgaactagtgtggttaatttgtgggaactaaagggtccatctggaaagtaactgcctggttgttaggtgagacgtgtggagaaaaacaaatgtactctacgggcttcgcttcgcgtgtgatgcgtgacacacgaaactcatgttttaaaggagtagagatagagatattcctcaacccgttttttgacccccttggcc

SEQ ID NO: 191666 - DNA, 379 bp, Zea Mays
ccgtttttaaatacagtatgtgacgtttacgagtttaaactaattgtgaaaaataaggattgttttctcttagcttagcttttgtacctcaaatcctcaatccctttatttgctttcatatttctgaggatcatgatgtgaatgagagtcatgctcattgtctttcatgaatcgctcttattattcagcagcttaacatcagtgttgacttcaatttctagtccatactcctactttgtaaaatttgctgacgcaaatgcttccaaacttagcatcttctatggcgacatgataataaaagttacaggaaaatctgacacttgagcaactacgatccgggttcaggataagtccaaatcgaacaatgaagtgaagtttg

SEQ ID NO: 191667 - DNA, 1055 bp, Zea Mays
actcaacgcagccgagctcgacgtcgcgaccgggggcgtcagcttcgcgcctcagggctccgaccaggtgcttgcccttgcctcgcttccgcccgtcggtgtgcgcgggtgtcggggtgtgtttgatctgatcgtgtaaggttagatggttagatgtggcgatgttttcggaggtgtcagctagggtttttagatggcgttttttttttgccggagtaccagtcgcttaaagttttttatgtgctcagagcatcttcaacatttcaagctggcattggtgccggtctgccggaggaggggttgtggggatgatatcggcgccttaagaaatcttcagtttcttagggctatagcgacctcagaatttcttgcaagttgattgattgaatcttttgtgttcaaataattctagattaccacctagaccacggatataaatttaactttgagtgaaagtcccatatttgcagatgcacacggtttgatacttacagatgcatatggtacttacaggtgcttgtatatttgttgaagcttaagagtttcgtgtaatcatataaggatgttttaaatctctgggtgggaatagaacttttgcacttatgatggtttgcaaaaagcaccttgtctggatgataacagtcgtcttggagggtttatgattttgtttctaacaatgccctcccctaacactttttgctctgcatttattgtaaatgctgctataatttgaatcaggtgctacaacctttggaggttaccaacgtgccagaagatgagatcctgattattcgcttcaatgaggtgctttctatcggggagggaactttgacgattgcattcaaggggactttgaatgataagatgcatggattctacagaaggtaattacttttgtagttaagttttttttataaatcaagcaacatattcacaacgtaactttctgtttatagtgtgtatgagcttaatggagagaagaaaaacatggctgtaacacagtttgaaccagctgatgcaaggcgctgcttcccttgttgggatgagcctgcttt

SEQ ID NO: 191668 - DNA, 770 bp, Zea Mays
ccaattcttgttccttttttaagactatacattaggaaacaaatcacatatggttttttgcggagggaaatctcctgtcacactaattttccacgttacctgtacagcctcattataaaacaaataaaaattagagagcctcatgctctgttcattggtgcaaaatccagaagaaaaaaaaatcaaaatattcaagctttatcacatgagagtgtccagagtatccattcttgattttgcgacagcagcacagtcacgtgcctgcgctcatgctgagttgccgctggcagaccggagactggagtactagacccgggactcgggaggcgatgtcaacgggatcccctgtccccattcatagcaattaggtgcggcagccatccagcggtccagccactggcgagcatgtgaccagtcaccagcatcagcatggatggtgccatagagcgtggagtgcccttgactcggtgctgctcctgtcctgagtctgtccatcgacggagatgccactgctggaccagcggtgatgctgtccagtggcgacaacctcgagctccatccgtaagccttttctcatctgcatctcgacgccttctaaccatgcagcaaatagggccacgtcccatctaggattgagctcgtcacttcttgaacccctgctgcaatggggcacaccagtccataagtggggcctcgacccatctcgtctctgtaccttgatttgggtcggggcgtacctggtacgcggttcgcagcttcgaccccgaacc

SEQ ID NO: 191669 - DNA, 808 bp, Zea Mays
aagaggtatatatgaagcagccacctggttttgaggactcttctcgtctggattttatttgtaagcttgacaagtccctatatggcctcaaacaggcccctcaagcatggtttgctcgtctcaattcccaaattggtgcggttggggttctcagcctctaaagcagacatctcaccttttctcttcaacaaggatggcattcagatttatttcctcatttatgttgatgatatcctcatcattagttcttctctcgctgccactgatcggttacttggatagctatgagatgattttgcggtcaaggacctagggccactcagatacttcttggggattgaagtgtgtcatcaccctgctgggctcactttgactcagcggaagtacatacatgatctcttattacgcacaaacatgctctcagctagtggcgttaccaccctcatggtaccgaccgacaagattgcatccatggatggtgcttgtttatctctagatgatgccaccaaatatcgaagtattgtgggcggcctccaatatctatctttgactcgccccgatatttccttttctgttaatcgggtgtgtcaatatatgtaaacacccactacagttcattgggctgcagtgaaacgtattcttcgctatattcgccacacaattgatcttggtcttcgctttacaaagtccagctccatgcttctcagtgccttctcggacgctgactgggctggcaatatggatgatcggcgtagtacgggcggttacactatattctttggtggcaatctcatttcctggacatcat

SEQ ID NO: 191670 - DNA, 298 bp, Zea Mays
gatcggtcagcgatagcgcagcgagcccccccacggcggcggcggccgggggatcgtcgtcgtcgtcggagttgactagcttgtcgaagaaggcttcgtcggtctcgtcgaaatccgaggccatggagtaggaggaggaggggaattagccctagtccctagggtttggttgcatgaaggggggaggaagaaggtggatctggtcgggccgctcttggtttcgctttggtggacttccgccgcagtggggaagggaggagattggagactgggagcagagggaggagacgcgtgtgcg

SEQ ID NO: 191671 - DNA, 274 bp, Zea Mays
acaatgatgatcgatcagtccacatgttattgaaagccgtgctcgtcctgcgtggccgttgggtggtggttgacagggctcaacgccagccgggagggaggtggctactagaatcgggtgtgggcggcgcgtgtagacgatggcctttggggccgcacctggtgtgggagcagggcatcatgtcgcgtggggatggaagttgggtgggaccaagggtgctaggggcgtgcactacgctagagcctaggctgcttggggctagaaccctggtagt

SEQ ID NO: 191672 - DNA, 2020 bp, Zea Mays
agctgatccctagaatagatctacaagctttggctagtaaacttgtaagttttagcctttgtttctcacaagagcagtgctacaagtacaactattgggtacaacttgagtattaaagacccaaaggttaaaatgacttggataaaaagctcatagatgcattgaacagttaaatacatggttgtacacttgtacttgaagttgtactcaaagccttacgcttcttacaatcttgcacttttgtttattattacctatcaactttaattgcataaattaaggagtggacctaatctatttgtctcagttcgattctctagtacgcacttacgttaacaaataagttacttaactacctaaatgtgtattcaaaactgaggtctcaagtccagtctgatatacaatataagagaataaattgtaaacaataatacaatatactcccactgactccaaatttaagttgtttaggatatcaacagggtatgatactttgacttgcaatttttataaaaccataccccattccatattatatgtatatgatgtttttctctctctagatatgtaccttttgctatgcactttgatatacaatatgtatagataaaaggctctgtttggaaaagccaaaatgtcttatagtttggaacagagggaataacattttagataatattatggaagtattttctgatgaatctagtaacatcaaacatgtgttgtcaaacgggaaaatattcagtgcaaaccctttaatcgatggaaacataaaagccttttacaaaaacacacttcggacttcggagtttattttgttgttgcttaagataaaaggctttgttgttgttgatacttaggaattctaaaaaaactgaaaccatgcatatccacagtgcatctatgtatatacattttcgcaaaatttgagattcaaaattaatattgaaaaaatcacatgaaaataacaaatttcaggttcatatgtattacgcactagaaaaattcctaggaagtttattctctagtgcatatgcatctcaaatttgttattttcataggattttttactaaacgaatttgaatctcaatttttgtgacaacgtgcatccgtagatgcactatggacatgcatagtttcaatttttttaaaaaacttgtaagtatgtttgtctaaagggtattcacgattcaaccgagtggaaagtttgcaccaatattttcctgttgtcaatttatataacatctcatatattgatagcatagatcatatttaagaagtttgaccgactaaatcctacaacaacctatgtctggagttggtggagctttcatgttttataactgagtatactatctttccatatctcctggaatgttttcctaaagcaaaaacatcttatgatctgcgatatgaagtagttttctgattatcatgtttggttgttattttcttgttcttgattgagccgttgagttaatcaggtaattatgattcttatccggatgcacaatttgtatttcaggaaggggagtctgtaaagaagaaagcatttgtcccaccaccacgattcttcaatatcgatgaggcgaggtgacatgtttctccttgtgaattgatctaactgtttctgtcattgtttgctaatcttgtgtaaacagggagatgcatattcgtgtggaacggaggcgagataaagaatctggggagtactttgagtgggttgataatttgaagttcaaagatggtttcttgtacaaatctgtctccactaaatcgatccacacaaacaatattcaaccgaattttgacgaacttgagaagtttaagaagcctggtgatgacatgaatggcgacatggctagcttgtccactctgtttgcaaacaggaaaaaaggacactttatgaagggtgatgccgtcattgttattaaaggcgatttgaaaaatctggagggttgggttgagaaagtagaggatgaaaccgttcacatcaggccaaaaatatctgatctcccg

SEQ ID NO: 191673 - DNA, 436 bp, Zea Mays
gtgaagagaggatctccaatccatcagattaagaaaaaagaataatcctctatatcagacaacaggagatcacgaaaacatatataaacctaagttgtaggtgagatgtgctacagcagatagaggattttttgtattccctttatacgtggcagaattttgtttttcctttctggagggtttgtccttcatcttcgtcgtccttcttgttcccgtccgtcgtccgcatctccctgctcatgggatttcggtaggtcctgtccgcccgcctgctctcacgatgccttccatctcctgcttgaggtggcagcgtttgcagagcggcgctgcagctagcgactcatgagctccggtgatgcagtagcggcgtgcggcagcagagcggtcggtgctctcacggcgactagaagaggaacaaagaggattgagaaaaaat

SEQ ID NO: 191674 - DNA, 426 bp, Zea Mays
ttgtaacaaaattcagcccatggtaaccagtggacccaagtggagggcctctcggcagctaggcagcgaagatacatctcaataatacgattaaccacctctgtctggccatccgtctgagggtgataagaggaagaagtgaggagctgtgtgccgcaacgcttgaaaagattctgccaaaaggaactagtgaacactggatcccgatcggagacgattgactccatcccatgtagtctcacaatctggtcaaagaaaatatcagcaaccaccgaggccgtggcaggccgcttgaaggcaataaaatggccatattttgataatcgatccaccaccaccaacaaagccgtcttcccctgagactttgggagaccaaccacaaaatccattgagatatcagcccaaatatgatgaggtattggcaag

SEQ ID NO: 191675 - DNA, 714 bp, Zea Mays
aagtcatacccggtgggcaagaggtcagtctggcatcgtttagaagagcccagcaaacgcctctcggtgttcaagaggctatcttctcagaaggtctcccccccgcagtgcagagctgggagtgctgctcctccaaagaagaagaagtcagtttgggtgcgtatctctcccgcaccccaaacatccgaccagaagactaatcagccatctccaatgttgaacaactgtgccccgggtgttgatcaacgttcttttcgcaacaagaggaaaagaagaaggtccaagagcaaaaaaggaaaaggtcctgctgaagctgcgggttcgggggtgtgttcagattcccctccctcatctcctgaagctcatttctcccagtcgaggatggaattccatgccgcatctcccccaaccattgaagcttcacgtgttcttacgttcactgatgagatggcaagggaagagatcaatttacgaaaagccctgttcgtcaccatcgcaggtactagacctgtggtacagggatcggaggtgttggatgaggtggctcgcagctttggggtatgtattgataacatgtccatccaacattcctcaccagaggattttctgcttttcctgccggatgaggacactgcctccaggattttcaatgggggcagattattcactggacctcgtttctgcttaatgttcaaaagatggtctcgtttctcg

SEQ ID NO: 191676 - DNA, 353 bp, Zea Mays
tgcaaattttccaatgttcttcaacatgttggaattccttatcactaaacctctgctagttgaagttcagatctgcccttcattgttagtgaaacgtcgtggccaaaattagtactagtttaagaccatttttataggtagtctaacaaaatctatgagctcagcagtgtttcaactacgcttcaagttcctgctttacctgcaacaaaatgtatgacagtatgagcaaccacctgtttcagtgctgcatacaagtcggtttcaggacagctgtttcagtgttcttggataaaaaaagaagaaggcatgctttgcagctgacaaactcacagcagttaagtggcagttgctta

SEQ ID NO: 191677 - DNA, 341 bp, Zea Mays
ccaattcagagttatgccatttgggcttacaaatgccccggccacatttcagtgtttgatgaatgtagtatttcagcactgtatgaggaagtttgtgttgatcttcatggatgacatcttggtttacagtcccactttgcaagctcatgtggtccatttgcaagaagtgttctcagtgttgcaacaacacaagttgtatgcgaagagaagtaagtgttctttagctgtgacacatattgaatatttggggcatgtcatatctgctaatggggttgccactgacccaagcaaaactgaagcaatgctcaaatggccagtacccacttctcacacagagttga

SEQ ID NO: 191678 - DNA, 301 bp, Zea Mays
ccggctgccgctgctggctggctggctctggctcacagctacaggctacagtgaccgccacgcaacccacactgtctctgtcctcgtctccctctcccctcctagctctagctggataggtgggctctggggaggaggaggagggtagctaggtagtagctgcctataggcctcggcccccattcatggccattaccacgatgtgtcaccccaccacaccgccctctccgatgctgcctccctcatgataaccctctccctggtggttgttctttgccttgttgccgtgcagcctccaccc

SEQ ID NO: 191679 - DNA, 374 bp, Zea Mays
aaaatcaacttatacttttgagaaaaaaggggggaaatgcaattcatacttcacgatgtaacttcatggttttggtcataatggatcatatcacatatgtttaggatgtgttcattctctgatgatgtgacggtcatgtttgaagtttttgaggcctgtgtggaatggctactaattctctgtttcagaggacagtcatatggaaggtggttcagaatatgattccagggaagaaaaaggatcatggttctggaaaacatgcgccttctggtatcatgtggtccttcgctgctggctccaatttggcaacatctaccctcagtgctgaaaaggagtcgcggaaaaatctgaacaagttctacaaagaacttcga

SEQ ID NO: 191680 - DNA, 629 bp, Zea Mays
ttcctgctggtcccggccgtgtccatcgacatgtgcgtggggagcttgatcctcttcatgtggaacagggcggacagggaggacgcgcaggtgttcgcgccggtgcttgcgtccggtctcatatgcggggacgggctcttctccataccatacgcgctgctcgccaggtacgacgtcacgccgcccatctgcgtaaggttcatcggcagagtgcagaacaagatgctggacgactacatggagaaagtcgcagcatcccgatgatcgccctctcaacatgcttggtctgtacattctttcctgctgtcaggttttagtcacagcctgtgaagtaaaaaacggattgtttgcaagaagagatagttttatggacagtaacaaagagattctgtaatttttttacagtttaaaagctaacccagtaatatactgcactgaaaaggacacccacgacagttttcttgcagagcaattccaaagaggagacattcaatgaacactctttgcaaatctcttccacttcaacttttattatctatccaataggcgacaccacttcttaccccgtgcttccttcttttctccttttttcatataaaaatattcctcccccttcatgctgatctctt

SEQ ID NO: 191681 - DNA, 759 bp, Zea Mays
actctcatcgctttggacgtgttgcatatgatgactgctgatagaaagattcaatcatttctgcgcttgatattcctgaacatgtatgttttctcatacccttttcatgagtttgtctatgtattaccctatggatagataataaatttaacttctaccagttacaactaagggtgaaagtcgttcccttgttgtcatgcactcagcatcgcactttggaaacatgttgggtaccattcaatgaaaaaaatattctttaccgcttttctgccatatatatacacagtaataggcttaagcagaaaattttgtactgtaatatattgttcaaaggaaagatattttgataactttttccctgatagattaagatttactccttttctatttccaaaaagttatgtgaatagcaatcaacttaactggtagctatcaataatttactagtaggttttgttacctaaatcttccatccttattgccacgaccttgcagtaaaactttcaagacgtacttccttgctcgttttgtaatttctctgttgctaattatcagcattacaattgtgctaacaaggatttttttctaggttaggcctgaaaggttcagttctctacgccagaggttgagttctattgaagcacagaaggtgtccttggagactctactgccttctggacacaaaattaatgaattgttaataaatttctggagagtttgcaaaacagactatcaaccgaataacaaacacattcttgg

SEQ ID NO: 191682 - DNA, 309 bp, Zea Mays
gtggcattggtgaagaagctgacatccatggatcggttcaacttctcatacaacaacctgactgtttgcgcatctgagctctctgcggaggcgtttgccactgcatttgctcagtccaggaatgactgcccaattgctgtgaatccagacagtatcgtgaaaagtagagggaaacataagggaatgaagttggttctggctgttgtgctctccttgttcttctctgttcttgggttgctttgcttggcagcggcatgtcgaagggggaggaagaggtgtgatgagctgcctgtggttaagcaggtgtcg

SEQ ID NO: 191683 - DNA, 384 bp, Zea Mays
ggcgagccacaggacgcgagcagatgcaccacgctcggagattgtgtcggcgaggttgtcggtgatggagccgttgatccaagacagaacaacggcgttcatgcgagtccagtcgggcgagtggtggacaacatcggaaagcacgtggcaatccagagagaatttggtgagggttaggaggaaggactcacgccaccgagagtagaaggtagagttgacgtcgaggaggagtgggacgagggcccggatgttctgcacggcgacggcttgagcgtgcagattgagaagagcagccgcttcgtgttggagaagagcggcagaaagctgggcgacggagtcagcaccagtgccgtcggaggtgatgacattgatggggggagagag

SEQ ID NO: 191684 - DNA, 309 bp, Zea Mays
gtaaccgacgcggacgcgcaggaggaaggggcggaggtagaagatgtggaacccatggtcgtcgagctgctgcttcgtcctgcgccccaaatcagcagtacgtcgtcggtctccttgatccaccattctacaacagaaattgtaggggaatggatgtgctgattcaactggtcatagaatttttgtgcagatctcagcatataagtgcatgatctatggcaacgctactgctattctgctacctgaacctgtcgtactgctactcttctactctcttgtgagcgacaaccaaaggaagctcgttgctac

SEQ ID NO: 191685 - DNA, 296 bp, Zea Mays
aaatcaatccaagtattggagccgtgagaggagagggagcagggaggtgaggatatcacgcgcaaggaaccagtcggccaaaaaccagagagatagccagttcccccagccagggaaacgcccgctcctcttaaggagctgacctcaagagattgcacagaagtggcgaggaaaccggccgagccgttgagcgccgccatcaacggagcagtagcaaccaccgccgccactcgctccttggctgccgttcggctcgtgcccaggcaggcatgccctacgcccgctcgggcttttca

SEQ ID NO: 191686 - DNA, 728 bp, Zea Mays
taagttcatccagcatatcatctaacctagggataggatgacaatatctgatggtaatgttattaattgctcgacaatctacacacatgcgccacgagccatctttctttgggactaataaaacagggacagagcaaggactaagggactcacgcacataacctttatcgagtaattcttgtacttgtcgctgactttccttggtttcttccgggttcgtcctgtatggcgctcggtttggcaaggaagcccctgggatgaggtcaatctgatgctcaattcctcttatcggtggcaggccaggtggcacatcgtttggaaatacatcagcatattcctgcaaaagattagtgatagtagaaggcaaagtagatggtatgttgtgaagtgagaacaaagcatccttgcaaataaatacataacagattgaagcaacatcatttaattcaagcaaatcagatctggaagcaagaaaacaagcacttttcagttgtatttctgtcttcctcacttgagcagatttagaattgtcactcttatgttgtaccaactcctttgcagcacctagatttttattatgaacagatttatttttctctttgcaagctctagcaacttcatccttcaaaatagcatcgggggacatggggtgcaatacaagcttcttctcattatgcataaaagagtagtgatttgttttaccatgatgcacggtgtccttatcaaat

SEQ ID NO: 191687 - DNA, 317 bp, Zea Mays
cgactacaaagagcggcgaactccggcgagggcacctcggccgatcgcgcggcaagtggcgcggtgaatagtctagcgataaggctccaactcctctccgtgttgagatcttttaccccaacaattatccgcgcgccactggccacgaatcacaacgccggcgtggatcgcggcgcgggttcaccggcggcgggttcagtgaatctgtgatctttttcaggcactgtaccatagcaatcttcttcagtgtgcctgaccgagcgactttagaggcatttttctgcgatttccatacaacaaactaccaactcgattat

SEQ ID NO: 191688 - DNA, 331 bp, Zea Mays
ctcgctactggctgagagcctccataatcgccttccgactacaacgagtcgtgcacccacaccacactttggtttttttggtaccactccctcctatgacatcttcttgtttttgggtgtgcatgctaccccaacctttcttccactgctcataagcttgctcctcgttctgctcaccgcgtcttcctcgggtactcacatgatcataaagggtatcgatgtcttgatctctccactcattgtctcttgatctcccatcacgtcaccttcgacgagacgggcttcccattctcgactacctcgaagccctccacctacttcctcccttggt

SEQ ID NO: 191689 - DNA, 400 bp, Zea Mays
gctggattgcgtggtggcgaagagctcgttgtagccggagctggagagcgtggtgttggagtcggtggagacttgggggctggggtaggcctactcgaagaagggtcgcctactcccccggctccctcaaagtggacgtactcggtggtgaagtcgtcatacgtcggagtcgtgtcgtcgtccaccgccttgtcccaggcccatcctcgcccttcgttcgaacactacatcgcgcgtcgtgcgcacacacagtgttcatgggtcaaggatgcggtaggccttcgagccctccgcgtagccaatgaacacccctggggtgctcctgtcgtcgagcttgccgatgtgaccaagctccttggtggccatgccaagcctcgtacggtgtcatctcgttgagtgc

SEQ ID NO: 191690 - DNA, 298 bp, Zea Mays
gataagcacaacaacagcccgcgagcccaagaaccaccacgacgctaacatgccggacacgcggcagtggagtgacggaaggcacgacacgtggtgaggagttggagcggtggccgattcagataaacgaaagggataacggcagggagataagatgcgtctgcgaaacttcacagaaacgatgttacgtgtcgcaaatcgtaggcaagaagttatgcacagccgcccacagatttgcacacgccacgcgtgtcacgatgtctggccacagatagacatgtgcaacgcaagcatgaaa

SEQ ID NO: 191691 - DNA, 369 bp, Zea Mays
tcgaaagctgaatattttcttttagaatttacaagttcgacgtatcatggaaaacatattaatgattcacatgtgatctcttttatgtaatctttcatcttttctttctgttgtcagataatggggatgcacagattaaacaccttatgctgatattatctgctgttgttctatggattgaacctcctgatgtaatcacagcatcaatccgaaatgggggaagtgaaaggttctctcaggatccatctttgcaatcttgatttaacccgagaaaaaacttgagaaatgctgatgagcgagatattcattgtgttgcagtgagttcatagatggttgccatgccttgctttcaatcgcatctttaactac

SEQ ID NO: 191692 - DNA, 387 bp, Zea Mays
ttgagattctgagggcacatattgaagatcaatagtcttctgctgacaatgggatcgagtaaaagatgcatcaacaccgatgtgtttagtaagttaatgcttcaccggatcatgagcaatatgtatagcactcaagttatcacataacagaggtgtagacgtgtcacaagaggcaccaagatcagccaagagccagtgcaaccaaataatttcagcagcagtagtagcaagagcccgaagttcggcttcagcactagaacgagatatggccgcttgcttcttggatttccaggcaatgggagaagatccaaggagaatacaataacctgtagtagaacaacggtcaacaggatcacttgcccaagtggcatcagaatacatatgaag

SEQ ID NO: 191693 - DNA, 465 bp, Zea Mays
gtggctagctactaaacaatccattctcattcctcgttctcaaacaagtaagggtacaacaattaacttgttcttcggcgtgcagctgctgctaggatgaggtgcttccgcatctgctcagtctggtagttggacaggaacttcatgcacataggcggctccaccttgaagatggccagcagcgaagacggcagcgcccagagcccatcgccacagatcaaaccagacgccaccacgaccgacagcaggttcgctgcctgcttgttccttctcctccacaggatgactaggaggctccccaggcacatgtctatggcgaaggtcggccccacaaagaaggggatggccatggccatgatgtttgggacgtagcccttgatcctccagccgttggccgcggcgacggccgccagggcatccacgcacagcgccacgaggaagcaaggtacgcagagcatgacggag

SEQ ID NO: 191694 - DNA, 364 bp, Zea Mays
gtcggcccgctgccgtgtagcggccatatccagttcgagtccgacaaggacctccttttcccaggatagtgcggcggacttctcctgtcgacgcgcatcggcgacgacctgctatagtgctgtggtggccaaagtagcggcgagggcatccttctgcagcaggcacgcaacttcctcctcagcagtcgccaggcttgaggtggtgtcgtcggccatggttagggggtggggctgagacagtggctggctgtgatggataggtaagcggaagtgaaacctaggtcttgtgataccatgatagaggatatactgccatatgttttgtgtgtcattgattgaggagaacaatacacatatataggca

SEQ ID NO: 191695 - DNA, 468 bp, Zea Mays
acatgaaggaaatctaaaataagtcgtgagataacttaaggtgcttttgcagagaaggtattgcacatttcatactttaagatacaataattatgtgtccatattcatcttatatggttattcccttcttatgtttgaatgacacatccaaaacaacattattaattgtttattttccagcaggcaatttgcatctcccagcagcgatggttagagcatctcagagcataaatctaaacctgtcgcaagatctattcatgacaatatgagcagatattcttctcttagtagttagttttaagacacaactgaattcagtaggataagctttcgatacaaaacattctttagttcctcatgagaatggtcatggcaaatcattgggcactaagttgcacacgcttggcagtctgccttcacgtgtactacttaatggcaccgatggggatgatcatagtgaccatttga

SEQ ID NO: 191696 - DNA, 460 bp, Zea Mays
tgcacttcttgatgaagcttggtgagtttgaacttcttctgttgcatgaaatttaaaaggcagctgtaaattgtttatttcatgctataaagagcattgtttatttctatttccaaatcaattcttctaataaaagttctttggtttttggtttatccttcgtgcaccagtatgtttcctaagtgcacacacgaatcattttctcagaagttgtatgagaaattcaggaataacaaaagattttgcaaaccaaagctttctcgcactgcatttaccatacagcattatgcaggagaagtaagcaattttcacaacatcacattcttgtcagtacatttgcttgagtacattcctttcaattttattttattttattttccaggtaacttaccaatctgatcagttcctggacaaaaacagagactatgtagttgtagaacatcaagaattactgaatgct

SEQ ID NO: 191697 - DNA, 1523 bp, Zea Mays
gtaaaaagtttgagcttcatcttcagtctcctccaaggaggtgagcctcatttaatgttcacctggaaactgggttaagatggtggtcaatcactttagtttttttgcaaaacaataaaatcttgtactgtcatcaatcgccaatccctatcatactattatgtacaatcttttattgagcgcgaaagagtagaaagagctaacatagtaagccaatgcacaagaaagtctcactaggaattcataataaaaaatacccaaaactaaaagaaaccaatactatgtagcgtatatgaattcattataaaaaaatataaatgaatccatcttagaaaataccaaataacaatgattcctctgacctttcaataatagcatagaaactacacctttcagaccattgccttgattgtttcatatgttttgcctaaaaatgatacaacttacatctagaatttttgtgtggattttatttgtcatatctatggtctgcaggcttccagctattccagatcagaatcttgtgtgttcaaattggtgccttcctattctgtgtacaaaaataattgctaaatactgattacatgacaaaaccactttgtcaagactctacatagttcttgtgtacgtacttggcttcctattttgtgtgtctagcagtgtgttttctgtgttttcagttatgactattgttagtgtatttcaaaattaatatacttcttacattcttagacatataaagtcacattggggcactagatatttcacacatggaaaacaagcagatgaatgtaactgatctaataagagtaacttcctatatgtgcttgtagtttccagttaatacttaatttagtgtctttctatggaaacgggaaattaaccttgcaagttgtaacaccatttggttaacatggatgtggtttgtagcacgtgaggggtagaacgatgtccgcctctttcatttatggttcatggtacaagtctatgagagatgtctgttaattgaaaatcatgatggttcatatatgaaacagaataccaatctctctagaaatataaaagtatcaggggtcagagattaatctcgttggggactgcaactagacatcactcggttctagatcaaagtagatttattagggttttaattttttggctgagatgtgtcaagttactcttattcatatgttccatttttacctaatttgggatctcatgatctttgctggttctttcaatatgttaaactgaaataacaagcacttagcagctagcaacatcaagatgcaaggaatctcattgtcctagatgttaaactaaaatagcagttagattttcctagatgttaaactgcagtagcagttagattttccatgcaagatccttaaactgatcacttaatgttcacctggaaactggtttaattgttccgagttgagagttattgtattcatcattagtgatgtctctatctttctatataggctcaagtaacctgtttctatttgattttggtgccc

SEQ ID NO: 191698 - DNA, 1031 bp, Zea Mays
aaggatcctgaagcatctaatgaatgtgagtggaagtatctaggaaaaaataaacccacagatgctgagatgctgagaacatatgcgattgggttgcttgctatggcattgtgcaggtactattagtgtcctcattgatttatcatctggtgtgataatgttataattttactaccgaatacatcatgatattcatccaattcttgcacgtttcattttttcacctcagtggtgggcaattggtagaggatgtcttgactttgggggtgccagcaaagctcatgcactttctgcgcataagagtccttggtgatgcctcatcttctcaaagagatgctaatcatccacaagacaccaaatatcctcgaggcagagacgataataggggtaaatcacgtctggcccaagatggttctcggttggatggaacaagggttgggtatggaatattgaccaacccaacagcagagaaggacaatgaacctggtgttgtaatgaggcaagcatatggagaaaggtcattggatggcacttttgcctcatcagataattctgacgtccctgaggttgattggaccaatgataactcttatggcacaattgtttgtgacacaaagtcaaaatatggggaaaagacttctgtgacaagggctcttaaagatgaagagatcagcgaaaatggtgaactgttgaagagaaagctgagtcgagccccctctcgacttagagtgaagggaaaagcaggagacaacttgcctgaatgtgaaatgacacctttatcaccaacctctggattgagaatcggaggtcgggcttccagagacaggaatgtggtgagggttgatgacccaaagaaggcaactgatgtgaacaatagttctgcaggcctcgagttgtttagcgctatttccaaagaagaatatgaagatcgtttgagggattgcattattggcttgaaggatatatctgacatcgttttgaaggcagtgagagctgctgaggctgaggccagatctgcaaatgcacctgat

SEQ ID NO: 191699 - DNA, 665 bp, Zea Mays
ctgttctataagaaatttctagctttgtttgatgtgttctttagacatgtgtttatgtggtctgtggttcttcttagtttgaccgatagtgcaacttatgtttatttttgtgcctgtgtgccggtagaatgttgatagcttgtttgcgtaaacccaaagctaagctatgtccttgtttagtaaacttgatctaaacgtgtattaatttcttgacaacttatcctaggtgtcgtcttgtgtgaagatcattttcttcacaaggtcattggagttctagcaattagatcaagtcatgtcctcatcatctcaatatttgaaattgtatgagatctaattcataattttgtcacttcttcaaagtccctctaaatcttcaaaatatgcatgagtttgaattatcgattcctactccatggccaaactcatgcaaatacaaatagatgtttaggtaattcccttattggacctaagatgcactcaaacttaaaaataaggatctcgggtctgtgatcttgacaattcacttgtagctctcttatggtcatattttcatcctaaaccatacccttgtttggttggtgcaagctgatgtttctattctgctttgcctctccatgaggatcacattgtcggtttctcaatctgacctagtaaaggaatgccca

SEQ ID NO: 191700 - DNA, 610 bp, Zea Mays
caaaatacgtgttctggattatggtaaaattctcgttacaaaatttcagcagcggtacttcgtttacacatacgatatgccatagacgatgatacctctattgaagctgtttccttagtgcttttataatgtatcacggcaacaagtttctcacccactaactactcggtgctattaatatgcaaatgctttcaggcatatgttctagttgctggtggggtaataaagaacttttctcctgcttttgggaagctgaaatctacagaacagcaactagaaggagactatcgtcaacttcactcgcggttaagaacacatgctgagagtgtggcattttatggcggtgagaacagagaagcatctcatattatgcagcggtttgaggctcttgttgagcacctgaatcttgtgcgtcatgaaaactggtggttcggcatgattcaagatttctttctgaagtattttggtgctactgtggcagttgtccttattatagaacctttcttctctggcaaccttagacctgattcatctacacttggaagggctgaaatgttgagcaatcttcgatatcacacaagcgtgatcatatcactgtttcagtctcttg

SEQ ID NO: 191701 - DNA, 274 bp, Zea Mays
tgcatggtggtgccatggcggcgcacgcacaggcacagctacctccatgcatcctgcattgctacacagccggccggcattattaattagatgcatgcatgcatgctcactactcaagtagatcatgtcgagcatatgtgatcattaaccctagctgtttaacggaattttgggggataacgaatggatatgcatgtaagtagaattcatcaagaatgagatagagcgtagaatatatgaaaaaagagaaaaatgtttatgtgtaataatgaat

SEQ ID NO: 191702 - DNA, 471 bp, Zea Mays
gtggaagtgcacaaggctgcggcggcagacgcgaagaacgtggcgcgaggaccagatgaggagttggacgacgacgacgacgaccacgacgacggcgcggagggtgaattgttggacgaggagcaggagacagacgaggaggaagaaaaagagatgctggatctgcaggatcacatggccattgacgacgacgagcaaactgctccgcaccaaggcaaggatccgtagtccccagtccccaccaccactgtcgtagtagcgtcttcgcaagattcacttgtcggttgaactaataatgacactgtgctcttcaattgctgccgtattgcagtggacgacgacgacgagcaagatcttgagccaccgacaaaaggtgcacgaacacctctgccaatttcgtccctattttccccctctgtattctcttccatttcttcactgttgtgttcttgcctccggactgcatcaccg

SEQ ID NO: 191703 - DNA, 832 bp, Zea Mays
gaggaaagcaacaagcggtagggctggctcgccttgttcctgtttgctagctagctcttcgttcctcgcgcaaatccctcggcgttttctcggcgttcatcatcttgctgcgcttttctaatcgaatcctgccggccggccggtgtcacgccgattattccctgcgtagctcttgttgtttccgagcgtttgtttgggggacggagcgagagccgcatcaccatctgctcgctccggttcaaagcgcaactactactactagctagactactgcctttcccccaatcattctctctctctctctctatgctgtgtatcagtccggttcctcgtctgagccatttctttcctctccggcagcttctcgcatgcgcgcgcgggtgggtttgatttcttggtttcttgcgggggtgagtgcagcctgtttgtcatcatctctcccttgctttgtttgtttgctcaagggaatggatggatgatggctgtgtggcctgttgtggcgcacatatgcccagatttatccatccaatccttgcccttgcttctttgctagtatctatctagctcgctcgctgctgaatcttggtcgtcatatttattatctccttctcacacgctgctctcttgtgtgtctgtgtgtgttttcttttatttcttgctccgaccctctttgtcctgtagatcgtcatcagatctctcacacaagacgccggagtccaggcagatagatacacaccgcgccgcctgccgccatgtcgcctctctgctgtgactcggactggtcgtcggtcacctgagagcaagctaaacgacgacggacggacggagctag

SEQ ID NO: 191704 - DNA, 290 bp, Zea Mays
ttggtttttagccccgaggcgtccccaaacaactccaatatcatggttaccaagtgcatatcactagcagccggtctcaagaacatcaccacatcatcagcataaagcgatattcggtgttgaatggaacaagttgaaaggggttggagcagtccctcatcagcagctttaacaattaggccattgagaacatccataacgatgatgaaaagaagaggggatagcgagtcaccttgccgcaagcccctcttgtgttggatgtattccccaggcactccattaagcataat

SEQ ID NO: 191705 - DNA, 512 bp, Zea Mays
gttggttgcctcaaggaacataatatggctgatctgacggtgatttttctaacctgagacatcttggcagagtttgtacccaaaaactagcaccatactaatgatcttgttcaggcattgcccgagggagcctggtattgttctacggactgtgtgaggattaaccagacactgcaagatttacttaacagtggtggagaacctgttcttgccatggatttagatgtcattaagaagaaacgagaagtgaaaggttttaatgatgatgatgctgaccttgatgttagatggagagttttaaaggacaagagctcagacgacagcaaactagtgctctccaaagcagttgccattttccatgtgagtttctgttgcttcatactggatgttttttttctgacagttgaccattggttctttgtcaaaagttggtagaatttgcaataagctatggccaggtattgtggctcattttgcatagatgaccatgggccgggccaggccagcccaca

SEQ ID NO: 191706 - DNA, 382 bp, Zea Mays
gaagaagcgagccgtcaccgacaataatggaagaaggtgcagtaagggagggagttgaagtattggatagggtaccggcgttggaggtcatgtggaaggtagcaccggtgtcgaagtaccagtcagtctgctggggcggagtcagggacatagtgctgaaggcggatgcaagggactgagcgtcccaagatggagtagtcggctgagccagcatgccgtgggtagcgcttccctgcaaagggccggtctgcagagtgtgctgcagaggggcgcctccctgtccttgaagagcaccatgaacgtattgttgggtctggtgggccagcagcgcctagtgaggagcgatggagacaggagcagcgtagaaagcctgctgttgttg

SEQ ID NO: 191707 - DNA, 389 bp, Zea Mays
gcctgatattgttagcattgcaaacattcttgaggcttgcattcatttgtgttctgtacagcttgtgagacaatgtcatgcctacatgctcagagcatccctagaagacatccatcttgaaggagctcttgttgatgcgtactcaaaatgcggcaacataaccaatgcatataacatctttcagatcagcccaaagaaggaccttgtcacattcactgccatgattggatgttacgcgatgcatggaatggcagaagaggcagtagagctgttctctaaaatgcttaaacttgacattaggccagaccatgtagttctgaccacacttctgtcagcatgcagtcacgcaggcttggttgatgctggaatcaaaattttcaagtccatca

SEQ ID NO: 191708 - DNA, 449 bp, Zea Mays
caggaggcaaatgttgcagttggagatgtggagaatgcaacactactcttcgctgaggtgcaagactcattaggtggaacttctcaggaaatacacctgtatgaagaaaaagtagtgcctgcagtctgttcagatgaagtctgggtattagacactggagctagtaaccacatgtcaggcaccaagtctacacttactcaacttgatgacactgtcagtgggtcagtgaagtttggtgatgggtctactgtcaaaatctatggactaggttcggtggtgatgaaaaccagacaaggtgaccacaaggtactcactagtgtgtactacattccacaattgaaaagcaacataattagtcttggacaactagaggaagcaggctgtgacatcagactatttgctggtagactgaaagtatttgatccagagtataacctgttggtcagtgc

SEQ ID NO: 191709 - DNA, 473 bp, Zea Mays
cctggggaagagacgtagctgcgcgttgccggaggcggagaagaacccagtcgcccacttgataggtgatcgaacgatgagcccgatcatagtggcgcttctgcaccgcctgggcccgctctagtcgtagacagatgtcctccatggttctagctatggcagcgacccgcgtctcgccctattcataggatcgaatggacggggggcatgaccatacacgatgcggaatggtgtctcgcgcaacgatgactggaaggcggtgttgaagatgtactccgcccaaggcagccagcgcagccagtcgtggggccggtcacctgttaaacaccgcaagtacgtaataatgatccggttagccaattcagattgtccatcagactgggggtggaaggccgtcgtcatctggagcttagtgccacttaagcgcattagctcgtgccagaagctggaggtgaacactgtgtcccggtcag

SEQ ID NO: 191710 - DNA, 852 bp, Zea Mays
attgcacaatgctaccagcgatgtgttatccaagcttcatgtggtgatgcgtacagtagataatcttcacttgaaacacaggcagttagcagcgaactatcaaaaacaaagagattcgagtgcctggaacagagctgaacagaaacgtctgaaaggtattttgtatttgttttgtggatggtatttttgagggtgctccatctttaatagtacttttgttcttaactgaaagtattttagcaatatttaaagttttgttctgtgccctagatcatcaaacaagtaaatactaatctccgttaaaatggtgaatgccttgtggcaataatattttcattatgttgtgaaactgtaaatcgattgtttcttgctgtggcactaccaacacatggtattaccaatactattctttattctattatgtgtacctagctgtcgtgtaatggtaaactaacccagtatttatgtacttctcaagaggagttgactagtgttgttgccaagttggaaggaagcaaacaaaaactggcagtactgaaagcacagggagacaataaacaagcaacaccgatcctggttcctacgctgggaaacaaaaatatgactgcagaaaaggtgagagataaacaaacagaactgcaagatcttgaagctactcacaaggagttaatggtaatgtcaagttcttgttttagagctccaaactattggctaggatgctagatgtgtatggacttttaagattgacacatacaaatatgagcaggaattgatttcaaagcgtctggaggaaattagaaggctgcatacagagagaattgaaattttgaacaagttagcaacttttcaggt

SEQ ID NO: 191711 - DNA, 278 bp, Zea Mays
aaagttcgaaaatttagaaactaaagaggtccaaaattgagaagaacctgctgctttctaaattctttagtgaactgaatcaaacttcagattctaaactgaattcgacaccagactgaacccacatcttccactccttgcatcacatgattccaaatgataccaaagaaatgacctaaatacaaattgctctccaatataccctttaactctttgctatacagctcgaatctccatggactaggtataggggagcttaaaaacccaatgaaaaacac

SEQ ID NO: 191712 - DNA, 356 bp, Zea Mays
tggcagaaccagctcgtcggcactatcccgccggagatcgccaactgcaaggacctcgtgctcatcgacctgtcgctcaactcgctcacggggcccatcccgagcagcttcggcacgctgccgaacctgcagcagctgcagctcagcaccaacaagctcaccggcgtcatcccgccggagctctccaactgcacgtcgctgaccgacgtcgaggtggacaacaacgagctgtccggggagatcggcatcgacttctcgcggctgcgcaacctgaccctgttctacgcgtggcagaaccggctgaccggccccgtgccggcaggcctcgcgcagtgcgagggcttgcagtcgctgga

SEQ ID NO: 191713 - DNA, 1098 bp, Zea Mays
ctgccaccagtcacggatttcaattacgtctccttccttcacgccctccggcaggactagtttccttttctccccagcctcccatctcaacacattcttcttgtcatccaccacatagtacttgtactcagaggtaaagccggcaacaacagacacgctcccacaccagattagctcactgtcctgatggactggactgagagatactccttgcttgacattccacgacccgagtgctggttccgacccggcaatcagcaagctctggccccattgcgtgtaatacggtagtttgaacagcaaggtcactgaattcaggtgtttctttcccgaggtcgccatgtccttcaaatcgaacaggggagaagagcgagatcaggaagctgaatgtgttgatgtacgactgaagaatgaatcccagccatagcttcaggtacaaactgcaatgggctcacatcaattctcggcttctcgccccccgaaggcaaagatcaatcaaggtatgttccatgaaatgagtggggtttcattccgtccaccatacaagatcccatatacaccttctatcccggcctcgccttttttttcatctctccagtaattcaaacagggcgcgcaagattcaggaatcggattcctttgaaaagaaaagtttgattcgcccagattcgtggaatcaagaggttgcccacttgcccacattcctataacactacgcgttctcatgctacgattgcctgcctgacatggccaaggcgacccacgcatccagaacgagtaagcactaaccagtacagtagagcccgtggaaacagatcaagcccagcaagaggaggaaccaatcaggtaacagagaagggcgctgagggtacgtaccttgacacggcacgaccggcggcaatggcgacaaacgggcagggaatcagcgacgggcggggggagagatcagagcgaggtacaaaacagagcgagtgagagagcggcgaaggctctccggctctccctcgaagatagaaggcgacgcgaggggagcggatgggtgtgcgtgtggagggcgaaggcgacgtctacgacggtgggagagcctgggaaagcgtc

SEQ ID NO: 191714 - DNA, 573 bp, Zea Mays
tggcgatgtatcggaaactttgtgaggagcagcagaaggctcgttcaaatgttgaatcggcacccactactctgcaaggtttgttctattatgccttttattttgatttgtcctgcccattagttgaataacttgtatttgtttggggttgactgtgttgtggtggcgtatgtcaaggcacctgtacttcacagatgctcttggatgttaattttgcctcacactttccttttttattctttagatagcagcagaacagacctgatggttctgtttgaaggatcacaggtaattttctggatgttacttcttatgcagcctatatggatacagtgtttttcgatctattccatcaagtgttttctacctgaaatgcataggaagtctcgaagaaagcttatgagcaagtctctgaacgagccagaagccttgatgaagagttgacaaaattgaggttgtcttttctcattgttttatctggcttacttcacatagctaatgatcagtgtatgttttttttatttcatcatacaagatctgcagtaagcttctaggggattgtcagtagcttta

SEQ ID NO: 191715 - DNA, 968 bp, Zea Mays
cttcactgacatttgagaagcaacgacatgaggcaaatttgatagaattagctgaagcacgagaaaagattgaagaacttcaaagagaagttggggacactgatgaaaaattcaccctgcttcagactagtatacaaaggtttttcttttattcccttttgcaagagttctaacctcctgtgataatgcattgagttttttagataacttttaattataaatatacaatgtctagattaatttgcatgaaaaaggggaaaggattaacccctcacaagactaataattatttctttctttgatgggtggacatagcgttgaagaaaggttaagagagaaggatgctctattgacaacagaaagactagaaagtgaagcaactaagaaatcactaaatgaatctgaggatagaaaccaggacttactactgaaaattgaaattgctcagaaagacattgctcacttccaagaaaccgtccgaaggtatgttgcttaatggttaacttgccctattttgtgcttgagggcggttcatttctgatttgtttcctgattatgcagtcatgatcttgttaataaatcaatctacatgtcgctattctcttagcttatattttgttcccattggtttagacatgaagaaaatatggcagcactggaaacttcgttgagatctgaaaggcagcaaaatgatgcaatcatgaaacaactagctgaatctcagggggaaataggagagctgcaaaggaagcttgaagatgctgatgccagaaatgggcttcttcaagattctttacagaggttccattattaccttgtatcgatatcaagtgttatcgctattctcttagcttatattttgttcccattggtttagacatgaagaaaatatggcagcactggaaacttcgttgagatctgaaaggcagcaaaatgatgcaatcatgaaacaactagctgaatctcag

SEQ ID NO: 191716 - DNA, 374 bp, Zea Mays
gaggtcccgcgctctgatgaaggacagcaccgaaccctgcacctgacgcgtcacagtcgacgacgaagagcttggcgaagtccggcatctggagcactggacccgtcgtcagggcgtgctttagggcgtggaaggctgctatcgtgtcatcgtcccaggcaaacgcgtctcgtcgcaagagacgcgtcagcggggctgcaatgaggccgaagtctttgatgaacttccggtagtaccctgccagtcccaagaagccccggaggcctcatgcagaccgcgggggcggccaggaggccactgccgcgaccttgtcagcgtccatggcgaccccgccctcggagatgacatggccaagataggccaccgatgtggcg

SEQ ID NO: 191717 - DNA, 378 bp, Zea Mays
caagaactcacggttgtcttaaatcttatgcttgttcaaatattgtagacttcaatgtacttaaaggaagcgcaaaattctagtaacaagctgacgtgcccttactaaatttggttggagaaggatccttaatggcctctaggtaagggttgacttttggggcaacacctcacttttgattgaggtagtcttggctctcaaagataagagaatgtcttttgtggcatcttttgcgccaatgaaacaacattcataacatccatagagctccggattctctgaacattcaactgatctttcatcttctcaataaacttcttaaacttcatcgtgtgcatgtgctccatccgcatcatcctcgtcaccatctacttcctc

SEQ ID NO: 191718 - DNA, 300 bp, Zea Mays
ggcccaacttatggctactcttcaacaaaaggaagatgaattggttgctcttcgtgaacaaatggctcgtgaacaagtggctaaccacagccataataatgacagggatgcctctaccagccataaccaacaacattctgaacctgcactcactcttgaggcgatacaaagaatgatttctgagggtgtgagagcacaatacatgcaaacatattattccatgcgtccagggtatgtgaaaccatatccaccagaagttgacatggtacccttcccaaacaactatcgccaaccacagtt

SEQ ID NO: 191719 - DNA, 320 bp, Zea Mays
gtttgctcgtgctcgggcgaggtccgttggaggacgacgacgagcgatcggtcagagcctggatcgctgcggcgttggcctggacggcggattgtagggtctgcatattggccatgagtgcctccaaagtggacttgatgtcgtcccctgtggtactagtggtggccggtgatgtcgccaaagtggcggacggtggagagagggcggcggccggaggcggtgtagcagcggttggtgatggagaggaagagctagcggagtaggatcaccaggatcgcgataccaagttgtcaagggcgtcggcccctagggtagctggc

SEQ ID NO: 191720 - DNA, 459 bp, Zea Mays
aaagagttgagccatggatagcatctatggccccacaaccccaaatggaacacaatggcactgaacaatgtgtcaatgatcagtcactgcgcagcagccacggatgtgtaaatatagagaagcctgtgttccatacagacaatgctggggttcagcaagagaccatggcagatgtagtcaatgaaagtgaaacaggaaatctccaaaaggatccacctgcaccaacttttatttttcaccaaccgtgtatgcctgaaagcaggtcttacgtccctccgcaagaagatactatagatgctgttggtctaggcgctaggtcctcagaaaggagtcctattgtggaggggaacatgtccgttggatctgtgcttgcttcagatggctgtgatgtacctttgcagggaagcattactgagccctttttccagcaggataaacatgaccatactgttatagttg

SEQ ID NO: 191721 - DNA, 398 bp, Zea Mays
cttgagccataaagggagcgccaaggcgacaaaccatgcccacagggacagaatacctaggcagtggctgcatgtaggccttttcacataggccaccattaagaaaggcattattgacatcaagttgagcgatggaccactcacaagcagaggccacaacaagagtgaatggtggtcacgtgagcagcatgcgcaaaagtctcatcgtagtcacgagtcacgaccatgttcctgctggaagtcacaaccgactaggcgagccttataacacacaagagaaccatcagagcgggtcttcttatagacacacttacatgtgataggatgaacacatggtggacaaagaacaagttcccacgtgccggtacgctgtagtgcaaccttctaactctggcaag

SEQ ID NO: 191722 - DNA, 571 bp, Zea Mays
attttggaatggtctaaccttctttttttaggatgaacataccaataaacacattccagcctcgagcacggcctctttttcagtacagatactacaggtatgttgtcattttgatttatttacttgtattgtatcagtatcacacacgacacacctttatttgtaggaacatctgtatttatagatgagttcattgtgactcctatattcttgatgtaggggaaggaaaataatagttgccaaaggcactttgcatatcctctgtatatactgcagtttgaatttcatgtcttgttacgatatgccacaattatgtctaacaatgtatttgcgtcttgtcttgctcatcatgttaccttcttttactagtgagcagcaacccttaagattgaatcctgctgaaatttctgaagtcatagctgaagtttgttcagaagcaacttcaaatgcaaatcagttgattgttccatcaagattgagcacccagagtcggcaaccttcagcagatgtggcattcagtgtccttatcaaacttgtcattgacatgtattattctatgccccatttcttt

SEQ ID NO: 191723 - DNA, 876 bp, Zea Mays
ttcacatgtcacaacagagcctgttattcatcaagagaaacaaggacttggggttgaagagtttgctaaggtgctagatatctttaaccatttggactggttggatgggaaaaaagacaccgtacctcacacaacccagctaaagatctcagcgattaccgatgaacctgagactttctttgatactcgtgaagaacttgaatctgaaagttcttctggtgaaatttattcttctagtgttgttctgaaggtcggaaatgaattggatatgcttgtcagcactaaaccgagacatattccccaagattcaagttcagctaatgttcaatccaaatcacaaactacagtgcagtctccttcgcgaatgcggcgcacagcattgttatcaccttctaaggttaaggtttcaaagaccagtgcttcaccaatggaactgtcttcaagtacaatcatgccacaacaatcatcttcgccggttcagcctcggcgagtgatgtctgactctgcagtaaaatttttatcagagataacagaatcagcatcaggtgagatgtcttgttcacaaactccagttgaacatgaaccttcctctctgatggaaaacaatccagcaccaacagcatctctgttacctttgtgcacacctcctcctcttcctccccctccacccactgtctctttactccctgttcccactaagttacccataaatactagcacaagtaccatcaacatttcccttagagcaaccgtgcgttcctctccaccttcagaaccatcagtccctcctaaagatcttttgagaaccgaagagctgggtaaatcacaagaaccttcctatgaaactcgtgggaaattacaaactgatagtactac

SEQ ID NO: 191724 - DNA, 546 bp, Zea Mays
cagccggctccaccagcagctaccccggttgcccccagggcgatcaccgtcgaccgtttctgtggccaagtgtactctcgccgtcgacctcctaccgcaacgtctccttcacttgcagcccaggcgtctgatgctgctgggccatcagcccggcgcctcctgatggtccaagagctactccaactatccctgtcggtgctgttgttgtcccccctgtggtcaaccaccaccgtatgaccactcagggcaagcgtggccttcggttcccagctctgtttgaagcttcagcactgtctccaattcctcgcagctatcgcgctgctctggtcaatccccactggcgcgctgctatggaacaggagtatgcagctctggttggaaacaacacctgggatctcgttcctcggccacctcactccaatgttgtgacaggcaagtggatattcaagcataagttcaacgccgatggttctcttgagcggtataaggcacgctgggtccttcgtgggttcactcaacgccctggcatcgacttctctgagactt

SEQ ID NO: 191725 - DNA, 323 bp, Zea Mays
tgtttggtattgcagctatttttgactgcttcaacttgtatcttgctatggactttgattgcacaccagctgtgaccgtggctaccttattgcttcaatcgctccaaaggattcctgatgttgctgaatcccgctctcgacaacttataccgctatttctcaactttatgggctatgatgatagcagcatctttaggtatttagatgctaaactatcttacttatacaatttcgagttttggaagttcgatccttttttgtacattttctgaactctgacttatgcagtgctgattcatatatgcctgaaaaatgtaaaggca

SEQ ID NO: 191726 - DNA, 365 bp, Zea Mays
cttggcgcatgtttttgacttgctgaaccgcgatcaatggaagtttaagctctccaaatgctccttcgcagtcaacaaggtgtcatatctcggccatgttgttagccaagctggagtttccacagacccaactaagatccaagcaattgttgactggccgacaccatcatgtgtcaaagagcttcgcagcttccttggcctagcgggttactatcggaagttcatacgtcactttggggtaatctcccaacctctaacatccttgttgaagaaagggattatttttgtatggacaccagaccatgacgtggctttccaaaccttgaagcaagctcttgtcacggcgccagttttagctctacctg

SEQ ID NO: 191727 - DNA, 390 bp, Zea Mays
gctggttgggagggataggctggaggagcttgttcgggagggaaagcggatgaggcgtgctcggaagaaaggtgttctcacgttcgatggtgacagtgatgaggatgaagatgatgatgcagcagaagaggaaggttcattaaaggtggatgatgaatttggggacttgtttgaggatggtgtcattggggaggactgggaggaggtaggcgatggaggtggaagtgatgcatatgaagagtacgatgctgaatcaggtgacatggaggagttttgggtcaagaaggctgtggctcaaggactggttggcaatggtaatgagcaggatgtttggtgagtgcatcagcttgtgggactgctcaggaagttaacgaagattgagaattcctc

SEQ ID NO: 191728 - DNA, 690 bp, Zea Mays
gtgaaaacacacctgtagctggtgctgcatctatttgttctccctgggatctgctggttagttaattattaattaatttagtgggtttccaactttttctgattttaaaagtgtatgcagaaatactttggtttgcatatcaattgtaccacacctgtggtttcaaatactgtcacttcggtttctgtgcctactcatctttcctcagtgtcttagttaacaaattacaaatgatgttcttctatcacttcaatttcgcaacgctacacttggttattactgattatacatgtatattgttttatcacttcatttatgcaggtgaccagcaaatttatttcacgcaagcttgtgcagcgatgttatgacagagcccttgcgattggtctaaaaggatatgcgaaactgtatgtgcttgttaagccctttcccatacaatcttgtgaaccttacctttattttttctgctaactaatgtttagtaattattgaagaagtccttgccacattgattgattgtgatgatgcttctccttcctagataggcaccattttaaacttagcagatctttctttgtctaataataatagtgaacaatataatagattctacttttattcatactccttttcaactgtgttacttttacagacatcaatcagtcttggcacgacttgcaaactgggaag

SEQ ID NO: 191729 - DNA, 524 bp, Zea Mays
atctatacatcatctgttctctgttcagttgatgactagactagatagctgcctcataaaacaaaggtctgctttggttcgatctgtgtgtgtgtcttttgtttatgtccaacgaaactgatgggagaagaaagcctttcgaccggcgtcgtcgtcagagagttgccgaacgtgcgtgtgtggtcggcgagtctagaaaccttccacaaccttccgagagcgagcgaggagacgtacacgtaacgtaaggccgccggtcgaaacgtagaaactgagcaaggcggcggccagggcttcttcctttcctttccttgtgtcgtttgtgcaacgacctggctatcggtttccgtttcccggtgtgtgtagtgtacccctacgcacgtagcacaacacctgtactacgccacctgtcacctgtgtgacctttgcttcgagatgtacaacatggtacagcagacagtcaatcagagtacgcgtttaattagtagtataggaagtggtggcttcattcgtcctcgtcgcga

SEQ ID NO: 191730 - DNA, 1832 bp, Zea Mays
gaattggggaaggtttatattgaagtcacatggcagatatctttactcagtgattctaaggtggatacgcaagatgcagatcaagatgatttggctgaggaagcttcaatttctgaaagggatagtgatgatgacacaaatacagcaccactttcaagatatatgaatcctgtttcagcaagggcttctatatcaccgtggagcatggagcaagattttgtatcaactgtgcgatctgtttcccacatgcaccaccatggtcgacactcattatcaaggataagtgggcgcctaaatggagtgttgaatgcaacaagtactgatttggatggtccttgttttccagcagagacatcaaggcgtcatgatgctctaaagagaatccctgatgatgttgtttctgaacttctgaagaaattttgttgtaccatgcgttccttcctttctacccttgtcaaaggattaccggctcatcgtcggcctgactctaaccttaacccaaattcgagaagtcttgtgactgcactagctcaatttttccttagtgctcttggtttctctgggcattctactgctggttttgagatgtctttatctgtgaaatgccgttaccttggaaaggttgtggaagacatggctgtgcttacatttgacagtagacgtcgcttatgcaattctgcactcgttaatagcttctatgttaatggaacattcaaggatgttctaacgacctttgaagcaaccagtcagctactgtggacacttcctttctctgtccttgctgctgccacagatcaaggttcctctattaatgagaaggtgtctcacaattcctggctgctggatacgttacagagttactgtaaatttctggaatattatgtgaactccacgttcttattgtctccatcctcttctcataatcggcttcttgtccagcctattgtaactgagctgtcaattaatctattccctgtgccttcagatccagaatcatttgcgcgcatgctccaatctcaagttcttgatgcagttcttcctgtttggaatcatacaatgtttcctgtgtgcaacccagcttttgttacctccctggtgtcaattatgaacaatatatgctctgttgttggagatatgaagcaaagccgcagtagtgttggagttgccaatcagcgtgttactggcccccctcttgatgaatctgctattgctacaattgttgaaatgggattttcaagggctagggcagaagaatctcttagaagtgtgagaactaacagcgtggagatggcaacagattggttattcaaccatccagaagattctgtccaggaagatgtgcagcttgcacaagcgttagctttgtcacttggaagctccattgaaacacccaaggaggatggaagcaataagaatgatacagtcattgctgaagaaaaaggtgtatttgtgcttcctttggatgacatccttactgtatcgaccaagcttttccagtctagtgattccaccttggctttcccattgactgaccttctagcgacactgtgcaaccggaataagagcgaatactgcaagcgagtagtattgtatctttttgagcagttaagacatttttcgtcagatgccacggatatgggtgctttgtattctgttgctcatgtgctggctttgcttctgagtgaagacagtggcatacgtgaaactagtgctgaaaatggtgtcatctcccaagttcttaacatattaggaagtcttaaatcaaggacagaccagacagatcatacttggaattctatcagtgctctgttgcttatattgtataacatgct

SEQ ID NO: 191731 - DNA, 354 bp, Zea Mays
ctcaaggttaggattaatggataaagattaggttagataagattgagttagttacttgggattagattaagttgaggtagttacttgggggccaagtcttcctatctatataaggatgtgttgtacctccttaagggggaatcaatcaatgaagacgaattagtcctagatctctctaatactctattctcccccaagccaacttcgctcgcctatcttcctggccctatgaactaggaatcataacatctggtatcaagagtggtatcaagagtcagggatcctttcccatgacttataccgcggacgatgtacgcacctagcgtgaggagctcgctcgtgccagggcagatc

SEQ ID NO: 191732 - DNA, 321 bp, Zea Mays
gtgaaggcgagttcctcaagaagcagatcgttccgtacctcgaggaaggtaggaagaggtcgtccgcgccgaaggtgaaggccgatgttggcgaagcgctcgttcagaccgcggatgacgttaaggacgagggtgcgatcatgaacgggttcgccaaggtcgccgagagcgtcacccatccctttgaacttgcggcagtagtcggtgatggagagatcgtcttggcgaaaattgcggaattccgcgtcgaggaagagtgcccgagtctcgcggttcccgaggaactgagactcaattgcgagccaggcggtacgagcaata

SEQ ID NO: 191733 - DNA, 395 bp, Zea Mays
aacgaatgacaacataattttgcaactcaggcaagaacttgaggcaacaaaaaagttgcatgaggcagagactcagcaattagagaccaaagctgccaaagtaaataaggagtttgaacagaggataaaagaaatagaactcatgttagaagattctacaaagaggagaagagaacttgaggaatctactgaatctagaatccaattttggaagcagaaggaaatagtggtaaacaaatttgtgggtttgcaagtaaagaatgctcaggtattggtcaacccactctgtcccctggccttttttttatctctacggtgaatatttgtgaactcaagtgtatagtgctctttttcttcaggaattgaggctctcttctgtttcagttagacttgaa

SEQ ID NO: 191734 - DNA, 419 bp, Zea Mays
caatcctggtgtatgggcaccgccaggatggagtgtcctttgtcaggtatgcgaggaagcttgatgctgaggatgccaagtatgatgtgccagtgggtgccacggaggagatggtggtgctttgggccattggtaggttgcggccaccagacacaatgcgcccacactacctcccacagaaccatggggggccaagggacacgacctttgggtttgcccggttgaatttgtcggagacggtggacaattgccttggaccgttggatgcggataataaggaggatcaggagaggatcattgcagatcgcaagacaccacttgtggtgacatctgctccagccgtgcgctacccgaacccaccaaaccctgacaaggtgctttacatcaacaagaaggaggcgccgctgcttaaggtcgag

SEQ ID NO: 191735 - DNA, 331 bp, Zea Mays
gaatttccagaagttacgattgtgtgtagcaaaggggtgatgtccttcacattggcaatagggcaagctaggatcagtgatccaacagtgaacacagcaacaactgcttgtgatgttgacttcgatgcagatgtctgtttcattcccttgcatttaccagtcataggagtaatgaaactgtgacccctggctgattctgatgcctcttttatgtactggtcaaggatgtcaaaagcactacggataagttgctgcgcccacttcaggatcagtgcatcaccttccttagctgtttttgctttccttttacacaaagttttcagtgatttta

SEQ ID NO: 191736 - DNA, 330 bp, Zea Mays
tggagctatcctcttcacgtagcaactggtatacagcaagcagtgaagaatttagatggccagtggtcaatatcaggcctagtgaacaatgggaggtgcttccttcaaagaggaacactgtgattgagttaaagctgcaagctgtttctgaaggcaaggtgtttggtgctatctgcttgaaactgcgcaattgcactcttagtacgactcatgcttttgtgatacctattgagctagaggtgcatacacgaacttactatgattccagtggcttaattgctgtcacatttgagcatgtatggacttgtgatgaaactgggccgatctttt

SEQ ID NO: 191737 - DNA, 565 bp, Zea Mays
ttcatattcatagagcaaggactgtgactattgcaaaggatggcacaattagtgcctcagagttaggtgattctttgttatgatttaatagttaatatttaataaaggtgctaaaatatgctatcttagtgacatgactatttaaccatgtaatttgtattctttgataggttgcaaggaaggcatcggaaaaggaaagtttctcaagtatggagctggtggtggtgctgggcatggaggccgaggtggcacagggatttacaatggaatgagaagtgaaggaggcctagaatatggcaatgctgatcttccatgtgagctaggaagtggtagtggcggttctgctttgtcagcagataacactgccggtgggggattaattggttcgttccatcttatcccataaatctatgttctggaatcttgtatattacatttggctccctttgtctttttatctttccctctcctgaattcagtgcatttggtatcaaactgctttaattgctgaacattttcacttccagttattggatccatgaaatggccactttcaaggttgcta

SEQ ID NO: 191738 - DNA, 710 bp, Zea Mays
tgcaatataagacagtaaactgtcatagtcgtctcttacatgtttaaactcaattataagactttcaactttgttcaataaatcaatgttttgtttcgcagctttattttgcaatgactagaaggacagcagcataattaatacatcaggattttaattaaacagcaccaaataaaaattgcattgttcattaacaaacatctatcatccagcgtctaaagttgaaccggagaatgagcatatgtaagaaattaacatgcccagttcacatgaggtcacgcagaggatcacgtgagtcgtgagatgttatttgtctttttttctccttccaaaaaatggtatttatgcattcttccgagtttgaatcgacacatccacgaggatggtaacagaagatacgcaggcaacggtataatgttctaactgaagcacaacatctagggacgagttgaactgggcatgttaatttctgtcgtatactcattctctatttcaactctatacgttaaatgatagatgacagataatgaaaaatgcaatccttatttggtattgtttaattagaatattataatgtcttaattatgttattgtccttttagtcttttcaaaatgaagctgtgaaacgaaacgtcgatttattaaaaaagttgaaagtcttaaaattgagcttcaacatgtaagggacgaccgtgacagtttactgtctt

SEQ ID NO: 191739 - DNA, 282 bp, Zea Mays
gaatgagcacgttaaccaagttttacattttgggaaacatcaatgtagcaaaagcaaactgacctggaggagttgctggcaaatatccactgaaataaaattattgctgaaaaagacttctgttgtgagggacgaaagcacgcgtaagacctgatcacacggtcttttgtcatcaagtccatgaacaataaattccccaaagtttttgtcttgtttaaagtcaaggttgatcttcaaagaattattcttcattgattggcaggaatggaacagcacaaggat

SEQ ID NO: 191740 - DNA, 472 bp, Zea Mays
cttgacgaagaccaactaccatgactgggcggccctcatgcgcgtgatgctgcaggcgaggaacctgtgggacgcggtgagtgaaggcacgacgacttacgtcaacgaccggaacgctttggagatactccccaaggcggttccaccagagctgatgggagccgtggctgggaaggcaatcgcgcaggatgcgtggaagatgcttcgactgcacaacgtcggagtcgaccgcgtcaggagggcaaaggcgagtacactgaagagggatttcgacgccttcaagttcaacgacggcgaaagcgtggatgatttcggtgtacggatcacaagcatcacgggtgaactggcggtgcttggtgatgaatacaccgaggaggaagttgttaggaagtttctgcaggccctgccatctcggtttgatcagatagcggcttcaattgagacgctacttgacttgagcgagatgtccgtt

SEQ ID NO: 191741 - DNA, 515 bp, Zea Mays
ggtgattacaaatcatgatgacatacaggaagtcctggatggtttcttttccaacctattgggtgctgatttccagaggcgttttactattgatctatcgagctgtcatagggatgttgtggatcttagtgcactggatagtcctttcttggaggaggtaagggatattgttgcaggcctcccttctgataaagctcctgggccctgatgggtttacggggaagttttacaagacatgttggaacattattaaggatgatctgttggctgccctgaaatctttgcatcaaggaaatgttcaaaaacttgggttgctgaattcggcttatcttatccttctcccaaagagggtggatgctatgtcggcgagtgattttaggcctgttagtctaatccatagttttgctaagttggtcaccaagcttcttgccaacaggttgggtcctcgtattcatgagttggttgctgccaaccaaagtgcttttgtaagagggagatcaattcatgacaacttt

SEQ ID NO: 191742 - DNA, 314 bp, Zea Mays
tagtaaatattcatggatcaacctagcgaaagaataacgcaataatagcgtagtgaaagtagtcgcataacagcaccaacgcgtgctcctcacattcgtggccaatcaacacggtagcgatcgacaacaacagggtctctatagatcttaatgggcaaaatataaagtacatctcctagatctttcattaagaaattgtttcttaataaagatttgatagcttataacatagaaacatcatctccgatcaaaagtatcttatttgcatactacaaatacatgtgccctctcactagccttgaggccatctccag

SEQ ID NO: 191743 - DNA, 399 bp, Zea Mays
tgaacacggcgtcacggtcggacaccatgtactgcggaacgccgtgcaagcgaacgatctcggcgaagaaagcctgggccactgactccgccgaataaggatgcgctagcggaataaagtggtagtacttgctgaatctgtccaccaccgtcaagatggcggacttgccgcggacccgaggcagggcttcaatgaagtcgagcgctacatccgtctagacgccttggggcaccggttgtggaaggaggaggcccgcaggatgaaggtgctcagacttatgacgctggcacgtcggcacgccctcacgtagtcctggacgacctgcttcatattaggaaaatgaaagtcacgtcgaagccggtgcatcgtgcgttggacaccctcgtgcccctcctcgtg

SEQ ID NO: 191744 - DNA, 323 bp, Zea Mays
cttgtacatataggttgcacgcctgtgtttggctgcagtccctgaacttggttgtaccttagagccttgggattctataggttcatcttgttgaacttgaacagattcagctgctgcatccaccaccattacatcctcttcctcctcttgctgctcattatcatctaggaaaatagctcttttccttcttttggattccatttaatccctcatctcctttctaattgcagtagtggtctttgaacatatctttgtatctccataaccacctgctagatgctgctttagcctttttatccctccagaaactatggtgtcacaaa

SEQ ID NO: 191745 - DNA, 741 bp, Zea Mays
aagacccatttgcacgtgataggtacagcaccagcaggtaacggaacaacatcccatgtacatgtgcgatgaagggcattcaatccatcagtcatatcaagctgccactcaggtataccagaagcctctttataagatgatggttcaacaatgactgcaccagcacggggaaacccataacgttctggagctgcaatagtgccacggtcacgaagatgatacccctgattaaaaacaacatgagagtcatcattgttagtacaagtatcagcaacaggatcatcatcaagactggccgtgggagtagagcgaggacgacgaatgtaagtctgagtgacaagtggtttggaagagtaagactgagatggtgtggaagtggaaggtggtgtgatgggaataagaacatctggggtagaaacagtagatggtggtactgatgaagtttgagaaatgggaggaaggctcatgaaggaggtagactctgtggaataaaaagaagaatgggtggaagagttgtaaaagaagggtcagttttcattaaagctcacatctcgagaaatacgcatgcgacaagaagatgaatcataacatcgataacctttatgttcagggctgtatccaagaaaaacacactcaacagattgagcagtcaatttagtacgttcacgaggtgataatagtacataacacgtacatccaaaaactcgaaggtggtcatatcgtggaggagtgccaaaaaga

SEQ ID NO: 191746 - DNA, 326 bp, Zea Mays
gcttctctctcctcccgtgcatccgccgcgggcctcctccagtcctcttcctcaccccgacgactccgcctcaaatccaatcccactcccacctagcggtccggctggcctcgcctcctcctcctcgcttctctcagcctcaggacgacgcctgcctaggcttccaccgctgatctgaccccgaaacctcgttcccttgtccgcttcctgccgtctcagtcgtcgatacttgtcccccaaaaccccgggctccggccgatctctgcgcgttgaccggggcgccgctgatggtggcgaggatgatgcggtggccgcggccgccggcg

SEQ ID NO: 191747 - DNA, 511 bp, Zea Mays
agttcggacgatgagtctgatggttttcactccgatgatgagatggacttgacacctgcccctcctggaacagaagaaaatatggagggttcatctgttgcaaacaaacatgatgccgatggagataccaaagaggaagatgacgcatctgatgatgaagatggtacggatcaagatgactccaacagtgatagtgatgaactagacgatgactctgatgtggatgtgggtactgatatatctgatgaagacgaaggtgacgacggtgaactgaaagaaagcataaatggttcagaggatgaagctttagaccagaatgaagacagcgaagaggaagacaagtcaaaaggcagtggctctaaagcgcagaagaggaagttaaatgattatattggacagctaaattctgctgatgcaagccttcgagctctgaagaggttagcaactgccaagaaggctgaagaaccatctgatgaaactggtaaaattctatccgatgaagatttcaaac

SEQ ID NO: 191748 - DNA, 379 bp, Zea Mays
gtctgtggcaccactatccatataccaatttggatcaacgttgtatccatgagttgctgctgctgcctgtttcacagttgcttcaggctgaaagctttgatcaaacctgtgccagcactgaagtgcatcatggcttccttttccacatatctggcacgcaggaccattgaagttgttgttctgtgaccttccaggtacaggtgagcgaccacctcgccccctttgccagctgccgccctttggtgaacggccacgaccacgattattcctgccaaaactctgtccagtaccaccacgacccccaaatttgtttgcagaattaatagaggatacctgaccatggccaccgtactgctcttgccgaatttcaaagctgagc

SEQ ID NO: 191749 - DNA, 585 bp, Zea Mays
cctgacttccctacaggagggacaatcctgggaaatcaagggtatttattctcttttttctttggtcttgtctttctttttgactttgcgctaacttgtgtacccatccctcctcttaattagtattttggaagcatataaatctggacgtggccgcattgttgtgaggggaaagactgacatcgaaacaattgacgagaaaagcaagcgcacagctattattattaaagaggtatgagttaaagattttgttttggagtagtgtctgacatctctactactgtttgttctggcaattctctatacctacttagaagcaggagggcacgaacttactaatttatacatttctgcgcagattccataccaaactaacaaagctactcttgtacaaaagatagctgagcttgttgaagataaggtaagtttatttggagcagacttaattgtgtggttggtcttaacctgagtctattctgtgataagtttgatattttgctagcggcatgatggaaacattaagaattccgacaattgttgtgtttttatttgcaggtattggaaggtataagtgatattagggat

SEQ ID NO: 191750 - DNA, 432 bp, Zea Mays
ctttcccaacgtcaccatccattgggtgtcgaggacgacgtcgtagtcggcgagcggcataacgtagaggtcgacgcagaaatcctcgccggcgatggtgattggcacctgacggaggaccccggggcatgcgatccgttcgccattcgccacggtagctgagaggcgtggcctggagcggacggagaggcctgtgcgagctgctgcctcctccgcgataaagttatgcgtggagcccgtatccaggagggctgtgaacgtcgcaacacccaccttcacacgcacctgcatcgaatcacagattggcataccagcgacggcccggagagagaacagcggtgcctcctggtcggctgctgcgttagccactgcgtcgtcgtcaagttccacgccgttgacgtagaaaatccgacggcagacccggttatggcc

SEQ ID NO: 191751 - DNA, 624 bp, Zea Mays
ccaagaccccaacgcctcacgcacccctcaaccctaccgcagctgcgcaggcacacgacctccgtgtgcagcgcatcgccgccatgacgggtcccttacactccagctccggccacaacgccgccgccggcggcgggggcaagaccatcgaggaaatgtaccagaagaagacgcagctggagcacatcctgctgcgccctgacacctacattggctcggtggagaagcatacccagacgctctgggtctacgaggacggcgccatggtgaaccgctccgtcacctacgtccctggactctacaagatcttcgacgagatcctcgtcaacgccgccgacaacaagcagcgggatcccaagatggacgcgctccgcgtcgagatcgacgtcgacggctgctccatctccgtatacaacaacggcgacgggatacccgtcgaggtccaccaggaggagggcgtctacgtgccagagatgattttcggccacctcctcaccagtagcaactacaacgacaacgagaagaagacaaccggcgggaggaacggatacggcgccaaactcactaacatcttctccacggagttcgtcatcgagaccgctgatggacgtcgccaaaagaagt

SEQ ID NO: 191752 - DNA, 405 bp, Zea Mays
ggcatgtctgactattcccattggctaacagtacacctttgtcgagacgtgcgccacacccatcatgactcgcgcgttaccaagggcgctgcagcaagatatcaatattgtacacactacagatattatggcgcacggagattacacgggcatggcaagcagtagttccatccttccatttgtccctaggcccacgtgtcggggctcagaacccttgtacatgcccccctttgactataaaaggggaggcatgcgacgtgaggggactcggacgcaagtcattcaggcttacacacaactcaagctctcgagcaatacaacactcagtggagtagggtattacgctttggtggcctgaaccactctaaacccttgcatgttcttgtgttcatcactccaatctct

SEQ ID NO: 191753 - DNA, 381 bp, Zea Mays
acggcagcacccacacgtttccaatggaaccggtcgtcgtcacatcttccagaacggttgaagctagctagtggtatagaaaagagtagattaattattatattcttcctccgcgatgtgcccaacagcgaccggcgccggcgccgctgttgatgtgcacgtttcctgacgacctgtgtggcccggcgccgtacgccgccgtcggtagccccatacccgtacgtgtgcatgcgtgctgctccgtccatttgtcgtcaggctggctggcttcctcaagtggtacggcggcttcggtgcagatcggatcggagtacttgagcattcggcagtactcgttcgtcgttcgttcttccagtgtgacgtgtgtcgtcagcgccgtcg

SEQ ID NO: 191754 - DNA, 838 bp, Zea Mays
cacaaacagaacgagctgggtcatcttctccaggactcgcgtctgttgcccagagccgtcatgcgcacagatattttctcgtccagaatacgaccccttcctcttcgatcgggacccatggtccagcctctcccatgcgcatagcttatgaatcatctcccacgcgatcgtattccattgcaaccacctccgtaaacattacatgctcaagctcttcgttcctagtccgttgagatcccttccgggattttcgtggtcgctgcaacaaaccccgagtcgggctctgaacaacctctgcgagatctttggggccgacgtggccaactcgccagcgcctctgggctataaaagcgagcccccgtgacctcctcatccctcgaatcgagttctgccttggattagcgtcaccatgtctacaggagaagaagagtgctaccgcagggaaagagaatctggtccgccgccatagccatcccgcactcccgtcgttattaggtgcctggggcttggtccgagagcttcggaccacactatcgcttgggtatctggcgaatcggagctctgtatcgtcgccgggtcgcgcggattgctcatcagagtactccttcgccttggatccgcagttcgccgtgacccgtggtaccgggcatccttatacctagtaagaactccctcatccgaatcaatttgctctgctcatggcgtcgatcgtgtgaattgtcgaattgggtcgctgctgcgcgtactccagtttgccggtggtgaccaccgccgctcggcagctgggagctgctgcggtctgggtaggagggcggcggggtcgttcagaccgcccgat

SEQ ID NO: 191755 - DNA, 732 bp, Zea Mays
ctcatgatgtcacaaatggagggaggctgcccagtagattataatacaataactgatcttttccttcaggtatgctttatattcataaataattggtttgttgtctattaacgtcccttggcttttcaagtcttccttattggttgcatgccttcacttacatacttctgttaacagagaaatatgatacgggaggcaacagcctttctgttggatgttctgaagccaaacttgccagagcatgcttttcttcaaaccaaggttatcatctttcctctttgaacatgaattggttgtgcttggatgtgtacattatttgtttctcaggagcatttctgtatgaattgtaggttttggagataaacttagtgacttacccaaatgttgctgatgccattcttgctaatggtatgttcagtcattacgaccgccctcgtattgctcagctatgtgaaaaggccggtttgtacttgcgagccctccaggtcagtgcatttgcattggtgcagctgatatccccgcttcactttcctgtttaactaaaatattatattttgtgatgcagcattactcagagttgcctgatatcaagcgtgccattgtaaatactcatgccattgagccacaggtttgtagacttcagtaattttcagatatcttcttctattgttttgcccattgacaactttctcggacaggcacttgttgagttctttggcaccttgtcaagag

SEQ ID NO: 191756 - DNA, 1229 bp, Zea Mays
agccgcctcagctgggataaatttccaagttttgcaactaatacttcacttgctgtaatggcatacagagtttgcagttcaatcaaagtccacaagcccttaaatggctccacagcttcccaacttttgaaaccgctgaaagttacatcttgcaaccgtgaaaccataagatgtcgcaatttcttcagttttgaaaacccttgtgggaacttcactaactccccattctcaagactcattgtctgtaggttttgaagttttgtaatagatttagggagctctttcactttggttttattgaggcataaaagcctaaggttgaaaagctctccaattgaatttggaatagtctcaataggcaagcttgataagtctaatactgcaaggtactttggtttggaggaaatagaagaataccacacagataatgctctgctggtgtcgaatgtaattaaggtgcgaagcctggatggatcaatggttgatggaatgcccttgctgcattggagcacagccactcgtcgagaatatgatcccactagcactgcttcattatttccaccataagttgtactgaaaccctctcttttagattggaaaatggcaagttcacgcacaagatcatgcattcgaatacatttaatcctaccaaagcagttcctctctgcaacgtgaagcatgctccgtcgtataagttctttaagataactttcagcagtgtcttctaagctgcatgcccctttttgttcaataaatccttcagctatccacaatctaatcaatctctttctgtgtattagatagtcttctggaaacatagcacaatacaggaagcagttcttcaaatagtctggtaagtatttataacttagattcataattttctccacgcgattaaggttctcattgttgtgtagctcccagataagctggtcataaaatagcttccactcgtcaacattcttcggtctcagcgacaatatgcttcctattgccacaagggctaatggcaaaccatcacatttctccacaatgtttataccacactgacgcaactctggagggcagatatggttttcatctttcagaaatgccttcctacaaaatacatgccaggaatcatcgacacccagaggttctactttgatcttacaactacccttagctagtgaagctacctcctcaattcttgttgtgattattactctgcttccaaggccattatctac

SEQ ID NO: 191757 - DNA, 841 bp, Zea Mays
agggtataactcccttacagcacccgttggctgtgaaggttgcaaatggtagtttgttgcagtgcactcatgagctgaaaaatgctaaatggtctattcagtcattggtgtttcactcagacctcaagctgctgcagctgccctcctatgatttaatcctcggtatggactggctcgagtcatgcagccccatgtacatcaattggaagcataagtggatctctatgtcatcagtgcaggggccaatcttgctttagggcaaccaacatcagattccaccgggcactattgtggaagtccaacacattatccaccactcaccacctgatgctcagctcaattcgctgtcgggtttgaatctacctgagtctgtcaccaaactgttacagtcgtatcacacattatttgaagaacccaccacccttcctcctagtcgctcctgtgaccatacaataccactggtacccggcgcccgtcctatcaatgtgagaccataccggttttctcctgctatgaaggatgaaattgaatcccaagtaagcaagatgctggagactagagtcattcaacacaacaccagttctttctcttctctagttttacttgtcaagaagaaagaccactcctggcgtttttgtatagattacagacaccttaatgcactcaccattaagtccaagtacccggtgcctgttattgatgaattattggatgaattatatggtgcatcttggttttctatacttgatttgagagcaggattccatcagatcttactccgtaacggtgaagaatacaaaatagcctttcaaacacatttaggccactatgagtttcgagt

SEQ ID NO: 191758 - DNA, 438 bp, Zea Mays
attctttccatgctgggttctaatttcagtgaatacattttcctccctgctgttggagttagtgggggcattttggttgcatggagacacaatcttaaatcgactgggcagagcagaattgataaccatagtgtgtcggttcagttttgtaaagagaatgggactgcatggtggctaacctgtgtgtatgggccgcaaggggatgctgagaagctgctatttatgcaggaattaagagatatcaggaccacttgtttagggccttggatgttggctggggacttcaatctcatctacagtacctctgacaagaataccaatcatttcaacagagctataatgaataggttcaaaagattaattgaagacttagccctgaaagaaattcccttgcatgggagacgatatacttggtccaaccagcaagtaaatccagtt

SEQ ID NO: 191759 - DNA, 464 bp, Zea Mays
ggtctccatcaagcaattgaagcaaaagaaggtgtacctatacaaaatgaaaccataactctcgcatcaataagttaccaaaacttctttcttcaggcaagtgacaaactcttctttctggagtttctgtttcttaaaaaatactggaaagcagaaaatccaccaacaatactgtttctggtgctttttaatgctaatggccagtaacccttgttgagcattttggttgatagtggtagagaaatgaatatataaatggctgtgtgctggatgaacagcttcctcctaatcttatctttgttttattttcaatttattacttcgtcaagaaattaacagacttttgtgccagttccccaaactatgtggcatgactggaactgcagctacagagacccaagagtttgagagcatatataaacttaaagttactgttgtcccaacaaacaagccaatgatacgga

SEQ ID NO: 191760 - DNA, 439 bp, Zea Mays
gagatgtataacggttcacatcgtcaaatggtataggtcgttacctcttagatagatggtaagaaaacacccaaactaaaacacgacacaaccacatatagcacagcgctcctagatagtaccacctcactagaacaaacagccaagctagatattaagtgacaagtctcctttttaacaaatatctttctcaaatatggtcgtcattgcacaagcatcatacgttaagagacaaccttacaaatgttgaagcgaatccaacggctccaacgacgcagaaacatgccgttgtgttccatcgtactcgtaggtacctccaaaaccaaatgaaaccgtagcgattttgtatgacatcatgtgaagcaaaaaaaacggatgctagattgtgaaacattcattgatgtcgtgaaacatccatcacccagtgcacacattccat

SEQ ID NO: 191761 - DNA, 276 bp, Zea Mays
gctgcatgcttcctttgaggtaagattgctatggagttgatcgagtgatctttcctgtcatattagatggttttcttcttgttcctttgcaacattatcttgaaagtttctaggaggcagctgaggcatgcactattccttaaatttgttgtattgtgtcttccacatgtgttagttttatatcctagatcaatgggtcaatggatcgtgacaaggctgtagcttttcccataatcgatcagactatatcctaggattaaggatgtgcaacagaac

SEQ ID NO: 191762 - DNA, 289 bp, Zea Mays
gagatatcccacttctagttgagggcaatgagaagaggaagaggaggggtgttttagctattgaatctagcttcaatttggatgtttggagacaacttgatgaactaacaactagaatgttttacactggtggtctgccttttaatcttgcacgtaacccatattttagaaaggctttcatgtttgttgccaataatccaattggaggttatgtccctccaagctacaacaagttgaggacaacgttgggcggaggccgaacacgccctcgttctaagctcacaaaccc

SEQ ID NO: 191763 - DNA, 637 bp, Zea Mays
gctgttgagtgttgacgccttctcgttcctgggaggaggtgatttctctgctgagggcctggggagtctcttggttcagtccctctccctctgcagtttatttgctttttttaggtaggtggagtgtggagttgttgggtgggagagggcctggaatttatttcgagctgcttctttggagaccattgtttctcgaatctgagttcctcttcttcggagggagttgtcaattgcgttctgattgatttggacaagatcggaaggaactggcactctcggtgggcgtacaaaaactctgagcttgtggccttatcgacttcttgggggcatctgggagtagcttcagcgattcacttgagtctggaggaatggcgccgaccaagaggatggagaagctcaagctcagcacattgttgactttcatgcgttgccacaggggctctagtgatgaccactcacggattgggacagtggggttctcccgagtcgtttacgtcaacgagcctgatatgcttgaagaggagggattcaactaccccttgaatgaagtgtcgacgacaaagtacactctggccaccttccttcccaagtccctcttcgagcagttcaggagggtggccaatttctacttccttgt

SEQ ID NO: 191764 - DNA, 325 bp, Zea Mays
aaaacaggcagttagagatgtgggaggccttggattctccaacatttcgcagcaggctgttgtgggaactggtcaagttcgctcaaaacctaaagctcaagatggaattggggggccttattatgcctctggtgttgggtcttctgaagaacaatttgacagacgcagcaacttttatgcaagcaaggatgctcgaccatcaggatctgtacgtttggaaagtgcacttcttccaactccatcaatcaatgccgatagagttggtaagccttcatccaacaaaagctggaaacactctgaggaagaagaatatgtctgggatgat

SEQ ID NO: 191765 - DNA, 434 bp, Zea Mays
catgatcaaatccccatcgtccaaactcggatggacgactctggatatcgtcttcttcctcctgcgcgcggccacggcggcaaacaaagcatgcgtgacggacattcgccggagccctgcctagacccaacgccgcaccgattcccaccccagaaacggttggggacaaactcattggagattaggtggcggttgtcgctgtccacgagctgctcggatctgcagccaaggcaagcgacggcgagaatttgcaggtgatctgacggccttcgatctccctggatgtcaccaccacgagcacgtccccgcagtgaaggtctcgatccaaccctggcgccgaatcatcgccaaatccgagaacagcggggcggcttcctcgcactcagcttttttccgcaaatctctctctgcaatccgacgagcacatggcgatg

SEQ ID NO: 191766 - DNA, 839 bp, Zea Mays
atctactaacatgcccaccaacaagttcaggagtcttatggcttaacataaacccactactacttaaatagtttactaacacaagacagatcatcaaagtttttctccatgttgcattcttgctcaacctgctgactcaaacaccaatggagatgtactcattttatctgtatctctcgaagtagaccctccagcaggttccattccacctcctcggctcggacgcttgcgttcacttcagcctgggagtttgcctcgcattatcctctatagctgataggcatcgattcaacctgagagcaactccctccttgcataagcatggccatattcagcgtcctctccgctcttgctatgaccacacacacctccgactaagtcattccttgaaagcataaatagtttctcagattgcataatttaacaattaacatacgcaaatcaggtatacccgaagccctcatacctttttcttctgggttgtaggtaacctcagtattatcctttacaaactttgtttcgttataggcttatcgcaacattttctaagaacattattttgtctaggtcaaggctttaaatgggatcagataacatattgtgggaaacttgcggttggagagaaaggatctagttcaaagcccattatttctgacatatcctggaacacgtacaaaaaactgcaccctaatttgaccaggactgacaaagttctagcttgtacgggatcttttggtacctttttgttctattattcagaattatcggaggttgctcttgattctggtacgaaggggaaagaccttaaggaaggttgggacaagatactttgcgtattt

SEQ ID NO: 191767 - DNA, 333 bp, Zea Mays
tgttaggacggcgaaatatgtgctgatatttaagagctctagtttattcttgtttccaaagactgctgatagcgttggttttctaagcgagtcataatgtgttcatatctgcaagacgttgttgctggttgatggtatatttgcaggggagcagtcgcttccagtaactctgcactgctagccaaccattgcttgcagttgagctgtttaataaaatgcctgctttagaccagattagttttttatttgttgatcagttatcaatacttttgtgtatttgttttctgatcaataacctatatgcatgctccaaaatctgagaccaggcatgac

SEQ ID NO: 191768 - DNA, 522 bp, Zea Mays
acgatctgtaggatcactggcccaggtagcatcagagtaagcatgaagctgaagtggggaatttgagtcataaaataaacattgtgtttttgtccctcgtaaatatctaagcacacgaagtaagtgcccataatgaactgatgtaggagcagagacaaactgactcaaaatgtgaaccgcatgagcaatatctggcctggtgacagtaatgtaaactaagctgccaacaagatgtctatatcgagatggatcctccaaaggtgccccatcagtcggacgaagaaataagtgaagatccataggcgtggcaacagtgcgagtatcactaagaccagaacgatcaagaaggtcttggatgtacttggcctgagagagataaataccattttgagtctgcaaaacctcaatgcccaagaaatagctgagtgcccccaagtcagacatttgaaattccttactcagatacgccttcacatgagcaatatggtctggatcatcgcctgtaatcaacatgtcatcaac

SEQ ID NO: 191769 - DNA, 319 bp, Zea Mays
atcaaattcaagaaaatgattgggcattcctttcctaggttggactgagaaagcaataatgtgattctcaaggagaggcaaactggaacaggaataccagcttgcaccaacccaacaagggtatggcttaggatgaacatatgaccataagagagttacaagtggattgtcaagattacagactcgagatccttgttttttaagtttgagtgcatcttaggtccaataagggaattacctaaacatctatttgtatttgcacgagtttggccatggagtaggaatcgataattcaaactcatgcatgttttaaagattt

SEQ ID NO: 191770 - DNA, 478 bp, Zea Mays
ctttcgtcagcttgctcagggcgatctctctgtggacgagtactgccgtcagatgaagacgatggcagacactcttcgcaccctcggggcccccatcaccgacgagtgcctcgtgctcaacctcctccgcagcttgagccctcgcttcgatcgtgtgacgcccatcctcacccgcatgaagccttttcccacctttgcggagaccaagaacgatctgcttcttgaggagcttcgcctctccgcccactgcgatcgccgctcccgccacgacgctctacagcgctcctcgggctcccccctctgcctctgggggatcctcttcaccgcactctggtttcccaccgtctggagctcttcggcagcctactggctccagggaggtcgcggtcgtggtcatggccgtggtcgcaagagtggacgcaacgtccgaggccattcaccaggtggctcccagtggccatccttctacaacccgtgg

SEQ ID NO: 191771 - DNA, 553 bp, Zea Mays
ccggattccattactcatgaacaattaaattgcaagagttcaatgtaagcaacactaataaccacctgagccactgaacacaaagggtttagccaacaggcaaactttacccacctgaacgcaaatcgtgaacaaccgctaatcaccacgccaacaaaagaaaaggcgtataaatgttctaggaaattggtgctattacatatttacatgccctgtatggcaattgtagcacacaggttgagctctcaaagtgccaactttccagtttccatcttcacttcaacgcaacctccaactcatatgactgtcagtctgttgtcgttgaccttcatttcctcctgatggaaatggatcaccaccgacttcaatgcttatgctctgtgctccagctgtggagcttctccatccttctgcaaccgtacccagtatgataataatgaagaaatcaaacgtaagatcttcgttggtgctttgattcttttctccttgaaacaaacagcctttcttgttttctatatagcccagcatacaacagccaatcccactctataaa

SEQ ID NO: 191772 - DNA, 313 bp, Zea Mays
tggaaatctcaagattttgggcgaaacgatcgacgatttccgggtagtgaagaagtttctgcgcgtggcgccatcacggttctcacagattgtggtgtccatcgagatgttcgtcgacctcaagaccctgacagttgaagagctggtcggtcggttgagggcggtggaagagcgttttgatgacaagatcgatcagatcgtggacaaggcagggcggctgctgctggccgaggatgtttggctggagaagcataagcatcgttttcaccccggcaacaaggctggagggagtggtggcggcggtgtctcctcc

SEQ ID NO: 191773 - DNA, 354 bp, Zea Mays
tcaaaatgagaaagttgtgaattttctatgtttactatatttttcttttatcctcaaaatcatttttgattttaatttaccaaccctgtggatggcaactactatttttattaaagacagggtctaattcacaaatttctgggtctgtttgcaatgaaacatgaactatacaggactgcgggttaattgtggaaaactccgaggactcatactacaaaaataccacgcggcttcaacgtgctcgattctgggccatccattttaggatctaaggcccagattagatggactaccccagtgaaccggtacatgatgtgagtcgttggatcatcatcacgcggctacatttaatcg

SEQ ID NO: 191774 - DNA, 556 bp, Zea Mays
atgagaggtgctcaaaagatcccctacaaccagaaatagaggtactactagagagcttggacatcacatcacgcccgggctggccgagacgacgatgccaagtcacagaggaggcggccgctgcaagaacaggcggggcagaggtcgatgtagggaaagcaggcaggcgaagcgtgtagaggggccctgggctgtcacatcgagcgagaagggtcctggtggcaagatccttcacagacagaccaaacggatcaaactccatagaacaagagttgtcagtagtgaactgacaaacagaaagaagattttaaatgatgttgggggcgacaaggacgttggttaaacggaaaggaccgggaaggaccgtgtcacctactgaggtgacgggtagggcagatccgtttctaacaacgatggaagaagggaggggtgggggagaggtggaagatagaatacctgcgtccagggtggtgtggtaggaggtgccggagtcagccacccaatcagagactgaggtgggcgaggacagcgtcatcgtggagaaggagctagcgag

SEQ ID NO: 191775 - DNA, 871 bp, Zea Mays
tagaacatcgggggtagaaggtgctaggtgtagcctgctgttgtcggattagacaaattagatgtgaaacagatgtggttgtgctagacgaggttaggtcaagcagtgtgtggatgatagtagatgtacctacttagaggttaggcatgcctgaagttagtggtccggacgcaaggtacacgtgtcgtcaatgcatagcatacgatgatgtagatgctgcagtgagtgccatcttggatagaggcatgcttgtgagagtgtgtcctttggtggataccattggaagtggtgttgtgactcgaggaggcgacacaacaatagcagcgctattgtttggagtggatgcgtgtagtactttgctaacttcacatgagctaggaggaccgtgcataatcagttggttgatcaagtatgcatgatgtgggatgctaatggaagaaatcggtggtggtgtcctcatttatggtggcgatgatgaaccaacgataatcatggtaattagttccgtgccacatttcctacgatcgtacacttcttcaatactattggagttgagtgacactaattagtgcatgtatcatttttggacagggtcgttgtgggattgggatatagagggcaacattgctagaatcatgacacaattatgacatcatgctctagtgctatgtttgtcccgcttgagcctcaagttcgagccaagcatagttgtcatttggcaatgagtccaatgcacccgcacaagaggagtctggactcctgtgcgctcgtgtgacatgctagctgagacaacatccttgtgatatacaactgcaggccatggatgaaataagaagagaggtgagcaaaagaaacacaaggaaaagatgga

SEQ ID NO: 191776 - DNA, 786 bp, Zea Mays
gtcactgtcatagaagataacagtgtctgcacctacaaggttgattcccacaccaccactacgtgtggacaaaatgaaaaggaaaaactttggatttgtgttgaacctctgcattagagtctgcctctcttctgggggagtagaaccatctaatcgcaaatatgtatacccatataaatttatgaactcttccaagacgtcaagcatcttagtcatctgagtaaatatcaaggccctgtggccttctgatttcaaacgccttaacagaatagcaagttcctgcaacttcccacagtcaaactggatcaaacgcctatcaggaaagtagacttgacgacgaacgatagcagaccttataggagacagaatgggagaaaacttgtacatgcatttttctctatatgctggatcaataaaaacaggagactttcctttgctgcaccagcaaacagggggaggagctcgagcagctggaattgcgaatgtaaatgattcaacaaaataaagcattttctgaaagcgttccacagatggaagaacaagatctgcaaggcgtgatgaatagtccatgtggcacaatggattgttcctcttattaagaatatttgatacaggatgctttacagtcaaaacatgtctcatgtttgtgccatagacaggtctcttttggcatctaactctattccaccatgcaacagaagctgccctttctctggattcctttattctctcctcctgtagggctttctgaatatcttcaaaaatgtttgtcaaattacttccctg

SEQ ID NO: 191777 - DNA, 286 bp, Zea Mays
accaggtcgcggctcctgacgtggtgctgcccaacgttgcgctggttgatgcgcgtcacaacggggcgcacctgccacacagcgacgcctgccacggcgagcgccaggaagcccttcttgatctggggcgaggtgtggtacaggtcctggctcttctccttggccagtgccgtggacgacaggacgctgtcgccgacgacgcagatgaggttcgtgatgatggccgcggcaacgaggagccggccattctccgtcactgtgaggttgagctcgccggcgatccgcg

SEQ ID NO: 191778 - DNA, 400 bp, Zea Mays
gtgaagaaaggtgacaactcgaatggaactgaaaccgtgttaggtatgtcgtccaaaaaatcaaaaactgcgcttgtgggtggagagggatcctcaaaaaagggaaaagaggtctcctcgaagaccacatggcgagagatgatgatgcggtgagagagacgatcaaggcataggtatcctttgtggttgggagaatacccaaggaagacgcatagggtagagcgaggagatagtttgtggggtgtagtgggggtgagattaggatagcacttgcagccgaaaacacgaaggtgttcgtacgaggggcgtttgccaagtaaggcgaagtggggtgtgccggaagcaagtgtctttgtgggaaggatattgagaagatatgtggcagtaccgagagcagcag

SEQ ID NO: 191779 - DNA, 601 bp, Zea Mays
gtcatcctgttcgagctgctggtggggattcctcccttcaacgctgagcacccgcaggtacgcgcgtcgctcgcctgtcagaaggaagagacttgatttgatggtcaactttctgtgggtagataatattcgacaacataatgaaccgagagataccctggccacatgtgccagaggagctgagctctgaagcctacgatttgatcgacaggtgagagtcagagaacaaaacacatctgaaaaacttgtgctgcaaactgtacttgccattgatccgatcgtgtgctagctaggttgctgatggagaacccggtgcagagattgggcgcgacaggtgccggagaggtactcctttctctcgccgtctctccgtccaatacccccaccccctgcgacattaactgaaaaatgggatattagagcaggtgaaggctcatccgttcttcaaggacatcaactgggacatgcttgccaggcagaaggtacgttgttggctatactgacaaatcactgtttctttttctgtaggctaaacagtgacagtttcttccttgtcttgtaggtcgcgttcatcccttccacagacgacgagtacgacacg

SEQ ID NO: 191780 - DNA, 310 bp, Zea Mays
catttggatatgatccagcaatggattatgatagccacatgcagagtactgtgaaggttgaagatgcaaaaccagaggatgtcttgccggtcactgacggtgtacagaaggtagagaaagagaagctaaagaacgcaagggatggttcagataaaagaacgaaggattccctattgaggagactatcggcgccaaggaccccactgaatgatgcacaaaaacgtgcacagaacctgcgtgcatataaagcagaccttcagaaactgaagaaagagcaggtatttcacatttcattccattttcccttctg

SEQ ID NO: 191781 - DNA, 454 bp, Zea Mays
gttttcttacagatgccacatcacaacagcctttttacaggccacaacaacatttccccacagcacagctcaaccaaacaggtcctgcttctgtggccaactccaacaacatgatctgtcgattccgatcaccctcattcacaaatcaccgctgcaatggtccgtaggcacaatccttcaaattagggctttggttgcctccaaggctcccacactttctaacctatgattctacagtcacttgtccttgtatgtggcaatgaacccacctttcctaagcactacatgctgttgatggttgttgacctctggcgtcctgagatctgcatgctcctctgccctcattaaaatcttacaataggcaaatgcttatttccctctttctcccattgagtaatttctgcctgagtctaagacccggtgttccctaccccacttcaattttgtgcaaggc

SEQ ID NO: 191782 - DNA, 289 bp, Zea Mays
tcgccgccatcgccgttgatttctcatcaccaccaccatcaccatcatcccctacacacctataccttatggctaaaggtgaacggaaggtacaaaatgatgatcctagtgatgttgattgtggtagtgatagtgattacgagtatgcttcccctacctatgatgagctagccgaattgcttaaggaatatactcaagtcattagaaaatctaaggcaaaatgtgacaagcttaaagatgaaaataagtccttgattgctaaatatgacataattgtcaaagctagtga

SEQ ID NO: 191783 - DNA, 2462 bp, Zea Mays
ctgtcactcaaactgttgatgaccatttatctgaaacaagaagtgggaaattagatcaatcaacatgcatcacaggattagtctctgacaattgtgttgtctcagaggacaaaacattgatgagtgaaggtgaggtcaacatttggtggtaatggcatactagttgttaatttattctctgcatagccaaatctataggctttaattatgtttaagttatatggcatcacaattgtattattattttttgatcttctttggatgctggaaagctggcatattaataccctattgattttgtgatgttgtaattagctttgtccattattgtcatgttatatactcaaagggagactttgttggtccaaaatcaccaaatggtttatcaattagtttcattgtcgcagaccgtgaagagcaaagccctgtgtccggagaacagagagttagcttggaagcaaatgccaatgagcctgaggaaaagaacctagctaacgtcacatcaactgatctccacaccaaaagtctgcagcatgatattgacagaatagctaaagagactgataaaggtacaactgaattaatcctgtatccataataaaaactctgcaacattgatgagtgaagataatatgtatgctgaacatctaaatccacctgtgccagctgattattcactgttttttttctaaagatcttgcttagtaatcttgcttcaagattttcaattcactaaattaaacttgctaaatctccagatgttttgtctttggttttccctattgaagagcatgaagaaaaatatggagtgagccctatagctgttgaaaagtgcgtctgtcgtgaagcaagtgcatgtgaatctgcacgaaaacccctaaccgttatcttttctaacaatctccacaccaaacatctgcaacatgattgtgatgtgctaattaaggagactggtgaaggtaatattgcattaatacttgttccacaacttgttactgatctgtggagatggtgatgaaaacttgtgctgtttgcactgtgtttaatttaccaattttaaacatactgagttctaagtcaagttgttggctacttgtaattctaattatttttaataggctttatgtttgttctatctggaacagctaggcatatgtttcattgtcatttgttgtcttttaagtatcttacatttttttgaatgtattctttccctttctcagaagttttagctcaggagaattgtaatgaccagcctgttcctgcccagactgaccaagaaattaagttaaacgatgaacttgctgatccgggtatggactgtgtttaatttaccaattttaaacatactgagttctaagtcaagttgttggttactttcattctaattatttttaataggctttatgtttgttctatctgcaacagctaggcacatgtttcattgtcatttattgtcttttaagtatctgacatttattttttaaatgtattctttccctttatcagatgttttagctcaggagaattgtaatgaccagcccgttcctgcccagactgacctagaaattaagttacacgatgaacttgctgatccgggtatgtactgtgtttaatttaccaattttcaacatactgagttctaagtcaaattattggctacgtgtaattctaattattagatttgtgcattattgtcatgttatatactgaaaggaagactttgtcgttccaaaatcaccaaatggtttatcaattagtttcactgttgcagaccatgaagagcaaagccctgtatccggagaacggagagttagcttggaagcaaatgccaacgagcctgaggaaaagaacctagctaacgtcatatcaattgatctccacaccaaaagtctgcagcatgataatggcagaatagctgaagagactgataaaggtacaactgaattaatcctgtatccccaataaaagctctgcaacattgatgagtgaagataatatgtatgctgaacatctaaatccacctgtgccagctctcattcactgtttttttctaaagatcttgcttcaagattttcaattcactaaattaaacttgctaaatctccagatgttttgtcttttgttttccctattgaagagcatgaagaaaaatatgcagttagccctatagccgttgaaaagagcttccgtcaggaagcaagtgcaattgaatctgcaggaaaacccctaactgtcatcttttctaacgatctccacaccaaacatctgcaacatgattgtgatgtgctaattaaggagactggtgaaggtaatattgcattaatacttgttccacaacttgttactgatctgcggagatggtgatgaaaacttgtgctgtttgcactgtgttgacattttttaaatgtattctttccctttctcagaagttttagctcaggagaattgtaatgaccagc

SEQ ID NO: 191784 - DNA, 772 bp, Zea Mays
aaagcagtactcgcagatgacaccctatctgccacagttgaaaacaatgagacgggggcagtcaacagcaagcaccctcgtattgaagacccacccaccctagaaggcaacattcacacatgcagctctgaaaaccccccgcgacgatgccccaccgggatttgctctcgcagcacacctcctagcaaaaggggtcgaagacatcataaggcgaagacctggggatctcaacagaataccaactcaaactacgagctctccgcataaaaaaacaatcatcttcagaggcaaagatacagccaagaggtaacgaaccaacatgcaaagtgagacaattgatcatggaaagcaagagcattggagcaggaaattgcaggcatgcaacgcgaagacccccctcaccaacaaccagttggtgcagtcaacaaccaaaatatttatcacttccataggccagccaacatgcaagttgctttccaaggattaaactacctcgatgagcgaagcctcctatcagcacagctccaggcctccccgtggccgcaaaactacagagcgggcacctatcccaagtacaacgacaatacagacccaacccagtataatgagttaccaggtcgatgtcgcatcctcgggaggagatgactccaccatagctaagtcattcatcatggaagacctcaccctcacatggtactcaaggctatcgcctttgtcgatcaactcatggaagacccttcgtgataaattcctgctcaatttccaaggctat

SEQ ID NO: 191785 - DNA, 1025 bp, Zea Mays
agctgttcccaaggccttttcataaaatttcagcactgctgcctgcttttcttcttgtgtgatagccatagaggtttctgtatgcagcttagcaataaaattctttttctttctgaaacgggcttgatggtgaaaaaagaaggtatttgcatctccttccttgagataaaggattctagaatgcagtctagcaatggtacgttccaaagaagcaagaccaagcagatgtagtttaagcttcttttttagccattcttccctgtttgaaagatccctggaatctcttgcaatctccagtctatgtattatttccttagccatctcaatatgtaatttaatgttaccaacctttctttgcccccacttctgtaaatctttactgagccgttgcaacttgagaaaaaggcgctctactgcacttgtggactgtacatgagcttcccagttccgttgaacgacctcaaggaatcctggcacttttgcccaaaagctttcaaaatgaaatctcctcttgcctttagtttggagttttaaaccaagaatcaaagggcaatgatcggatacattagacgccgaactttggaggactgaatcaggaaatatattctcccattccaaacagcaaaaggccctatccagccttaccaaagtaggtgaactcctctcgttggaccaagtatatttacggcccaggagagggatttctttcaaatcaaatttatttaaaaatctccaaaaccttcccatcatgtccctgtccagattatcattatttttgtctgaagcctgataaatcatgttgaaatctccagctgtcagccacggctcattacataacatcctgatatctttcaattcctgtaaaaacgtaatcttttcttcctcacatcctgagatctttgtaagtgaccacatccacaatgactgtgttctacattttgctttacatgttttgtgttgaacacttaggtgttttaactgtttactgtttatttgctttaaaaatgccaattgctgcctagaat

SEQ ID NO: 191786 - DNA, 481 bp, Zea Mays
gttcttactagaggaagaacactgaacggagattacagacaagaagagacgaagaaggaggattgagcgtgagctttggtattctgttatttccaaaactgaatgtcttttccctcaactctcctatttattctattacaaccactatttaatacgggccttaacgaatccattcggcaccagaaattctggagctgggcttcctagtgcgtcggcccaccatcttgtcttgtggcccttccagcgttgtctcccctgctccatcttcagaatgcccttcagccattccaggagagctgacacgtagttccttctattctgctgtgctcgtggtgcattcggttggtacggtatcattttctcggattattttttatgttgtgaagtttatatatttgcgcttatgaaaaaagccatataaatggcatttaggggaaggatatggtgcgctttgacatttctggttatacatgccatctgc

SEQ ID NO: 191787 - DNA, 360 bp, Zea Mays
atgaagactacctacgcggaatatgcatacacaaactcgtgagcttttgtgtaactcaaagaaagtgaaataaaagtgtaaacccaatgagcatagacgtccaaccaataataccacagccttgaaatgttacatgcactttcccccttacacacaactcacaagcatcatcatacccgtatgatcctcacaaacatttgttggatccaatccagaatatatgttcatcccaccctccactgttcaatccggatcagtttccacttggatgcttgtgtgctctcgtttgtagaatgcagttcctccattttgtggggatcatttgtgatctctgaactggagtgaaaacagtcgtccctt

SEQ ID NO: 191788 - DNA, 608 bp, Zea Mays
ccctgtcgcagccaaatcatcagaagtcattcccccccccccccccccccccggcttcagacggagtctgggagactaccacgtccacagccggagagaatgaaaggtgaggggggcaggtgccaccatggacccgctgcgatgcttcggaccttgagcccaaacggtcaaaaattgatctccttccccgaggttccccaccgacttccctgccgtcgttatcatcaccgccatgaggaggagagcgggaacgatgacgcctcctctgtcttgaagaaccaccatttactccggaatcctgagaagggatcaaccgatcactcctcaacgtcgagaaactaatagaaatctgatatacaaggccaagccttccatcttcagtgttaactcccgtaggttccacaatccaaaggtctctggcagcagggatggttgccgggtcaaaacaccatccagaacaacgaaagacgtcaagattccggagctccagggtatcaggatggacttcatgcacccaaacacactgattcagtagctgctgaactgttgataactcccatgcatgtaaaggaataccagtcagttgcacttccacagggatcggcagg

SEQ ID NO: 191789 - DNA, 329 bp, Zea Mays
ttttaaaaatttaacctgggctgtctgattaatctcaacagcgctgattagatcacggactctatgcgaaaaccgcccatggatcgaggatcaatggttaagatttttattaaggatcgatctcttcctatccaatcgattgtagatctacgactcccgcacaataaatgaactggtttgctccacttataatcttcgtcgtccgctacacgaatcaaaggatgtgtgcctcccctcccccacggcagtcaaggacggcggctaggcactctgcggtggaggatcgcctgagactagcatcccggcggagcagcgaccaaatcctaagc

SEQ ID NO: 191790 - DNA, 385 bp, Zea Mays
caatcagaggatttaactgcacagattttttttactaccaacatatatttgaaaacggggatagtattacctagggtgacaaggacaagaatgcatgtgaacatttatcaaagcccacaaagtataggcttgtttcatgggtcatggtgaccacaaatatacagagcccaaccctttgaagaaatataaacgatcaaaatagtttaatatggaaaaaatacaaaataatggagtacaattgaaacagttttatctggaagaaaaatatgaaatgctagagtaactatcagtaccatatcaccatactatatggctatatgcaaaaaccagggataccccaccccattaaaaacatactggcctaaagccaacacctagaaaaaat

SEQ ID NO: 191791 - DNA, 869 bp, Zea Mays
gcacggtccgatcttgatgatgcaggtgaaatagtaactccaactcctagggtgaaacgtatattgtcaagtccaagatgccttcctcatgtggcccaggttatctctagcttcaagtgtttgctatctttttccaccatataagtggatgttggagactgtataagtacaacataaaagtgacagtatcttagtctacaaccatcagattaatgtgtataagttaatacaatgcaatccttaaagctctgttgatgcaagtagcatttccttgaactgtcactaaattgtaactctgtccgcaatataatgcacagttgtcagttgtgttataagatataagctatttttcgtgccattaaaattcatgctttaatttgtgattcaattatcttattcaacttttcagatgtatgtttctctttcttttgaacaatttaattgaccaaatgctgacaaaaaacaaattgtattgtataggttatgcttactggggaaccaagcattgttgaagcagctgcctcattgcttatggctattgttacaagaaaccctaaagctatgattcgattatacattactggtgccttttactttgcattggcatatcctggttcaaatctcctatcaattgcacatttgttttcggccacacatactcatcaagcttttcatggtggtgaagaggcagcactatcttcatctttgcctttggcaaagcgtagtgtactgggtggactcctcccagaatctttgctgtatgtcttggagcgcagtggcccttctgcttttgccggtgcaatggtgtctgattctgacacaccagaaattatatggacccacaagatgcgagcagaaaaccttatttg

SEQ ID NO: 191792 - DNA, 1341 bp, Zea Mays
gcgaagtgaatgtaagggggtcggagaggtggggcaacgcgtggcatggttagaggcaacgtggtgacgcatggtgtgggtggaggctacaaggccgcaggtggcacggtcgaaggcgaaggagccatgcatggcacagaagaggtcgctgggaccggtggtaggggaaggggactaggggaggtacttagacgagatcgacatcgagaagagagttgaggtcgagatgtggggaggagccagcaaggggaaaccatcctcatcgaaaacatgtcgagagatgatggtgcaacgagtgagaaggtcggggcaccgtaccccttgtggtcacaggagtacccgaggaaaaaggtagcgtgctgatcggggcgaaagtttgtggggaacgatggcagaggtattaggataggtgcgaatcatgcgatcagtcttgccgttttgaggggaggtgcaaggatatgacatccgcagctacatgtcgtgcaagagaaagaaggcatgagacatggagttatcgaactcctgcccgttgtcacactgaacaccccagatggtgcaaccgaactgagtcaacacccatgcgaagaagtgagataaggtggggaaggtgtcagacttacgacggaggggaagagtccagaggtagtgagagaagtcatccatgatgaccagatagtattggttaccggaaaagctcggtatcaaaggggtgagcattgtgggacatggaagaggtgaagggtaagtgattgtggtgaccaagctgacaagcatggcaaggcgaggtaacgttgccgcggggtggggaatgatcaaggtggacgagagtcgagaaaggacgtcatggctggggtggccaagacggtggttccaagtggaggcagaggcagtggtgacgtgggtggagggtgtggcaacacgtgatgtgggaggtatgtccggaaagtgaataggatagagagtgggaaagagttgtcgcagcgagcgaccacaacacgagtggtaagatcccagatggtgagcctccggggatcaaactctatggaacagtggttgtcagtggtgaagcgacgaaccaagagaaggttctatatgatgttgtggacaacaaggatgttgttgaggtacattggactaggaagaatcgtcgcttactgaggtgacaggcagagtcgacccattaccgacaatgatggaagaaggtaaagtggggctgtggggatggggtgaagaaacagtaccagggtcaggagtggtgtggtacgaggcgccgcagtcagcaacctagttggtgggagtaacatgagtgggctacgaggacatgtggtggtacgaagagag

SEQ ID NO: 191793 - DNA, 3451 bp, Zea Mays
aaccagtctaagccaccacccaggcccagctcacctctttcctctcttctcatgcccacgcgctcgcctatctcatagtccttccccattccgcctctctagctggcctgtcgaggaccctcgccatcctccccaggcgcaccaccaaacggtccaaacccccagcggcggcgctaggatttgagtctcagcgcgccggcaccgccaccgccaccggcggtgatggcagggcaggagcgtaggacaatcgatctggaggagggatgggcgtttatgcagaagggtatcaccaagctgaagaacatcctcgagggcaagcccgagcctcagttcagctccgaggactacatgatgctctacacgtgcgcctccttctccccttactcctcctcgccgccaccgtctcctgcgcagcggccgcttggtttcacaccgcgatccgcctcgatccggttctgatctaggttttggtcctcttgtcgcaggacgatatacaacatgtgcacgcagaagccgccgcacgactactcgcagcagctctacgacaagtatcgggagtcgttcgaggagtatatcacctccatggtgagcctcctgttcatatctatctttcccatgtgaatgtctgtattagaacttcattgttttgtatttgcggcgttgtattaaggttagatttcctactcagagaggagtaaggcagcttggatgggagtttttttagcttttgttgacggggaacaaatcgtgctctcagagcctggggctcacatgagcacttcaaatctggtacgttctgtgagcaatcaacgttaaggtgggaggggataaatggaaaattgccatcgaatcgaaactgagttgaagggaggtaaatgaaaaattactgatcactgttgtattgctcacaaaggggctgattggtttgctgcgcgctgaaccaggctcgcgagatgcaggaagcgctagtttggttgcttggtccagctaccgagctaggctcccagcatgcaaaagtgcccactctaccaggcgccggggagacgtgagaatctgttgtttcgggcgagccagtctcgagcggtgcaagaacgagctgctttggcaagcatgcagagaagaaaatgctgctgggcccgagacatgcaggcaaccaatcgttctgtgagcaatcaacgttaaggtgggaggggataaatggaaaattgccatcgaatcgaaactgagttgaagggaggtaaatgaaaaattactgatcactgttgtattgctcacaaaggggctgattggtttgctgcgcgctgaaccaggctcgcgagatgcaggaagcgctagtttggttgcttggtccagctaccgagctaggctcccagcatgcaaaagtgcccactctaccaggcgccggggagacgtgagaatctgttgtttcgggcgagccagtctcgagcggtgcaagaacgagctgctttggcaagcatgcagagaagaaaatgctgctgggcccgagacatgcaggcaaccaatcgttgtctccaccaggcctggctgtatagatacggaaaccagtcaaagcgctactgcacctctagagcctgactcctgctttggtgtatatggcgatgtcctcatttccttctgtgtttctgctaaatgatacattgatcactagtcaggttcattcactctgtagatggacattcttttgggaaaaaatgagagttgtttgccatatatgataggtggtgaattcttatagtatatagaattttcctgatctgtttgattgtaatttgtaaatgaattaattaaaactttctaatgctgcaaatattgcagtggcagtgctctcttccccttcatctgtccatctcttgatttttagagggtaattcaatctctttaattttattgtaagcatcttgatttggtgaaacacttgatctagctacttgacgtgccttgtaacaattctgtgtccatttgtttgtacacttgtgcctgctgttctgttggctccagtagattcattagatgtcctgtgatattgctgtgtctattttcattcgctgtttgttggaacttgtagcttctgttatgggcttatcgagggtagacagcaaaccaggattatttcattcactccgtagatacaaatttctttttgggagaatgagggttgtttgtcatagatggtagaacccttttgtaataatatatacaattgtcctgatctgtttgattgtaatttgtgaatggagtaatcagaacttctttcatgctctcttccccttcttttgtgtattttaaatttctgcagcacaattcaatctctttaattttataattgtaagcatcttgattggcgaaacaattgtcccatctacttgacaaacaattttgtgcccattctttgtacattgtagctcatttcttatctttataccctttaaagcatgagtttcgtgcgtcatgcgcgaagggcgtagcgtcgatctgtttattctctccccacgtcttggctaacaactaggccgttaccttccagatgggccgtgagaaaacacctaagcgcaacataacaccaagccacacgcagcgcaacgctcctggataataccacctcgctagctgaaggagtatgagcgaccgagcgagctatagaaagggggcatgtctccttttcaactcatatctttcttggccttttggctaagacaaagtgtagtgtctgcagtttaatatctgctatgtgggccatatgtccactttaattttatttttttattggaagggtccaactttaatcttaaatttgatttttgtggggcgggtccatcacactgggttgccactggacccttgggtgtcatacaattgttgcgctataccatcaaatatgattggtgtaccgtcacacgggcattgtactagtatatcatgtagactgtagagagcacctttttgtgtttttgcaccgcctcctaatggacaggagttggacactaattgatgctatctatggcaggaagataaataatggattgcataattgaatacacatggatgctagtttcaatttgcaggagcttttctgcagcttgctaatttattgtttaatgagcatctttaatttataaaagaaacttatataccctccttgagttacaggtgtttttatgactagagattgaacccacgagttgtatgatgctttcttcattgtatttgtacgttcacttctgagagctttctcactaatttttaatttcatgcaggtactaccttcgctaagggagaaacatgatgagtttatgctgagggagctagtgcaaaggtggtcaaaccataaagtcatggttcgttggctctcgcgtttctttcattaccttgaccggtacttcatatcaaggaggtcacttaccccacttaaagaagttggtcttacttgctt

SEQ ID NO: 191794 - DNA, 329 bp, Zea Mays
gtccatgcagttgcacagtacagtgtgaaagtcagtggtaccgccgtccagtccagctccagctgcagcccagtggtcctatctggaaaaaagagagcggaacagacagtgatcgagcggggggagtccctgcctgcctgcatgatgaatctgtatcagtgggtggagggatgagaaggcgtggagatctttttcagaagggcgtggcgtggcccggggacggaaaggtgaaacgaagccattcatggtggttcggcagtgcagcctttgaaacagaatcatgagagcccaaggtggagagaaggcgagaggggtggggacaacggggc

SEQ ID NO: 191795 - DNA, 706 bp, Zea Mays
gttctgttgtcccctgctgctgagaagatggaagtagcagatgataaggatgaacctggtgttaaggagttagctgaagttaaagtgttcgccaccacagcagtaccaattattgctgagagtacaagtaagaggaaggaagtagaccacgtccctgctgagctgaaacctgctaaggtagagttttacggcagaactacaagatcacactcaacagcagctgctgcattatcgcccactgtgattggaagcaagttaagaaaggcaggagatgtgcacacaaacggagaggtgtctaaggacttggaggttcctcgaaacgatgctcctattaccaggtcactgaggaacagagttgttcatattaacaacagcgcagttgatggaactcgtgcccggaagaagcttggaaccaagaggaagcccagtagtagaccagcaactcacgggcgtcagccacctgtacctcctgtagaggataaagaacaagttgctgtgccctgtaagttctcccaacacaggcgatcaagcagaaaccgtcctcggcctgatgaactgttaagaaacacatatttagaaaataacaaggtgaatggagtaccagtggggggcaaggacttgagtatagctcatcgattgacacataacgccgctaaggccagcgtgggagatgttgagtcgctgtcgccaggtttcgaagacagtc

SEQ ID NO: 191796 - DNA, 418 bp, Zea Mays
tactggagccatgctggagtcatcttggatgtgcactgctctatggagatatatactgcatgattggttggttgggccccgcgccgaggtcccgtgcatgcgttgactgcgcttggccgtgtgcttgattggctgcacggcagcgaccgagcctgtgtgcgcaggtgcaaggtaggtttttttacccttgttggcttgcatgcgtggggaagtaagaatcatccgtttcaaccaatgcaggcctccgcgagtcaggcgcggaggctgctagcaaccaaacaggaggataatgtatattactaaaaatagtagcttagttatacttcacctctgcaatgtaagtacttgcctccctcaatactttttatgccctgacctggtaagtccctcagtgacacactgacacctatctataaac

SEQ ID NO: 191797 - DNA, 277 bp, Zea Mays
atgttagcaggttaccattgctgctatgctatcgttagaatgtatggtgcacactgaacagtctggtgctctcgcttgccaaaaacccaaagccgctgagttcgttgtcgccactacaaatgccaccggatagtctggtgcacaccaaacaatctagtgtgttctctttcttacactggctagcttctcttcgtaaactctaggcactcactggacagtccggtgcacaccggatagttcggtgtccctctttcagcaagctgatttttcttctttt

SEQ ID NO: 191798 - DNA, 712 bp, Zea Mays
caaaaactgcatcgctaatagaaaaacaggcagcagggacctataccaaagcagtcttcagtaggtttcaggaggaatttacagagtctctagggtttatcattcagaaaaccgaagacggctgcataagtaaatacagcatcacaaaatatgaagatccatcagacacattctgcgtgacttataatgcttccaataagatggcaaactgtagttgcaagtactttgaattctccggtattctgtgccgccatattcttggagtatacataatagttgatccacgaacacttccaactgaatattttatgaaacgttggacaaggaaggcaagagatgatgatgctttgttagaagataataacaacaatactcatgatgaggatgcttctcagtccaccacaagccgctacaataccctatgtgctgatgccatcagatgtgctgagaaaggagctggatcggaggcagtatataaggcagcaaaagatatcttacagaaggcatatgaagagattattgcttatgaaagaaatactggccagggatctcaaagggatgttataaacatcaacgaggatgtcacgattgatgatgcaatgaatgataaatctatgccagattctggacgaaaggtacacctaatatcgaactgtaaattcttcaggagaaccatattcttgtcagcattattctgtgctatgagtgcaag

SEQ ID NO: 191799 - DNA, 570 bp, Zea Mays
tccctcagctttggaatacagaaggcccagaacatccatagcaaggataaatagcatcggggagagaggatctccctgcttgagtcctcttctatgcgtaatcagtttacccgggacaccattgagcaacacctgagtagtggaagaggctaataagccacatacaatgtctcgccagatatgtccaaaacccatttgctgcattacttcaattaggaagggccaagagacagagtcgaaagcattggttatgtccaacttgaaaaacagtcttggcatgttatgttgatggaacaaccttgaggtttgttgcactaacatgaagttgtcctggatgaaccttccttttataaaagtgctttgacttggggaaaccatcgcattcaatctttttgccaaccgattagccagaattttagtaatcagctttgcaaaactgtgcacaaggctgattggtcgaaagtccttaacctgatcagccccatctgtttttggaatcaatgtaatgtatgccgtgttgagtttactgaaatgatcaaacttcctgctccaaatagcagccaaggcagc

SEQ ID NO: 191800 - DNA, 413 bp, Zea Mays
ttcatgtgccgtgatggtaatgtttttgacacaatgccttggccactttagtgatgctctatggtctaagtccgtgccctggagtaggaaagagaaagtttaatttgaattgtgttagtacctttttcaaagttgagagatgttgatttgtgttgttagaattgtatgctgattatctttgtgaaatttgtacatgttaccagtgttggccctccagtccttgaaacagattttgtgatttagtttgttcttcactgcaatatcatcgtgtggttacacatttccacttgtgttcatatgtgatagatgccagaaattggaaagaaagtaacggcagctgttatctaggtaaccagatattgaattgtattggaaagaaagtaatggtagctgttatctaggtaaccagatat

SEQ ID NO: 191801 - DNA, 474 bp, Zea Mays
gccagtgcttccgccgccccctcttcgggttcaggggatcgggcgccgcgtcaggaagcgggacccgcggctggtgtgcccgaactatctcgcggggatagtcccatgcgcgtgccccgaggtggacgagatggtcgccgctgccgaggtggaggacgtggcgacggagttccttgctggcgcgcggaagaagactaagactgctggtcgccgtggcaaagcggaagctgcaggtactgccggaggaactgtccgcgcggcggtggcggagatgaagtgccaagtgcctggctgtgaggcggacatacgggagctgaaagggtaccatcgccggcaccgtgtgtgtctgcgctgcgcgcacgctgctactgtcatgctcgatggtgtccagaagcgctactgccagcagtgcggcaagtaagctctagtttctccactcctaactgttttattaatcggcatgaaacagattcg

SEQ ID NO: 191802 - DNA, 438 bp, Zea Mays
attttactaatctcaaaaccatgattttgggtgttacaaaaactgaaactaaatactatccttgtgtcaggaagttgaaaaccgcttcagaacctattttatgatctacaacatcattgccaatagctgtcctgttcgttgaaatatttcttattgttcagtttttagagctgtaatattcactccatgttccatatatcaattatcacactgatttttatgtttgctattctatgggcttaaatattattctgtgcaatcgggtaaaccagagtcttaaaatgccatatattgcattcctttatggcttgctacaaagcaagctaacaccatgtgctcttctcacaacctttgagcataacatggaagtcccatactaaccataaactagcttccatttactagtatctggacattagttgaaatgtatcacagcat

SEQ ID NO: 191803 - DNA, 276 bp, Zea Mays
gatgtggttggtgccttgcttgtagaagttcagcaattggaactaaaaaggcttgttttcttaacatggccacttcaaatgctgttaaatgctctgctcgaattcttagtgtaatgcgtgtaataaaaaattctgatagccactttcctagtattgttgcttatttagccaacatggaggaaagtttgcgtggcctcttggttggttcactacaagatatgcagcagaaagaaaggtggcatcagcaactacaagaagcttcgaactgcagaactg

SEQ ID NO: 191804 - DNA, 332 bp, Zea Mays
agccgaacggtcaccaccaaatttggatgggagccattgaagacaacaccatttctatgcttccacaacatccaagcgcctaaagcaaccaaggagtcaaagccctttttactcagtccacccaaccgagcactattgaagcaccaccagtgatcaaaatcatctatatcctgtcctggaaggaagtcctgcaaaccaaaaggccttagcaactcaaaccagaaatgtcgcgcgaaggagcagcccaccagcagatggttgatagtctcttcatgttgatcacagagcgggcaaagaagcgactgagtcaatcctcgtctagccaatctatc

SEQ ID NO: 191805 - DNA, 288 bp, Zea Mays
gaaggcagccccatccatcaacgaagcagcaaaggcagcgctactggcggagaaaaaaggcaaggccctcgcggacaacaccccccaagaggccttcgaagatgaagctatcagcaaaagacagtgccaagaccaccccaccccgaaggcaccctacgcacctgcagctccggaggcgtaccacgagcaccaccaccaggttttgctccaccatagggcaaagacgcaatagaagatggcaaagtcatcggcatcttagccaaagaccagctacagctgcaggcccta

SEQ ID NO: 191806 - DNA, 1003 bp, Zea Mays
ctacacacccacaacctcttcctcaagtggtccaagtgcacctttgctccgaacttggtcacctgtctcggccatgtcatcttcgctaatggcattcagaaccttggccaccctagggtggctttctaggttggagggtactatcgaaagtctatccaaaattttgccgcaatcaccatgccacttgcctgctatgcaaaggagtctttgcctggacgttagacattgctaaggcctttgcagcactcaatagcacaccctctcctctgatccaatattgcagatgttggacttcaacatgtagttcgatatcgattgcaatgcataaggcacatgttttggcactgttatacactagggggttggtcccctagccttctttggtcgaccctttgctgcccgccactacaagctagcggcatttgaatgcaaactcattggcctgatacaggttgtacaacactggcgatcgtatctttgaggtcgtcgcttcctcgttcacacttatcattacaatataaagttttttcttgaccaacaattgtccactatgacctaccaccagtggatcagcaacttgtttggcttcaattttgtgctggagtactgctcggggcacctcaactctatatatagttgatgtgttgtcctgctgtggctctaactctatggccacagtcatcaaccctgactcaaaatttgcaaccactgagctactcgccctgtcagtgccctcgtttcgtcttcttgaggacatacacgtcgccacagaagatgacgcagaaggcgatcacattcaacgacagctgctggaggcttcccttgctcctcgcatgttggggctagaacaccacacacatcgacccctagtgcacttttgacatcttttagagcacccagtatagcggcccttggacacctcttgccctagcgtagtccacaacttatggcctcatctacaacaagaacatcttcatgttagcacaactcaatatgtgccact

SEQ ID NO: 191807 - DNA, 654 bp, Zea Mays
gttcaagcagaaactgatataattgatgctcttactgttagacttccttatctaggggtgactatccttcctcttcagttcaggcaggtaaaggatcctatggatatcatccgcatggtgataacatgtcaagcaggtgcataccttcattttgaagagatcattgatgtcgctaaacttctgggattaagaagtgaagaggaagtagcggatgtggaggaggctattgccagagaagctgtggtaaatggtgatcttcaacttgcccttgatatctgtttaaatttaacaaaaaagagtcatggtgcagtgtgggatttatgtgctgcaattgctagaggccctccacttgacaatttggatactggtacccgtgaaaagctattgggtttcgctctcagccattgtgatgacgattctgttggggaattgttgaatgcttggaaggagcttcatgctcagggtacttttgagaaattaatgattacaaccgcaacaaatcctcccaatttcttgattgatggatcttcaatcacaccacttcctgtacaaagtgtgcaagacatacttgacctgagagatgacaatggccatgatagacgtagcgaccttgtgggaattgttaaagacatgctgtcaaaagtttgcttggac

SEQ ID NO: 191808 - DNA, 439 bp, Zea Mays
gtaaaatgctgtcccgggcgttccgcaatcgttttgttgaagtgcatgttgatgaaataccagaagatgagctagccacaattttggagcagcgatgtagaattgctcccagttatgcgaaaaggatggttgaggttatgaaagaattgcaaacacatagacaaaatagtagagtgtttgctggcaaacatggtttcataacacctagggatctatttcgttgggccaatcggtacaggacatttgaagggaagtcatacgaagatctggcgaaagatggttatttactgctggcagagagattaagggatgtcaatgagaaagttgttgttaaagaagctttggagcgtcacctacgtgtaaaactcaatatagctgatttgtataactcggtaacgattccatcattctatatcatcattttaattttgcagtttca

SEQ ID NO: 191809 - DNA, 307 bp, Zea Mays
gatctagtgacactagtgtgcatcacactaaactaattagacatatctaggtcaaactactagttcatactcctctttgtagtacgatcaaagaaaaaacaaagtcctgaactactcttagtgtctctcagttccaatcgacaattatagtccattcttaatcttgttttcatcctttaaaaaccacaatgaataccataagcacacatggtaaccatatattgcccagaccattctccattattgtgacctaactcaagcttgtttgtacaaaacacacattagtcataataatattgtattgtca

SEQ ID NO: 191810 - DNA, 624 bp, Zea Mays
gaccgtccgagaaggacattgtcaagagtgcattaaaggtaccggagaatcctcttcacaacggtaagatgtgtctcctgcgtatcatgcatgtggaggaacacctaatgaacagtctgttgaaggtgaggtaccaaagccctcacaaggctacggcaggcagtggggacattactggagcactagagggaaccttcgcctgagcatctactggagtggcacacggctaacaatccaacatgccaatgcgctcaagtaggtctagagtatattgccgctgctaaagaaacaatgtatcgggaccgtgctcaactgcaatacccaagaaatggcaaaggtggcctagatctttcatggcgcactcctgctgcaatgctgaaatagtgtgctgcaagatagttgtagtggaggctgtgagaacaatatggtcgacatagagaaggtacacagtgtcagtgcatctttggtaaatgaagtgtgaggtgtccaacttagccttggaaacctaacaagaccaaaaaaaggaagcaaaccagctaaagcaagcacaaggtgcctgcttcagaccatacaccgacttattgagtttacagaccatgtccgtatgagttgagtcaatgaaac

SEQ ID NO: 191811 - DNA, 785 bp, Zea Mays
gaaccagctgagtcaaccagaaccaggaacatcagatctttatttccctacagagtactcacaatccacagtaggacagttcaaagcctgcctctggaagcaatggctgacctattggcgcagcccggattacaaccttgttagattttccttcactttgttagttgccttgctgctcggctccattttctggaggataggcaccaacatgtaaattttcttactttcttcgtgtttggttgctggtgccaaccttccaaatctgaaagtgttggtgtattctattgcaggggagattcaaccactctcaggatggttattggatcaatgtacactgctgtgatgtttgtcggcatcaacaattgttcaactgtgcagccaattgtttcaattgagaggacggtcttctacagagagagggctgctgggatgtactctgcaatgccatatgccattgctcaggtaaagaaatatcatagtatacagaatacagtggtgactaaggtgctatcttctctccgcagtcgctcagtttttatgcttcgcaggttgtcatagagataccatatgtgtttgtccaaacaacgtattacaccctcatcgtatacgccatgatgagtttccaatggacagctgccaagttcttctggttcttcttcatttcctacttctccttcctctacttcacctactatggcatgatgactgtctcaatctccccaaaccatgaggttgcatccatcttcgccgcagctttctattctctgttcaacctcttctcaggc

SEQ ID NO: 191812 - DNA, 451 bp, Zea Mays
cacggatcgtcggctaggatcaccaatctcttgctatcttgtttagcactatggctccagtctcttgctaactcgtttagcaccatggctctagtctcttgctaactcgtttaacactatgactttgaatccacctgttgcggtcatcgactgcgtgtttgactctagcgtctccaaccacaccaacaacaatgatggtaatatctcccttttccacccctctcattcaactacatctatcattgttggtaatggctccatcctccccgtcaccatagcaggtgactcagttcttcccaggccattctaactaaacaatattctcctcacctcggatatcattcatactcttctttctatttgccactttactactgataatattattccgtgatcaccagattcgatagcttcagccctctacacactacgcctcccaaggtctcttgcc

SEQ ID NO: 191813 - DNA, 271 bp, Zea Mays
ctgtttccttgtaacttccctgagtaatgaatttttacttcaacctttctgttggaaccataccgaccttacccttgattgttttctccacttcgccacttcgagagtcttgccttaactctatcctttgtcattatcaccttcacctttgacacatctatatattacttgatgtttatcttatacctaccctttaaaatctcctctcttccatctcaatctgagagttgcaacataccgactttcccttggtcgtatcctcttctgtgtc

SEQ ID NO: 191814 - DNA, 486 bp, Zea Mays
tatagaatcgcaaatggagtgtctaggtatgggacaagagcacaggtatcacactggaatcagttctgaaaaccaccagaggtaacggcaagtagggaggtaaagccaagatggccaaaaaggagaagcatacaggataaattctagtatggatgtatgaagcaagtgcaaacgtaacaagtaaaccataacaattaaccaaagtacaggaaataaaatagagcacgcagaacctgcgacatacctgatacgcagcgtattcagtggagcgagcacgtgggcagaaggggaagcacgttgcaaatccctgaagcaacaattgtaaataataagaacaagtaaatacataaacaataagaacacatacatgtaaaaaaagaaaacatggatagaaccaacaaaaggagggcaaaaagagacaaggcacaattatacagcagcaaaagcctacattcagctgacgtcgacatcaaaagcaaatattcc

SEQ ID NO: 191815 - DNA, 434 bp, Zea Mays
agaagcagcacaatgccatggccaccagcaggctcagcccttgagatgcccttgttcgccattgccaacctcacccctgccccattgatgcgaccaaccaatatacacaataccccaatgcggggatcagacggcggatgcgagagggagagaaaatacaacatgccaccagatctagcgcgcgtacctgagttagatggacctaggacagcaccaccatgactgctacgacatctgctttggatcgggcggcggcagtggtggaaaaccctagatgggggagaagccaggatgggattcagatcgtcgtaatttttctcctcgatagctctcatcaggaatgctctagcctgttgaagagaaaaggaagagatctcgctggaactcggatctagatccactgagggacggggagggggaggagtggatcgggg

SEQ ID NO: 191816 - DNA, 1233 bp, Zea Mays
ctcttgtttctagactcttggatcggatgatgaaatgtgaaaaatatggtgagcgacgtggtgcagcttttggccttgctggtgtggttaaaggatttggaatttcttccttgaaaaaatatggcattgctgcaacattgcagaaaaatttggaagacaggttgtctactttgttacctcgtccactagtgctgtatataatgactttgtaaataaaatgagtatgcattcacctgtcacaaattttcactaaattatgttctgcagcctttgtatcttttcatgttttgttgttctctaggcatttgaatacaatttatctagagtattcaatgggaatttttgattgacaaacatcatagcgctaaatttttccatttgtgtgcagaatgtctgcgaaatctcgtgaaggagctttacttgggtttgagtgcctgtgtgagaagctcggcaaactatttgagccgtaagtgaggcacctcttcacttagaactgttgctctgattccaagtggttcattatgtttgctttcttgtaggtatgtcattcaaatgcttccattcctacttgtgtctttctctgatcaagtcctagcagtgcgtgaagctgccgagtgtgctgctcgggcaatgatgtctcagctcactggtcctggtgtgaagcttgtccttccttcacttcttaaggtatcaatatatatgttctatgctatcaaattgtaacatttgttgcatccaaatgttctggagagtacaagtggccagttcatcttgttgttatacattgaaatctgacaataacttaactttccgccgaatatttaggccatctgcaccagaaaccactagtttgtttccgttaatttgaaagagcagaacatattgaggtccatctggtaaactttttttttaaaaaaagtctacacattctggattttttccacttattgtcatttgcactgttcgcacctttatgttagttgttcgaatgaagataaaataggtattcagatactttacaaaatattatgccagccacactcatttgtaaaagctacatgaaacgaatttatttggcttgtctgatacattcaaaattttccttaaagcacatatttggatgatccttaatatgattttcagggtctagaagataaagcatggcgtactaagcaaagcagcgttcaacttcttggtgccatggcatattgcgctcctcaacagctatctcag

SEQ ID NO: 191817 - DNA, 601 bp, Zea Mays
ggttctaactgtttgtttccctttgttcttttccatgatttgtaaatatcagtcaaggtgtcatggctgtgtgaactttgaccggtgaatttgcttatgcagatcagcatagcgataggcggtaagtcgtcggacatggtgcggtctctttacagtgcacatcgggtgagtctgaactttgtagctctttccgaagtgcaccatctctgcatccactgtttaatgggcttgtcacacttaagacagtgttttttgttgctcatataagatcatataacatgttgcagagatagtacttatttggatgttcatgttttaatccatatcttcatagcaaataaatgtatctaagcttcagttcagcttgaataccatgttgcaccttatgatccttgtagattgacacatttcatttcttttggtagactttcttatctcttccagaacatcaagctactgccatggggtttatcgcgctggtgactggtcatcacaatgcttcggttagcttatctcggttacttgttcgaattactatttttttggatatgcagaatgaccctcaatttctttcatttattatttgatcaagtgaacattt

SEQ ID NO: 191818 - DNA, 420 bp, Zea Mays
gttggctcttgcattggaggcaggcaggcgtcggggggcccgggccgcggggaccggaggtctcatcgtcccaactgaggccgccgccgtcaccgtggatgcgccgccatagtcgtcgtcgtcgtcgttgttgtcgtgacggacgtgcccggcaacatgttcgttctgcccttccatacacatgctgctatgcatatgcatgcacaacgaacgaacacatgcatggccatgcattcaagctcgtcgagtttttacccagttttagatttaccgttcttttgatcggttttgtactcccattgcatggccagtcctcctcctcgtcatcgtcgtggtcatccgcttcgttctccatccagattacatgcatgtgcctacagcagcagacgcggagagatgcgagcatccgtccatcgcagg

SEQ ID NO: 191819 - DNA, 349 bp, Zea Mays
aagaccataatgattagtttcaaagctggaacaaggatagccattcacgtccacattatcatgtacaataatgaccagcgaaacgaaatcaggtggaagacctatctgccttggggatcttgggtgatggtcatctcattcagactgcacgcctcaacaacaactgctgattccacagatttagatactctgaggttgaagtaagccggatgctttggctcaggtagaaccacactctcactatttagcgcagcaactacgtcggacatggtgggccgatcgtccgcattttcttggacgcacattagtgcgatgttaatgtaccgcctagcctctgcttcatgcatct

SEQ ID NO: 191820 - DNA, 340 bp, Zea Mays
tttaccgaagattaagttcaaaggaaggggagaaagatgtctataagatagctaggatttgggaaaggaagacaagggacctcaaccaagttaaatgcattaaggatgagatggatcaactcttggtgaaaggacaagacatcaaatagaggtggcagaggtatttgacaatcttttcaatggtgagaatgagactatggacatccaattggatgactccttcgatgatttaaatagatgctttgtacacaggatccaagaatcagaggtcaaaaaagctttaaagaggatgaaagagggcaagacgatgggcccggatggtatcccaatagaggtgtgg

SEQ ID NO: 191821 - DNA, 430 bp, Zea Mays
gatccatgcaaatctcagtgtcaccttctccagcaggcaacaactgactgtttgttggtgtgcagtgttcttcaaactattcagcaactaaactgttcaaacatgttactgaagattggcagctgaaacacatgatcaccggctgaacatggtaggcgtgaaaaataagatcaccgactgaacagtttatgatcaccagctgaaacacaagatctgggaggcgtggaacatggtagctgaactcttcaaacatgttagacaatagcaggcaacaacagtgaaacacaatcaccgactgaaaagttgtccggcacctggactgagcaaatttggttgcctggtggagggaggtctaacggcagacgctgctattcaattatttttttactttactttgtatcctccttacagatgttggatgaaagcaaac

SEQ ID NO: 191822 - DNA, 505 bp, Zea Mays
gaagaatcaaaaccttcccccattactgtgacccaggcattagatgcattaactgggtttgatgactcgactcaaatggctgtcaacagtgtttttggagttcttgaaaatatgattgatcagtttgagaaacaacaggactctgagaatggtgaaagtgctgatggaaatgatggtatcacttccgtggatgagacagaatctcatgtgaaagagaatacagagaatgtgtcaagtggagaagatataaaccactcatctaaacaaccagaaggtagcagtcctggaaaaactgattcaatcatgtccaaatatgattgtgcttttggtgaggaaaatcccaatttaagcattgtttcatatggtagaggaaaaatgagatattaccgaggaaacaaagttggtgatcatgtgggtgctgatggtatcgagcgagtcagtggcttgcctgactatttattagatatagctgtcaactcttacttgaaggcgcaatatgcaatgt

SEQ ID NO: 191823 - DNA, 360 bp, Zea Mays
gttgtttagtgaacaatctttattaatggagattaccctgttcttaacaagaatcaagagaaagagagggtgaaaggggtcagttcagtagaacactgaagatcagagcactaaaaatatctgaagaacgatgacagagatccagggcactgtagaattggatgtgttcgagtgatttggggaagggatcgaccgcggggagataactttgggtcatgtcatgattccgcgaacctagcccgagcttgaccgggatatttcatcggcggtcaccgtggctcggtcattccgccgtcgtgtcactcgtgcctcgctcctccctcactgtgtctcttccttacgtggtaaccatgcactgac

SEQ ID NO: 191824 - DNA, 290 bp, Zea Mays
atggacacatcaagctgccatgcagcatttacacggcgtgtaaacgggctacacggccgtataggtgaagtagacatacatgggcttgcagcattgcgtgatatccaaggttgaatttcatgaagatccttcaagatttatttttactacaatcaatgataggtgaatgtaggctagggaaaaatatactccacttggatacataggtttttctatgcacttaggtatacattatgtctagatagtagatacatagtaaaattaatgtatctagaaaagtcaaaatgtct

SEQ ID NO: 191825 - DNA, 1652 bp, Zea Mays
accggccaaaatcagcgctgcggacagattaggaatctgcagaacagccacaagtgacatgggaccaaagggtttacttacatactgtcttgtcttggcatgcttacattgaagtactataatattttgtttcctgttttctttcaggatgctgtattgataatggacttgttgtccttggaacatgtttcttcgttctggatggttcagaagcagagccagaggtttggaagcttttgcaatgatccagtgttttgcatgagtaatagtattagttctaagtttcatggaccctgatgttattattttcattatttcactatttttacaacaataacgcaagtgtacagtttgtactgtgattcagcactttcatatcaatcttctggatgtttccctttttgaactgtcgattctcattttgagctgtgtggtcatggcctagcatttcctcattgtggtgtcatctttttagagaacctgcattgcttgtaactgctgtatctaacaatatgcaactcagatttgagctgtttatagatgatacaataagttaatgcaattatgtcatcccatccttcttaagactactacaaaaatgaggaacagtgttatatcacctcagttcctgatattattccatgattgtctgacttatcatcaaattaaatacaccataatgtgaattaaacttctaagattttctagaacatcagtatcgtctctttaatggatatcactatgtgctcacgctaaagtacactagctcgctaacaagatacctgaaccacccaacaacaaaaatttacaaaccatgaatataaaccaattatgtgcaataatcatgcataaaggatgccatgtagatgtactgtgattgtcggcaattgcccacagggtcgtaggttaatttgctacgcaaacttaagacagggtcctatgttaattgagcttgtatttaaattttcttttggtgcattagcttttattattttgttatttttgatagttgcacttttttttggttaattttaggagactacgagttagtgttgagcatgacctaggtgctagtgatgctgcaccaaagacactgagattgtttgtcccttactggataaaaaaccactcgtcaattccattatgttatcgcatagtagaaggggaatccacagaaagcacagaagcagactcacttagcagaccagactcgctaagtagagtgtctaagtcttcaaaattttcccttaaatattcttcaaagtctcttgtcagaagaggaacaatgtcgcacagaaatatgcaagtactggaagatattgaagattgtagcacagactatgtgatgctatcaccacaagattacttgaaccgatctgctggtatgcgctctgagtcaagggataacaatttcagtccagctcgagttgcaatatctatggctgttggtggttgcacacagtacagcgtaggagtatcgctttttgagcttgagaacaaggtatgcaatgtgttgtgcttgcatttgatctattgctaatcttcttgaagcattgtaaaatatataagatgccattcatcttcaggagcatgttgatatcaaaacatttgcttctgatgggtcatattactggttctcagttcaattgaag

SEQ ID NO: 191826 - DNA, 346 bp, Zea Mays
cagctttacagtgagaacttcgaaatggaagaatgcacgtttgctccagctccctccccagcttctactaggccattcgttgtgacagacggtacaaggataattagtaaatcacgctatgagccagtacctctgccctttaatattagattagacgaggaatgtagaggcacctcattgatgccaggaagtatgattggaattgctcctctacctgagctgaagaaactcaaacatgaggccagagatttacacgatgcaaggcttggtctgtctggttctcagcgaagtagcaaatcgcatgaacaagcaggtacttactttcagcatcattcctcaacgtttg

SEQ ID NO: 191827 - DNA, 491 bp, Zea Mays
gtggcgggggtaaagaaaccgttattcctggcaaatcaatgccgcgctgcctctctggggcatggggcggggcccaccgagcggcggccttgccttgccttgcctggctggcaggcgctggcgctttcacgccgcgggcccgtgggatgggagtgatgactgatgagtggacggaacggacgagctcctcccccgcgtgtcggtggcgtggcgtcgtgccagctcacgcgcattgactgcctctgacacccgcaccacgccagccagcggctccgtttcctcgccctcacatgattggttggtgggctggtgcttttcgccgcgggtggacggacggacggacacgcctgtgggtggcagcgcacatatgcatagcatgctcgccgacacgatgcacgttccttcttcccgtaacccggacggccggacccctccaattattgcacgacccaacatcgtgcgtgcacgcactcgctcaatcaccactcgcg

SEQ ID NO: 191828 - DNA, 421 bp, Zea Mays
atcaagtggtactacaccacaaattctggagggtgaaaccactgagaacactgatgacaaggatggagactatgaggccaatgatgacaaggatgaagactatgaagaatgtgaagaggtttcccctacaactgctaaaggaaagcgtcatgtttctattggtcgaaaggacaagggtaaaaagcctaggccattgggaggacattgggtgcaagatcaattgagcaaacttgtgacagcaagtgagaagagcacagcatccgttgagtctttggcaagaaaggaggacaatgggtgctccattagagatgtcatggcattggtgaaagagtgtggtgcagttccaggaacaaaagaacacttcatagcatctcaagtttttgtcaagagggcagagagggagatgtttatgactttggac

SEQ ID NO: 191829 - DNA, 609 bp, Zea Mays
ctgaatatctgataccagattgtaatggtctcgacttctgagtttgtatgagtgggtagtagggcgaggccttgaggattgagggcgagagggagccgtgatggcgcacgactgagacacaatggggcaaggagcaatactcttcttagattgatctttgctaatcctcttaggtacaaactaaggactttatatagtccagtacaggcgcacataaactgctgccgcccctacttattctctaacaaactcctatctctccttttgatatctaatctaacaaacttatccttatccctctaatcctgatctcctagcgtggcctggcctatgggctgcttgggccgcctttcatatgttttacccaccataacatctctcccctcctccaagaatagcttgtcctcaagctgaaaatgggggtaggaagacgtgaactgttgcaatggctcccaagtatcttctatcggctgcgttccactccattgtacctgaacatgccagacacttcgttgtcttcttgctttgagcaccttctctggtgagggcagcagtcgaccattctccattgctggaagagcaggaggtagcactggtggggcgcctttg

SEQ ID NO: 191830 - DNA, 442 bp, Zea Mays
aaagccagccagcagctaaaaacctcctcattctcatccacttcctcccgcgcaaccgctcttccccaacttcgccgccgccatgggctcctcctacgacccctacccgtccccggccgccgacgacctcttcctctacctctccgacctcggccccgcctcgccctccgcgtacctcgacctcccgcccaccccgcagcctcagccgtacccgcagtcccagcagcagcagcaggggagcaaaggccccacgcaggacatgttgctcccctacatctccagcatgctcatggaggacgacatcgacgacaccttcttctacgactacccggacaaccccgcgctcctccaggcgcagcagtccttccttgacatcctctccgacgacgcctcgtccccgaccaccaccactggcaccaccaacagcagcgccagcgtcaac

SEQ ID NO: 191831 - DNA, 415 bp, Zea Mays
aatggattgatcagaaaaggttacttggaccatagtcacaaagttttacatgagatgttacaagtagggcttcaaccaaaccatacacactatattgcattggtcaatgcaaaatgtcgggttggtgagattgatagagcgtttaggctaaaagaagaaatgaaagctattggcattgtgcctgctgaagttgcggagagttcaattattcgaggactttgtagatgtggaaaacttgaggaggcagtcatagttttcagtagtatgatgcgttcaggaatggtgccaactgttgctaccttcactactctaatgcacagtctttgcaaagaatccaagattgctgatgctttgcacttgaagaggctgatggagttgtgtagattgagggttgatgttgtcagttataatgttt

SEQ ID NO: 191832 - DNA, 2086 bp, Zea Mays
cgagctctaaccgggaagcctgctaagaatctcaaggttgcatgtttattcatgtggcataatatagcttcttatgattatgcacgcaggccatatgcctcatcacttgtttgctgctacaggtgtctgggaaaatcacgtactgtggccatgagttttccgagttctatcctgagaggactagtgcatatgtcagtcagtatgatctacacaacggggagatgactgtaagagagacaatggacttctccagaagatgtctaggcattggtgccagatatgatatgttgtcagaattagctagacgggaacgaaatgctggcattaagcctgaccccgagattgatgctttcatgaaggcaactgcagttgaaggaaaggagaccaatgtcataacagatcttatactcaaggtgtgtccccgtatcttcttaagttcactttcacgagcagattcttttaacctagcctaaaattcactctcatgagagtcgaactcaggacctgaggggtgctaaccaactcagttagaggtctttcgcttctaactactctttttatgaagtgctttcataacaactatttcataactactcttttatgaagaaattgttatgaaagcacgtttccttaatatatacaactttcttataacaggaactaggcttatcactgtgacagttacacataaatttaatcttgatatcacccatggtttgttccatgatgattgagtttataaatgaccacaggttcttgggcttgacatttgtgctgatattattgttggtgatgagatgaaaagaggcatttctggtggccaaaagaaacgtgtgactactggtatgcctgcatcatgccattttatcaatataaataaatgatttgtaatttctccaagaaactctcaaactattcactacatgtataatcatagctattacagccgttaaatagaggatagagggccgtccatgaaatgcagcatagctatcagttattttctgaaattgcagagcttatgtttattgttcttttctgtagtagcagacctaggtaccctttggggtctagttacaaacacagagccccatggactctaattcgtcacatattttaattgatcggaagcttaatcagtatgattagttaactaggaattctaaaataaacctatggattggtttaagtgatgactctggcactgctttcctctgttatttatacattgtttctgtcatatccagcataaagaatcctgatgttaacttccttggacttcaataattggtttggctgtaggtgagatgctaactggacctgcaaaggctttgttcatggatgaaatatctactgggcttgatagcaacagcacatttcagattgtcaagtacatcagacagacggttcatgtgatgaattatacagtgatgatttcccttctccagcctccacctgagacctataatttgtttgacgacatcattttactgtcagaaggttacatagtctaccatgggccacgggaagacatccttgaattctttgagagtgttggtttccggtgccctgaacggaaaggagtggcggatttccttcaagaggtgacttccaggaaagatcaacagcagtactggtgccacaaccacgaagattaccattatgtgtcagtcccagagttcgtgcaacatttcaagacattccatgttggccagaaactccagaaagagttacaagttccttatgacaaatctaaaacacatcctgctgctttgactacccagaagtatgggctgtctagctgggagtctctcaaggcagtcttgtctagagaatggttgctgatgaagcgcaactccttcctctatatattcaagttttttcaattgtttgtcctggcagtcctcaccatgacagtgtttttcagaacaaagatgcccagtgggaagttttctgataacggaaaatttatgggtgctttggctacttctttgatcacaattatgttcattggaattactgagatgaacatgaccattaaaaagctacaagtattctacaaacagcgagactacttgttctttcc

SEQ ID NO: 191833 - DNA, 436 bp, Zea Mays
gtgttgatgatttaaacactccgacagactgtggaccatcgattcctgacaaatcatttccgctattgtttaagaaaccatcattacttccatgatcctgattcgaactgttgccatcagctcctcgagacagttgtgttttatcatctgactcaacagcaccagaatcaacaaacatggaggataactccccaaggagtaaacatctaaaactcttctgagctgcaacatcatcatcaggagctaaagtaacatcaccaaattttgtcaacaagcctctaatacatttccaaacatcagcaatctctggacgggattttggatcatatctcaagcacgatgctataactgcagccaatggttcaagtatagtaccaagcaatgtggcatcaagccttgtaaccacttccttctcccaatcatcatacagtccttc

SEQ ID NO: 191834 - DNA, 333 bp, Zea Mays
agaacatcgggaatgcgaaaagagccgggagagccgacgacacccacagatgtgacaggaagacacgagccattcgccaccatgatagatgaagggagagaggaaggagggtgaacagaggtgagtataccagggttgggagtggtgtggtaggtagcaccggtgtccgcaatccacttgggacccatcggcggagtcaaagtgggagtctggaaagcagccagggcggccgcgtcccaaccaatcagtccggacggtggcgtagccggcgacgtgggccacgacgaaacgacaggtgtcgagggccagggcgatggagaggcgaaggcgtac

SEQ ID NO: 191835 - DNA, 1721 bp, Zea Mays
ttggaagatgaagacattagaactttactctcacctgactttatattttcagcctgaaatgtatcttttgaactcggggcatcagaagtagagggacccaaaataatctgatttttccttttcttgaaatagagatcagatgttgcggaaggctgcagcaacgtcactttatccaaggaaatgttactcgactcaccaagatgccgcccctgtgcaactagttgatttaactttggcctaacataaattgctttaccagcatcaagggcttcagacttgtgcaaactaataatgcttagattgtcagcacctgagttaacctgcccactggaatcttccttttcagtttcaaggacctgttgctgcaaattttgagacaatggctccaaaacattcacagcacaactgatggatttggtatgaagtggcaaaggtggggtcttgggtctttcaactgaaatatgagaatgtgctgcgtcttttgaatcgacattcctgacaaagttcatgcttctcctcataacaggcttactcaacttattttgagaatctagactagaagaagaatgaagatgatttccattggctggatttctaattagggcattacccttgcggatataagagttttgacttttgctgttcttttttaatggcagtttagggggtaatcctgaagtctgtgaaacatgcaatgacgaattagaagatgatgcattgtcacgacgccatgtcctgttccttgcattctggtttaagcgagggggctctagcaatgaaccaggcaaagctacctgtttagtaggtaccttcaatactgtggagcttgcaatattaattcgaggaggagattttactacagagttgactactgaatctgacaacgccttcttgctatcctcctttggtgctgataccttttctgaagaacagataggaagtagagaagatttgcatgattggtgttccttgttagcttctggtacaatggcttcaatccaggaggataccgaatcaggtgttgtacttgacatgcccacaggatcctcagtacttccatggtaagtgtgatcagaatcaacagatatctgagaagctaagtctcgacctggtacatcagcagattgtgaagataagagaatgggtctactaagattatctataggtttacccactgtgcaataactatatttatctaaaacatttacagaattaatagaagaacctgggcgaacgatctcatcatcaacatccttatttctctcttctgttgccaaaaggactgcttgaggaatactgataccacatagtttgaggttgtgatcctggccagacaaaacatcaatactgccccgctggtcaatatccagcataatatcatgatcctgacagataacagggacaccttcatccacaatctgctctaaacctatcctcccattactaacagcagaagcattatccaagcagctgacagtaagtggtaaagtcaaccaattctgactgcctgcattcattaagtcattgccagattcaccttttcttttgacaacattaccaaattctgtcgttgtcacatcaaatcctaagtttacatccaataggttatggttttcctcaggctgtccctcactctctgcactactgaaatagatattattaccaagtgtcaaagctgtcggaacagaatgctcactgttaccagatacagatggtgaatc

SEQ ID NO: 191836 - DNA, 683 bp, Zea Mays
acttgtccatcgtttggtgtctttaaaaagttgcagcacaaattgaacaacgtgaggagaataagataaaggaggcaccaagcaagcacccgatttttcatatctccatatattaggactgaagatttccagcatggatgaaagaatgcatgctttaactgtacaacagatatcactgttgcaaacactaatattttgcactacctgtaaaaattcttccagtatctgcagcaagatagtgccaacaccatctacagaaaagactctgtcatgattagagaaattgaacctcagtctaaacaaggctggaagactatcagcacatctcgctactgaggataacatcatggcatcagaggcatcaggaggaaactcaatagtgagaccacagactaatttcaaaatcctttgggcgaaagacaacctcaagccaatgtttacatcttcaaccatttccaaagcgggagactggcaaagcttctgaaccagtgtaagaaggcgtggcatacaacataagtgagcaaccgcaaaatgctgtgctaatggcaccatggcatttggagatactgcactgcatgattgggaattctctaaaataacataatctcgctgcaagtattctggtaataaggccaaatgaaactgtttaaggtcatcttcacttttcgagcagttgaagcctg

SEQ ID NO: 191837 - DNA, 529 bp, Zea Mays
caagagtctaggggcaataacgaaaaagtgacccagactcaaactataccgccataggatggcgggttggtttcctaataacccaggggctgaaatgctaaagtgtcgagtgaaggggtatgtttgaatctcggtcgtccgatcaaaagctgagggtcatgattagatgtggcttacgcaaaatcggtacgcagtcagaaccgtgggattcacactgaacggatgagatacccgtgatatccccaagccgtaggatggacgatcaacgacgagccttttaatgctatgaaggggtatcactatcatctgatccgagccgtctacccagagatcaagggcggatagccaatccagtcgaactattaccccaacctaatctcagccgttaacttgggatgaacggccaggaactgttctcccacaacaccggccgacccaggacggcgctgccctgccgcacggtggcccaccataggtgagcaccaggaactaagtacccacccaaatccggccgctacctggtgtaaac

SEQ ID NO: 191838 - DNA, 329 bp, Zea Mays
gtaggtctaaggctgtcataatatggaccacagtagcagtcaacacagttctgacaaccaccagacgcccaacccgattcataagcgaagctttccatccaggaagtttctgtgtcactttatccaccagaggcaacagaacagactttgtgggcttgccgatggtgagagggagaccaagatacgtgattggaaaatatgagacaacacaagagagtaactcagtaaccgagcaacatcactatccgaacattgaattggtgttgctgcacttttggatagattgcacctgagaccagcagcatgcccaaaacagtctagaagatccc

SEQ ID NO: 191839 - DNA, 287 bp, Zea Mays
agtagctcggctggaattcgaggcacaattgggtaccttgcaccaggttggcaacgacttcaattatatgtaaaataatccatatttgtaaatgataaatgaaatcatgtatcttatataaattctccatcggtgtagcatattatttagctaactctacattgcttcatcaacacagagcatgccatgggactcagagttggtgtagaggccgaggtatacagctatggagtgctgctgatggagatacttactaaactaagaccaacagatcatatgtcttttga

SEQ ID NO: 191840 - DNA, 532 bp, Zea Mays
aagatttcgaaggaagtagtgccttaggatggcaggatgtggtctggtttaaaagcatgttagatgccaaatcctattcagttcaccatctccccgctgatcattccaatagggcattagatgcaaacctcacttatcctagtacacttgattaccagccttggtttgagtactgtgagtgtgaagtgtgaaccattcactagagtctacaggttagtcttccatgataattacgtgcacaagatccgatctcaccagcagtttcagtaggataggttagctgatgctcaaggaatccaggtgagtagaaatatcaattccggattacctttgtggtgtggttgaggttgatgtgccggctcattgataattctggaggaatgatctaaactatgagcaatgttggtgagatcagatataaggatgaaaaatgaagtctgatactgcttcagttatactgaacagtcatgtcaactctgttggtgagctgcactgggcatgcaactctggcaccagttttgcactctggcag

SEQ ID NO: 191841 - DNA, 355 bp, Zea Mays
agcgttacggtacctagtgggtcccacaaagtgggcttatggtaaggttcaaggtcgtgtccggtactgcttcatcttccgtcataccccttgcgtcattataaaacatgcataggtatccacccgatatggggtattgtctcgtcctttttggtgtatgggtcattgtagagactctggtgctgaggtctccgcgactggagttgatcggccccacaagtcagtgagggtatatccacgggattacatgggggtgttccatcgtgtctgcttaaggccttttggtactgtaggtacgatctagtcatggtttggtgacgttgcgttttgtcgcggaggtcgtgggccgacaacg

SEQ ID NO: 191842 - DNA, 318 bp, Zea Mays
gaccaatggtaaatcgctacctattatgttagctttcctcctatcttcatgtagcaccaaatagatcagggtttggggcctcgggaatggcctcacgggtccccgcgggggcacctccgtatgggctatgcgccaccgtgggtggccaccggaaggatgggcaaggatatgtgagccttccatcgggtgaataagggccaagatcagatccaactcataccacttcgtaggatgaatactagccgccaatcctgatatggacggatacagttgcagcacgcttacctagagccacaaccctaagatcttgatccctcg

SEQ ID NO: 191843 - DNA, 362 bp, Zea Mays
tacattagcaccagggacttggtccaagagcacatatctttcaaagtatggtactttgttaatgaatgggaaatgctgaaggaaatcactaacagttcaagcgaaggtggtctagtctatttgaagtatacatatccaatagaagtcagttcggggagccagatgatgaatggcttgaggccattgaggcgactagtgatgatttattgggggcttatacaaaagctaaagatgaagccatgaatattgccttcgacgcccatggaaagaaaaggctgaatagagtttttgatgtcattggttttgtctatcccgattactgctttctggctcggaagcaagggacaaaaaagaggattgca

SEQ ID NO: 191844 - DNA, 1466 bp, Zea Mays
gtcgaggaaggacgcggagtattgcatggaaaatgccttcagtacatatttggtatttatttagaaattcacatcttggtttcctggcacatgcaaataattatttcctttatattgcttattacttaatcttttggatattgttctgtggtcttgtgctgttaccccatgcttcttatacagaacaataaggagcccaaaacccattttgcatggaacatctttttcgtgtttatcagttcttaacttcttattgaatgctcaattcaagtcttatttaagcaacaatcataacaaacagctacaattctgggccacatcgccacatattcatttcattctagtttcttgttacaacctctgggccatgttgccacatattcatttgggaagggaaagggatgacattttagactggctacaagttctgggccacattgccacatattcatttcattctagtttctggtttctttcggaaacgtgtcctgagtcaagaaaagtcagaatgtacagggtccaccctgatttaaaactaccctcttcaatatcaaatggtttattatgcacattctgatactagctgtacaaatctgaatatcctgaggtatggtgcgtttagaagaatgcacaaataagtgaaatatgtgcccatgacaagatactacacttatgatatgtagatagtagactctttagttttcttgattgaacttcttgtagccttctttcattcaaagtgtaattcaccttttcatatatgcagagaattggatcttctggccagagaaatgctactagatgtggcctttggtgggctgaaatgcttaaaacaagaggacagtatagggaagcatctaatgtgtatttccgtgtttctaatgaggtagatttcctgtttgtcgtggaaaatttttagctgattagatgtattattgattgattgagcatctctgctactcaggaaccttctttgcattctgctgtactgcttgagcaagccgcttgttgctatctattatgcaatccacccatgcttcggaaatacggatttcacctaatcttagctgggaatagctacttcgtgtctgatcaggttcataataattcttttactgttcttgtaatccctttcaaagttcattgaatcattgaatcttttctaaatcgttttttcattctttaactgcagaaacaacatgctgttcgggtgtacagaaatgctttgttcgtttacaaacaaaacccttggagttacatcaacaatcatgtacactttaatattggaaggtagttagtattttttagctcctgtccaggttttatcttgtgtctgtctttatgctgtacttgactctgggtgtactgataggtggtatggagttctcgggatacttgacgtagccatcaagcacttgcttgaggtcattgcttgtagccatcagtcgctgactacacaaaacatg

SEQ ID NO: 191845 - DNA, 513 bp, Zea Mays
gctttatttagcaaaatatgtatatgatcatttttcactcattggtccaatggtcttgctagacattttgaataactatgactgttacttatatttcaggtatttgtaaaatcgtctctcctgtatgtgcgtctgttcctgccggtgttgtgctgatgaaggaacatcccaattttaagttcatgactagagttcagccccttcgactcgctgaatgggctgaggatgatacagtcactttcttcatgagtggaaggtatgcccactgtttgtctattttcattattgctttagctcatgttctgaacttcatcatttttggcatgactctgcagaaagtacaccttccgggactatgagaaaatggcgaacaaagtgttctctaagaaatattccagctctagttgtctcccagctaggtatgtggaggaggagttctggcgtgaaattgcttttggcaaaatggatttcgtagaatatgcttgtgacgttgatgggagtgccttctcttca

SEQ ID NO: 191846 - DNA, 727 bp, Zea Mays
tttggcttcacccaatagataccatgctggagatagctgtggtcaatgtagtcaaggtagttgatgttgaggtggctgtatatgaagctgctgacacaaagaggtgccatgatgatgacaaagatgtgtcggggtagtcgtcatgaaaggggatgatgctgaggtcgatgtagttagggctatcgaggacgtagacaaatgcagtgacacaatcaagagagggttgatgtagtcaagctgcgagggacgaatcatgcgacatggttgccaggcttgggaatgcattgtggatgaagcacacactagtgttgccaatatttgacgtacgaggtagagggccccaaccatgcatcagcgtttgagggaacattagaggtcttggcgatggttgctgtgcgctgaacgatggggtagaaggtgctgatgcaactcacggatgtcgaagtagacaaagtagttggggaagagacgatgacattaaagacgtggttgtgctggacgaataagaagccatacgaagtcggacgtgtctaaccgaaagattagtccaaacggatgtgtctgcccaatggcagcagttcggacgcaaggtatggtggtgatggtagcactcgatgttcgtgatggaggactcaaatagcttgacaaagattgggtattgatacgtgctgcgtaaggggcacaacatggttgtcgttgcaaatgagacaacgatgtagatgtagcg

SEQ ID NO: 191847 - DNA, 356 bp, Zea Mays
catcaggctcgtggctgggcgagcacacataggaaaccaatcagccgctttgtgtacttgataactttgcgcccctcgcttcgatcacttgcaacagccaacagtgctcattgtagccgtagcttgatctgacaacagtgctcattgtgccgcccaaatgcatgtatggctttgtctagtgacttagtgaggtgtatcttatcagttatctccatgaatcgatgtcacctccattaattaacgcacgttccgttcgtttagtttaaagtcggtcgacgagacgacgagtccatatcaggttatgctaattcaacctccttttgaatttttttgtgtttgaacagggtgcagccatg

SEQ ID NO: 191848 - DNA, 421 bp, Zea Mays
gatggatatgcacagctcgaagcggacactgctgccagctagtaaagcaggcaatcacgggcagaacacagacattaacaacaaaaaatgtttttatacttttttccctgtaagcaacaaaaaatatgtctctattccaccagaccttcaccagaaagaaactactctactgattcctgcacccacagaaaaaatgttttatatgcttcactaaactttctaatcaacaacagtagcacagaaacgcctcttgagtttgctcgagaaaagaacgcaagatagaacgtgccccgtgtccgtaagctataaaaagttaaagaggaaacaaaaaaaatccaaagatcgggcacagttcacagacagtttcacagaaaagctcaccagcaattcctatgttcattggtccatgcgaaaccaaaca

SEQ ID NO: 191849 - DNA, 968 bp, Zea Mays
tgtcgatggagcaactcgatctcgggtgcgtccgaggtggccctgtggagacgtgggactgcggtggcaaggaatctgcagcggcgttagagcacagcatggaggctgcaaaggcggcggaagtggcaccgttgtggcgcctagccggacacagtggctgagatcaatggtgtggtggcgctagggctaggtgctcatggaggcaccatggatctgtggcaagaagcggccatagctagcgctcgctgcatgagctcatctcgcgagctgcttgtggaatgggcgacatgcatcttcactggctttgcagcagctgctgcattggacactcatgtcggtctgtgaccatgcgcggtggtgcctgctggaccagcagacattcagtggtgcagccccgttgtgtaggtgtgaggtggattgcgccggtcgatagccctgaccggcgttagccagagccgatgacggtgacacttcatgttcattacttgcttgtttgccttcatagtggtgtcacctagaagccatgtatcgtctaaatggaggccgtttcacacgggacgttgcttatttgcctgcaaacctttgggtttttgacgagccgggctctttcgggttcattacttgcttgcagtgtgtctctagctgggtgatctgcagtagtgaagtcggagctactttgttttgggtgcaatgaagctcggcaatgatcatgtgccacattcacttcttgggagatcagggcttgttgcaagtttgtggtggcgtgtcagagtccttggctgatgttcaccatgggaagtcagagctgcttaatgctgcttgtggtaagcttggctacgatggcatgtagtgggttctgtctagtgtcctttttgtgtagtggagtgactagggagtagggattgtcgtatgggttgtcatggttgggttttgctggttttccatttaagaaaccacactctgtatgg

SEQ ID NO: 191850 - DNA, 366 bp, Zea Mays
cttcaccaaactatattccaaccaattgtgttgcttaaaccaatgttcctgaaatgaccttttatcatgtgctttgggaaaattatgaccaatgggttgtgttggacctttttttatgaatgccctcctatcttcacttctaatattaggagcaaattggtcaattggaatgcgaataccgggatcagagataatatgatccatatgaaactcattgactgtactacctgttcctctgacatcttgttcatattggacctcttcattgtcctctaattgagatccaatagctcccttcactattggtggattgtccacctcttggccaactccactcacatgagtacttgggtttgtactactaga

SEQ ID NO: 191851 - DNA, 348 bp, Zea Mays
aaagatggcaacttgccaggcgtattgccagaaccagaaaagccgaattacctgaagattagagaagaatgacgaaaatcctaagtcacgagaagctaggtggtggctcgatgaaggaatatcaatcagggcaatttgaagaacatcgccagggatcaactcagcaccaccagcaagcatcagaactctagcatccggtatgccgacctctaaggcgacttcctcatttgaagcatgcgctgttaccatgccatcggaacgtggaggagaagacccaacgtgaacatccatggaggtatgagaaggggagcccacttggataccctcgggggctgggttatagcccgc

SEQ ID NO: 191852 - DNA, 492 bp, Zea Mays
cgtcgtggtcagaggaaaaggaagtcgggcgctggggccggttggctccttcgcctgccttcgacctggctaggccggagtgctttgtcgggcgatgtggaagaattgatcgggctgaggaggagctctgtcgtgcactgattgtcagtgttgtcagacaggaagattctggctacgccgcggaggtgcgtgatgcgattgcctcgaggttttgccttgaagtagggtcgctccgcttacgtcgtgctacgccaaattctttactcgtcttcttcccctcagttgtcgtggctgatcaggtggttaaaggggggcaatctcttcatgcccctccactcaggttacatattcgaaggtggtctcgtcaggctttcgctattggaagtggtcggtcgctggtgcccattggcgttgagctacgaggaattcctgcgcatctctgggggattgagtctgcggaggctgtgcttggtgctttctgtttgattcatg

SEQ ID NO: 191853 - DNA, 331 bp, Zea Mays
acctcccagagatcaaatggaacagcataatcgttatacagttgagtgatactcttgagatttaatgatagttcttttgccttatccttagcagccttagcagtctctgcattagcaagaatgttgtcacgagggaacggaacattaggtaattcagaactgcttggaatattttcgagccgtgcaaccatgagctccaattcttctttaatttgaatttggaagcgtagcacgacaagttttccttcaagcaaatccactgtgctgctatcaacaggatttttggacaaatcagcagcgatgcctgcgcttttggcctgaagcactgcat

SEQ ID NO: 191854 - DNA, 280 bp, Zea Mays
ccgccatgaatgacaacacgagcccttggaagatgtgtagggaacaatttgaggttaggttaagacatagatctaggttttggagaggtcaacacggggcctagaaattgaagaggtagatgtagagagcttacatggagtctgaatccacattgacttgcccgctcgccgctggcgatgatgcggaggatgggcgacgaagaggaaggtgagcccgggggcgctaggcggcgagcggaaaggcacaaagcaaggctgagcagtgtagtggagtcgtggt

SEQ ID NO: 191855 - DNA, 346 bp, Zea Mays
cctgaggatgtcaagagggtttgccaaccatctatcctaattaatggagtacgagaagtttgcggagtatgagcagaagtactcagaggatgcagcaaccaaacattgaaaagtatcatggggagttgcctgcctgctgggctgatgcccttcctgtaagtccattagcacctcttgctcctcgtgttagagctgacatgcagaggatggcttgtaatgtcattacgcttgatcattcacatcttccagcagctcagtttggcaacttccagaagcatacgcctgaggtgcgcaacgtctgcttcggagcgagggagcatggcatgggcggcatttgcaacggtgg

SEQ ID NO: 191856 - DNA, 348 bp, Zea Mays
attgaagaaagtaaagccttttttcaggtatatgttctttcactacatatcatctctgtaggcctcttacaatacttttccactgctagcacaactgacagattagttgatggatttttgaattagcattaaaaaatcatgtatgtaagtatggactcatatgtatgtactgttgatctgctactatgtcttgtgtcatcagtaccttactgtatcaactatcaagtgtcattttcttcaatttcaggtttatgaaggtgctgtttacatgcatcagggtgccaattacttggttgaggaacttgacttggcatcaaggacagccttctgtaggaaagctgatttgaa

SEQ ID NO: 191857 - DNA, 1436 bp, Zea Mays
tcggatctaccaactccgcctccacaggtgagccacctccgctcgcatcttgtagattgaatcagacacgagtagtttcttgtagatcgaattcagacttcgatccgtgcagcccaccggcaagacgtcgagggcgtgcgtcggctcggcgttgcggcagctgtacccctcgatgtgtgctctctacgacgtgaacctctattcctccacacctgtaccccttccccatggtcgggccacacgctggactgggagcatgcccctacgcaccttccaacaaggggatgggttaaattctatatctcttactcatgtcttgagcacaaggggctaggttaaattatggtgaaaatcaagtaggagttaggatttggagctgttttttaatttctgaaggaagaacatatgttctccaaagtgttgctgaatccttctgtctttaaatattaaaactgttatctcttcaaatttcaagtaggagttggaattactcggctgtatgtatatatgttgaggcctcagtgctgctagaatatacctggtaggggttttggaccaagggttgaatcctagatgaattagggttactgttagtcgtcatgacagattttttgttgaaaaaagtttaacaggtgaactaaacttagactctaattaatctctttattaatctgaaaaataggcaagatcacatttttcctcgtcatgctagactagacctacctacaacagctataccagttgtagttgtcagctcgtggaagcacaatagctaaaaccagatactaacacaagtttttgtcatcttgaactgcaatagttttctgtatcttgaactgcaattgtcagctcatggaagcacaatagctaaaaccagatcctaacacaagttttcctcatcttgaactgcaatagttttctgtatcaagtttttttatctgttaaatgttagtatatcacaatgtgatcaaaacaataaaattcttcatatcctttagttcgtattgtactgatcactatttagagcaagttctgaaaatgtcaaataatattgcttccagctgttttcggtctcttgttcaattaggtgctattagtcatgtatcttgccttcgaaactgtatccttagcttatgttctgtatattctctgtttctttctttcaagaaaaatgtgtaatgaaaagtagtattatgttttaaaatataatggctttcagtgacatgtatattcgttacttgtttttgagttttgacacactagaatctctctaatgttgtgtattgattatttctcttgatatattgattacacctactgctaccaccagacacctaccaactgttttggagcttgctggtaaggatcattgcgaaacttgctaccaagtaccaactgtttgcatactcaagattagtggtgagtagtcattgtcc

SEQ ID NO: 191858 - DNA, 704 bp, Zea Mays
ctctgccagcgcttgctaccaggaatccacctgtagtattctggaaaatctttatacaataatgtccttgcaaaactatcagtatgattcttagtgaagtactctgtgagtgttgtcatagaagaagttggctcattgacaatgtcttgtagtttagctgtctcgtcaataataacagactgcatacctggtaaatggcattggagttgcaaaacagaaggattgacaccaaacaatggaaaaccaagaatcctatgtacagcttcaggtggggatatgtatctggcatccctgtactgccgaatctcattgattactccatcttccttatgagcagggtcaactgagaatgatgcacgatcgtggcctttgtaaacatatttgcacatgtacttaatggctttgatgcttgagcaagcttcaacatttatgtggcagttatacctcataagcaatccaggattgtatggaaccacccacctgttatctaacacacatcctcttacctttacacgacgcccatcatctctcctcctatacaaagggtatgaatcctttccttgttgtgttgcagcacagaattgtcgaggatagcgaaaacgacactcttcattgaccatacaaggacactttttatttaaaactccacaaggtccatgtagcatatgcttgatgaccagattatgcaaaacatggtatttatc

SEQ ID NO: 191859 - DNA, 2207 bp, Zea Mays
tgcgggccttagcctcggtggggccggagaacagcttctcacaattttcttcctggagtttcatgtgaggtatgtttgtctcctgaaaatctccgcgtttcaacttttgcttggatttgtctgaaattccttaaccaattaatcatgttcgttcaacgttagtagtaggcttaggcttctttccgatcttttttttaaaaaagattcttttcctctgcctacgtttttgttttgtctgaattcctgaagtacctgatggctctctttcccctcaaacgaggaggtagcaaattactacttgttactgcactttccaggagctcacaaagctgtctgcgatgcagggtgctcctcctgaccagatgggagcaagctatcctcacatgtttttgatcctcttgctgcttcgtggagccaatgctgctttgaaatctccagcagggccgaaatggcagactctgagcggtatcacatatacatatgttttttatacatttcttgttgtttttttcttcaatcaatcagcatttgcctcaaacattttttgttgttacaattgcagctgctaatgctgttgctatcaccctacaggcggtccccctctagtcatagctcgaggaggattctctggcgtgtttcctgactcgagccagtttgcctaccagtttgccttgactgccagcttgcctgacgtcgttctgttatgtgatctacaattctcaagcgaccatataggcttctgcaaaacagggttgaccctggataactcgacgactgtctccgagaggttccccaagatggagagaacatacaaactgctcggagaggacgtccatggctggttctctctagattttaccgcggagcagctggttcagaacatcacatgtgagcagtccgattaattaagatggaacctaccattttgaagcactagtttcctgtcagaacttgcactggcttgatgacatgctttgctttgctttgctttggttggtaatcccctcagtgatccaaaacatcttctcgcgcccaagcacatttgatgactccttggggatgtacacgcttgatgatgttgttgaactccacccccctcaaatatggcttaatgtacaggtaaatgtgattccagtcagttcacgagccttccctcttcttcttcttttgccccaacgtgttcacttttgcagtacaattcgttctttttggagcacaaattaagtagcgaagattatatattagaactgccaaaagatagcctctcttacatctcctccccggaggttgaattcctgaaaagcttggctgggaagctcaagaaagccaagacaaagctcatcttccggttcctcaatgaaaacgtcgaggagccttcgaccaagaagacatatggggaactcctgaaagatctgaaatccatcaaggcattcgcggctgggattcttgtgcccaagacatacatctggccgctgaaaaaggatcagtacctggcgccatccaccagtctggtcaaagatgctcatgccctcgggctggaggtgtatgcatccggatttgccaatgatatcgtcttgagctacaactacagctacgatcccagtgaagagtacttgcagttcatggacaatccagacttctctgtggacggtgtgctcacggacttcccgtccaccgcatcaggagctgttggtaaggactgctcaatgttggaattggaaggagctaaaacccgaatgtttttttttttctaaaacatgtggatgattttttttccagcttgcttggctcattccaagggcaatcctctaccgcctcctggaagtaagctcaactatgaattgtttgtaccatcacgatgccatttgtaggttcattatcatcatcgccgctgctgagtgcttattcccttgcacaaatttagaggacaccaggccgctgatcatcacccacaatggcgcgagcggcgtgtttcccggcagcacagatcttgcctaccagcaggcgatcaaagatgccgccgacatcatagattgcacggtccagatgtcgaaagacggaacggccttctgcaagcactccgctgacatctccagctccacgaccgcgtccgtcgctttcgcgtccaaagcctccaccgtccacgagatccagaataagtctggcatcttctcgttcgatctgtcgtggagcgagatcgcaacctt

SEQ ID NO: 191860 - DNA, 362 bp, Zea Mays
ttcttgagaaggaacgggccactgctgctgctctggaggagcagggagtcaccgccgccaagcagatgacgccgccccttcttcgccggttctcgagctctctagtgaccaagctgctggtgtgcagaacatccgctcattggtcccagtgaccctcgagccgtcctccaccaactttgcaagctggcgtggtcatcttcttctcaccctcaaatggtatgccttgacggatcatgttcttgctgattcctacttctccaacgacacggcatgggatcgcatggacaacattgtcttgtcttggatttttggcaccatctccatcaagctgcaggagcgtcatggcacggctcgtcaggctt

SEQ ID NO: 191861 - DNA, 354 bp, Zea Mays
caaataccatcgtgtacagtgtgttcgtgtgaattttgcctccctccgatcggtgttctaacaacccagcaactcgcttaccagccgaccagccgccacaccacatttgcatacctctgagccccttccgtcgagcaccgagacccctgtcccagcctacctgggctccagccattcgaccgtcacccgccctagcatcaatgcctcgcccgctgggtcgtcgctcgcatcgctctcttgcctggcgacaccttttttagtgcagattgcagaggacatgtcgccttggctgtagaataatcgagtaagcgatagaagccactcgtatggagaggtagtaggaagaaatcatga

SEQ ID NO: 191862 - DNA, 299 bp, Zea Mays
gaccgatgaacaggctagccgagcccgtcagcccgctaggcggtaccgtaccgcggtatcccctgacctttgtccgctcgacaagctcttcttgatatccactccaaccggtcagccgctagcgagcttgctgctatcaccgtctcacgcttgctgcggtggtggtaaaatcgttccccatctcatgcttgagctgaatgctgcagtggtgcaaaaaatcaagtagaggtagttgatgctgaaaatataacgtcaggatattctgatccgcctcgacatccatcaaaacttaaccatag

SEQ ID NO: 191863 - DNA, 488 bp, Zea Mays
tcatacactgagactttaagtacactgaaatttgctgaacgtgtatctggtgtagaactaggtgctgcaaggaccaacaaggagggcaaagatgtcaaagaattaatggaccaggtaatcatatatttttcttttccttcacttgctagggcgattgatatgaaacagtagatgcaaaatgtcaaggtcatgagttgacttttagacatgcaaagaaatcaagaataccatgttcaatatatgtcatctaggtggctgaatttgatccagaaggaaacattcagttgttgacatccaacttttcacctgcagctttcactgctcaaagataccattgcaaagaaggatgatgaaattgatcagctccaactagccaacagtagcaattccctactgaagtccacgaaacatggtgactccttgttgaagcattcggcctcttctccaggaatgacatccttaggaaaagtggcaagctttggtagcgg

SEQ ID NO: 191864 - DNA, 452 bp, Zea Mays
tttgggtcttcgatttgggtctgtagcgttggagatacccccttcaaactactaccggtccggaagccgtgcctcctagccactcacgctcgccgttcgtgatccgttctcgactgttggtgctccggactcataggtcagcccgcgccgccctcttctctacatcccagccttcgagttctaggctgtagatcgattttcgttgacacgttgtttggtgcttcatctgcatcctttttttgcagttctctagtccatattgatggctacattatcatggttgatggaatggtcagtggagaatgtttgtgaggcatttttctcctatttcggggaaaatcagcatgtgagattgccatctaccccagtgatccccgttgatgatccgaaggtgccccttcttcatacatgtttgcaccggttcaaggggacccttggtggcagagagaggc

SEQ ID NO: 191865 - DNA, 714 bp, Zea Mays
tgtaaacggcgttcggaagtcagttttctactttcttatgccttcatactggacgggtaaaggaggcaagatggaaggttagatattgaagtatttgatagctactcacattgtttccgctgtcgtatcttacactgcccattaatctttattccagagggaggcctctttagcttttttggttcaagccgtcctgcagatgatgctacccctactgacgaggatgtccttgcggagcaaaacctagtaaaggaacaagctgcaaacaatgcggtagatcctaatgttgcagttcaaatacatggtctacgtaagacatatccaggaactttcagcattggatgttgttgcaaatgctctaaatctaagccgtttcattcggttaaagtaagttttcaattagtttttgacataaaatacatgcaactatgcttgtcatcatctgattattcattgcctaaaactttattcagggcttatgggtgaaccttgagaaggaccagctattttgtcttcttggtcccaatggagctggaaaaacaactacaatcagttgtctgactggaatcacaccaattacaggaggtgatggtaagtatcgttcattgaagcagcattcttgtttctttgtctcaaaacaacaacttccatactaataatacatactaaacatctcatagcattcatttatggtcactctgttcgaagcactgt

SEQ ID NO: 191866 - DNA, 390 bp, Zea Mays
tggtccgctgtgaaagaccaaactccttgtagttctttactttagggagtagcatataagccgtgttaatgctacgatcctgaaaaggaaaatgaaggggttgatgacagtggcggcgacacgaggggaggcgttgatgctacgatcctgaaaaggaaaatgaaggggttgatgacagtggcggcgacacgaggggaggcgttgatgaggcgaaagggtcaagggaaagggatgatggatgatcaaataatattatacattggatttgagtgaatatatatgtgagggttatggagcgatatgaaccattcattttgatgttgtgttaagtctgggtgtaatttgattgatggatttagtgaaggttatgagtgttgaggtgatttggtt

SEQ ID NO: 191867 - DNA, 541 bp, Zea Mays
agagaacggcaaccccacacacaaagcccaactagagttatcattgccaagctcgacacaagggataagcagctccgactccataagatgggctgacagacaacaggcggttggattgggacatcaacacggcgacaccataccaaactcagcacaacgacgacagagtaacacgccgaagcgaacaccaccaccacgcaaacaacacacccaacaaaacactacaccaccacaaactgggagaggaagagaaagaagccgtcgtgaactgcgccgtcgtcgccaacgctgtgccacgccaaaagccgcagcccgctgcaagcctcagcgacacctgcaactcctccaccatgggaaatcaccctcaagccacacgcacggtcgtcgatcgctcagcacacactcatctgccaaggacttagaaatctccgcccaccggcactcctctactgctgtgcgcgagcaacaccaccaaccaaccaccgccactacctgaccaagatgggcctcagatgcggcacctctaaggagggcacgacgc

SEQ ID NO: 191868 - DNA, 493 bp, Zea Mays
tttgttgactggttctctttttataaaccctcggctatacttgcttatatatgtgtaacaccatatctcgtacaatacatcgatagtctttctatcaccttcaacactttttcctgccgtggtcctcttgcagacgctttgccgattctgttgtcgcttctttggtggatacttcgccactactcctatcgcttctccggcgtatgatttgccgccaaagttccgttaatcttcggtggatgctttgccgccgatgccgttggttcttgctgagtgaatactttgccgctgcagttcccttctctggttgctttgtcgttgtagtttgactttcgtagtggcatccttcgccgctacaattgtgtctccttgccggggtaggcttggccatcattcttcatttgcggatgttttactgccgttgtcatgctggtttccttggtggatgcttttgtcggttaaggttgctttgttcttctctatggcggatgct

SEQ ID NO: 191869 - DNA, 467 bp, Zea Mays
cttctcccacgcctccactcgctcggtttctccagctccctcagcctcctcgcacttctctccgacggctcgctcctccgcttccgcctccccgatctgcaacccagcccttgctccagtcccgttcccctgctcccgccggcctccggcggcgtcgccgacgctctattctggggcggcggtgtagccatcctcacggaagacaaccgcgtcgtggtggccactgacatcgaggtcgacgatcctcacccccgtcacctcgccgacccaggcatcggtgatgaggaacatgttctgtgtatggccgtggtggaggcacagtttgtcatgtcagggagcccagaagtgctgcttgctgttggcgaccgggtcattgcggttgacgaggatggcgtacaagtgcttggggaagagctggagattggacccgtgcagaagatggcagtttcacccaatggcaagctcct

SEQ ID NO: 191870 - DNA, 503 bp, Zea Mays
cttgcaaaatgtcttgttacaatcggaagaggagcttatgtcgaagcgtgcgtcagagctagttagtgaaggggctgcatcaaagcccaagaaaacaataggcaagatgaaggttcaaggtacaaaacaagttcacttttccttttgaataccaaccatatctgcttctatttctgtttattattcatgaagatctctaggaaattagtgcatcttcatggttcttaagacttgcatgtgcaataaaaaatgactttagggattaacctaacttaatactattctgtgtgcagttcgcaaagttcggatgtctgtagatatgccttctggttgcaacttatcatcactgccaatggtgaaattggattctgtccggtaccgtttgtccaatgtacaatccacactttcatcaggatgggagtctgtacggagagttcgagttctaccacagcttcctgctaacagttcgttctcaaagcacagcttagcatacatgcaagcaa

SEQ ID NO: 191871 - DNA, 300 bp, Zea Mays
ggggacatgatagaggaattcagagatctcgacaaattaggactggggtttacatcggccgatcctttggaggagatcgacataggagatggtaaaactccaaggccgacttttgtgaacaagaccctggagaccgatcctagaaatgaaatgatcgatctattgaaagaatattcggattgctttgcttggaattacactgagatgtcgggattaagccgtgagatcgtagagcatcggctgcccattaagtccggtttcagacctttcaagcagaaagctagaacatttcgtccagac

SEQ ID NO: 191872 - DNA, 509 bp, Zea Mays
ttcaacaatagtgcaaacagtatcatcatgacttggcttagaaaggctatcaaccaacgcttgataaagaaacttgcttggagtgcaccctctggacatcatctccttaaatagcgcataaccttcatttgatttgcctattttgcagaaacccttgatcaaggcctcataagtcattgcatttggttcataccgccgttcgaccatgtcatcccacaccctaccagcctcctgtaactctccattctcacataatcctataataagcgagttatacgtcagcaagctaggcaagaaccccctctcgagctcatcaaatagcttcctcgcctcctgaaccattcctttcttacataaccagtagatcaatgtgctgacgacagtgttatctggagggacgctcttcttcaccatctgtctccacatctcattcgcctctcctgcctttccatcctggcatagcacatcaaccaccttagcacacagtggtgtgtccggtacatatcctg

SEQ ID NO: 191873 - DNA, 476 bp, Zea Mays
caagccagtgcggcgacaatgtccggcgagcacaggaacaagggccttgactgggatttgaacgactggaggtgggacgccaacctgttcctggccacgccggcggccatcgtgccgtccgagtgcagcagcaggaagctgagtcgagctcagggggagatcgacttcggcgtcgtcgttgacaagaggcggaggctctcgccagaggaggacggcagcgccggttgcagcaattctggggtagcagatggagacaacaatcatgtggtgcctgctcagagagggcggagcagcgaggaggagacacccaggaaaggtgccagttcgagcaccactccgtcctgccaggttgacggctgccatgccgatctcagcggtgccagggactaccataagaggcacaaggtgtgtgaagcacataccaggacgactgtggtctgcatcaagaatgtagagcatcggttctgtcagcagtg

SEQ ID NO: 191874 - DNA, 481 bp, Zea Mays
cggctgttgatatgccccctatctacagtctttttgcagctagggctggtgcatctagagttgttgctgttgatgggagtgcaaagatggcttctgtggctacccaagtatgccacttttctcttcaaaattgtattaaagtaccaacctctttgtaccatgagtaacttataggtactgcatgatgcaggttgcaaagaataatggtctgttgtatgatgagaacgtggaagcagaacagaagcaaggcagtgctcaagttataagtgtcgtacatacaaaggctgaagagctaaaccagaaaatacaagtcccacaaaatggctttgatctattagtgagtgaatggatgggatattgcctgctgtacgaatccatgctaagttctgtcatatatgcacgtgatcattttctaaaacctggtggtgctattctcccagatactgcaatgattgtaagtcagttgcttccttgtattctg

SEQ ID NO: 191875 - DNA, 353 bp, Zea Mays
agatgacacaacttactaagttgctcttgttccatgcattataccaggtatgtggtaactaggtgacatacctacttatttgtacatatttgtttttttagatggtacaactcgctaaattgctcttgcatactgaattaccagtctaaatctattcttttagacttcgcatcattcccagatatggggcaaatgagagatttcacacatattgacacctaggccacttactgctgactaggtgcatacatggtgctccacattagctaggtgacctgattgagccaaagacaactttgtgggacttggtttaaccatttagaaccttagggaagaaagtgaatctgtagtgg

SEQ ID NO: 191876 - DNA, 432 bp, Zea Mays
gctacatccttcggagggggtaacaacaccagcgaccactctatctactattcctgcagcacctgctagaagaatcaagcagcgacacggcttcaacctttcgacggtacgtcgtagcgccagacttgccaacggccctcgaacgaatgtcatgcaacgggcccagcgcgtcctctgccgcaagcttggtctcttggcaaaagatgacgctgctgattttaatactgctttgcaggaatttcaggattggttcaagaagccactgactgtggagatggggacggccctagatgctctgttcaatcttgatacgccagacacagtttgcctcgacaaggccttgatgggaattgctggagatgctatagctgagatccaagaggaggtggacgccatgcatgcagaggccagagcagttgctgcggcttgatt

SEQ ID NO: 191877 - DNA, 346 bp, Zea Mays
tgtgtatgttacaaaataaactacttgtatgttaaaaaaagtttctccctgccattacattgacatctcaaactcctcgcacctgttgccttttggaacatatacgttataacccacattttgcattgtgatttctctactaccaacaccaattttcttagaaggctatttagcagtaatttttgtactagctacaagaaacccattctatgcaataaatatccatattacgtaggtctgcagattacggcatatgctgcaatagcaaatgacacatttgtggcatattgctttcctttcaaagctttgagaatcatgtagtcatgcattagattcacatgcacca

SEQ ID NO: 191878 - DNA, 325 bp, Zea Mays
tttggttgttataacttcgcgtaccgcaaggatatgaaggccctggtgcttagctaccgcactaagtggccaaccagctagaaaagtgagtggttctataataaggacgatgagaagaagagggagaaattgaagacgctggtaatgagcccgctgagtttaagcttcaggctaacgaggcccctatgacgcatgtcgtcggggtcaccatgccaacaggctgtagcagaattcagagttgtgactgagcggatcggcactagagatctggtgcaagaatacctagccaatggggtatttccgacgttgagtgaatggaatatgc

SEQ ID NO: 191879 - DNA, 416 bp, Zea Mays
gtaagggtgtcaagccttgcactgtgtacttctgattagtcctccgatgaatcacagttacacgtcggcctttaagctcatcaaccagattttccatttgcctcttgttcagagttgttcgataatcaaggtaccccactattttgtgaacaaggtccatcaccggtccagctttgtaaaatggcataactgaataatcaacacacaggttcaacccttgttgagtgtatttaagtgtctgctgggttcctttcatagctacaacaccctgcccaatgtctatactgctgcttggtgagtaaaatcctctaccaaggataaccttgcgccatctggaggcctcacgcacaacaacatcaagaccctgcaagacctctctaggtacaggtaaatctgagagttgacttaatggcagc

SEQ ID NO: 191880 - DNA, 398 bp, Zea Mays
acacctccttcgcgcccccatcgcactcctctctaagcctgatcgtcgtactacctggataaccagtttgtcacagaccagcggtagccttcctgcttggcggttggcgcccaccttctacaagccttattcctaggccaacaccgtctttgttgggttgcagacgtcttcaaccacttagacatgtccatagaaagttggggactggtctcagcctgcccctaggtgcagcaagcgctttctcccaggtgggacccatccggtctagtggctgctagctacatcttcggggatctagctcgtcttccattattgttggcaatggcaactcccttcttgttcttgcctagagccactctcttcttccagcttcattctctgatgacctctttctctcc

SEQ ID NO: 191881 - DNA, 895 bp, Zea Mays
cacaatcggcggcaacagcgattgatttcgtccgccgcacctctcctctctctccgccgccgtcgccgccgccaacaagggcgaaaccttccgatttcttccacttctgctgttagggttccgcctccacctgctctgctctggtgagttgttatcttccctccgtttctctttcttctctttttcccccctttctggtgatgatgcatgcacacatgatgagattgctctgccgattgtcagtcctctctccctcagccgcaaccgcaaccccgccaagggacaacgcaaatccttcctcttatcagcttcagtcactactacacctacctgtaccacactgttcgtcctcctcggttcttttgctcctaatccttgccactacccgatctatcccttcacttccgccgcgcacctgcatgtgcctttgtgtttatgtctagattcatcgcaccggacccatcttgtgcgattggattcgattgcttccgtattcctcatcgctatttctgggtcaaactccttgttgcgtctatccaaatcctttcttgcatgtttgactatccctcccgtgccaaacccaaacaaaataataataataaaacccctttcgccccccattcaccttagttcaaacttcgtctcaatacccttctatcagattcttgtgcgcacgacccaacccaaatgagtaaatgacagacgacgacatatgctcaaccctttctgtgcaggtatcttctgcgcaatgccaatgctgtaatggatcgatcgtcagattcttccaatccaccaggttcatgttccacgacaatcacgctgtatttctcaatgcggttgctctaactttgtaacattgtaccaggtcttgccgtgcctgccgcctcaaagccac

SEQ ID NO: 191882 - DNA, 694 bp, Zea Mays
ggaaattgatagttgtgacagccatcctcatgattcaaatttgcctgctagttcaagcaaagcaccacaaataagaagacaggtaaacgacatgctctttatgattcatatctgctgcatctcatgctagttagactagactagatttgaagtaatcattttgcatcctgaactcccaaaatgggtgcattgactagaataatgcacatactggtagtaatatgatcctactttctgcagatatcacctaacgtggaggcatctaaccgttcctccaacaaagataccgaaggtgatagtaacgatgagctggcagataagtctgagctctggcgtcctttaaattgtttagtagaagctgccaacaggacaaaatcctttaggtcaagttcacagagtccagttgttaagggagagcaacccaatggctctacgagtagtacatttgctagcaaagcaaaggcaagggagaatctggagaagtccaaaattcaggatgacaaaaaagatgttcccatgccaccagtgctgccaaaaagaagagctcaaggtactgcgcggaagaagagagatcgtcttcaagctccaactgatgtgaagcctgatgctgcagttgcacagaatgcaaagaagttcagctccatatggttttcattgattgcctcatttgaccagtaagcatttccaattcatc

SEQ ID NO: 191883 - DNA, 429 bp, Zea Mays
tgctcgtgccctatcgccgccaatagggtgtgtcggttcgacactatctggcgatgtggagatataatcgccattcatgttgagacgagatcgttttctcgcatcattggagtcgtcaccgtgtcgagtgcaccacttgggtcgatgatgaagagcacactacatgtggtctggcttgaagtctgtttcactagtcctgttgcggaagcacttctttgccgcttcaagtagcatagtatcatttgatctgcttggcctggccgtgaacaatctgttgtagatgtcgttaaggaggatgagcttgccgttgctcgtggaccatcaatccttagctgtttggcgatacggtggcaaggaggtttggtggtagagttgtacgcaaccgctatttggcctcaaaaggtcgacccttttgttgttgccctcaac

SEQ ID NO: 191884 - DNA, 612 bp, Zea Mays
gcggccgccctggctgccttccagactcccactctgactccaccgatgggtcccgagtggatcgcggacaccggtgctacctaccacaccactccggaccctggtatactcacctctgttcgccctcctccttcctctctcccttcgtccatcatggtggcaaatggctcgtgtcttcctgtcacatctgtgggtgccgccggccctcccggctcttttcgcattcccgatgttcttgtcgctccttctttggtccacaatcttctttctattcgtcggtttacttctgataattcttgttctgttgagtttgactcttctgggcttactgtgaaggactcggcaactcggcgcccgctcctccgatgtgacagcatcggccccctctacaccattcggcttccgcacgccacatcttcttcgtcttcgtcacctgacactgctgttgtttttgctgccaccacgtcttctaccacctggcatcgtcgccttggtcaccccggacgcaatgccttgatgcagcttactcgtagtgccactatcccatgtactcgatctcctgaggagcatctatgtcatgcatgccagttaggccgccatgttcgtcttccg

SEQ ID NO: 191885 - DNA, 348 bp, Zea Mays
atcctaatgaaacaatcgggacctaatccaaaataatgagatcttaactagtttaatctattcgtaccaacctaatctagattctatctaatatattatgatctaatctagagtaagttacttaatgctggtacaaaggataaagccatactccaaatccacttaagcttaaattggtgacctaaatcaacttggccatacccaacaacttgacctacatacacagatctatcttagcctcttgtcccaaacccggatggagacaccaaagagcaagactggaaaaggacaatatcaacctcgtcaaggaaggagagaagtcaaactcgatcttcagatgcattacca

SEQ ID NO: 191886 - DNA, 433 bp, Zea Mays
attcaaaacttgctagtttcattcttataaattattttatcagcgttacctctttaaaatttcaactaagttgactcttctcttgtagatggtttgtactctccaaactactcgcatcaacaccagctacgcccctccgccccggcagatcccggtctaccccgtggtagtcgaggaagttccggtggatctccctcccatccgagtggagaatgtagtcaatctagaggatagctcggaggagcagctgtcgacgcctaccctgttggcagagtccctggccttcgcagccaggtcatcaacgtcaccaccgccagcactagccttccaagcacctacacccgaaggcgatgaccccgacgactccggagatgacgatgacgaggatgacgacgacgaagaaggtggagacgaacacgtccatgaggaagct

SEQ ID NO: 191887 - DNA, 303 bp, Zea Mays
aaggcatcaattgcccaaattaaacttgatgaatactaccacgccggaaacaatatttcagatgattcaaaccttggtaatcacttcttgaacaataacttgcggcaaggagttcaagcttccctccctcagtgcctgtttgctgttggagatcattcggtggaaacctatgaattttgtggcaatagttcaactgaattgactagagttgaattgctaaaaacttttggcgagtgcacattctgttatgatgtcagtaccaaagatcaagatggcaatttagtgagctcaacttccatgtcg

SEQ ID NO: 191888 - DNA, 298 bp, Zea Mays
caagatataatattcaggtttgggatatcgaatagcatcataactgacctaggatccaacttcaccagttcagaattcttcgatttctgcgagcaaaagagcattcagatcaaatatgcctcggtggcacatccaagagccaacgggcaagtagaaagagccaacgggatgatattagaagcactcagaaagaaagtcttcaacaagaatgagaagttcgcaggaaagtggatcagagaattgccatatgtagtttggagcttgagaactcaacccagtcgagctctgcatggaaata

SEQ ID NO: 191889 - DNA, 331 bp, Zea Mays
caacgcattgggccgtcttggttcctagatcttttaccttactcacttcagtgtctcaatcatttaatgggcaggtaatttctcgcgaacgcattcagctattgactggtcgcccatatcattcgagcagattgagctatccaatatccatttagctcgacacagtgaagaactgaagatacacattgggcttgcttgtgttccgtctctctcaaacatcctgttggtgtgctgtgaaggtctgaaggtcacataatccacttggttatatgccggggtgggtaatgtgagtcgggcttgataaatgcaggcttgttaacttggtaattag

SEQ ID NO: 191890 - DNA, 299 bp, Zea Mays
aggtgataggcggagatctctgttgcgcggccttactgagtcactgtcacaaattctgcctctgttgtattctgtaagtttgcctttacacctttaccatgttcgcatgggagatatggaaacaccgaaatgcctgtgtgtttgagggaagaaggccttctgtccctgctgtttttcaggaagttacttttgaagatgctctttggtgtagggcaggtgccggtgctcttcaggagctcttggcacgccatttcactcctggacactaggatgggttgctagtagtggagtgtagctgt

SEQ ID NO: 191891 - DNA, 286 bp, Zea Mays
ggacaatcttttgattccattggaactattatgctgcatatccagaactgaattttctgacatgaaagcataccttcgttggcagaagagacaggttagcattgcttggtattttctgaatgaccttgaaccatatcgtcatttcataacattatatccttcatctatgttttgtggggtttagttaaacatgctggaggaaggcctcataaaccatccagttgttggatttggggagttaggtcgaaaagtcaatgagataaggagcctttttagaaagattgaa

SEQ ID NO: 191892 - DNA, 361 bp, Zea Mays
acagcaaggcgcggctcaggagggcggactgcaacgtcaaggtgcgttgtacgccgctgctgttctgcaacactgcaactgcagtctccccgtgcgggtgatcttatttttgccattgtgtttttggtgttgtcgtgtgtgttcagctggagaggtgggaagcgtccttgagagattaccaggtgctggtccaagaactgccggagaatgaggacgtgaagaaggctctctctgaggtcgaagccaagctcaagggccaaaggcatggggccgcagcagccagatctcagcactgacgtcatgtaactacatgtcccttctccagctcttgcagttgtattttgtgtcaactacatttgaa

SEQ ID NO: 191893 - DNA, 524 bp, Zea Mays
ttcagcttctttcgtggcctgactcgatgcaactgtctatctcctttaaacgatgcatgctttttcatgaataccatattttctcttgtgttttcttcttcaaaagcaccttcagagttctccctctcctcttcattattagatctggttaaggtgtcaacttcatggttcatggctgcaagacatgtggaaaaactcctcataaaactcaaaagaaataaatactagcattttactgttgtactgaatgtaggaaatactcacattttagcttcttttgtggcctgactcgatgcgactgtctatctcctttaaaagatgcatgttttttcttgaatattatatcttcagaagcaccttcagagttctcattctcatattcagaattgtattcactttcatgttcataatcagactcactttcattataataattctcactgtcattatcagaatcgaacatattgttaccggtcccagtcccattgacctttgctgccattttttcaatacttcatcgaaat

SEQ ID NO: 191894 - DNA, 1095 bp, Zea Mays
actgactggtacttcgacacaagtgcaacctcccacatgacctccaacgcgggtaccctatccaatacttcaactcctccattattgtcggtgacggctcgcttcttcctgtcatttccactggctccactactttacatggttctttacatctcaacaatgttcttgtgtcacctaaacttattaagaacctaatttccattcgctagtttactaccgataataactgttccattgaatttgatccctctggttgctctgtgaaggatctactatctcggaacgtgatcagtgcaatagctccgggccactataccccctgtgcctccctgctgcacacaacttcatcgccagctccactccgtcactttggcatcgtcgtctcggtcaccctggccacgagaccctctccaagctcgcatcaatcgttcccatgtgtaataaagatgctagctctcctttatgccatgcttgtcagttgagtcgtcatgttcgccttccgttcgtacgtctacttctcgtgcggttaacaatttcgatcttattgactgtgacttgtggacatctcctattttaagtgtctcgggtttcaaatattacttagtcgttcttgatgattgctcccattacttatggactttccctttacgactaaagtctgatgctttcccaaccctcacttagtttttcgcctatgtgaaaacacagtttggtgtcacgattaaagctgtgcaatgtgacaacgggcgcgagtttgacaactccagctcccgcacattcttcctcacccacggtgtcctactacgcatgtcctgtccctacacctcatctcagaacggtaaagctgagcacatcatccgtactaccaatagcaccattcgctctcttctctttcaggccagcatcccaccgaccttctgggttgaagcactccacacgacaacacttcttctcaacattctacccaccaagacccttcatttttctactcctcacttcgccctcttcaaaattgtaccctcctatgaacaccttcgcgtgttcggttgcacttgctatcccaacctatctgccaccactagccacaaacttgat

SEQ ID NO: 191895 - DNA, 347 bp, Zea Mays
cacattgtaagacactgtgtcctttaaatgtgtctcaacaaacaacaaatgagcttggctgatactaccacacttagcatacatgtcaatcaatgaattcagcacatggaagttcatttcgacacagcctttcctcaaaatcccatgcacctgtcttgcaactgacaaagaaccaagctgtgcacaggcagacatcagcacagccatcgtcgcgggatcaggttggaatctggcgaggcgcatacgattgaacacagcaactgcatcagcccatgacctctcctgcgagtatgcagcaatcgccatgttccagctgttcacattcctgtctggcatctcttcaaaca

SEQ ID NO: 191896 - DNA, 346 bp, Zea Mays
acacggcgcacgcacacgcgcgcgcgcgcacacacacccctaaggtgatgaatcaatcagtgcattatctggacctaagatggaaccagccagccgaactaattaaccagctagtcattgactatgccggtgcattatctggacctaagatggaaccagccagccgaactaattaaccagctagtcattgactatgccggtggaaccaacccaccagaccgcggaacagatccgattaatcagtttatcaggtccgtacgcattgactttgttggggcgatagtgcctgttattttgttagcagtttcagactttcagtcattccattggagtctcatccatccac

SEQ ID NO: 191897 - DNA, 309 bp, Zea Mays
cacagatctgggggcgctggttgcctgaaacagaatcagcggcaggcagacacgagtgggttcaggggagggcaaggaccagacgatggcgagtcggcgagatggcgaatcagtcggacctggtgtggagagacgacgactcggtgagcagtcttgctgtggagggacgaggacgacgacacaatgaggtggtcttgctgtggatggacgaggatgacagtgcaacgaggaggtcctgctgtggagggacgaggatgacaatgtggcgaggtggaggaacagggacggcgacgtcatggcgagatggag

SEQ ID NO: 191898 - DNA, 721 bp, Zea Mays
aatgaatcaagatgcattccattttatattgttagtagatatggtcattttttttctcaggaatcatcacatgattcaagctgcagaggttggctcgtgttttgtttgtctttcatgtctgtgctgcttttatctactatttaagcaccaaacttcctatagttcttcagagtgacacactgacatgcttttgcctcaggatacttctgggcaagttacctgatggaaattgtaagatgtctagggattcgattcttgcagcggagcttccatctgcatactctcgttttagttggaaaggcctctctccacgagatctcctttgctcattttgtcgccttcagaggttgccagagccccattttgatgtcagtagggtctcctgtgatacattaatgtcagctttgagctctgaagaaagaggagcgccagcaggcagcgcagaaaatcagtacaccaatgatgtcaggatcaacaaggaaaaaccagatctttttaaatgtgaagtgaacatacgttcacggaagcaagaaattttactagagtattctgcagctgacacttggagcaaggaatctaatgctattcagaattcttcattgaaggtcttgatttggttcaataattattttaagaaactaacctcaaaaacaggcaagctatatctttctgagtctactgctggtgtcaaggtacattcaaatatttttcttcaagagtt

SEQ ID NO: 191899 - DNA, 381 bp, Zea Mays
aggggaacttgcacttcagtaggccaaagttctcacggtctgatttcactattcatcactacgctggaaatgtaaggaacacttgttctgtctgccctactattgtttgaaagaataattcttacatttttcacgaaatgtaagatgcattcgttgtggacttcgtgacaatgtctgataggattgcagatcctaccgggggtgctacgaaggttgtatggatgagaggtgggaggacgggaacgactacgacacagagatccgtggctgatcgtgcgcagtgaagtgagggagaggagagagagagccgatggctaggggtgtgcccaacttcctgtggcctcccttccccactcgctgataatgggctagagtttgata

SEQ ID NO: 191900 - DNA, 733 bp, Zea Mays
gtgcaaatgcgcctaggatacactccatggatgattatttcatgattgaagttgagaaggtcagcaggaattggaaaactactgttcttagtaatgatattgatttagtttgtgtaataattgtcttaatctgggtaatctggccaatattctcttagaaagtggaagacactgaaggccctaaatcttctagtgcatcaaaagggaggaggcagttgactaagaaagtaattgagtattgttatgagccagaaatggaggaggtgatattactttcaacaacgctgtaattctttttctcttgtcatatgcacctgcaaacttgagctcgctatattagcaaagctatacactcatgctatcatttgtaaaaatatgcaaagctaattgtcctatcatttaatttcctagtaattcaacttttcatggtgaagcttctttatcgatacggtatctttgtatataggatgcccaatggcaacatcttaaaaatgaatcatatgctgctcctccagaacatcaacatatagaattaggcccatttttaggccttctcttggcaggctttgaataaaaagttataaattaatttttgttttgtttcagctcagtccttgctccttaatttttgtttctgttactttggcttgtttatcagctattatatagaccagtattatcgttgctgattttttgtgtattttatagacttacaggtcaagcatgttgaagg

SEQ ID NO: 191901 - DNA, 567 bp, Zea Mays
gggaaatagaatagaaagaggctagatttgaggtcgctgcgttctcaccaccctctccacttctgaattgaagaacctacgatccgttccacaaccgggcagcggtttgttccgtgctgcaaattagatcgagaggccatcttcttcatctcagagtttcgccgtcggttggttcccggagccgcgccatttctcgacccaattttgtttcaggtttcattgacgacgttgcagtgctcaggtttccgcatttcgatttcgacttttgaatcgctctgaaactgcttgcgtgcgtgcgggcgtgcgtgtctgactctctgttcatgtgttcatcgcttgttcagattcctctctttctctgttttctctggacatcacggtttctgacgtctcggcatccttgttgcatgaatctgcaggcagtgtgatcccggactgtgcatgagctagctgaaaagggaaggggattccagagatgccgttgttcgaacgggatcgctaccagaggctggacggcgtgggcgcccggaggccgccgccgccgccgtcgtcgttctgctcgtcggc

SEQ ID NO: 191902 - DNA, 485 bp, Zea Mays
caaagttttaaatgaatatcgattggtgttgcaacggtgtgtgtatcagtaagtcaagagcgatcaagaagatcttgtatatatttggactgagacagataaaagcctttttgagtctgttgaacatcaatgcccaagaaatagctaagcggtcccaaatcagacatctaaaattccttactaagatgttacttgacatgagaaatatgttctaagttgtcacctgtaatcagcatatcatccacatataatagaagtaaagtgcgaccttttggagagacatgaacaaacaatgcaggatcatgttcactagaagaaaaaccagcagttgtgatgacagagatgaatcgctcaaaccaagcatgaggagcttgtttcagcccatacaatgtgcgacggagacaacaaacatgccctgagggagtatcaaccccggaaggaggatgcatataaacttcttcttgtagatcaccattaagaaaagc

SEQ ID NO: 191903 - DNA, 530 bp, Zea Mays
tagggggctagagctatcgaatcaagcgagaacaacacgagtggtaaggtttcatatggtaagattgtagagatcgaactccatagaacaatggttgtaaccaatataaggttttgtataatgttggaggcaacaatgatgttaaggtacagaggaccacgaagaactgtgttgccgactgaggtgacaggcagagttgatccattatcgacaatgagagtagaagggaaggtggggctatggggatgggggtgaagaaacagttctggagtcaggaatggtgtagtatgaggcgccagagtcaacaactcaatcagtgggaggagtgggcggcgatgatatggggaaggagagtgccatcgggggcatccccacagagccaccgggaggggtgctggggctggcagtggtgagcatgctaatgacaagcatgggttggggagaagacaagtcctcaagcgtcatggagagagagtcggcgttgcagaacacaaatggcctagtagtgtggcggccctcttgaggttggg

SEQ ID NO: 191904 - DNA, 285 bp, Zea Mays
tttaatgagccctgccactccgttggcaggcgatgtgtcgcctcagcatttaatgtgccctgtccacttcgctgacgggcggcgactaggccatcctgcagatggcgtgcttgtccattccgttagcaggcagtacgcccctgctgcagcgtacactatgctcatcatcactcgcacgttaccaaggaagcagtgcaggatatcaagattgtatacactacggacattatggcgctcggagatcttctaggttgcactggccttggatacttctatatgtattcc

SEQ ID NO: 191905 - DNA, 734 bp, Zea Mays
ggcgtagctatgcaaaactgagatggttccattctggcaagaaaggctatggattgcagttgcaagaagacgttactgaaggaagatttcttattgaatatgttggagaggtactgttgtcgtccgttattttccgtgtttgtgtccttgtacataacccgttattatgttagtgtgatgattgttgattatgactaatgagctcttttgactctatacttaatgatttctttcaggtccttgacataacatcctatgaatcccgccaaagatattatgcttgcaaaggccagaaacatttctatttcatggctctaaatggtggtgaggtatgctttttagtttttatattttgtccataaactatttatctttttcagatttactattttattgcacttgcatattacatgccaccatttttagtgcaagttctttcacttttgtattaaatttatattcagtgaagaactattcgatcacctccttttattcccttcccttttcatctagtgtattatgttgactttgtgtggtattcacttttcttaatatacccatcatgatgttgacaattgaatacattcttttaatcattttttttgtttcaactgttccaggtaattgatgcttgcactaagggaaacttgggccgattcatcaatcatagctgcagccctaactgttgcacagagaaggttgactttatctcttccatttttgcgtgtattgtc

SEQ ID NO: 191906 - DNA, 297 bp, Zea Mays
tgactgaaatggagaatacttggacaactggttttggttttaagcctgttgcaccttccaagaaacaaagaatgaagtcgttaaatctcttgattatgaatgggaccggtctactagagaagaggttgctgccaacacaaacagttgatggacagatcactaccaagacaggtctaaatactaaactgttccaacaaaagttttctctgttcagatattgtgatgctgtaggtcttttcctcttcctttttgatctggtaatgctgtagtcccatatctcagcaattcttatttgtt

SEQ ID NO: 191907 - DNA, 715 bp, Zea Mays
cttggagtaatatattatttaatgatggagaaaagttgactgatgattggtggagcttttttgacaagatatggacgcttctgtgctatttgaatggcaaaggccaaaccagattaacaccaaagggtttaaatacagctggaccatctattgggcaacgggcccgcggattagtagagtccctcaatatcccagctgcagaaatggctgctgtagttgtaacaggaggcatcagtagcgcattaggtggaaagactaacaaagttgctgacaaagctatgatgctaagaggggagagatttccaagaattatcttccatctcatcattatgtatctctgcaaagctggcttagaaaacgcatccaaatgtgttcagcaatttatatcactgctccctaatattatctctgaagatgatcagtgcaaaaatagactgcatttcttgatttggtaggatttgtaatcttattttatatataatcattcgcttgatgatggttaatttgacagtttagtaacttattgctgcaggtccttactaagggtaagatcccagtatgggcaacttgatgatggtgcacgtttccatgtcatgtcacacttgattcttgaaactgtgatctatggaaagtctatgcttacaactaatatagtaggcagagatgattctactgaagcaaataacagtaaggaggctgggttcattcttaatct

SEQ ID NO: 191908 - DNA, 472 bp, Zea Mays
tggtggatcagatataaagaatctatatgctctgagggatgaactcgtggaatcaaagcaattccttcaagactggtttgatatagaaagtcctccatgcttgtggtcacatataacttgtgtggacaaatctgttgcagtcatagatttgtcaaatatcccactccatgttccttttccattatgcatcacggcattccaggcacttgctcgtctcaacttaagtaggtgtgatttatttggtgagattccagaagccttgggaaatttgaagcatcttcagtacctggacttgagcagtaaccagcttactgggattgtgcctttctcattatatgatttgaagatgctgaaagaaatagtgttagacagaaacagcttgtcgggacaattgatccctgccattgctaagcttcagcaactcgctaagctaaccatatctaagaacaacatttctggagaacttcctcca

SEQ ID NO: 191909 - DNA, 379 bp, Zea Mays
tgtgaaagaccgaggcttgccatcgtcgcacgcaagatgcaactctcccgccaaaatgcaagacgccgggcctgacaccaacgggtcgatgagaaggccctccactgtacgataccgcaatggctcaccgtcgtggcacgcgtcaatgcgctcctcatcgtgggagaacggggtaacgagctccaccgggtcgtgctcaacacgagctggcgtcggaggggacgtgcctgaaggggttaccgtcagtactagagtgcgttgtggcgaagagctcgttgtagttggagctggagagcgtggaactggagttggtggagacttgggggctggggtagacctgctcggagaagaagagttgcctactcccccagctccctcg

SEQ ID NO: 191910 - DNA, 576 bp, Zea Mays
catatataaacccttgtccgattcggtgaacagtaggttgtacgaatacggagaactggcggcggccgcgatccctgatcgtcggtctgagataacgagcgaattgcctcgtcgtgagagaaactaccttgtgtgatcgcgtgtgtttacatttggtattcagagccagagctagatccaccacacgagcactggacacggctccaagcgaagacgacggagatggctccaccgtgccccgacgacccagtgatgcagattctggcgaagcttgaagaagggaacggggagacgcatcggaggatggagaacatgcagaaaacgatggcgaacatggaaaccaccgtgaagactgtgatggacgaacaaggggagttccgaaagtggaagccagaggtggaggccaaggtacaagagatcgccgacgtgatgatcacgatccaaggcaaggttgatcggttcgtcgagaagcaaccgatggacgcgcaaagcaacgatgcattgaaggaagatggtgtaccggctcctacccaactgggagcaccttctggcgaggtggtacatgggcaagttcac

SEQ ID NO: 191911 - DNA, 383 bp, Zea Mays
caccttctctacctttgacagcagagtatccagctttctctcaatatgattataaggagtaaagttttcattcatgaggggatgacctgtgtttaattctcgccgatccttcactgaaggcgcttgtgtgctatctaatgtttgtacaggcagtggaagagaattgggctccttgaactggaactcgctttggctacttttttcatcagatactgtaacaccaattgtagggcccattccactttctatccctgcagacgtatattttgaatcatttgtgctacacagccctgcttcctgtgtaaccctttcacatgtgacgctatcttgatcccttgatttgtcagaaaaataactaccatcaattttcaaatttcttgact

SEQ ID NO: 191912 - DNA, 439 bp, Zea Mays
tattgctctcgtctgaggatgctaccagatacagaagtgttgtaggtgctctccagtacctatccttgacccggccagatatctccttctgtgttaatcgggtttgtcagtttatggcttctcccacagtagatcattggacagcagtaaaaaggatcttacggtatcttcgggcgaccatggacatgggtctttggttcaccagatcatcatctttcctcttaagcgcatttagtgatgctgattgggccggcaatcttgatgatcgacgtagtactggcgggtatatcatttttcttggtggcaatccggtctcatggagttccagaaaacaatcaactgtctctcgttcaagcaccgaagctgagtataaagcggtcgccgacgccactgcagaacttatttggattcaagtgttgatgcgagaacttggcattac

SEQ ID NO: 191913 - DNA, 392 bp, Zea Mays
taacaactaacccaacatagcctccgattatgtccagaatttgtttgtacccacacacacatggttataccaggcgagcataacttcggccccacatcaggcgatctgaaaaatgaccaaactctaacaagaggtttagaatctctgtattctaagcaacaaatcacagcattagctaaatcatcctaaagatggaagttaatccatccttgtgaatcgggtctatgtgaagcacatggcatctcaggataggcacagtcacatgaaatgggataacttacgtagcctcttcaaatcagaagcaacaccatggctatggctcaagtgctccaatcctccaactgaccaccccgccctgccgctgagcacactgcccgtcggctgaccacgcc

SEQ ID NO: 191914 - DNA, 4551 bp, Zea Mays
ctgtcactcaaactgttgatgaccatttatctgaaacaagaagtgggaaattagatcaatcaacatgcatcacaggattagtctctgacaattgtgttgtctcagaggacaaaacattgatgagtgaaggtgaggtcaacatttggtggtaatggcatactagttgttaatttattctctgcatagccaaatctataggctttaattatgtttaagttatatggcatcacaattgtattattattttttgatcttctttggatgctggaaagctggcatattaataccctattgattttgtgatgttgtaattagctttgtccattattgtcatgttatatactcaaagggagactttgttggtccaaaatcaccaaatggtttatcaattagtttcattgtcgcagaccgtgaagagcaaagccctgtgtccggagaacagagagttagcttggaagcaaatgccaatgagcctgaggaaaagaacctagctaacgtcacatcaactgatctccacaccaaaagtctgcagcatgatattgacagaatagctaaagagactgataaaggtacaactgaattaatcctgtatccataataaaaactctgcaacattgatgagtgaagataatatgtatgctgaacatctaaatccacctgtgccagctgattattcactgttttttttctaaagatcttgcttagtaatcttgcttcaagattttcaattcactaaattaaacttgctaaatctccagatgttttgtctttggttttccctattgaagagcatgaagaaaaatatggagtgagccctatagctgttgaaaagtgcgtctgtcgtgaagcaagtgcatgtgaatctgcacgaaaacccctaaccgttatcttttctaacaatctccacaccaaacatctgcaacatgattgtgatgtgctaattaaggagactggtgaaggtaatattgcattaatacttgttccacaacttgttactgatctgtggagatggtgatgaaaacttgtgctgtttgcactgtgtttaatttaccaattttaaacatactgagttctaagtcaagttgttggctacttgtaattctaattatttttaataggctttatgtttgttctatctggaacagctaggcatatgtttcattgtcatttgttgtcttttaagtatcttacatttttttgaatgtattctttccctttctcagaagttttagctcaggagaattgtaatgaccagcctgttcctgcccagactgaccaagaaattaagttaaacgatgaacttgctgatccgggtatggactgtgtttaatttaccaattttaaacatactgagttctaagtcaagttgttggttactttcattctaattatttttaataggctttatgtttgttctatctgcaacagctaggcacatgtttcattgtcatttattgtcttttaagtatctgacatttattttttaaatgtattctttccctttatcagatgttttagctcaggagaattgtaatgaccagcccgttcctgcccagactgacctagaaattaagttacacgatgaacttgctgatccgggtatgtactgtgtttaatttaccaattttcaacatactgagttctaagtcaaattattggctacgtgtaattctaattattagatttgtgcattattgtcatgttatatactgaaaggaagactttgtcgttccaaaatcaccaaatggtttatcaattagtttcactgttgcagaccatgaagagcaaagccctgtatccggagaacggagagttagcttggaagcaaatgccaacgagcctgaggaaaagaacctagctaacgtcatatcaattgatctccacaccaaaagtctgcagcatgataatggcagaatagctgaagagactgataaaggtacaactgaattaatcctgtatccccaataaaagctctgcaacattgatgagtgaagataatatgtatgctgaacatctaaatccacctgtgccagctctcattcactgtttttttctaaagatcttgcttcaagattttcaattcactaaattaaacttgctaaatctccagatgttttgtcttttgttttccctattgaagagcatgaagaaaaatatgcagttagccctatagccgttgaaaagagcttccgtcaggaagcaagtgcaattgaatctgcaggaaaacccctaactgtcatcttttctaacgatctccacaccaaacatctgcaacatgattgtgatgtgctaattaaggagactggtgaaggtaatattgcattaatacttgttccacaacttgttactgatctgcggagatggtgatgaaaacttgtgctgtttgcactgtgttgacattttttaaatgtattctttccctttctcagaagttttagctcaggagaattgtaatgaccagcctgttcctgcccagaccgacctagaaattaagttaaatgatgaacttgctgatccgggtatggaccgtgtttaatttaccaattttaaacataccgagttctaagtcaagttgttggctacttgtaattctaattgtttttaataggctttatatttattctatctgcaaaagctaggcatatgtttcattgtcatttgatgtcttttaagtatctgacatttattttttaaatgtattctttccctttatcagatgttttagctcaggagaattgtaatgaccagcctgttcctgccaacgagcctgaggaaaagaacctagctaacgtcatatcaactgatctccacaccaaaactctgcagcatgataatgacagaatagctgaagagactgataaaggtacaaccgaattaatcctgcccagactgacctagaaattaagttaaacgatgaacttgctgatccgggtatggactgtgtttaatttaccaattttaaacatactgcagagttttggtttatcaattagtttcactgttgcagaccatgaagagcaaagcaatgtgttcggagaacggagagttagcttggaagcaaatgccaacgagcctgaggaaaagaacctagctaacgtcatatcaactgatctccacaccaaaactctgcagcatgataatgacagaatagctgaagagactgataaaggtacaaccgaattaatcctgcccagactgacctagaaattaagttaaacgatgaacttgctgatccgggtatggactgtgtttaatttaccaattttaaacatactgagttctaagtcaaattgttggctacgtgtaattctaatcattagctttgtccattattgtcatgttatatactgaaaggaagactttgtcgttccaaaatcaccaaatggtttatcaattagtttcactgttgcagaccatgaagagcaaagcaatgtgtccggagaacggagagttagcttggaagcaaatgccaacgagcctgaggaaaagaacctagctaacgtcatatcaactgatctccacaccaaaactctgcagcatgataatgacagaatagctgaagagactgataaaggtacaaccgaattaatcctgtatccataataaaaactccgcaacattgatgagtgaagataatatgtatgctgaacatctaaatccacctgtgccaactgattattcactattttttttctaaagatcttgcttagtaatcttgcttcaagattttcaattcactaaattaaacttgctaaatctccagatgtttcgtctttggttttccctattgaagagcatgaagaaaaatatgcagtgagccctatagctgttgaaaagagcgtcagtcgggaagccagtgcatgtgaatctgcaggaaaacccctaactgtcatcttttctaacgatctccacaccaaacatctgcaacatgattgtgatgtgctaattaaggagactggtgaaggtaatattgcattaatatttgttccacaacttgttactgatctgcggagatggtgatgaaaacttgtgctgtttgcactgtgtttaatttaccaattttaaacatactgagttctaagtcaagttgttggctacttgtaattctatatatttttaataggctttatgtttgttgtatctgcaacagttaggcatatgtttcattgtcatttgttgtcttttaagtatctgacatttattttttaaatgtattctttccctttctcagatgttttagctcaggagaattgtaatgaccagcctgttccggcccagactgacctagaaatgaagttaaacgatgaacttgctgatccgggtatggactgtgtttaatttaccaattttaaacatactgagttctaagtcaaattgttggctacgtgtaattctaattatttttaataggctttattgttgttctatctgcaacagctaggcatatgtttcattgtcatttgttgtcttttaagtatctgacatttattttttaaatgtattatttccttttcacagaagttttagctcaggagaattgtaatgaccagc

SEQ ID NO: 191915 - DNA, 631 bp, Zea Mays
gtggcaacagattctggaaggaatgtccgtcgacgaacagaagaggaggatgaagaaggtggcatcggcagttctgatgtatgtcttcttctaggactaataatttgttgtatattaaagtatggaattatggtttgtcaactactttactactatctccactctaaataggtacttctaggtttgttttgggtaaaaaaccccgatatgttaacttttaaccaagtttgtacaaaaataattaacatatatgacaccaaattgaaggacagacctggtagagtggcgagaagcctttccactgagccgtcctgggttcgacgcaccctctctacaaaatacagggggtaaggcttgtctcggttatttttgccctggaccccactcatgtgggagccaccataactgggtctgtcctttttatatatgacaccaaatcagtacattccgaacatatatttcataattgatcaaataataccagtttagtgcttaaatgttgctattttgttctaaaaatttggtcaaatctaacatagttcgaattaggacaaacctcgaagtatctatatggagggagtattatttattgttgaatctggtttatttgatgccttgtaggaagagaaag

SEQ ID NO: 191916 - DNA, 428 bp, Zea Mays
cggggccacgcatggcgtcggcggggtcatgtctggggtaggcgaggtcgatggggccgtgcgtggcgcgggcggggccatatgtggtgtaggaagaggcagcggggctgcgcggggtgcagtcgaagccgacgtggccgtgggcatcatgaaagagggcaacagaagaggaacatcgacgcaatcgacatcgaggagggaattgaggtcggcggtggtgagtcaagaagggggaaaacctcctcatcaaaagcaacatgacgagagatgatgcggtgggtgtggaggtcaaggcattggtaccccttgtggtcatggcaatagccgaggaaaatacgagtggagtgggggagagcttgtgaggagcagtggcggagatgttgggatagcaaacataacaaaaaacttgaaggtgggcataggagggg

SEQ ID NO: 191917 - DNA, 385 bp, Zea Mays
gatccatctccggttaggaccacaaccgccacatgggaggggaggagtctcgcgtgccactggggtgtcggacgcgttgccccctgttcccttggtggcaccgccgggacattcattcatcttgaagggcgcgggacaagctgctgaggagatcctgagagaggccacgacttttcgatgcagtttgccgggaccccaggaggaagacgaacatttccctagaagtggaccccgatgacaatgggagtggttcacacgggttgctgatccccccaggataatttcgccccaacctttggtgactgggccgctggaattgcttgggctaggatcgcctctattattggcccttcctgtctccgctctccccccggctggatctgtc

SEQ ID NO: 191918 - DNA, 419 bp, Zea Mays
cgaacacgtggtggacaaggtacgagttcccatgtgccagtgcgctctagagcagcgatctccttagccattgcatgctgccattcttgatgaagaacgtcatcacgataagaagccgactcaagaagagcagaagtcacaaaagctgatggagaataacgactagtaggctgacgaatacggtgactacgtctaagggacaactctggtgtagaagcgacaaggaaaaatggctcagcggatgaggacaagtcaacaagaatagatgattcacaaggagatgatgacatatagagaagatgaagcagcaggagatggcacatcataagggatagtggtgtggcgagtgtaaacctgtgtcactggaggctttaaggaataatcaggaagcaaagaagactccaaagaagacagaacaa

SEQ ID NO: 191919 - DNA, 291 bp, Zea Mays
ttggctcctccgatcgcctcggatgttgagctggtggcgcctgggttctcgccccctcggctgatgctgctccggttgtggtaattgattccactctcaccgcctcgtttcccgccctgccccacgcttttaaggcaccagaagtttgggggcctttgggagatttattggaagcagtcgtttctccgactaatggcggaccagttgatgccctagctcctccgatcgcctcatatgttgagctggtggcgcctgagttctcgcccccatcggctgttgctgctctggtga

SEQ ID NO: 191920 - DNA, 302 bp, Zea Mays
attaaaacagtaagccgactgaccaaattaacttacaatttcaattcacggttgcccgttagtaattggcggtggtgtacggactggatagtctcagatcggtgtagcagggagagctgtagcataggacatcacgggtgacgacgatgccacatatggctgtgcagcaagaaaggtgatgtttggcatatagtgattcagtgcctataggaaggatgttgaggtgggtggctgttagtaggatttcagcctaataattaggtgacatgcttgcttgaaattgtaggaaggagagattgtgt

SEQ ID NO: 191921 - DNA, 649 bp, Zea Mays
ggatcggaagaaaaaggacccacttgctgttatgactatggttataaagcattcaaaaccttctatcttgacgcaccaaacccgtcttggtaatgatgaaattgttatggcgatagatcctgagacaaaggagttactttattatgaagacagggcagataactcacacttgcatgttacaattgataaggatatactgaccaataatcctactctccagctgcataatgatatggaggtttgctttcaaagtctacaactcaagagttgataccttttttttcatgatatgtttctgctaatattgttgcttatgtacagttttcatggtaaaaaaaatattgttgcttatgtatgtcttgtttttattttgatcttcttttgttccctggcaggactgctacattgatatctgctctccagaagtcctaagtctttttacagataacttcgattatcagcatcttcgccgtcattttgtgaagggcttactagttgatgatgtaagacaattcactactgtttgaccacagtaagaaaaaggacatatgctgtttgcctgttctgcaacaaagtaatgtccttaccaattctttcagattatggggtacaaaatctatactcatgaattacgctctggatatgctgc

SEQ ID NO: 191922 - DNA, 305 bp, Zea Mays
catcaatagagggaaatttggttatgatccatcgcgtgcctactctacaagttttgtcagatcttggtctactattgttgaccgaacatggagatcttactgctattcatcatctgattctttcatctctccagagactttgtgggaggtgtgtcattgaatcacttatgtaatttgcacttttgcacatatctgaagagctacattttctagcttcgatcaaatccctcgatttggtttgcagccttatgaccattcaaagttcttttggggcagcaaaaaacacaacagtgtaggggttttcc

SEQ ID NO: 191923 - DNA, 361 bp, Zea Mays
atgagataaaccgcagtagaaactgcttcaccccaaaactgtgaagggacaaaagaagatatcaacaaagtgcgagcagtttctataatgtgacgatgtttgcgttcagccacaccgttatgtgcatgagcaccagggcaagaaagttgagcaagagtaccctctgaagtcaaaaactggcgaaaattatcagataaatattcaccacccgaatcagaacgaaagattttaatgtgagtggaaaattgagtgtgaatcatacgagcaaaggttttataaatagaaatcagctcagagcggcgtttcataaaataaatccaagtgtagcgagaatgatcatcaataaaaatgacataatatt

SEQ ID NO: 191924 - DNA, 474 bp, Zea Mays
gaccaattttgttgaacatcgcacttttctgcatttgtaccgcagtttccaccgcttgtggatttttctgctattaatgttccaggttagtggtttgcgattgtgttctgtcataaataaatacatccggaatatttaatgttcaatatgtattttaattgatgatgcagctcttagctattattgcctttcaccatgggaagatggacattgacaccattagaatactacttagcgctgggccagccttttttgtactaaacttcattgaatgtatgttctctattgtaatattatagttatttttgctttatcttgattcctttctcatttctaaatgtaatctgggatgtgatcgatttatatttctacggttttttatattccatattttgtaggctgcttggatgtcatactcatgtttggtgcatataagacggcaagaggttttgctatctcaagattagttattcg

SEQ ID NO: 191925 - DNA, 366 bp, Zea Mays
agattttactgcctgtttcacggcgaagactgcgcgcacccaacgagggactgcccggaaacgaaggccaccagggacaggatgtctcgggcacaaccagccgacaacccaagagttgtcgcgcacacgtatcaacaccacctcccacaaccatacaaccacgaccccgctcagcatccacctaaccacgcataccaacaccaccaggaggtgcaagtcgtaccaaccccactcccgcctccgcacccacatcagccgaacatcctccacccaaatcacccccaagcaccaaaacaggaagacttcgctgatcagccgtatcgcggagtcattcacatgatcactggggggtccagcgtcgacttc

SEQ ID NO: 191926 - DNA, 656 bp, Zea Mays
gccaagatagggcttaaaatttcagagaaatcgtttattcaagtaaaggttggatcttgttgggatttccggtcacccacatgaacgacatgtgtatataccaggtggtggcctcatttggcaagcttttgaggtggcacaacagtccaaggatcaaaacctatgtgttggtcaaatgcctatacatctctgctatggaggtcccccagaagtgccttgctctcttttggtgatgacaacacgggaagggtgtgttcttgatccatccctaactatatcctgactccagatgatgattggcatatggggaacaatgatgcaattgcgatcacatggaagacaacatcccccaatggcaatcctcacccttccccgaagacgacaacgatgaagattttctgcaggctgagagggacttcatggaaaatttggtcaatcagaatctaggcggtattcaagaagcccagggtatccaagaagcacaaggcgaccctatttgggaaaatgctgcacttaatttgggtctagctaatggttggcctgcctggcctcagcagccacaccctgctcctcttcagcatgtcgtgctagtcattcatgatcagttggtgcttgacccggaggatagggtgattgaggaggattctagttccttg

SEQ ID NO: 191927 - DNA, 947 bp, Zea Mays
cttgttgcagctgcaaagagtagtgaaactatatgtgaaaattgcatggctatattgaaggcaagttattttgtctgtattttcagttttgacattttcgttgacatctttaatttacatattggacccattatgcatatccaatttaataacatgcagcttctaagtgaagaaatttttgacttctcaagaggtgaaatgacacaacaaaagatcaaagaactgaagtcttcacttaataggttgggtttgttgtcaacttctatattttcatggctaccttggatgtgctgtgtgataatttattcgtgaatctatgttttaacaaaaaagttacttggctctttagtcaaggatacttctgttttaacttatatgttattttctttgttcagtgaattccggctcattcatgagctatgcttgtatgtcttatctgcaacgcaaaggccacagctcatccgtgctacattggcgacactccatgctttcttatcatggatcccaattggattcatttttgagtcaccgttggtatgttgatggctgaactttgtgagtgactgaatgccaaccgtgcctacaaaaaatgctgagccttaccttttttcttcttattttttatttagctggagacattactgaagttcttccctatggctgcttatcagaatcttacacttcaatgcctaacagaggtaagggacacctaggattttttgtgtctagtttagccatagcttgtaatttcagtggacaaatgggagaataatttattttatacaatgtttgggagctccatattatgatatgttacattaacctgacaccatattatgatattttacacaaacctgacgcttctgtttgggaccaattggagaagttctgttttgaattctctctgatatatgtagctaccttgcaggttgcagcacttcagtttg

SEQ ID NO: 191928 - DNA, 382 bp, Zea Mays
ttcaaacagttgatctctcagataacttgctgaacggcagcttaccgatggagctctcaaaacttgacagcctgcgtttcttcaatgtctctcacaattcgctgtcagggagccttcccaatagtcgcttctttgacagcatcccttattctttcctctccgataatgctggcctttgcagttcacagaagaacagttcctgcaatggtgtcatgccaaagccaattgttttcaaccctaattcttcgtcagacccctggatggatgttgccccaagttccccaagcaaccggcaccagaggaagatgatattgagcatctcaacactcatcgcaattgtgggtggagcagttattgttatcggtgtggtcaccataacagt

SEQ ID NO: 191929 - DNA, 278 bp, Zea Mays
tgggcaaggcgaacacgaaaacctctttgcgcctcgacgggtgcagctggacgcgaccgcggaggagagtgtgagctaggacgcaagttgcggcaccaagtcacgcctcggcacaacggagcaaggcgtcgagcctggcgcagaagctccgcgagcatgggctcggacgcgaggtcatcgggggaggtaaagtgtgcgtctaggaagcccctcatgctcggtagcagcaacgacatgggatcatcgagaggggagtggggagctaggtgaacgtgtgg

SEQ ID NO: 191930 - DNA, 314 bp, Zea Mays
cagtaatatccacgttgatccgtgcacgaatcttcacggcgagctcgaatcgcagcgcccgatcaccggcggcgaggtacactgcatcaagaatcttcttcagtgtactgtaccatggcaatgttcattcagcgcgcctgacagagccatttgagagtcatttctcttcgactttcgttcaacaacctaccaagccgaccataacaaagttgttgtccatcatgtcagctttaattttgttatagggttcttgttcatacctccactccatcaagcacaattcagctctcaagttgctctaatgccactgtcag

SEQ ID NO: 191931 - DNA, 828 bp, Zea Mays
atctgatactcaatcaccttgccatgtttctgagcataataatccacgagcctccgtgtttggccggattcagcatccacaaaggtcatctggctggcaggtaagggtgtcaaaccttgcactgtgtacttctgattagtcctccgatgaatcacagttacacgtcggcctttaagctcatcaaccagattttccatttgcctcttgttcaaagttgtccgataatcaaggtacctcactaatttctgaacaagatccatcaccggtccagctttgtaaaacggcatgacagaatagtcaacacacaggatcaacccttgctgagtggatttaagggactgctgggttcctttcatagctacagcaccctgcccaatgtctatactgctgcttggtgagtaaaatcctctaccaaggataatcttgttccatcttgaggcctcacgcacaacaacatcaaggccctgcaagacctctctaggcacaggtaaatctgagagttgacttaatggcagctgcttcttcaaatctactgatacaatgtaggtctttgatcgaactctcacacgaaataaacctgcaggcagttcagcagaagtatacagatttcttccaccatcataagcaacacatgaggaaagacgccgtaaactgctttccctgaagagctcatccttgacagagagaaattctgccttggatagctctttgcccgaagcattagacgaagcttcatcaagcttgatgtttatgtcataatgaaaaatagttgtcacctttcggtagctgacaataaagtgattcaccaaaagtttaaccgttgcttga

SEQ ID NO: 191932 - DNA, 348 bp, Zea Mays
tccagagctgctgttgactgtccagtggagctgcccgtgagcatcaaacgacgttcatacaccctggccagatgcatagcacgctgcagcgtctctggagtttgtaattccacatcagttcggagaggttcgcctaagcctgctgtgtacatgttggactattgtcgatgagacatgtcgtcacaacgacacaacagggtcaagaattggcgcgaatactcttccacagtgcctgtgcgcttcagttcttttaaatcagccatgccattgaacctgagtggtggcccgaagcgcatctggatgaactcaatgaagcgtgtccaagtcagcacgccgcctagatcgcgc

SEQ ID NO: 191933 - DNA, 918 bp, Zea Mays
aaaatagctgcgcttgaaacattggaagttcttctgaatgtggtgtgcttaaatccaacttatttctcattattctcttatttctccatgtcttttgttttctgtttgccagatattccttatttgaaccttgttctcatatttttctggatacaattatagcaaaaataacttcggaaagctcactgtaaacgccttttttcccacataaagatggttcaaagttcatcacaacacatatacacctcttgttctaagttttaagcattgaaccaaatgggatagtggataagatatttaaatggttgaagttatttttgaagcaaatctgtacagcattgtgctgtacatcttggtgctcatagataagtatactcataccatagctgaaacagtagctataactatttttaatgattatattctacaaaggaagaagtaccaaacttaccttaactttctatgttgaacaggaacaaattgcgtattgaatttgttatgcaaccagcatatatactgttatttaattataaatagatttttatgtcattatcaacttatcacggagcagggaggttcattgcggatggatcgctggaggtcagaagtggacatgctcttaattaacgtggctagaagtgcttgcggcatgggagggagttatgagcaaaagccatccacatttggggagccaaacatatcggacttccaacttgcttcgcttaagggcctgctggcatcttttctttcttctcatgcccgtcctccttatttagccaacggaattgaactcttcagaaaaggtaatatctttcgggatgtttttattggattctggatgggttatttaaattttagtttataattaacacatgcagttagttgaacaaaggtttaactgcgattggtgcggcactg

SEQ ID NO: 191934 - DNA, 457 bp, Zea Mays
atagtgccactgtcatgaagatgatacccctgagtaaaaacaacatgagagtcatcattgttagtacaagtatcagcaacaggatcatcatcaggactagccgtgggagtagagcgaggacgacgaatgtaagtctgagtgacaggtggtttggaagagtaagaaggtggtttggaagagtaagactgaggtggtgtggaagtggaaggtggtgtgatgggaataagaacatctggggtagaaacagtagatggtggtggtactgctgaagtttcagaaatgggaggaaggctcatgaaggaggtagactctgtggaataaaaagaagaatgagtggaagagttgtaaaagaagggtcagttttcattaaagctcacatctcgggaaatacgcatgcgacgagaagatggatcataacaccgataacctttatgttcagggctgtatccaagaaaaa

SEQ ID NO: 191935 - DNA, 840 bp, Zea Mays
acaaaaattggtactggattggagcagcagggctcttgggtttcaccatctttttcaatgttcttttcacattgtcactcatgtacctgaaccgtaagcgctatagtcttgattccttgcttatcatccttaaaataaaatcctacagatgataatttctgtgtcaatatcataagcatgtattctttaattctcagctcttggcaagccacaagctattatatcagaagaaactgcaaaagaagcggaagggaatgggcatgcaaaagggacaataagaaatggaagcacgaaatcgaaggacggtagccatgatagtaagaaactcttaacaaaagtcccagcttataagaaaaaactgaaaaacaaattacatcttctaatctgaggttttgttttttcagaggaaatgaaggagatgagattgaatgcgcgtttgagcagcagttcatctaatggggtttcacgagtcatgtccattggcagcaatgaagccgctctgtcaagaggcatggttcttccattcaaccctcttgccatgtcttttgataatgtgaattactatgtcgacatgcctgcggtgagttcaccttcaattattctcagcaatttttcctgtcccatttgttaccttcctcaatgtgcttgtatcgtcaaatatggaaactgatggaaaactccgttgtttcccaggaaatgaaacagcaaggagtgcaggatgaccgactccaattgttgcgtgaggttacgggatcattcaggcctggagtgctgacagcacttatgggtgtcagtggagctggaaagactactcttatggatgttttagctggaagaaag

SEQ ID NO: 191936 - DNA, 366 bp, Zea Mays
caaacatgacaaccgccggagccgtctctttttcttcttcttcccttcagcaggtgcaattgggcggctgacctggcgaagacgctttgggtgagtaccctcaggtttcgggtgtccactattctgtcaagctctggtataaccgcaacagccattgtttcagcaggggccgagtcagaagattctccagccaacatatcgagcacaacattcatctttgcatcatctggactcgctggcatctcaaaatgaacttgcctctcatcattaggaagatcacacagagaagcaaccaaggcctcaatatcttcgggagagggtcgcactctaagacccagaccactatcaccagcaggaggattagac

SEQ ID NO: 191937 - DNA, 462 bp, Zea Mays
cgcgatatcttcttaggctctttattgtagtctgttgctgaaattgcaatagtatttactgttaatttcgcctcagtgatgttgtatgttaataagcaggggcatggtccgtacttatgaggagaaagcgtaccttaggttagtctggtagcagatcaatgtctgtccagaatgactagcttgactaatcgagcacataggtctctagattactgcttatactttgcctgtcaccatgcaccaaggctcaagaggtctgacacgcatctgaagccaatcaatgctgcttctgactaaaacttggcagaactgtacgtagttcaggggctaatctgttggtgtcatagttcagaggcaaatgttgctgcagaagttctccatgcagcttgtaagataagttgggcgcttagtcgtttgtttacactgttctaagattgcaattttataaaatgtgcagaggcc

SEQ ID NO: 191938 - DNA, 1211 bp, Zea Mays
taaaaagtcggaggcatcaaatccaaaaggtttttattagcatggaagcgaaatccaaacccctgaccaattcgggccgagcagcaggcggaggaggagttgcatccgtggcctcccgtgttgctcctcctcgcgcccgcgtccctattacttctccgcgtccgtgctggggcgcggcgcgcccaccgatcctgttctacctcgcgtctgcgctgcgacgttacctgctgctgtcgcccgtcggtggtggaattcgtcgcgcggatcgagccgcgggctcgattcgggcttggcgcctctgtatatatgtcggaattcgccgtagcgtgtgattaggttttgttgttcttctgtgtcggcctggtcttcgcgtgttgtgttttgttgtctggcggaggcgaatctagggtaacggtcagtcgggaatggagtcctccgacgacgggggctccgggccggcggcagggagtcccggccctccgtcggcccccgcagccgttggcggtgcgagtagcgctcctggcgcgtctggatccggcgggaagccgccggtgaagcgcgtcatgaagacgccctaccagctggaggtcctcgagaggacgtacgcaggttcgtcggctattgatgattctgaaacgttttgatggtttgtttttgcgagcttttgatcgaactgtgcgtgtggttttcatggggattctgttttgcgcagaggactcgtatcccaacgagacgaagcgggcggagctgtcggtgcagttgaacctcacagacaggcagcttcagatgtggttctgccaccgccggctcaaggaccggaaaccgccggccaagaggcagctaagggacgaggaggttagcgtcccagtcatagggccgccgccacctgtgcttccgcctccattgcctcccagcgagatgatggtggggactgtcggaacctatggtgagcagctgctgccctattccaggagagggtctggccggttatcggctgcacctaggttatctgtgccggagattgggaggaggtactatgaaccgccacaagtcatgctgcctcatatggcaccagtgcaccttatgcaagcagagcaccgggtgatcgattctgtggaagcacttataggggaacctttgagggacgatggaccagtgcttggtattgaatttgatccacttcctcctggtgcatttggagcacctatcgg

SEQ ID NO: 191939 - DNA, 409 bp, Zea Mays
aggaaatgtaacaagaggcaaggctctaaattaagtgacacttaagcaaggaggggctgatgaacgcacaactgaacttagctctatgcctctatataagccaatatgtcattgcattctgcaggaactcagttacaggccaagaaatgtcaaatacatgttccactagagctggatagagttggtgaacagataaattttctaatgcttgattatactgctcaggttcacacaataaagtgtcagagacatcatgaaccgttctcacggacacgggccctgcaaccattgggttcaaatccgtcatgagagtgtcaaccaaatggattggttctaccattactctgaataggctcattggcagaatggtatatgatatatccaatccatgtaggtacttagctttgat

SEQ ID NO: 191940 - DNA, 380 bp, Zea Mays
gtaaagccgatttggactcctgcgtaccttggcaagaaggtgacgagaggggtcccaaatcctcatgactccttgctcgacctccacgcgcgaaccgttctcattcagctgtcccaagctgatgatagagttcctcaacgcagggatgtagtagactccagtgagcaacctgtgctcaccagacacggcggtgaagacaactgagccgacacccttgatctctacgccggaggcgtccccaaaattgacggagcctcggacgctagagtcgagctcggtgaagaactcctgtcggccggtcatgtgatgagtggtgccggtgtcgaggcaacatccttcgatcatgtcgttgctggagccgtcgccgaggaaagcgcgtg

SEQ ID NO: 191941 - DNA, 371 bp, Zea Mays
cgttgtcacttgaagatgcgccgttgagtgcgtgggattaaggaccggacgaaatcagcagcagaagacatgcggtttagattgaaacccaaactatccgataccagattgttatggactgcgatgggattgggaaattggagagagagttgtagttgcagaaacgtcggccgggggcttctgttcacggccgggcaagaaggcttgcttctaattcttgcttaaccttaactaatacaatagtgtcccttttatagagacgactgacttatctctgttgtagatacctttgtgggccggcagtatgccaggcgccacaaaggagtcagttagccctcctattttagtggagagattagctctatttgttt

SEQ ID NO: 191942 - DNA, 512 bp, Zea Mays
gtcagagagagtgttgtagagccaggagcggacggcgcagggcgagtccgggacaggaaggccccggaggacgtggtcctactaagagtacttgccgagggtgagtaggaactgttcgcgccagcgagggaaagtaccggcgccgagttcgagggtagaggggcggcggtgcctgggtggtagacctccagggtagcggaagaggaccaggggggtagcgttgagggcagcacaccagagggaagcaaggtggcgcctagggctgcgtgccgagcagggaaccggccaggaaatgggtttggtctgctgataccatgtagaattgcagctagaatagtattgattgatgtcacggatgatacgcttagtgtgatcgttctgcaaggaggtgtagggatggaagacatgcgaagaagatgaatgtcgtgggtgaggaagaatgtgcgagagctcgcattatcgaactcaaatgaactcattctgcattgcagtgatgatatgctgcaggagag

SEQ ID NO: 191943 - DNA, 761 bp, Zea Mays
tgaaccagattataactatgtacctccgctgtcttgctggggatcggcctaaatcgtggttgaagtggcttccatgggctgaatattgctataattcatcatatcagtcggctctaaagtgctcgccattcaaagtagtgtatggcagggaccctcctcctatggtttcctaccagccagggaactccaaggtagcagccgttgatgtccagctgcaggacagagatgcatttcttgaggaaatcaaagcacgtctagtgcaagctcaagtcactatgaaaagctaccaggatcagcgtcgcagagaagtggaattcagtgtgggagattgggtctggctacggctacaacagcgaacgactgtaggggtcactacagcttctccctccaagttgggaccaaaattttatggtccatatcaaatcacacaaaagataggggacgtgtcctataagctgcaactaccaccaaatgcacacattcatgacgttttccatgttgctctcctgaagaagttcgaaggcaccgtgccaacacagctggttcccttaccacccttgttacatgggcgggttattccatctcctgagaaggtcctccgagcaaggctgaatagaggagtctgggagctgttggtaaaatgggtagggcgctcagaagcagatacgtcatgggaagaaattgaggcatttaaacgccaatatccacatgtggcgctcacggacgagctgtttgttggggaggggggaagtgttgtagat

SEQ ID NO: 191944 - DNA, 474 bp, Zea Mays
gtggattcaactgcttcatcgcttgaatcatggattgggtttgctgttgatctgcacaaggctctgcattcatcttctcctggttcaaacaggaaagatgcaccaacaaggttgcttgaatggattgatgctggtgttgtttatcagagaaatggtgctcgtgggcttcttcgttattctgctattcttgcatctggtggagatgctcatctttcttcaggaaatgtgcttgtgtcagattcaatggatgtagaaaatgtagttgcagattcaaacagtagagatggtcaggtcatcgataatcttcttggtaaacttgttgcggataagtattttgacggagttgctctatgcagcacttctgtggtccaattaacaacagctttccgtatcttggcatttatttcggatgataaggtaagaaattcatgctcatggaaaacccatttattcatgacttatagttcgtaatga

SEQ ID NO: 191945 - DNA, 566 bp, Zea Mays
cggcgagatccacgcccggcgctaccatgctccgaaacgaaatgggcatgtgccacacaattcccggatgatgacgaagcaggtagtggatttcttaccgggaatgaaggggccgacagggctgtccacacgagcagtacgatgcacggcggattcatggcggaccacaacgacggcaacgaattgcccacgctctgaggcatcacactgcccccagagccacggacacaacccgcgagctcgactaagcacttgttaccaacgccggtgatgcagaaacccccaaccacgccaatggaggatccacggcgacacatgaatgacagcgagaaattgaagggcttccggtgatcttctcagtgcaccgggggcacgaccaccatcagaaccaaccggtgaagccctcagtccacaaatcgggtcaggtcaacggtgtagtcttggattccctctctcactcggcggaacgaccagtgcggcagcgacccacgcacagcggcacatctatttcctcacggtttctctgtgcggtaatggcgagagttgcaagggcagcgcgtacggcg

SEQ ID NO: 191946 - DNA, 477 bp, Zea Mays
aattgatccttcaaatacggatgaacggagggagaatgatattgggcggcccgatgaatcagcaaaaggctgtgaaaggttaacttctgattctataaacacagttcactccaaatttggcaagtctagtaatgaagaggataagagaacacagaacaccaggtctacggatccaaaagatataaaggaatcattgggtagaattcgtgccgaaccatcaaacagggtacacacaaccagtgttgggtattactctcagcatgcagctcatgatccgatttcatcttgtaaggagatcaaagtgcctttgcgagacggtgcaagggattctggaagggaccgtgcactggagttagtggttacaagtccacgagaagagactcctcgatggaggcaagaacagtacgcacttcagattttagaagacgttcaaaattcccgaattgctgagagatctaggatggagatggagatcag

SEQ ID NO: 191947 - DNA, 385 bp, Zea Mays
caatagttccttattctccttaccttttgccaacaatgttctcctttgctgcctcaaggatggagttgtcttgttccttcatcttcgtcacatcatcattatgagctttttctgcttgttcttgctccttttagcttcggctcatttctctttagacgcttgaagtggcggagtgttgttgttatagtgtcagatgttgtcgctggagttggtgtcgttgttgcctttagtggtgctgggagtccaggcttgggcgccatcacattattgctttccacgatgattgctagacatcgttcgtacgcccgggcaagcgacatggtcgtctccatgtcctttgcatctagcatctcgacgtccattttagcggttgcagtagtccgtt

SEQ ID NO: 191948 - DNA, 401 bp, Zea Mays
attgatttatactagtaacttgctcgcgcctagtgcgagtcttcgatcaatgctgaacacatttaaaagcgtgttgttttagatatatggagcaaagcatatgtggatatatctaaacaaacaattgtccacggtagtagaacaatttagtctacaaatgtagcagcatcagcaatctagatgtcaacattctaagtttcagattaatgatcttaaggacaacataatagaggctgataactctgttgtgtgtattagatgaatttaaggttaatttgctattatttacatcatggctagcaaatatacaaattaaaaggtgcatatttagaaaagcaaacaggaaatgtgttaagcatacatgttttcctcggagtgatgacttttggaaagtgaagttg

SEQ ID NO: 191949 - DNA, 367 bp, Zea Mays
gattgatctgctcacattctcctctgattttggttatgatgatgaagcaacaaacaatagtgttggctatgatgatgagcaagacaaagtcaagaatgatggtggtatagatgatttggatgatggttattgagatatgatagagggagattgaataacgcttgtgtgcttgcaattgtggacattgtattctactttagttgcttttgtgctatgtttgtgcctttgtggttgtggacattgcatttcactttagttgtttttgtgttatgcttgtgcttgtggactattgcacatttcattccactttgtttgtgagtgtttacttgctagttgctattagttgaacacagggccgggcctaggg

SEQ ID NO: 191950 - DNA, 290 bp, Zea Mays
ctggctagaaaatagaaacacataacattttggttgaggttatctcccgctcctatgtgaaccacaaaatatttcatgttgctaatatgtatttgctacgaatgtattcatcattttagattactaaaatgttcagataaacaaaagctgtaatttggatagttgttgatataatcaaagctgccaataatatgattacttttacaaataccccctgaaattctacgaatcaacccgctgtcatacgcacttctccgtcccgcctcccttcgggcccacaccatcttcgt

SEQ ID NO: 191951 - DNA, 822 bp, Zea Mays
ggtggataaatatgtcaatgggagggggaaaacacaagaggactacactagaaaagaagctgctcagcgcaaagactcgagtgaaaatcaagggcagaatgatgctctagagctagacaacctccggatggagatgcaagctgacgaacgtccgttagaaccaggaaacaagagggacaggaagtggcagaaaaatgtatatggactcggatcagcttcgggacagaaggaaaccttgtccaggagagaaaatccacggtcagatagagggatggtccacagtaacgacagcaaaacaatttattacaggaagggtgggacggaagtcgataatgttgatgaccaccctttagaaaagcaagaccaccaggatacatcaagtgacggatctaaaaagagaagccgaccagtggacaacgcatctggtggcaacagaccatacttggatgagaacaagaagcgtaatctcagagaagatggaagatatgctcattatgaagactggagaagtgaaaggaatacagcagcagacacgtctggatataaggcccaatcagaagagaagcctgtatggacaaacactcgaacaggatcaagggagcattcactggacaggcaaaggatagagtgcggtgacagctatcgtggaacctataacaatagacaaagacatgaatggctgcacccgcacgctagtggtaattcctcgagaattggttgggatgacaggaggcagtggagttcatctcggtcaccatttccttcggctgaatttggtggtgaccgttcctgttctcgtgcccatccgagaggttctaaata

SEQ ID NO: 191952 - DNA, 771 bp, Zea Mays
gtaggtacccgaaagcaaaatccgctatccaatggtcatggtggaacggacacaatagcaggattattagcatcactgatggaagttgtgcggacaacagtagcatgcgagtgtgtatatgttcgagcaatggtcatcaaagctttgatatggatgcaaaatccacatgaatcttttgaagagctaaaatctatcattgcatgcgagttgtctgacccagcctggccttcctcgctcctgaatgatgtcctactaaccttacatgctaggttcaaggtattggatcccttttagtgtttatactatatatgtagtgctaaatttgttacattattctcagtacattgttcatttttccattttaatttgttcattatctgcttgtgtctcaaatagtcaaatcatatttgagattgcaaccattgaacatgattagtggcattgagtgtttaatgattaaaagtaacgttgttctttttaaacatgacggtgcctttttatgttgctttttttaatcggaacataggatttatttcttttcagaaatttgtttgtcatttttttctagctccttttcatgcacccattgttttttatggttcatgcacttatccttctgatttttattagcatgtgtccctttatctgatttcatgattgacttattattctgtttgtcttacatgataggcaacccctgatatggctgtgactctgcttgagattgcaagaatttttgccactaaagttcctggaaagattgatgctgat

SEQ ID NO: 191953 - DNA, 854 bp, Zea Mays
tacgagctgccactgctaggttgctcttgagctgtcaccctgcctggacggttagcttctcctccacatttgtgtcgtgtactctgtctcttctgttatctgctctcaatctctttccctgtttcgaactgagctaaacctttttacactaccttcctttccctcagcctccgtatcctcatgtctttgaagactctatcatagataatattaagaagtgggtaacggaggatcctgaagcgtctaatgaatgcaaatggaagtatctaggaaacaataaacccacagatgctgagatgctgagaacatatgggattggtttgcttgctatggcgttgtgcaggtactgctaatgcctcattgatttattatcatctggtaccgaatattatccttttactactgaatttattattatgttattctaattcttgtgtgcttcaattttcacctcagcagtgggcaattgatagaggatgtcttgactttgggggtatcagcgaagctcatgcgctatttgcgcataagagtccttggggatgcctcatcttctcagagagatgctaatcatccacaggacaccaagcatccttggggcggagacgacagtaggggtaaatcacgtctgtcccaagatggttctcgattggacggaacaagggttgggtatggaatgttaaccaacccgacagcagagaagaacaacgaaccttgtgttggaatgatgcaagcatatggagcaaggtcattggatgacagttttgcttcattggatgattctgatgtccctgaggctgattggaccaatgatagatcttatagcacacgtgtttgtgacacaaagtcaaaacatg

SEQ ID NO: 191954 - DNA, 415 bp, Zea Mays
ggagactcaaatttcattttaccatggtttggacactaaaatcctttagtgtcaatgtttaggtttaggtttaaggataggatttagggtctaggtttccatgaaattgtgtgctatagctcacgggtggcaaaaaaaatgccataacggcctccctggtctaaaacgaaggtggcaggtcggatacataaaattggctgtctggccacggaaatgtgtgatatagctcgcgggaggccaagaaccgctttaaggtgctccggggacaaaaacacgtgtggcggaatgcagacataaaaatggtcgctcggccatgaaaacgtgtgatatagctcacgggaggccaaaacagccttaccagtctcaatggtcaaatcatgggtggcagacgggaggcacgaaatcattgttcgac

SEQ ID NO: 191955 - DNA, 681 bp, Zea Mays
ccaccaccgtgtcccgagttctcaagtacatcccggagctgcagaagcaggtggacaacctggagaggaggaagaaggagctgaccaacgccaactgcaagccgggagttctgaaaaccaccaaggccgtaactcccattgtttctgctacctgcctcaacgacacggagatcatggttcaggtcagcctgcacagcgatgtggccgccacagctctccctctctccaagtgcatcaaggtgctagagaacgaaggccttcatctcgtcagctcatcaacctactcctccgcctttgagaacaagacattctacagcctccatcttcaggtgcatcactgcttcttcttttttttttgaaagaacgactgcttctttcattagatgcatgttcaatgttcctgccttcctctgacgttgacttgaatttctttttactctgtctaattagttagtataattgcactgatttatacaatctaacactattaccacagtcatctcaatttccacccttgcttttctagatgcttgctcaaaaaatacatgcagttccaagctccgaatcctcaagcaagaggtgtcactggatcactgagcatcagtagaatcagagaacgaccacaacagacaaaataaatacagacaggaaacaaatgaactcatcaaactaattaaatat

SEQ ID NO: 191956 - DNA, 335 bp, Zea Mays
gaaatgatgggtgctggatcctctagattggattcatcctcgattcctatatcttcctcaaaatctgtgacctccagatagaacagacgcgggcaccgatgaccacgaacgtattgttcgtcacagttgtaacacatgccctgtttgcggcgctcagccatctcgccgggagtgagcttcttaaatggacgttgtgcccccgtgctggttggtgctgctactgttatagtggactgttgtgctggaataggaaatgacggtcgctggggaggcctcgacgacttgctggtagttgatgtctgttggacgtcgagtgcctgagcccttcgttcata

SEQ ID NO: 191957 - DNA, 277 bp, Zea Mays
cgcccagatccacaggatcggagaccaaaggccccgattcactcctgctcccacgatgcgcacgcctgattacagccctccgttgccaatccaacggccaacccatcttcttctccaacgctacgcgtatacctggcaccatttgcccaacccgaacgcccagtcggccgcgatgcgcaacaccaagccaatcccagctaccggccggcacagtccaggccctacacatcgacaccgccataaaccgagcgaccatagactcttccccggcttcgca

SEQ ID NO: 191958 - DNA, 532 bp, Zea Mays
actgtctgccactgtgccgccgcacagtagaaagttagaaaccctaaaacagtaaaaccctaagccgccgcctctgccccctctcacactctgctccattgctgccctgcggccctgccctctgctccggtggtcctcaactccggtggtcctcagctccggtggccctgccctctgccctctgttgcgctcgcctctgctcagattcggcgctcgcctctgctcactgctcaactccagcgcttgcctctgctcactgctctgctccggcaaccgtctgcaccaatctgttctgaacttaaccgaaatgagcacctctacagatggtaatctctgtgttcttttggttcttcaattgttcatttggtgctgcacctcttgagttgttattcacactacagatgagactaggaggtggcgtaataatgttcaagttatctattagtggaaacatccttgattttgattgcttgtactgctgtcctgctagacagctatagtgtactgctgtcgtgctacagctatattatat

SEQ ID NO: 191959 - DNA, 523 bp, Zea Mays
actaaccttggattaggcgagataatcacccccacgggtactgtagcatatatataggcatataggcaatatgggccttatgggccttaacaaaaatatccatctctggtggtgttttctttctgctctttgtggatctagaaaaaaaacaatggaatctagagaaaagttcgatgcaaatgcctgatcagtgtgagaaatgttgtctgctgctttctctctagtagtttcagtctcaaccagtctcgacgcattagttctcactttttaaaggaacaaatgggagaatctacttccttaaaagatgacccattctcaagcgctctccgcgatcccgctcttcgcccgccctacggtcgacgcgtggtgccacgggcccgaaactttcctttgattcaacggagcattgcgtcccgtaactattggcgtccgctgtccacgtcgtcccgtcctgccgcgccacacccgcaccccaaaccctaaacatcatttcagtattttggttggtgtcctttatgttgcg

SEQ ID NO: 191960 - DNA, 338 bp, Zea Mays
gtccctgcaaagaatgagaagaaagaatcctcaggcattggcaagcgagaaactgggaaatctacaaaaaggactggtaattcaatctcttagccctgacacaacatatgcacattgtgtgacttggtgaaaacttatgcacaaaattttccagctcctatagacaaggctaagactgctaaagaggaggccagagagttgctcttgaaggaggaagcatctgtgcgtatgaaggttgggcaagtgcagaaggatctctccttaatgttggatgctcttggcaagttggctattgctaatcctatatttactcatggtcaactgccgtcactggtcag

SEQ ID NO: 191961 - DNA, 353 bp, Zea Mays
ctgcaagtaaatgaatcactctaattcaagtggagttccatgatttgaacaacaaagctcgcaacactttgttctcatgcctctcgctgggtgagtttgagcgagctggacatttggctacaactcacgaaacctggtccacccacgagaaattccatgagggcaatgatcatgtgagaactagactctttgagatgtaccggcgagagtaaaagaactttgttcaggtggctggagagactatagtgttttctcggttctagtccatcgtgaacaagatgtgtggcaacaaggaacagttacctatgagatcatgagagagagctcaagctactgcatgctctagatcgaag

SEQ ID NO: 191962 - DNA, 448 bp, Zea Mays
tcgctacttggatgatggcagcatgccccttgcggagctgattgacccgagcctcggttggttccctcaagaagccgcgcacgcactgtgcgaggtcgcaaggtcttgggttgggtggacccagaccccaacaagagaccactgatggtacaggtggctgctaggatgaaggagatcgcaattcgcaaggtcttgcgtggacccagacctcaacaagagatcgaccacggatggtacaggtggctgctaggatgaaggagatcaccgcgctggggccgggcctgagggagcgactcccaaggtgtcgccgctctggtgggcagagctggagatcatgtcatctgactgaaactagcttatgcatgcacttatccattctcaatctcctcccgctgtcactggcaattctttggtttgttgtgttgtggttgcggagcctgaagcaaag

SEQ ID NO: 191963 - DNA, 460 bp, Zea Mays
cctgttgcagagcactcaaatgagctttcctgctgtcaagctgtgaaatcatgtttgtatcctgtgctgttatgcactcaggcaaatgctcaggtccagatgcatctgttggtaagacatcgctgattctgtcaaaacctgaagttaccgtggcatgagagctcagtccttcatgaatggaaaccttagatgactgattgctggagccaccatcatttgccccatctccatcagcacagtgagatagacttggagatttttgcttacaagattttggttcaactgtagcagtatggtcatgtttatcctgctgggaaaagggctcagtaatgcttccctgcaaaggtgcatcacagccatctgaagcaagcacagatccaacagacatgttcccctccacaataggaatcctttctgaggacctagtgcctagaccaacagcatcaatagtatcttcttg

SEQ ID NO: 191964 - DNA, 330 bp, Zea Mays
tgaggtctgagggctgattcgttgttccctgactggctgatcctgttgccctgcgttgtgaatatgtactccctagcgcgtatgtgtatttacactgtgtccgtccgccgtcccgcgtgtgttgtttatgtgcctccatgttcctgagtttggcgccagcctacagctgcatgtagtcgtagtccactagttttgtacttctgtatggtatatggggtggggcccctagatctgggggcccaggtcggttgccccgctcgccctgccccaggcacgggcctgcctgagggcgtcatcgagtggatcagtaatgaagccaaagcttttgag

SEQ ID NO: 191965 - DNA, 364 bp, Zea Mays
gtctccgtaggataactgctaataactacgtaactcttatgtccagtgatcatttgacctgatctcttgctgaaatttccatcacaacataaataataagtaagtcagacatatccatgtgaaggtttgatagtttgagtatgttatatgaattcaactgctgactttgcaataggcatttgcagccttctacctcacatgcttgggtgatggttgtcttataactttctttatccatgactccatgccttgcaaatatcattcctttgactaaataattctttgatggttacttggttttgatggcatttcttctgcttctatttctttttcccatgcttttgaagcagataatggatagggc

SEQ ID NO: 191966 - DNA, 405 bp, Zea Mays
acgacgcgcacgactggctcgtcgccctcaacgacgacttgctcgagcggttcggcgcctccaccgacgagttcaagaccctgcggcggaaggaggagacttccgggcggagggcggcgccgcaggctggggacgggttccaagtggtgtgcgggaagaagaaaaagaaggtgggcgatggtggcgaggaacgcgtcggcagagttgaggctttcggaggttttggctctgtgaggatggtcaccaaggacaaggcggccgcgccgggggtgaaggcgaaggtgcccttccacatccgcaccatcccaaggccccaggatgtgtattgtattgtggtggacaactccagcaagccgttcgagcatatcttgcttgatcgcagcgaggatggcactcgggtcgtgc

SEQ ID NO: 191967 - DNA, 430 bp, Zea Mays
ttgttctgaattaacagaggaaaatttggagcttatacacaaattgaaagaagttagtggggtcgaagaacaagattcttgcctttctgatattgaggtaatgttaaatgcgacaggtctttctgggacttcaaaatctagagcaaaatacctagaaagaaaatgtgctgaccttgagcagaagatgttgaattttcaatcggagtctagagaactagaagagaagctcaaaaaaagccacgaggatctaaaaggacaaactcttgaattatctgagcttagagagaacctaagtagattccgtgctatggagctagagagaggggaaatcaatttttcaagaggctaccagttaagaagtgaagaactaggagatattgaaaccgaactgaaactgttgaagagtactgttcaactcaaagaaaaagag

SEQ ID NO: 191968 - DNA, 389 bp, Zea Mays
ctttgcgccatctgacacaagagctgcaaattgtttaacctgttcagctgatggtgcagttccgatctcaaccagcatattcaccacctctatcttcccagatgagacagcctcctgaactgctgaaaggtacaaatcatctttaacatcttcttcccggagatcaacaatagttttgaatcccttttctagtagccatgccagcccctcctcactgacttgccctcccctccaaaatgcaacctcgggctcatctgttcctgaatcatctgacacaatcgaaaggtacaccggaaaccaattcgcaaataatgtcggacatggataaccatcaggccttgagaaacctgcatcgtaacaagcgttcttcaatctctgcagcttcctcc

SEQ ID NO: 191969 - DNA, 305 bp, Zea Mays
aataatctttgaaagggatcgaaggtggcaggtgcatgtacacacatgtaattagatggactcacagagcttagaacattaaaggggactgtgccttagtagatctatcagttaggataaaattgccatttgaatagcatgtaaacagtaaacaaaagttgctaaacaacacatgagcactacagtgccaagatttaagtataatcaatttccacttatgaagctaacatagcgagtgcattgagttatttgcagtctctttccaacatttctctgcactacataatcacatgttcagtagagac

SEQ ID NO: 191970 - DNA, 357 bp, Zea Mays
gcccagacacctcaccggtggtcttcgctcgtcgctctctctctctgctcggtcgtcgtcaccaggcctcgacctcgtcggtagtgcctcactcgcccctcgaccgtcctctccttgcctcttgcaaccatgcactcggcgcagcgccgctccctccatggcagtactcatcccctatacctacggcgccgccacattcggccaacccccatctgtccttggccctactcctctgactacagcacttgtgccttccactactctcgtggaccctggctccttcagccccgccttcgcactggctgccagcaccccctccttcctagctccgccgggatcgctgtgcgcatcttactt

SEQ ID NO: 191971 - DNA, 333 bp, Zea Mays
ttctgacttcttgctgaaggggtacaatgaggatattgagagcactgtacagacattgcaatctgacgaggaaatgggaccaattcagatgagcagcccagtctcacagaatggcgagagcattccaccacatgtgaatggcactgaccatggttccaccatttcacatgccaactcaaaatcccatcgccaaagtccatccaattgtttgggcctagggctgggcactgggcataacaacccctctagccgttatgcgcgatctcttcttcccttatgatttgtcttgaggatatccagatgtgctcctttatatttgtgcatacttgttgg

SEQ ID NO: 191972 - DNA, 319 bp, Zea Mays
gtcggctagggggtacaccccaaccagcgaagaatgacgagggggcataaccccgccagctaccacgggccgagactacgaactttgtagtcgaggtccgacgtccttgggcacgtacgcccttgacaggcaattctctggaaggtatgacttaacaatcttgggtgtggcaattctttacaatacttcaaagttatttgagcctttctgcaaggtatgtctttataatctttgagttgcttacatattttatcaaatatgttgtctgacatgttccatgaatacatcatgtcctggtcaatttcattcaccttcctac

SEQ ID NO: 191973 - DNA, 297 bp, Zea Mays
atgaaaaccagatcgagaggagaaagggagcgaccagagacgcgagaggaaggcggcgcattgagggaaagaatgagagccaacaaaatccggggaaaccctaacctggttttggagatcgctggagaacagggaatcgcggtagagggttgatgccatgactcttgggcttgggctgggaagagcgactccacccccgagcgccatccctcccaagacaaacgggcgcgacatggacctagagacacgacataggagggcacgagaactccctgggccacaccgcgcactgtagac

SEQ ID NO: 191974 - DNA, 328 bp, Zea Mays
caagagctgagggatggcaatgttgagctgaaagagattgtcaagaaccatgagagcattgaacttgtgcatatcgataacctaagaaagttggagaggatgtcagagacaaatgcacatttagagaagtctttgtcagctgcaacaactgagcttgagggactgagggagagcaaggtggcattagaagaatcatgcatgcacttcagatccacgattaacactcatcagtctgagcgagctgtgcttgtagcgcagattgaggtaatttctcagaccatggaggagctactggagaagaatgttttcttggagaattccttatctg

SEQ ID NO: 191975 - DNA, 357 bp, Zea Mays
gatgtatactgcacaactggaaaatatggacgatgcaaagaccaatagctttgatgggttggggcaaacctttcacccaaatgtcctgtacatgctttcttccttatgtttgccttcactccacctcttcctaaagcatcatccttaccttgatcttgagaactcccattagggacccatgtcatgcctctcttcttcaacttttgtgcaccacgtttttctagcctcttgttgtgccaaattgataatcggagtgggcttctcggttgtgaattagtgttggacgacgatacgtcttccttaacctttggcatattaggctttttaaattcagatctagtaccaggactattgcta

SEQ ID NO: 191976 - DNA, 500 bp, Zea Mays
cttcttcagcagcaggagcagaagggccagcaccctggtccagacacgatactcgccgaagccgtctcttcttcttcttcttcccctcgacaggtgcagttggatgactaacctagcggagacgtttcgggcgagtacccttaggctttcgggtgtccacggtttcttcaagctctgggatagttgcaacagccattgtttcagcagggaccgagtcagaagaatccccagccaacatgtccaacatagcactcatctctacatcacctggactcgtaggcatctcaaagtgaacttgcctctcatcattgggaagatcaccaaatgaagcaaccaggacctcaatatcttcaagatagggtcgcactctaagacccaaaccactatcaccgacatgagaattggatacaaaatcgaaaaaggacttagaaggtggcagattccaagcagaatatgcaacaggagcaccaatatttgatactttgcccctcaagatcatc

SEQ ID NO: 191977 - DNA, 364 bp, Zea Mays
atctagttctgcttataatgctctcttccttggttcagttcagttcgaaccagcagagcgggtgtggaaatcttgggctcctgggaagtgcaagttctttatatggcttgtggaacataataggtgctggactgctgacaggctcagaaaaagagggctagaccgaccagagcagtgccccttgtgtgaccaagaggctgaaaccataaatcatttgctggtcaagtgtgtttttgctaagcagttctggtttgatttccttaattcagtggggctgcgggatctgtatccagctcatgaggaatcctttgagtcgtggtggaaatctagcagctcccgggcatcggatcttgtgagaaaaggt

SEQ ID NO: 191978 - DNA, 319 bp, Zea Mays
ctcgctatccctgtgcctgccaggactcctatgcgcttgccggctgcacccccttgccgcagccgtaggatcgctggattcaagcctgagcggtcttttctcaaggaatcgacgagggtccgcaagagggtgatgagatcgttggatattaatggtgataatgaaggtttagaccgacaggctcttgatgattatgctcaactgtttaatcaaccactttcagagtctcacattcaagccttagtagcgctgtttgggtgggctccatctgaggatgtgtgcctccagactgatctggtttagggtttttggctctccg

SEQ ID NO: 191979 - DNA, 611 bp, Zea Mays
ccactgactcccttcccgagttggactttcttcttgatcctgaacccgtgtctccatctggttagtcatcgtctttttccctcctgtaggtttaccccacaccgttcctgcctatggcaccgatgcctcttttggctcgcgtgcctctagactccctctaggctgccctatagccccagtcagtctgtatgtctcctactcgatcttcgccggatcgttggcagctctgttgacccctttttcccatgacttcgcttaccttgtccagaccattggggtcctccctggtgccctcctcggtagcggcccctcctcgctatgccaaccatgtgcatgtctatcagtgacgtgcgtggtcgtgcgagtgcatgcaccgcctcgcttccggaccgagccgacgttgtatcacccctcttcttcagcgtgaccttcgccacgtccaccaatggtgacttgctaggctgctggggttcttcggcttgttgatagtcttgttctctccgggacctccacgctggtctcccgcatgtcgtcttctattcatagcgccctcgtcgaacctcacttgcatcacactatggaggaagagtactagacccaccttgacaatc

SEQ ID NO: 191980 - DNA, 594 bp, Zea Mays
cccgagcggcaccgcgactgcccacctcatcaacagcttccacactccccagggcgccaagcttgccaagtactcataacccggtcacccctctctgacgctgctgtgacggagctgctcctcctccgacgatcctcaaacctgaaacggtccttgcatgcaggagacaggtgaagacgctggggaagttcttcgccggcagcttcacctggggcttcttccagtggttctacaccgccggcgagggctgcggcttcatgtccttccccacgctgggcctcgaggcctacaggcagaagtaagagcatgcaatgcaactgaattgacgcatggcgtttcagagtcctttcagcgttgacgttgatcgccactgatttgctgttgcctgcacctgaaggttctttttcgacttctcggcgacgtacgtcggcgtcggtatgatctgcccttatctcgtcaacgcctccgttctccttggaggagtggtctcgtggggcatcatgtggccgctcatcgagcagaagaagggcgactggtacccggccgacctcaaacccagcagcctccgtggcatcgtcggctaccgggtacgta

SEQ ID NO: 191981 - DNA, 413 bp, Zea Mays
gcggcgcgcacgtccgcggagatggacgccttcctcgagcgggtcattgcggaccaccgccagaggcgccgtgccggacgacaccgtgaaggtggtgatggcgatgatcaccgggacttcgtcgacgtgctcttggacgtgaacgaggcggagcacgatggcgacgacgctcgtggagtcctgtttgacgacgactccatcaagggcattatcttggtacacgacgcatatgcgcgcatacatgttcatgttcttaacaaccaacgactgctacgaatctgaagatggactgcgcgcgtgtacatacagaacatgttttccgccgccacggacacgacgtacacgacgctggtatgggccatggcggagctcatcaaccacccggacgagattcgcaggctccaggacgagat

SEQ ID NO: 191982 - DNA, 421 bp, Zea Mays
ataccattgtacaggaaggtggtgttagcgacttagtactaggatatgctcattttgggatggttgccgctgctaggtggattgcaaagctctcagggccttgtctggcacaagcattgcagatgtacccagacttcaaaataaaggtttgagttatttcatagccattttctttgtctttgatgctagagtatgagcattgctacaacataacctttttatgacttatgatgcatcataactatgtttacatgtttctttcaaagtgttgcaattgatgggtgttcatggcaattggcaaatctatttaggttgttggacattcactgggaggtggtacagctgctctgttgacatacgttctgagggaacagaaggagtttgcctctactacttgtctggcatttgctccaggtttcta

SEQ ID NO: 191983 - DNA, 338 bp, Zea Mays
ggagggggcgtctgggagacgctgctatcacgatggggaaggcgggggctgggtcactgcgctggtgtcggcgagatccgtgggcggcgatttggggtgtggagagagaagattagggcggctgggactgcggccgcaaggtttgcgggagagaggagagccggtgcggcggggattgcggctgcgggcagagaccatggcgggcggggacacggtggatccatggcaccttccatgacgggcggtggggaggatggcgggggcacggtggaaacgctggcgttgatggcgggcaaccgaggcagaaccgtgcaccatcatactgtgaacgtctacag

SEQ ID NO: 191984 - DNA, 342 bp, Zea Mays
tgcgtattgcttaatgggttgaatgtcttacgaattgcttcacatgatgtgttgaaactggctgtgcaatttatttacccaataggtatgcttattccttaacagtttaatgcatggccttatgtgtttactgcagtggtttgcattaataactacatttcggtgtgtgctaatttgcctttctaacccctgtcgacctatcggaatgtgctaatttgcctttctaacccctgttgacctatcggattgtgccttcgccttttgcaattctttgaagtccctgcttattgcgtgccagatgtgtgttgctgttgccattttttcgactgctttgtcgtttct

SEQ ID NO: 191985 - DNA, 375 bp, Zea Mays
gtcacagagaatgaggtcgaaggggtgagtagctcgggacatggaggaagagaagggtaagcgagtatgatgcccaagttgacatgcatggcaaagtgaggtggcgtcgctgcgagggtacagaatggctgaagtggacgatagacgagagaggatgtcgtgcccggggtgaccaatacgacgatggaaagtggaggcaggggcagtggaggcgagggcgtagggttggacaacatgggcggaggaatgtggtgcgagaagagggccaaggggggactcctatagagccaccaggaggggggtggaggcctgggacgacaatcatgtgaggtggaggcgttagggaggcaatcacgaccttgggaaacacaagag

SEQ ID NO: 191986 - DNA, 396 bp, Zea Mays
tcccactctgactccgccgatgggtcccgagtggattgcggacaccggtgctacctaccacaccactcccgaccctggtatactcacctctgttcgccctccttcttcctctctcccttcgtccatcatggtggtgaatggctcgtgtcttcctgtcacatctgtaggtgtcgccgaccctcccgactcttttcgcattcccgatgttcttgtcgctccttttgtccacaatcttctttctattcgtcgttttactgctgataattcttgttctgtcgagtttgactcttctggtcttactgtgaaggactcggcaactcggcgcctcctcctcagatgtgacagcaccggccccctctacacccttcggcttccgcacgccacctcttcttcgtc

SEQ ID NO: 191987 - DNA, 468 bp, Zea Mays
agtttctctatttccttaaaaattaaataatggaaggtcatgacaatgaggaagattgggctacaaaggctaaggcatgggttgctgctaaatctgttatgggaaaccaccagattcaacagcatgccatatccacaagtagaactgaaggtcatcataatggttaccatgatcagtatcagcaaccagctggtctgccaacagaagttacagaagctttgcacccaccagtacctcaatcaagtattgatcatgtgccatttccaatgacaggtcaacagagagaaacaaaccatttattaggtaaagtatcttattgcccttgatctatatattttacttatggatgtgtaagtttcagaatggagctgaagattatattgcagatagaggtccaatggtgtctccagcaaagaattttggttcattttcgtccacctatgagcaggaggtatcttataattattc

SEQ ID NO: 191988 - DNA, 692 bp, Zea Mays
atttgtattcaaatgatgtaacgaaggtcccttgcccacaaggtttcagtgatgcacccaaggaaggtgcactttgccatgcaatatctggtgctgatgggaagttcacatttagatcactaccttgtggtaagttgataatttattgaactaataaaatgtcacctcagtgcaatggaattgttatgtcaaatttcttcttcatgaaagttgttcaggatttcgtgatgacaattgagtaattaacacatgtacattggatgtcttaaagtgcatcaatacatgaagtatcatttcgatctataacttgttcatctaaatacctctgttcatctagctgtatctggtgctgatgagcagaggtattttaaataccaaatgcaggacaagctattttaaacaaactaattaccaaccaaatattttctataccacaaaaccgattcgttgtattcatgcagcaccagtgttaaacattttaattgtttggtcctgttcattgggaatcctgttctgctctttctgagtctctaactccctatgtgacattatttgtttactgttttctgttatatgcaggtagctatgagttgttgccatactacaagggagagaacaccgtatttgatatttcaccatcttcactttctgtttctgttgagcatagtcatttgacgattccccaaaaattc

SEQ ID NO: 191989 - DNA, 398 bp, Zea Mays
atcgatgattgtgatagtcaatgcagatgagggtatgattagtccagttggagtcaccggtgtggttgatgtcttgtgcgtaacatggggacatgtatgtgggtgtgtgtcgtggtgtatttagtagtggtggcgtaaggtatttgtttgaggtgtgcaggtatatgccgtaatatggttatactcgcaatgaggcaaaatatatgtattgtgggacacaacgtttaggttgctgtcatataaccgtgtgaaggatgctcccgatggtcatgtgactaaagggggttgttgtggcaaagcgagaagtaagtttagtttttcaacggttagtggatagtatctgtcggtgttgtcatgatttttgttgtatgacagatcgatgcttagctttataaatt

SEQ ID NO: 191990 - DNA, 305 bp, Zea Mays
cgtcaatactcacccccgttggatctccttgcaccggacagcaagttccaacatccatgggcatctgtagcatctgcacttgcatctatggttgaggtaggggttactgctactgcacctgttgcatagctgctagtgtctggccaatctcttggactgcctgagtttgcatcagaaacatctcctcaatagtcatcgggggcggtggtggcaactgttgatgaggtgcctcatcttggggtccctgctactcttgctgagcacgccttccacctctatgtctgttgtcaggcatttgtagaaag

SEQ ID NO: 191991 - DNA, 460 bp, Zea Mays
atagtgctgtcaagtccacacatgcttttccacctcaagttatcagcagtatttctcttaaggaacagaatatcccaatgagctcttattgcttctctagcagcccctagcaacagcttatcatgggaaacagtaattttccgagcttgcttacgataaagctcgactgcatcctgtccaattggtaaccaatcaattggtgccacattaacagcttctgcacaattgaagccacagttgaaaccagcatggtatgcccgagggaacgttaggacaaactctccctcatgctgaacacatcggtagactggtactccttcagatttaagcaatgatgttgaaaattgagtaacctgcagaaggcgttaccatcttataaatgcacccccatatcgtttgtatcaaaaggaaggtaactcacgcaaacatcacatcccgcagcagaaccaaatctcatata

SEQ ID NO: 191992 - DNA, 458 bp, Zea Mays
ctcggttgtggtcagaaacgagtcgatgatggggcctcggggcatgtccgagacgtcgtgaagccatgtggcgtgtgggagatgtggtggttgtgtgcgggagccccagtttaggttgaattgctcaccagaatcatgttggtcgtagatccgcttcgattggaaacggcgctgtcgacaccacggatccaaggtaatgcgacttgcttaggttcaccaccatacctacattgtgaagtcgtgttcaatttacaaattggagcaccagggaaccccgacaccggtcgtcagtggacactccgctgtgttggccgcgcgactctatcgtggctgggaagaagaagggctcccagccgtcgttcaattgatagatggcctagattggtaggtgtattctctcagctagagttgatatgtgtcgtaagagggagatcgggtggatctaggttggtcccggg

SEQ ID NO: 191993 - DNA, 931 bp, Zea Mays
cagctgaataatcattgacaggacttgcaggtttaccattcctatcgcattggtctgaggttgttgtaagctctggcttcttattagaaacatcaacttcatcaactggtgaatcctccaaatgagaccttcccattcggacccttgctcttttgaccaatggcaagtgctcatctccatctgacttgcatacttcattctttgaatttggagaatctgaaaggatttcactgtactcagcacgtaattcatctttatttggtgttgtacaatcttcataatgaggaacaggttttctatctgattttcttattctcctgaaaattacttctgtattcatgggtagattagatgtgccatttgatttcaattctgtctctgaagttccattttcagatgcttcactgttacaagtactatccgccttaacaggaggattcaacattttgctgccgttacaagtagtccccaaagttacaggttggttggaagtgcctctgccagaatgcaaccagacattatctaatatagaaacagaacctgagttagctttgtcatccgcatgcctatgacgactggagcgttccttattttcattaggaactgacccaatagaagacaaattggtatgatcaaaaaaattaccagaaccttgagccttccttgattcaacacttattgaactccttgactttcgcagagatggaaccctactacgtgtgtagcaattttgtggctgtgcatccctttgcttatttgaaaatgagttagtacgcaaagaaatctccctcatttcatcaagtacagatacattttcagtaggctcatcaggagcagaatttataacacagcgttcgtcactcattatagtgactgaaagcctgtcagacttgatcatgtcatgacccttggtagtgacataatgatcatc

SEQ ID NO: 191994 - DNA, 423 bp, Zea Mays
gatcagtgaccggatgaacgaggtcaccgagggcatcagccatgcccttgagacgacgacagtagtcggtgatggaaaggtcgccctggacaaaggtccggaaccgcgcgtcaaggagcgcgcggtgctcccgtttgccaaggaaatgggattcaatggcaagccaggccgagaaggcgttgcaactgtgctccatcactgtgtcgacgaggtcggtggagagtgtcgtagatccacgacttgaccacgcaatccatgcaagtctagttaggggagggtggcgttgaggcagagaggatgtggtcgttgagggagtacttgccaagagtgagcagcatctactcacgacagtgggtgtagttgtcggaatcgatgtagaggacaacgattatgagcgagcggatgtgctggtccgcaaccgac

SEQ ID NO: 191995 - DNA, 1689 bp, Zea Mays
gcagcagctgcagctggtgttgcagctgagggtttgtctcctgaagaagcaaaaattcaagcagagaatgctgctcatctctcagtagcactagcagagaatgcaatagttattctgatgcttgtggaagatcatctgagatcacaagctcaacatttttgcacatcccttacaggtgatagcatcacatcgtccacatcaatgacttcattggctgccagtcggtcaaattctttgagcacagctggtaaagaacccatggctgctggggtctcaagacgggcatctttgtccagtgatgctggtggccttcctctggatgtatgtaacacatggcggctatatgtcattgcattttatcagttatgaatattaacttcataaagtaattgtaactgtcaaaccattcttcaaatttgagcagttatatatgcattatattcgtcttgtattttcttgtttgtgtttgagagaaataacattttgctattttttctagccattgcttatgtgttatgtcactacaaaagttgtttcactgtctgtcatgattttcgttcttgtaccatgttccttgtttatggcttatttttaccagtttttcataattgttatctgggtaatcatgccataatatttcagtagaactcttatttaccttaatcgcttggactacctggtcttgctagttcatcgaatgaggtgtgaacaaattattggcaaaataaatggactctagggtaagttggtgtttggtacttcggtcaacagattataccatacatgcctcttctttggaaaggaactcagcaataaagtcctaaatgcataaatgttacagtgtgaaatacttcgaaatcaaaaggtgttggtggacaatctaatcatctaattcctggatttgaaaaaagcttttaattgtacatatcttggtacctactacctagtgaaagttaaaataattagcttttgactgttccttcatgcattcatggcttatgctgatattctatttgccaacatatggttgaactttattcttatgaatactgtctttatttttgtctgctgtgattgaagcagttgcttacttctatggctgattcaaatggacaaatctctgctgccgtgatggaacgtcttacagcagcaacagcagctgaaccttatgattctgtcaagcatgcatttgtgtcttatgggagctgcataactgatcttggagaaagttggaagtaccgaagccgtttgtggtatggtgttggcattccacccaaatctgatatatttggtggtggtggaagtggttgggaatcttggagatctattctagagaaggattcaaatgggatttggattgaatttccacttgtgaagaaatcagttgctgtgctgcaggcacttcttttagatgaatctggacttggtggtggtcttggtattggagggggatctggccctggtatgggggttatgactgccctctatcagttgctagatagcgatcaaccatttctttgcatgctcagaatggttcttgtttcgatgagggaggacgacaatggtgaaggcgatgcttttacgaaagatgttagcataaaggatgtggtatcagaaggaatgggccaccaggctggaagtgtgatgccatttgatggcaacagttattcatctccaagaaaacctcga

SEQ ID NO: 191996 - DNA, 447 bp, Zea Mays
gtttctgttgttcgccaaattgaggttgtctactctgtcgcctcactctagtgacaagttcctaaactggtggagtagagctgttaaaacagttccaaagaagttgagaaaaggccttaacacactcatcatgttgcctgcctgggaaatctggaagcatcggaatgattgtgtattcgaagggcaacggcctggtgttcatactgttttgcaggttgtgtccaatgattgtaccctttggtgtgctgcgggtacctctgctcttcaggagctcctcactcgccaacccgctcttagggcttaatttgagttgctggtagctgtgtggcctgtgtaggtgtgtgtttctgtagagtggctgtttgggtggctgttgatggacctgcccatttcttgccttctttgtacccggtgctgactcttcagtcgctccgtttctgttttgtc

SEQ ID NO: 191997 - DNA, 314 bp, Zea Mays
cgaagctctgtttcacactctgcaagcatagccatggatgacggtggcaattttgtcaatcacaaaaatactgacacctgtagttcagctcgtggtacatttgattatgcaggtgctctcccagagaagatgacgaaattaaatataggatgcagaaattcataccatagcaggaaagatgaaactgctactgaaccaccagaagtatttgtatttgggtgtaatgtttctagcttttcttctacccatactgcaagtaaatcacatgatcccacgactcctgaattttgttttcaaagtaaagcagaggcaac

SEQ ID NO: 191998 - DNA, 514 bp, Zea Mays
gaaaaaagtctagctagatactaggtcggaatatgtgcaaccctaactgtagtctaacatcacttattgctatgcaatttcaattcaagttctgcctttatttgctaaccactgcattgcttgttaggtgtttttatgtaacaatgctacatgtgggcacttttaccacccgaaatgtgttgcccaacaacttcaccccatcaacattgatgaagcctcagaattggagaagaagataacagaagggttttcatttacatgcccaattcactggtgctttcattgcaaaggtttggaggatagaacacaagaacctttgcaatttgctgtttgcagacgctgtccaaagtcatatcacagaaagtgtttaccaaggttctgttttagaacaagctatttttcttgtttttttaaatactttaagtgtataatctcttattcttcaaatatttggaattatttcacagcgaaatttcctttgacgaaaatgaagaggacgatatcatcatacggg

SEQ ID NO: 191999 - DNA, 414 bp, Zea Mays
attttgatgctattaacctgcactcacgcatacgctcaaaattgttatatatggctggtcaggacaacggcagactgcgcatggacgcagccatccaatcaggtggttaatgatctttgaaatctacattccctaagacatatagaggtcaatagatgcgaggatacattttttagaggactggatgatggtgttgtgctactcacagtccaatctctcaaacttggacgatttacgcctaccaaaaattctttgtcaaatttgttcaaatgtttcccagcactttcttttttgtatgtgacaacatcatcaaatgaggaccatgaggaagtggtactgtagtttccaccctctagctcgctgacagcattatctgggaactctacgtcaggaagctctgctcatgaatttgac

SEQ ID NO: 192000 - DNA, 293 bp, Zea Mays
caagcggacttcgccttcttcgaccccaagccgagcgacttccatggcgccaggctgctgctcaagacgtacctcgactctaagccctgggacctcaccggcttcgctgatctcatcctcgcgcagaccactgtaggcacggttgtcaagttggccgatgacgaggaggaggaaggggaagggaacggtgttcagaaggccaattctagtactaacaatgacgacgatgatctgtttggtctcattagcgtgctcaatttgggacaacacgccgtatgattcgcacatccacg

SEQ ID NO: 192001 - DNA, 567 bp, Zea Mays
caacctttgcaccgtcaccttttgcacgatcagagcccacgtggaatcccttgatggcatcccacgcctcttttgctattttcttcaccgtgagcatgtggatcatcttcggaggaacagcaggcaggatggcctctgttgccagcctattgtcctggcaatcatcagtttcatccatcacatcccagtatccacgagcctccagcttcaccttcatgagattccagtcctcatagttggtgtgtttgagaagtggataggtgctgctgctgcccttcgccagtctgcaagatggtctctgttccactggactgacctctgcgccgtcggactgaaggggaacggtggcaatgctgcctcaactcagcatcctcgggatgagcaaatgccatgtctttttacacccagactctggtaccaatcattagtattgatagtggtatatgcagcagcagcctgttgctgctgctactgcactttactttgagtgacacgatggaggctggtttcgggctgctatgagctgcagcttgctggtgtctttacctcttatttatagctgaaaag

SEQ ID NO: 192002 - DNA, 271 bp, Zea Mays
taacacagaagttaatgtatacatatagaaatatattaatcacagattaacgacgacagaccacgcacatggggtagacggtagacgaagctcacctcggcgatgatgagagcgatgtagcccctgctgcgcagcgacgataatagtgcgacgacgtatcccacggcgagacgctgctctggcgaacaacgttgacaaggatgaagcatgggtggaggtggcgcgacgttgatgagcacccgagcaactgctggtcggcgaggcgtgggtg

SEQ ID NO: 192003 - DNA, 327 bp, Zea Mays
cagaagcagtatgggttcacataaaattaataaataatgtggccagccccaccggccacaacgctgtccgggcccacacgccagtggcggcagcagcaggtgttaccgcatgggactgggaggtagtagtagagggggagaaaaaagctgggtgtgcgcgggaaacaaaaagagagagaatatgcatgggggagggtagggacgggtgcaagagcacgctgttaaagtggatcgctttgcatccagtaactgcagcgcgagacggatgaaacgaccgatgcagctgcccctgtgggtgtggctgtcctgtagcgtttcaggcactgg

SEQ ID NO: 192004 - DNA, 430 bp, Zea Mays
ggtaataaggcagaaatggtggtcagctcattcgctccacattgaatgggtgtaacagaacttttggagatgttcgtaaacttttgaattctagacagggatgagatggatttctagatttgatccttgttagaaggcagcttcattctagacaggaaaacttttgaagttgttagaaggcagggatgagatggatttctagatttcatcctcagtaaaaggactgtccagcattgaaaggtcatgggaggggatgtggagttattccaggttaattgagcgctctctgtcggttgatcaacccaacagattggagtagaagtcattgagtagctcctccttattctcgtgtcttgtcaaaatgaggccatcgttggatagcaggttaccaacaaaattcttgcctttgcgatatttagcatgcagatgg

SEQ ID NO: 192005 - DNA, 317 bp, Zea Mays
tctcccagctgagtgatcttttgcttgaatacaatcaactgtattgctttctccagtctgaattttacttccatcaattatcctaccattgccccttagcagagaatacccaacggagctctccaggtcaagtgagtttggttccccaagggaatttgctgatctaggcaaaaggctcatagtggtatagaagggtgggaataaccaagtcatcggtagcgcaagtgcaaggggaggatctggaaccacaagaatgatcttggaggcattgtatgatacaacagatccagaggtgccaggtagcaagaaatcacaaa

SEQ ID NO: 192006 - DNA, 272 bp, Zea Mays
gccatgaacaacaacttgacatacataataggttacataacctatccaaccaatctaaaagcaaacaaccaatctaaaagcaaacaaccaaactagattctgactaatctcatttaactcatagccacctaataaactagctgctctacctatttgtcacctacaaatctgtcttaacaacatgtttctaactcggatggagacaccaatacccaagaaggaaagagattaacctcatcagcaaaggataaaagagtcaactggatcacaaa

SEQ ID NO: 192007 - DNA, 309 bp, Zea Mays
tgaacagagactgaaaaattgtctattctagtttggagcatcttgcagaccgaaatcctccaagccaaaataattcccccccgcgtaccagccgccgggagaacaacatactcttcaaaatcagagcctaacagagagagaatcatatgccgagaaatggatgctttctttgtttcttgcaaacaaacaatatcaggcttagtgttatcaatcacaacacgcactgagtctcttcttgccttattgttcagaccccttacattccaaaacagaacctttgaaggatccatcggaaaaaccaaataaaac

SEQ ID NO: 192008 - DNA, 455 bp, Zea Mays
gttgccttttggagaactttttccacccatctcagggtcttctgcctgcacaaaatccttaatctcttttaggagcgttgacatcttttcaacaatgccaccaggatcaccgccactagccatctcatgcaaggtcaaagattcatgattgaggtcatatattgtgacaagctgcaacttctcagataaccatcgaagaatatttgcgtcaacgctagcactgctgcttgaattatagagagacatcaggtcattaaaaagattatcgtcacatgaatccgatcgttccttagctcttttgaactgagtatgcaccaagtcaacctgcataacattgaaaatattatggtacacaaaacaaggaaaaatatcaaaacagtagtaatataaaaaacattaatgaaaatagaaattttggaatttagtagtctacctgctctcttacttcatcagat

SEQ ID NO: 192009 - DNA, 451 bp, Zea Mays
gcgaagtcattggagatgccagcatgattaaaaattccatcatgaatcactccatgaggttggctatgttcaatgagcaaagcaacctgaaattccttgcaattgctgacacaagatttgcctctgctattgtgatgttgaagagatttattgctataaaagatgctctttcagtgatggtagtaagtgaaaagtggagtgcatatagggaagcggcccccgcggcgggagcaggcgcgatgggcgcagtcgcgccatggggaatgtagaacgccgccgaggcagggagagagggccgcacgggtgcacccgtgccgtctgcgagcaccagggcgctgtgcagtcacgcagaggagagggagggaggggtagaggaagggagaaagggcaggggagggaaggccggcaacgttgatgagcggcgccggcgacgttgatgagcggcgctggc

SEQ ID NO: 192010 - DNA, 739 bp, Zea Mays
gtccgaccatcttttgtatgtatctcttctgtagaacttcccatagtagtatgcaagcacatcaccaacagtctttgtacccagaaacctgctcagcaggttgagattcttgccaaaaatgtagagcccaaggagaaatacctctgcctcaagatcactccaaagagcaacgggtgaataaggtagaggacttaattgtttggtttctctctgctgcattattgaattattggtaacattctgtccttcttgagtggggcaagggaccattttttcatcgtatgcttgattactgtcagatttaatttgaactacaggcactactgtatgtggatactggaatgttgcagcacatatgccagtgtcattgctagttgcacaagttgaggtcacctgactgtgcacatctccagtgctgccttttgttccaaattctgaacatttttgcgtttgtagtacctcttccgtcttatcaacttcgcttggtgatgcccacgtaattggtaaagctaacccaaccacaacagggtaaccatagccatggaatatggaatcattatgtgaactggccatgagcttacggcactcatcctctgtagcaagattggggatttctgcctggtgctcacttccaatgcatggacatacaagcgagtcatcatataccacatctgaagcaagagaagcttctgatgaaggttggtggtctccattgtcttcaaaatcgagtgattcagac

SEQ ID NO: 192011 - DNA, 625 bp, Zea Mays
gatagacgtacgatttgtcgtcgactcgtcttggttttgtcgcttttgtttcccttctctctgagcctgcctcctaccgtgatgtgctttctcatcctgagtggcaattcgctatggctgaggagattgctacttttgaacggactggcacttgggatcttgtctcacttccttcctctgcttctcctatcacatgcaagtgggtctaagattatgacacactctgatggctccattgagcgctacaagcttgacttgttgcacgtggttttcaacaagagtatgggcatgactataaggagacctttgctcctgttgctcatcagaccactgttcatacccttcatctgttcgtcggtgggctatctcacaacttgacgtgaagaatgctttccctcatggtgatttgcgtgaggaagtctacatgcatcctccgcttggttaccttgttcctgatggtcatgtatgccggcttcgtcgttctctcgatggcctcaagtaggctcctcgtgcctggattgaaagcttcacctctgttctcactattgttggcttcgttgctagcaaacatgatcttgctctctttgttcacacttcatctcgaggccgcaccctcattcttctc

SEQ ID NO: 192012 - DNA, 565 bp, Zea Mays
cggacgtagaagctctgtaggagatgaagttttatgctatgatgtggcttcaatcgaatcaatcccagactttggtagcacctcaagtttcaaaagtgaggacacatctgatgttgatgttgatgatgatcgtgatgaggtggaggatgagcaagacgaggagcaggaccagactgatgctacatcaactgcagtacggttgaaagttcaacatgttctagagaagcaggtggatcttgaatcaacagtatctgaagtgtttaacaatgttcaagatgttttagaaaaattgagagctctagaagaaattgctgatgggcatgatgataagttatttgaattggttggatcccatacagaagctaaggagaagcaggaagaaattgaagaatcagtgggagaggttatgctgaaactgcaggacctcgaaaaagtgattgagaacactaaaactgaactaacttctatggttcaacttattcttcctagattagctacactggagggagaagtgaagctacataaggctgaagtgatagcagcatttcaaggagttattcagaaa

SEQ ID NO: 192013 - DNA, 779 bp, Zea Mays
ctttgacaagattttctctgatgagtttatccttgacataataggtgcccttgaatgtatgctatctccattgtttcctgatgtttctcatataccttcattatagcatgcaatcatgtgtgatctgattataactgcaatgcattgtccaaggttgctagtttcttattttaactagatatactctgtacagatgatccagaggttccaagagtgcaaaagcaccgtgcttttctaaaagatcatgtagttttcaaagaggtattctgggctttcttgcacatattgtcatgcctgagaagaaggttatttaatgtatatataactatgtttctgacacaggccatacatattgaaaatgtttctgttatttcgaagattcatcaaacatacagaataggctatcttaaggtcagtgtctcttcataattgttagctaacttttgtaccgccttggtatatgttaatactccttttacttagctgttaatcttttttatttagcctcctctatggcatgacgttttttggggggcatttgcaggatgttattctgccacgaatattggatgatgccactctaggaagttttaacacaatgatacattcaaataatgcttctgttagtgtttcagtctcacccttggtatccttaaattgtttcccatttgttacttattacgatataataatctgcctttaggttatttccatgctaaaggatgacacaccctttataagacaactatttgctaggatgaggtcatcagatatttcta

SEQ ID NO: 192014 - DNA, 461 bp, Zea Mays
cggaaacatgggtatatgtatatccactttattatgtaggatagaagatgtctttagagcatagataggtttggttatgaaagggtagggctaggaaagactctatccaagattgtggatcttgattacttttgaagatctagcttgaaccttatccttccttgatttgatgagctcgatcatcttcgatcttcgttcttgaagtctttatccgaattagggacatgtagttaggataacttgtaggtaaggacagatggttaacaggctggtggcataagataagtgtattatggcaacatctaggatgggaggggtggtcaccatgaatatgctggtaagttatttgttcatgggtggtttggtctgatgtactaatttaagttaaaacatggccagcagggtctaatctatttcactagtattaactagtccgttaagtagctcactttagattggac

SEQ ID NO: 192015 - DNA, 473 bp, Zea Mays
gtaggacttcctggggagctgtggaagatgattggtgaatgtttgcagttccgagcttcaagaagaccatccttccaggacatgctgaaaattttccttcgacaccttctggacataccacggagcccacctgctagtcctgagaagtaattccatctgattttgtattacttttacgctaaaacatgatacatggaagcttaaagctttggagaacctttacctgtagaagtattatcgatcaaattatcttcgagctaaccattcctgaagattcctttacttggtggtgtaccagcaaatgttgaaatgtcttcgagctaaccgttcttgaaacatacttgcatattgttttccccgacttaatttttgacctagctacttgcttatgcagtgatttcgcaaatgaaaacttgcccaatggcatggaacctccaacaacctccatcctagagatggttcgttataatcca

SEQ ID NO: 192016 - DNA, 362 bp, Zea Mays
taagttcaacttagtctggtgagctaattcattgttctagctatttagtttaaattaatggattgaatatacatagcagtcacgctggtccttatagtttagcaagagagatgcgtggtggtttagtcgcatcgtatcgaattgacagttcgtagaatatgtgaataatgctccggtgggggtatatgttcaaaataggtaaaaaggttctatgtgggtgaaaagtggtggtattaaatgttgcaaaatgtttctttcatttagtgatggggtggagttaatattatgaagagtgctatggttctatttaggttatgtctaattatgttaatacatgtgtacactaggtgttgtcgaggttg

SEQ ID NO: 192017 - DNA, 410 bp, Zea Mays
tctgccgccgttatccgacgttgagtcggatttttccttcaaggcgatcacctctgccttcatgtattggagctccgaggtgagggatttcagcgatgcaagcacgtcggcgagggtaggtttggtcatggtggctggtgatgttgcggaggcagtggaagattgtggtgatggcggcggctaaaaatggcggctgttggaggctgcggaagaggtgttgagttgggatggtgaggatcgtctagatcacgataccaggttgtcaagggcgttaaacccttggctggctggaccgcggctacggagctcgtaaccgtcggccgtcttctccggtgaggttattcccctctaccgtaggcttagagaataagagagatgaggctaacaatctgcttgccttaattgtcctg

SEQ ID NO: 192018 - DNA, 345 bp, Zea Mays
ggaacgatcgacaaccactggtccaagaggaacttgaggctgcaatggttggtgcggatgaggaagcagcgacccaaaggtacaaccaccaatgccgcacagcctggattaggcagatgagtacacacctgtacgttgtcagcttgtggtgatggacggctaagggccgactaaagaaggccaagggatcgacctcttggcggagaacgacacctaaacccacgcctaatgcgtcgcggtcgatgatgctagtcaaagtccgacacctaaaccctatggagaggacgtgcttgagcgccgtgagcacctccgcaatctcaggcatccatgcaaaagcatccttgc

SEQ ID NO: 192019 - DNA, 378 bp, Zea Mays
tgacgagctcatcttgtgccttgtagatgagcagggggcagggacaaccttgagaggggcagccgccggcgatggtggatggtggagactggagagacctggaggctagagcagcagccgccggcagaggacaaaaacttgagaggggcgcaggcacagggaggatttagggtttaggggcgccaacagatgtatgcggctactgggccaaaaaaacgttgaagcccaatagcacaaccacatttagcccgcgcgcactggtcgaccagaatctatctaatcggacgactaatcggtcgctttggacgattaagcgacgattaggacgaccaggaaatctgatcgcgtcgtccccctggtcggccgcttacaggcgac

SEQ ID NO: 192020 - DNA, 1648 bp, Zea Mays
tccaagtcctatcagccctgtcaggtaattcgctcattcgtctgcttctgcagttcatctgagcctatatgggtttctagggcatggtgcctgaagaactggggtcctggttatctgaattgttgctcttgcctccattccttagggtagagttgtcggatgcacattagtgtctttagatcatgaataatcctatctttcggctggagctggaaaggtccgtgtgatttttatgtgcttggtattgacatcggaggcataatgcgttgggctccaagattttcgcatctgactgtacgtcttttttttgggggggggggggggggatctggtgtcacttcgttgtgccttgttttctcagaagcaacatcgttgccatgttggcttatgttggcaaagccactatgctgaggtattactgcaatatcgttgtgtaattgtgtagattgtcgaataaaatctcgggaggaaaataaccaccagtcatacaaactaagatttacagtgcatataatgtagcttaactttttgctcccttcagatcccagctcatactctcggaacagtcatgcagagtagcaaagtttgcgcataatggaaaaaaattgacctcacaactgggccctttatcaaaacagtgtgatacagtagaatactaacgagctatctttcagaccactgctccacctccaatgcctagagtcttagatgcataattcagaactggatgaggttgtagagttccaaacaactttgaatctggccttaatatccagtttagacatattttttcagtatcatttcttttttaatcttggaagtttgtaatatccttcatttccggtttgaattgtgttgcaagccaagttagctgtaatgatttctgttgcatgactgtcaaacctttatggcacagctccagctccaggagttcttggagttgtgtattatacatgaaactggaactgggatacactgagattacttggttgtattgtatcattgtgtttctattctagagtaaatataaatatctaaaccactttaatttggttgacaaattccatgtctgccgtggtctgtgaattggagctctctcaaatgagagctgagtttctacgtgattatgtgatgactaaaaatttgacttagatattttttattatacttgtgcacatatccttgcttgaaagtgtatgtaggtgcaagcagtcaagcacttctactacacatatttataatgtctgtacatgttttttttttttgaaatctggaaacagctattttgtacagctgacaaatcatggcatgctacaattatgaccaccttttgtgatcctgctctctatatttaagatgcatactatattgtccagttttactcttgttttgccccatttgctagagatgatatctcatattcttcatcatgtgtttgaactgcacaagtaatcatttcctaataacggttaccagcactggctgtttgacagatcagaacaacaaaagaattgtccttgcattgcaaagtgggttgaagtcagagatactgtgggcactgaatgcccttacagtactctcatttaaggagaaggatgacctccgacgtgatgcaacacctcttgctaaagttcctgggctcctagat

SEQ ID NO: 192021 - DNA, 345 bp, Zea Mays
cgacgagccccatccctgtgacctctagggcagcagctgccacaagcacgtcgcccgctgcgcccgtgtcacaggactccttcattgtgttccagcagcaggtgttggactcccagacattgatcatcaaccacctgtcggcgttgaccgcccggttggggcaatcgaggtgcaatccgcgtcggcctcgtccatgattgatccttcatcatcgtcccacgtcttcccctcgactgcgcaagattaacctatggccctcccgactatgggggcatccaaaccgcacccgatgcgacgtcctccctgtcacttagaggtcaagtaaccctttctatataaggagaa

SEQ ID NO: 192022 - DNA, 364 bp, Zea Mays
ctgatcctgaagatgacacaaacttctgtgatcagtccgaatcacaaaaggtcctctactcagataacatctccacttctctactgccattaatattgcaagaaattccttctcataagttgacagttggctgttcttcactcctaaagctttactataaaaagccacaggatgtcccttttgcgacaacactgctccaatgccagtgtcacaagcgtcagtttcaatgacaaatgtctcactgaaattaggtaaggcaagaacaggagtggtaatcatagcatccttcaaagcctcaaaggcagtttgtgctgatggtggccatccaaactgtttttgttgcagcagtaccgtcagaggtttt

SEQ ID NO: 192023 - DNA, 751 bp, Zea Mays
gcgagaatattccagaggtgtagataatctacaatggcaccaactgtaagagctcctttgatgtctgcaatccatcgtctgttcaatagggcctgctgcacagttcttctgttaataattctttttggaataatgctgaataatcttggagcaatatcagatacccttttgccatggatccatttatctatccagaacatggtgttggtcccattccccacctcagagatcaacaccttggagaagaaggaacgggccatgctaggaacttgaatggacaggctagaccaagggcgtcttgggtcagttttttgcaaccaaagccatcgcatgcggagggcccagcagagctcaggaaggctagcaatacctagacctccaagctgcaacggacgacatacttttccccaagccaccaagcaatgccctcctttcacctcttttcttcctcgccagagaaaaccttttcgtattttatcaattgcttcaatggcccagtgagggagatcgattgccattgccatatagaccgtcatgctagtgaggacatgctgcactaaaattcttctccctgctctactcatcagatcggccttccagcttggtaggcggtctgcaattttgtccacaaactgctgagcctgattcctggataacttgtgtaaagacaaggggagacccagatatctgcaaggaaaggttgcaatctcacaaggcagccagctccggagttcctcaatagtctcctcgg

SEQ ID NO: 192024 - DNA, 695 bp, Zea Mays
cacgaagcaaactacttgttgaatccaattcttccattgctgaattcaaagattcacccttcaaaatattagactgatcagcctcttccaatctgacctcgagaagctgtgccttcttctgccattcgtcagctaactgctttgacttggaaccaaaattcctagcatcatcaacatcactcttaagttcatcaatcatgcgctccaatcgaactgccttttcttcagcagccttttttttctcaagctcaagctttaatgcaaagttctcttcttcaagattctgaatcctctctgcagtcttcttcctgttgccatccaccttggaatcaaccagccctttgaggcgcgtaacctctacagtgagatgctcaacttcctgggccttcacctcggaagccctaacggcatcatctacctggctgagggcttcattcttggcatcgattgcgtcggccagctcatacctggccttctccagctgctccactgtcgaccgcagcacagcgtcatcagcctcctgctggccatggatgcttgcctgctccgactctctggcagggagtttgtctgcctcctgcgcctcaatagccctcctttgcacatcaagcgcatcctgcagcttggcattggcctcatcagccaccttcttggcacgctccagctcagcaaaaactttgcacttctccttctcg

SEQ ID NO: 192025 - DNA, 371 bp, Zea Mays
gcagaggttcaacggacagaatgcttaagatcactgagagaagttgccacttctctatctgaaaggcctgcccggggtgatcttactggtgaggtttgtcactgggctgatggataccatctgaatgtagcattgtatgagaagatgcttggcagtgtttttgacatcttggatgagggaaaacttacagaggtcacttcaaatccatgatatttgcagttttccactgactaatttcaccattagtcatgatgtttctcttacgtttttttctttaatccaccaggaggcagaggaaatccttgaactcttaaggtcaacttggcggacactaggaatcacagagactgttcatgatacatgctatgcat

SEQ ID NO: 192026 - DNA, 348 bp, Zea Mays
ctcagttgaggcatacaaagttaggcccaccatgtagtggctgctactctatgatgtgcagtatactactagtatgtaagcatggtttgggatgaactaatatcctatgataagatagtacccagggagttttagttcatgaaaggattcagatctagttgagatagacaccgaaatgtgctttgcttaggtacataggaagcttgaaaccattaatctagaagttgatctgtaaacaggtaccacttccactatctacttgtcaataacatctttccttggtagaatatgtataaccacgcaggaggagaaagtttctacaaatgctatttatcagactaaatgcat

SEQ ID NO: 192027 - DNA, 517 bp, Zea Mays
aagacaagacaatgtgaagatgggttaacattttaacatacttgaagagggagaatgcaccttcgtgcatccctctaccaacaaataaccgaggctgcagacaaacatcgaatctttaaaaaaaagcatccacaatcttgaccgtctaattaacagcagaaaacaagaaatggaatgctacctgagaccaccacatcatgatcgttatgaccttaacatttgaactctctaggattcttctcataaatgggaaaagaaatagcatagaagcaagtatgtttggtgccatatatatcactactgccagtatatacaaagatggctgattctgaccatccccaagccagctttttattgttcttgcaagaccagtaggattctcccaagtgtacgcgtaagtcactggtaaaatcacaacccatgcagcagcagatattaatttcaagacatatcgtagcttgactgcaaatgacatgcttctttttgctttccagccaaatacgagatctaggattgc

SEQ ID NO: 192028 - DNA, 555 bp, Zea Mays
ggagaggggtgtcatcgctacatgcagcctatctatatatcataagctgccttgtctgatcgtcagcaactcagcatcacacttggattgcgtgattatatataattggttgttggttttgttacgtagtcaggtatcagcacagactgcagcatcagacttatttggctggagaaatcagggatcatcagagtcaaaggcaacaagattctgctaccatatcagtgcaagcgaatggctgactgtttaaagacatgcctggatcttctattgtgaattcgcagttctttcatgggtggattgtcaggatcccaaactggtagaggtgggggatggaattctctgctcttctgacttcagcggggataaacatcgctgtctgcgtgctcttcttgtccctctattcgatcctcaggaagcagcctcacaacttcagcgtctactttgggaggcggcttgctgaagagaggttccagaggcaggacgattacttctcgtttgagaggctactgcctactgctggttggattgtaaaggcgtactggtgcaccgaag

SEQ ID NO: 192029 - DNA, 390 bp, Zea Mays
aaggagacattacttggtgaaacaagcacgatgccaattccttgtccttcattgcaaaccgatccatcaaaatataaagtcctgggagtaacagtgaggtacgatatgtctagtttatgagtatcatcgatccgatgttctacaataaaatctgctacgacctggcctttcatagatttcaatggttcataagccaagtcatattctataagtgcataagcccatttaccaatcctaccactcataatcgggttttgcaacatgtatttaatcacatcggtttgactggcaatggtgcaatgactagacagtaaataacatctacacttggtgcatgcataaaataggcataagcataacttctcgataaaagtgtaccttgtttcagca

SEQ ID NO: 192030 - DNA, 525 bp, Zea Mays
gagccagtatcccaacaagctgcaggtgcagctatataaaaagcgagcagctcggacatacccgcaccaaaaggacccaacgaagtccagccagctgagctgagcctcgtgaaccagagcatttgctccttcctcgtcctcctcgatcgacctctctccttggtgccgctgccgccatatatgaactgctagcacgcgcagcagccagcagctgccgaccggcctataatcagaaggccagaaaggatcgatggagaccatcaagtgctgcatcgcgtgcatcctgccgtgcggggcgctggacgtggtgcggatcgtgcactccaacggacgcgtggaggagatcagcgggggccccgtgctggccggggagatcatgaaggcgtaccccaagcacgtcctccggaagccgccgtccacgtgcccggccgacggcggcatcgtcgtgcagaagcccgtcatcctgccgcacaatgccgagctgcagaagggcaagatctacttcctcatgccggtcatggccac

SEQ ID NO: 192031 - DNA, 309 bp, Zea Mays
gaacctttagtgcttctctacaaatgtaagctatttgggattcatcaagaggctcctctgtgatgcctatcaagtcagcaacacttccaccaccacagtattccataattatctgtaggttgagaatcacatttgcatcaagatcatgttaaatgagttgacaactagataaatctcacaatgatagaaaagtttggctagttcctaatattaataaaatggatacaagcaggctatttgattatttatacccataggtactcctctccttggtagcttccaaagtagcggacaacatttggatggctg

SEQ ID NO: 192032 - DNA, 512 bp, Zea Mays
acacctcatctctagtgttacagagagcgatattagacttggagaccctccttggaacacacacatattcctatgcttccaaagcatccaagcaccaagaatcaccaaagaactaaaacccttttgagaaggaataactagttttgaactttgaatcctccaccattcttgtaaggaatcaccctgttgtggagcaagggtatggagatcgaacaaccgaaggaactcaagggcaccagggcacgcagcgattgtagtggggagaaaggggatccaaaaccacaggcacaagggcacacaggttttggatactcaccgcctgcgcgtgaaggttggcgatgagggtggcctcatagccggggtcttcaacaacatcggcgtcgttgtttaggacgccaccctggggtggtgggaaggcggcgttgtgggatattgtgtgttgtgttgcactgagtagcaggattacaatatatagacctctaccagattgtgctccacctgatttatagaaa

SEQ ID NO: 192033 - DNA, 324 bp, Zea Mays
tgatacgtcctcctcctcttccccatgtaatcctgcctcagcgagcgtgatgagctcactcaaccttgatgagtcctcctcctcctccatcagctccacccctccattttttgctgaacttatcttgcacgagcctcgtctgcgatatagttcccggcgcatccaatctctgcaaatatattgatataaataagttagcaaagacaagataaatacaatgtacgagcaaaacaacacatctttttctcactcacttgcactcagatgactatcaagattccccaacatctgtttctcggctctagccgcctccatttcccttgc

SEQ ID NO: 192034 - DNA, 275 bp, Zea Mays
caaatgtccccaaggaaatcaccacaagattagctgaaaagacctcatcatcaagaatgatggaacaaccctgacatactgaacagctactaatggagccattagcagaactaaccacaattgggtgacccatcctctgcaccgaaagaccagcccacgacacaaaattctctgaaacaaacgaatagctagtgctagagtcaaaaagagcatgggccacaaacgaatcaactgagatcgtacgtgtcaccacgtctccctgctctctgccatcc

SEQ ID NO: 192035 - DNA, 321 bp, Zea Mays
ggttggaccagagttgaatcaaggaaggcgaagaagcgtcgccttcgtgcactgcgggcacgtcgcccggtgccaaatgacttgaaaggtcgctgtttcaattgcttcgcggataatcacctcgctgctttctgccaccttgagccaaggtgttttcgttgcaagacagttggtcatcgctcctactactgccccgggcctgtgaaagctgacaggaaggttcctgtacatcgacggctgttgagaggaacggtttggaacagactttcgacagttgagccaacgatcgctgatcgtgttccgcagtatcagttgcctcgg

SEQ ID NO: 192036 - DNA, 1067 bp, Zea Mays
gtccattccaaggaacacccaaactgcaatcttctacaatggtatgctttacttttgacggataaactttctcaacaagtgaacataccttctttttccttaaaagtttcaattcaaacatactgttattttgcatctgccctgctagggttctgctaaactagctatgccacctcgtcgagccaatgaaaactttcttgaagcctatgaagttattttaatattggatgaccgtgaaaaattcgggtttgtatcatcatatcctactctcacaaagaaattttgtatcttcttttgtatatttgtagttatctttgatttttatgtgggatatctcattcagtgcataagtattaaaagaaaaatgcccctctgctgttcattttccataatttgttcaaattatcatgaggatggttgccttatgcaatgtttgtaaccttggtacaagtttcatactttcattggttatgactggtctggtttatccttctattttgtacgaaactgtaatatatgacttgacttccacaggttcataggtcattggagaaaattgggtttttattatctttaaacaatcttgatatgtcgatactgttattactgcttttgcgttgtcttttgttggaattcaatatatttgctctgcatggttcatgtattttatttgtgcagttggatgtgtcaccattagaatttaatgtgattgctttgcgtggaatcgggttctcatgttttttttatcttgtgcaggtctcgttcaagaaaagttgctgataacatttgttccctgagccattttgctgtggatgttagttgggatcagagtttgcactcttctatatcatgtcctactttctctctgctgtagaaatgaaaatgggggcatagttatactgattagcgatatctcttatatggtgccagacctagagcctgacaatttcattggccactacattttcccgctttcatgtttatgcctctattacatagttggtttcaaaatataccattggagtcctaattctttcagtcaaggatctttgactattaacaagcta

SEQ ID NO: 192037 - DNA, 548 bp, Zea Mays
tggttgtcacaagctaccaactacaatgctctttctgttgcaattcttctcatcttacatgatgtatacagttgcatgtgttaaaaagagagaactattaattttctacctggacgtggatgactggatgttcattttcttttcttggttctaacttctttacttgacagatgggtaaaagattgatggaaattgccaaaaaggaaggtattcaagctcaagaggtatgccctattgccctgtatatttcccagactccagtgcttctaaccttgcatgaaatttttgagatttaaattaacagaaacagatcagttaacaaaattaaattagtgtttgttgtctcttatatttctgtgtaggcttctagtatgcttatctctttctgactctgttatgtagacttcaatgttctgctactaatttttttctattatgctagaatgcaatggaagagcttgctgaaagagtgcacggagatattcgcatggcactcaaccatttgcagtatatgagcctctcccagtctgtggtcaaatatgatgata

SEQ ID NO: 192038 - DNA, 473 bp, Zea Mays
ctctgacagtatctgagcctaacagatccattctgctttcgctgcctctttaaccttctagggtacgctgcccacctctcctccctctctctggctgctgccgcacctccatggtgtgcgtcacgccctccccctcctttggtctgtctctaccactacagccttgtgccatctcatctcccctgcgatgggaccaccgggtaccacctctagcttgttatgctgcaaagaaggaggaatgggtggctgctgccctagccgccttggatgccgctcgcactgccatgtagacgcaacgccagaaggaggcgactgttgcgtttgccctgcaaaaggaggctgctgctccttggagtgcaagctagttgctgctcaaaatgcagtagcgcccagtgacgacgaccccaactccactgccgacaaagatactccacgcgacactggtatcattgcacatctcgacgcgtaggcta

SEQ ID NO: 192039 - DNA, 464 bp, Zea Mays
tgcaaggatcgtattcaagtgaaactagtgatagctccaacttatcatctctgggtgcagtagctggtgatgaatggaatacagccttcaagaaggtatatactagaatctatgattactatactagaatctatgattactagtttactcgtgaatcctgataatgccatttgaagatacttatatggtttcatgatttcatctttttatcagcatggtatctagccttctttcaaactgaacccaatttagttattgctgttgtacaacagatggacacattttttttttagtttgctttccacgtgcatgataggaaggttgagctcatgctatctttgacaggtatactaccctcagactgcatgcatggactctacatctgtcatgtacactaaagaagtaggtcaggctagcccaatatctgttcttaagcctctatctgaagattgctctgattctga

SEQ ID NO: 192040 - DNA, 1371 bp, Zea Mays
tcaacgaagtttgtcccatctttcggatcagcgtcttcatagcccttggcaacaaagttttttcactaagttgcttggtcttcagtacaaagtagtatacaaaaaggggtccgacaattcagtggccgatgccttgtcccggcgccctcatgaccaaatggaactttatacattgtccttggccactccagtttggatgttgttagcaccggttacacggagcagaactgaggaagggaatggggtttcgtggagaagaagaacaggaggtggaggaataaggataggcttcgatagatattttcttcttcgataaccattcctccacgtttcagcagtataagtatttacttattacatgggcagcactggccctcatttcacccactctgggccagacagaaccacattgggcttaagcttcctcttgggcctcgtagccatgccttggtgattgccagtttcttcaacagccttgtcttccactattacatctccttgtgtgctgacattaccccctccaggagcaccagcttgcccccaagcgggtgctaagggaaaatgttgacgcatagcttcaatatcctcccaagttgccagggatggcggaagagaggaccattggataagagcttgtgggactgccttcactccacgatagacaaccctgcgctgcagcactgccataggtattgtaaatgaatcagctaggtctggcaatgcagtagttacctgacttggaggaagcaccgattgtttcaacagggaaacatggaaaaccgggtgaattgacgaagatgatggcaagtccaatttgtaagttgttgttcccactttagccagtacacggtatggcccaaaataacggaacgagagtttgttgtttgaacgacgggcgagggacatctgaacatatggttgtagtttgacaaaaactaagtcgcccacctggaacactcgatcagaccgctgcttatccgcttggtgcttcatccgttgtttggcacgaagcaaatgttgctgtaacagctggttcatatgaattttatcagcgatgaatgaactcaggtcgcctgagtgagcatcgaaggcctggataccaaagtgctttggaggatagccatataaagcctcaaacggagatctgccaatggaagagtgtggactggaattataccaaaattctgctgacgctagccaactgtaccacttggaagggcaagcatggacaaaacatcgtaaataagtttccagacactggtttacccgctctgtttgtccatcggtctgcggatggtaagagctgctcataagaagattaactccagccagcttgaacaattccttccagaagtgactagtgaacacttt

SEQ ID NO: 192041 - DNA, 280 bp, Zea Mays
gctgcatgtatttagttttgaactggcttgtataggttgtgttctccacttgttgaatcatgtgctcccttgcattttttcattcattttcccttaagttttagttgcattcttttgtgagccatgaataaaataggccttttcaaagtgtcggtgttttgacccgaggatcctaccgactagtgaattagtgttgcgtgccctggcccagatgggtgatgcaaggagacacaagtctttgtcttggttcaggcaagagaagaccctacttccagcagag

SEQ ID NO: 192042 - DNA, 703 bp, Zea Mays
accggggtcaaacagggcttgcaatctagcatgccagcacgctcgaggatatctagggtatactgttgctgctggagaaataggcccagagcgacgctcaacaacaatccccagaaagtggtgaagatgagtcaaatccttcatggtcaacccatgttgaagggcggtgatgatccggtgtaggaggcccgaagagaaggcaatgaacacgatgtcatcaacataaaataggaggtacacagtgtcactaacacactggtagatgaacaaatatgtgtgcgacttggcctcagcaaaaccaagggagagaagatatgtggcaaagcggctataaagtaagaggtacacggtgtcactatcgcattggtagatgaacagatatgtggcaaagcggttgtaccaagctcgggaggcttgcttcagaccatagagggcttgttgagcttgcggaccatatcggggtgagtagggtcaacaaagtcggcaagctgactagagtagacaatcttaatgagagtgccatgagaaaacacattcttgacatccaactgatgacctgaccaagaacaagagagggccaaagtgagaattgcagagatggtaacaggcttcaagacgagactgaacgtctcatcgtagtcaacggcaggacactgagtgaagcctcgaagaacccagcaggctttgtacctgtctagagagc

SEQ ID NO: 192043 - DNA, 332 bp, Zea Mays
tgctccccaatgaaacgattcaaggctgctgatacttcttgccttacagaacgctgcaactctagctgcatatccatgcaagcttccaacatcctttgcatatggctcatgccttgctgaagtctagccatatcagctcttaaatcattgatagcctcccattcctggacagaaaagaaaaatatgagcctttgccacacataacatataagctactccccaaacttactataaatcgaagagttgagtgcattagcctactataaacacagcctgccaaatatggttcacaaattcatcataaagaataaatgtattgtattcaaagctcc

SEQ ID NO: 192044 - DNA, 441 bp, Zea Mays
ccacatcttctccgtggagggggggtatcagatttgtcctgatcgtcacctccaaccggcggcagtggagccccaggcaagaggctcaaatcagcagggacccaacgaatttgcaccgggtacaccagggccttcttcccttcagcagcagaagcctggtctggttcagtgatccagaggtctttcatagatgggatacgttcagggtcgcagcaccaggcaaggcatcgaaagacttccaaactccggatttccagtgtgtcgggcagaacctgggaaatgcacgcatgggggttgatcaattgttgcaccaccgaagtctcccacgcatgcaccggcagacctctgagctcaagttccacgaggtgcttcaaggaattaccaccagcacccccgaacctcgtccaacgcctagaggagagcatgaaattttcttctctg

SEQ ID NO: 192045 - DNA, 455 bp, Zea Mays
atggtaaaggggctgatttcctgagagcagttgatgagataattgaagtttatgattctctaaaggatataggtagcaacaaggttgacttgcctgccgaagaagtaaagccaggtgtagaaaagtttgctgaaaataatagccgcatggatactgaagatctggtcagtagctcctatatgcacaatgatagaaagatagaagatcattatgtcactaccaggagtcatgacatggtcaattctgacaggccttcagttgacgagcgatgtgttgtaaattctgctcctgatgagcctattgaaaatgtatccatccttgatgaaatgagggatatttctttgcgtactaattcattttcaaataagcaaagggatgcacagccacaaaattgctacacacgtactagggttccatctctgcggaagtcaagaagttcattaagtctggaatca

SEQ ID NO: 192046 - DNA, 384 bp, Zea Mays
tgctcgccccaaacgcaatccacgtctcggcgccatggaaggaatcgcaactcaatcccctcatcgtcaaccagcgcacagtaccaccatcggcctgcatgccatcgcaagtgcaggaccaccccaccatctcattcttcccattctacgcgtcagccccgcctggatcttccgatgctcgagtacttcccattctacgcgccagccccgcccagatcttgcgatgctcgagtatgagatggaaggcacctctctgagcgctcaaatctgaacaccacacctctctgaaacacaaacatacttggtttacaaaatagagaactactcgtgtggctgttcatctgacaattttaggtttgtgtttctaagttttatatatgtttc

SEQ ID NO: 192047 - DNA, 338 bp, Zea Mays
ctcctgtaaccaaacatccaaatccgtggaactaatcaccgcatcaggagagataccaaactgacgaggctggcacccatacagcagctcaaatggagaacgaccggtggctgaatgaggagatgaattataccaaaattgagctactgataaccattggctccactgatgcggacaggcatgaacaaaacaacgtaaaaacgtttccaaacattggttcacacgttcagtctggccgtctgattgcggatggtaggcagaactcatgcgcaactgcacatcggccagccgaaagagctcttgccacagaagactgagaaatattttgtcgcgatcag

SEQ ID NO: 192048 - DNA, 885 bp, Zea Mays
atgccattgaggggccacagcctatggacttagacattaaaaggggatctactgagaaccaaaatgagcatcgcgaacagttacgccggaagaacactttcatggctttggacgtgttgcatatgatggctgctgatagaaagattcaatcatttctgagcttgatattcctgaacatgtatattttctcataccctttctcacggtggtcgtctatgtattacccacctatggataaatttaacttcaactggttgcaactaagggtgaagttaggtacagaacattagcccagcatttcacatgcaacaagatacaaggcgttttaagtgtgcccaccttattaacatgttgaccatgaagatgttatatccatgatctaagtatttctgttctttccatgcactcaaacattgcacttgggaaacatcttggtcacaatatctgaaaaaaattattttcaacttttcttcagtatacatagggataacaataggcttaagcagtaaattttatatagtaatatattgttcaaaggaaagatagatttctagaacttttgtcctgatagattactatttagtcttttttgatttccaaacagttatttgattagaaatcaacttctctggcagctgtcaattattatagtagtaggttttgttacctaaacgttccatacttattgacaggaccttgcacaaaaactttcaaaacttacatccctactcgttttgtattttctctgttgctaataaccagcattacaattgtgctaaagaggaatttttttctaggttaggcctgaaaagttcagttctctacgccagaggttgagttctattgaagcacacaaggtgaccttggagactctactgccttctg

SEQ ID NO: 192049 - DNA, 361 bp, Zea Mays
tccctaattatgtgattccagagcctgaggccgagctgtgcccattgtggattaagaagttcaatagagaactaatgcgaacactctcattttcggagcatgaaacgtttgaccatcccgtggcatgtgagatttgatacttcctgttcttagctggctattctgtttgcagaatatgttcttgcttatgctttaagctattattaacaggtcttctagttgtgtcatcaatggacaaagaaccagtcaataaatttgttgatctcttcaacacaaatcagttgccatctcttttgaatgaaggcataatggatccacagattttgaagcattatcttgtacttcatgaccagcaagaggg

SEQ ID NO: 192050 - DNA, 326 bp, Zea Mays
tcggaaaagaaaaaatttcatagccaaaattcaagacggggagcagctagtgaccagtcatagcgataaggcagaggtgcttcggtccttctattcagatctaattggtacagcgcagcaaaggtccagaactgtcaaccttgacaccttaggactgcagcacattgaccttcaggggctcgagcagccaatctcggaggaggaggtgtggaataccatcaaacagcttcctccggacaaagccccggggcctgatgggttcacaggtcgtttctataaggcctgctggtcaatcatcaaaaaagacattatggctgctatcctgg

SEQ ID NO: 192051 - DNA, 357 bp, Zea Mays
gcgaaagcatcaaacgccaccagcgccccttgcatctggtacgcgccggaggtgctggagcagcaggaggcggccaagcgcacggagaaggcggacgtgtacagcttcgggatggtctgcttcgagctgctgacggggaaggtcccgttcgaggacaaccacctgcagggggagcacatgagcaagaacatccgcgccggcgagcggccgctgttcccgttccaggcgcccaagtacctgaccagcctgaccaggcggtgctggcacggggacccggcgcagcggccgtcgttcgcgtccgtctgccgcgtcctccgctacgtgaagcggttcgtggtcatgaacgtgaaccccgcc

SEQ ID NO: 192052 - DNA, 770 bp, Zea Mays
taccaaaatgtttttgcgccactgataaaacttgaggctgattatgacaaggtactgtgttctgattaagagatcatgttttttatcttttccatcacaaaactgagttgtgttactgttttatatgttgttgtagatgacgaaagagtcacagagcaaggataatgtaactgtccggtgggatattgggttgaacaagaagcgtgtagcttactttgtctttccaaaggtctgttcaagaagtgaaatatatgggattagtgaattaataccataattgtatagttatctgttgttgatgatgttcggtattgcttcgtgatactctattgtctaacacgggaaacaattatgtattttaggaagacaatgagttgaggcttgtgcctggagatgagctacgcttgagatatcctggtgatagctcacatcccacatggcaatctgtgggacatgtggtaattagaaacctgctgataatcttaattgggccagttttatctttgtggctatgctaaggacatttgttctttcagattaagctcactgcacaagaggaggtggcacttgagcttcgtgcaagtcaggtataaccgtataaggcagtatgatttttctcatgttcctttttagcatccactcagcctattttaacaatttccttgaatttcagggggtgcctactgagctaaacgttggattcagtgttgatttcgtttggaagagtaccagttttgataggatgcaaggagcaatgaaaacttttgctg

SEQ ID NO: 192053 - DNA, 414 bp, Zea Mays
accttagtgaagtaagtgtgagtatgtcgcaccgacttaagtcgtcgccgacttaggccgattgctccgttagcagggtatagtggtcaccctaagttaagtaagcgtgagcatgttacatcgacttaagtcgtcgctgattgctccgttagtagggtatagtggtcaccctaagtcaagtaagcgtgagcatgtcgcaccaacttaagtcgtcgccgacttgagccgattgctccgttagcagggtatagtggtcaccctaagtcaattaggtgtgagcatgtcgcaccgacttaagtcgtcgccgacttgagccgattgctccgttagcagggtatagtggtcaccctaagtcaagtaagcgtgagcaagtcgcaccgacttaagtcgtcgccgacttgagccgattgctcc

SEQ ID NO: 192054 - DNA, 818 bp, Zea Mays
tagcaaccatgcttgatggggaaccgatcatatccttaccacccaagactgtttcacttaagacggtggacttcactagcgaggagcgtggtttttataacactttagaagttgaatcacgagaacagttcaaggtcagttcacagtatttgattaatagccttgtttcttacattcttctgttttgtcaatcagcttgatctttggatatcacatttagacatatggacttccacatgaggcaagctaaaccaattagggaaggtttgcatacatagttgaatatcttttacaggaccagtgtatggtaggtagttcgacattatgttgctggattacaagtgaactttaaaggacgatgacacatgttgaataacttttacaagtgaactttagaggagtattacaaagatgcgcagctctcctacgttgtcgagaaaaaaacatgatttattgctcatccagttgcctgttttaggtcactctgaagttgatacattgatgcaaaacttatccgtttcatttgcgactattagtctattagaaggctatgctcactacaactgctttgcaggaatatgcagctgctggtactgtaaagcaaaattatgtcaacattctattgatgcttttgcggctaagacaggcatgcgatcaccctcacctagttagaggctatgactcctgttctagttggatgtcttcgttggagatggtgaagaaacttcccatggaacggcagcacaaattacttatttgcttgcaatcttgttctgcgttttgtgctctatgcaatgtaagtgaattcctttcatttt

SEQ ID NO: 192055 - DNA, 1149 bp, Zea Mays
ttctgatgttgctgtttcttgcttggaaaagctggtaacggaataccaatcgcatcatatggaacatgccaaggatatagctacattagtgtttcgtctccttattgttcacccaaaggttgcgtagttatcttccattactctatctacccctttttcctgtgttgattcttactttcagtgttgaaatggaacacagacccttagggtgaacataaaggccttggagctagctaagaaaatacggtgggagttctacgcaagtagttctcttgtatatgatggggtcgattttgataaaatgaaggtgaggttttttactggccagactaattgtgcctcttgttatgccatgttgatcttaagtttaagcttatcatatgagtgcccccatcttattcttaatgcccatatcttgaatccttagatgacagatccacatatatggctagatattggaagctgtgctttttattattgaaatgtttattttcttgatctttcgatctacatgatcatattttgttctgtttatttgtatgtaattcttctacccattatgttgttacagaacatgagtgcagactccattgcttctattaacatgaacaacatcaaagcttttgctgaaactttcctagcagacccaaataagcatgtggagtggttagctaactctggaagtggaagtagattttctaaaactctgtttctgctcatagtattgcaaacacttgtttccacagaaggtatgcccatctttgctgttcactttgctataccattctcatagaacttatgatggttgcaataacaaatctgttctaattattagctgtttttatattatgtgctactgggaatgctattatttactccttgatctccttaacgattgtcaattttttcttagtatagtacctgtcatctaatagttcttacctccctaccgcatgtatacataaaaattatctcttgaatgatacaaatgctgtatataacagaatcctgtgatcctgatatgttggcttctgtgctaagaccatatagtatgactatttacttgttccttttcagctttggatgagcaggtgaatctttgtcatgcttgtttgccagtcctgaaggatgaatgtcatcacatacagc

SEQ ID NO: 192056 - DNA, 1530 bp, Zea Mays
atggaactgagtcttctagaaatggtacagtcgaggatatatgtgctgatgaatcagccaatcatagtggtcacagtttggaaatgcagaaggataggaacagtaaatcccatgaaaacgagtcatgtaaacgagaacaaggcaataatatattgtcaatatgttttgttgatgagaccagtataatgaaagatgatcaagtaggcagagagaatgttgcagcttccaaaaagggtgaagatgcgacatatgatttacctgcagaaaaggatgataccaaactaccagtcactagagctgatgcaatgaccaggaccaatcaagagcatacagatgagagcaaacagcatgggaaaataaagcaaataacagataaagactacaatgatgctggatatgagttcttgatcaagtgggttggaaaatcaaatatccacaacacctgggtttctgaatccgaggtaaaaatattagcaaaaaggaaactagaaaactacaaaacgaagtatggaacgagtttgataaacatttgcaaggaacagtggtgccagccacaacgagttattgctcttcgagcatctgtagatgaagtggaagaggctttaatcaaatggtgtggtctttcttatgatgaatgcacttgggaaagattagatgaacctacactgatgaaatatagccacttggtcactcagttcaagaattttgagtgccaggctttggataaagatgtggtaaaagattatgcaaacacaaggaaccgacatgagcttaatgtgttagctgatcagccaaaagaacttaagggcggcatgctcttccctcatcaactagaagcattgaactggctacgtaaatgctggcacaagtccaaaaatgttatccttgctgatgagatgggtcttggaaagacagtgtcagcttgtgcttttctatcatccttatgttgtgaatttaaaattaatttgccatgtcttgtcttggttcctctttctacaatgcccaattggatggctgaatttgcatcttgggctcctcatttaaatgttgtggaatatcatggttctgcaaggtcaagatctatcattcgccagtatgagtggcatgcgggcgattcaagccagattggcaaaacaaagagatcgtacaagttaaatgttttgcttaccacttacgaaatggtgcttgttgatgctgcatatcttcgttctgtctcatgggaagttcttgtagttgatgagggacatcgccttaagaattctagcagcaaactctttagtttacttaattcgttatcatttcagcacagagttttgttgactggaactcctttacagaacaacattggtgaaatgtacaacttattgaacttcttacagcctacttctttcccttctctgtcatcatttgaggagaaatttaatgaccttacaacagcagaaaaagtagaggagctgaagaaacttgtagctcctcacatgcttcggaggttgaaaaaagatgcaatgcaaaacatccctccaaagacag

SEQ ID NO: 192057 - DNA, 472 bp, Zea Mays
cagcagcgtcttccacttctcacccacgtgaccacgtctggtgctaacacatttgggttgggtccccccaaggaaagggaagcaaagcaaagcaaagcgacgccgacgcgtctccaagaataggcagcatgcacctggcgggttgtggagcgcacgcctcggcgctgggctctggccaccatcccaaacatagcgggcggctgcttaaacttggcaagccggtagccaccacataacccgccatttcaccgcttccctcctccctctcctccgattgggcccaccaaccagggagagggtgagagggccccgccaccgtcaacaaaacaacccacccaaccccagtcacaacgaggcctgccgccctccggtgcgggccggtggtcggtggtgacgagcagacacgctagactagctcgctagctagctacctaggtagaagcaagcgctggaccagccatgacgcgccgcg

SEQ ID NO: 192058 - DNA, 522 bp, Zea Mays
ttcagttatttcggtgttttgatggcatatggaggcctccaagatgtaagattttcaaattttacccttctagtgtgtcttattttatgaatttgttttataagaaaatgctgattcatttcagtatccatcttgcagtttctgactgaaaagaaagatttgacaattacattgatcaggaaccggattctcccattatattctttggatccttgcagcccatatttgatttcaacggctaattgggttattggtcagcttgcgatatgcctaccagaggttacatgtttttcttgttttttaattccatcatctcataggacatgctggatcaaagtagaggcttaatgtaatatgtatatccctctacattatacatttcactttatttcttgtttgcttacctgtaggacatgagttctagtatttatgagtccttaatgaaggcgttgaccatggagtatgtggaggacataacttgttatccggtttgtgcctctgcttctggtgctattgcagaac

SEQ ID NO: 192059 - DNA, 323 bp, Zea Mays
gtcgaggactaatcatgattagttgcccagtctgtcccatggcaactaggtttgactatacaatttataaacattggatcctatctaagtgcattcaaagaaactagagtccatttggactttgattatccaaattcactaccacttctacctttggtaatggataagcagttgaagctcttgttcttcccctgatcctcatgactaacatgctcttgtcaggctgttgaattgattgatgcagaaatagcgcagtcattttcacaacaaaggaaacaaagagagggcggtggtcctacatatcatgaaacttttgcttatgc

SEQ ID NO: 192060 - DNA, 636 bp, Zea Mays
gtttcttgattgctgtcagatcctctactgctgagtgctgattgttaaatatcttccaggggcatggataactgtcttaaaggccacggcattggctagtgcacaggtagcttcagcaatagagagttaccatcacctgctaaaacttcggctgctgaatgaggcagatgaaagtgtctactggcgtgctgattggttggtcgataagttgggtacaaaggtccattcttactactggctggatgaattctcaggaaagaacagtttttcgcgttactggaggagtgagtggagtagtggcccaaacccatggtgccagggaatgcagattccagattccgatgtcgtcattgaaggcaattatgccagtgtggtcagccagaagaacaaggagaagtcccatgtcgtactgaatccaggttctgagtttgcgttgtgcgattgtagctggtcaatgaaggggaacctttgcaaacatgtaataaagtcggcaaaggtctgccgtgacaggggattggcactgccatcgttggccatgttccactattaccaggcattggcaaatcttgttcattgtccacccagtgatactttgattagtgaccatgcaatggctctggcagtttctgttaaaac

SEQ ID NO: 192061 - DNA, 304 bp, Zea Mays
cagaatgatacatttccgtaaatgtgcaaattcatctttcagtttccagcagaatctttttgaaaggaagctctctacccatttcagtcgcaaattattgtcaatatgggcatccgtgtcagcaccattttcaagtctgggagatcctagtaatatgtttagagtttcagctatagctgcagacatattttgcatgtcatcaacagcagcaataacagctcggatgatgtgcttaaaggatctaataaccatttcatgaatgcatatagactggatgtgtgggagcttctctgctagctctacc

SEQ ID NO: 192062 - DNA, 499 bp, Zea Mays
tgaacttgtcgttgcagttgtagcagaggcctagccgacgtcgtttttccatctctgcctgagacaacttcttgactggacgaccttcaatggtgatggtagagttgtaggatccggaaggtgcccttgaggtggcgggaggtgtgggcaggagacctcggccgccccacacgctgaggtgtggcatgtgcttgctgcgatctgctcccgaagctctagcttcctggcgagactcatggcgatggacatggactgtggattgtggatctcgatgtcgaggctaaggggtggttggagtcccgccgtgaagagatgtacactctgggtttccgtgaggtggccgacacgtggtagcagggcttggaagcggtcctgatattccaccactaagctcatgcgatgacatgctgccggtttgcccaatgggttggaccgcaggggtggtctgaatcgctggtgcaggagttcggtgaagcaacaccattgtggagtgccctcg

SEQ ID NO: 192063 - DNA, 1106 bp, Zea Mays
cttcttgggtatccagagctcaaaccagccactaataagtatgaaagcacaggacaaccttactcgagtgctaacgatggtgatgatagtgtaagtatgaagtgcacaaaactaaattttatttacttaaattcacttgttttaataaataaagtatgtaacaggctttatgttttcaagatcaaattggttcaattatggacaagacgaatgtgcattcaatttcttctcttaccttctccagctattccagtgatccaaatgatgtgaatgaaaggaacttaaacaaagcaaatgtttatcaatgccagaaatgcaatttgactttcggtgaccggacttcatatgcgcaacaccatttggcgtatcatgaaatgagtgttaagaggcgtaggactggcaagtttggtgagccagtagtagggaaagatggaaaatttgaatgccctatttgtcataagacctttgaggaggaaccacagtactttggtcatgtcggatctcatgcaagatatgaaggtttagctcctgaagcattcttggataaggctacttccagaagggcagctaatgattcattggcagaaattccatttagccttcaggaattgactgaatcacatggacagaacaacaaggtttcttatggtgaaaagggttttcagcaccacaatcattcaaataaacatggtgataataaccttacagccattgatctttttggtacaaattattcggataatttcatcaggccaaataaaacttggggtagtcctgaagagggaccttcctgtaatgatgctccaagtgtatctagatatacaaattttacaggccatgctgatgtgatagtttcagaaagggcatcaatctccaataatcaatctgttagcaacattaatggctttatatttagtgatcagccgggaggtaaccatgttgtcagacctactgcctctgtaacagccaatcattatgaggaccagattattgatcgtggcagggctgctccgaatgctgacaataatactgtgaaagcaagagatgtcaaccttaattcatgtgcaagtgcaagtacaatatctttccctattgcttatgcaaat

SEQ ID NO: 192064 - DNA, 379 bp, Zea Mays
gtgagattaggatagcacttgcagccgaaaacacgaaggtgttcgtacgaggggtgtttgccaagtaaggcgaagtggggtgtgccggaagcaagtgtatttgtgggaaggatattgagaagatatgtggcagtacgagagcagcagcccagaaagtgggagggatgctggcttggaagagaagcgtgcagacgacattattgatggagcgaattatgcattcggccttgctgttttggggggaagtgtaaggacaagacatgcgtaaaagaactccatgggaggagaaaaacttgcgagcgttgaggttgtcgaattcgcgaccattgtcacattggacaccctggatggtgacaccaaattgggtgcgaacataagc

SEQ ID NO: 192065 - DNA, 491 bp, Zea Mays
aaagattcgagcgacgctcaacgacatccccaggaaatgatgaagaggacccagatccttcattgtgacttcttgctatgatgatacggtgcaacatgaccgaagaagaggtagtgagcacaatgtcatcaacatacaggaggaggtacatagtggcactgctatgccaagagatgcacaaagatgtccgacttagccacaacaaagcttagggagagcggatatgtagcaaacttgctataccaagcgtgcggggggtgcttcataccatagagaacttgttgagcttgtagaccatgtcaggatgagcagagtcaacaaagccgacagatttactacaatagacagtctatgtaagagtcctatggaggaaggcactcttgacatctagctgatgaataggccaaaaacgagagatccaatgagacaccagcacaaacagtagcatgcttcaccactagattgaacgtctcatcgtcgtcaaccccggg

SEQ ID NO: 192066 - DNA, 1164 bp, Zea Mays
ctcaaggcccctactttttctcgaatcccaactcatttcttcctcctcttctggattatcatctgggaggcaaaggggtgacttgtcgtagagcattttatgtcaaagatgccctgctttaccgacggagacagaaaattagtgaagacagagatatacaccatacaaccaccttcgatggacgcgggggatgacattgcttgacatggactgcgtggctgaggcaatcggcatacagtacttgcagcctgtactactatacatagacagttctgttttcctccaaagtgctttatccttagaccattctcttctgtcatatccactcccgctccactccatactgagcgtgcgttcttgatccatactgagctctgccgagtgctcgctccaatggctgaacttgcagccagcctggtggttgccccactgctgtccatgttgaaggagaaggtgtccagctctctcctcaaccagtacaacgtgatggagggcatggagaagcaccacaagaccctcatgcgctggctgcctgccatccaagaagttatcgctgacgccgagaggcagacgtctcgccgcggcgtggagaaatggctcgagcagctcaagacgacagcgtacgaggcgaatgaggtctttgacgacttcgagtacgaggcgctccgccgtcgagccaagaaaaatgggcacatcgccaagcttgccattatggcaagggtaaaacttttccctacccacaaccgtgttgcattccatatcaggatgagctacaggcttcgcaggattgttgacaccttcaaggaccttgtggaagaaatgaacacctttggattcaacaagcttgagcccgaggcaacaacgacatggaaggagtggcgtgagacagattctattatcgttgatcctgaaaatattgttgccaggtctagacatgatgagaggaagaaaattgttaacttattggtcaatggtcatgttaccgatggtgatcttatggtcgttcccattgttggaatgggaggactaggcaagaccacactcgctcagctcatctacaacgaccctcaggtcaaggagcacttccatctactaaagtgggtatgtgtgtcagatgatttcaatctccgtaatctttccaacaagatatgtaatgtgtcagag

SEQ ID NO: 192067 - DNA, 397 bp, Zea Mays
ctcgctctaaatgcaaacgaatcacatcggacatcaactgccactcatgcaaccaggaagccagatcagccgaactgataacagcatcagaatcaataccaaaatgccttggacgacacccatatagagcctcaaaaggcgaacgtccaatcgctgaatgaggagacgagttgtaccagaactgtgcaacagacagccagagactccattggtttgggcacgcatcaacaaagcagcgcaaaaaggtttccaaacactgattgatgcgttccgtttggccgtccgtttgaggatgataagcggaactcatacgaagctggacatcggccaaacggaacaactccctcctcaagttacttaggaacacacggtcacggtcagacacaatcgactgagg

SEQ ID NO: 192068 - DNA, 299 bp, Zea Mays
ccaccaccttcagctcgcactttgccaatgcgcccctcaccatcaccaacgtctatgccccatccaaccaccaggactccccaaccttccttgatgaactctcagacctcctccccagcatctctggtccttggcttctgatcggtgactttaatatgttgcgcggtgctgctgacaaaaaccagggtcacctggataaccacctgtgcaccatgttcaacagcaccatcgactcccttgccgttgccgaactccagctacaggactgcctcttcacctggtccaacatgcgttctgtt

SEQ ID NO: 192069 - DNA, 1858 bp, Zea Mays
ccggagtggcgagccgagcgcctccggcagatgcatggggaggtgaggacacactcccgtgcctcggcgtggtgatgaggattggttttttcgttgttaggccatagggcatgtacccgtaccctagaacggttttctaaatacaaaagacaagtacaatcctatttaatatgtagtctcctgtgggttttctagtaggctaattgaagaaaaatacaagatacgagttcttgttaagagaccgtctttacatggctcttcatacacattgtctcttaactgcatttatagtatagaggctcagagttttatcatgcgatcttttaaatgtctcttgtacttagaaaaccaaaccaccatcctagttctgtacatgcctgagattgtatggtacaactctgagcctctataaatacagaaaattgtgaagagacgcctcttcgtgaagagcccgtcttttgatatttttcacccctagagatttcttaagagatatatcaattaatggggttgtacatgcccttatgttgcccccttgctgatggaattcatgggtcgcgatgccacgatatgcttttatattaaatttataatatgctttgaactctgcatttcagattttaccagcagcttgattaatatcgatcaagattcctagatagtattacctcaatggtcgatttggctttggtttttctagatgagctttttaccccgatttctgtgcctccttaatattttttgatgttttaatggccaagttaatgtctacagtcctgtagttttcccatgctttattgtcctatttccacagttccaaactctgattgctgcttgcttttgctgcactggtggaactgctagttggatccattatgaaacacaatttggtttcatctcttctcatacaatctatatagcttagtttgatgtcaaggatatcagttgtcgtactgtttttctctctgctcacattgataaactttgtctgttgtgctgtgcggttagcttgagattcatggtgtcagtaaatttgctccacttgttgtacacatcaaataagctcttgctcgctttgtagtagttacttacaatgttttgcatgctcacaatcttcaggtggaaaaggtcgatgagaatgaatggtggaacaagattgggcaattaagagaagggtcccagcaggagctagtagtcaagcggaattttggacgggatggacaaaatatacttgcaaacatggctcagagacaaggaatttacttgtatggatcaatcatgactgttcttcacttcacatgtctatgatcattcttcactggcaagaatagatgcaatatcgctttgatctattaaagtttggttgttctatctatttttttcaccatttgatacctactgttttgcctatgaaccatactcttcaaagctgacaaattctactttacctggtttgcatttttaacgtggggaagatagtaatgcatacaacaaagggaagacacttgttttcagcaaggtacccttacctgattatcgagcagatctggacgacaggcatggatcaacacaaaaggaggtactgtgtgtctgattgatagtttgtaataacatcattatatgggtcctcttcttgatcaatgcttatatttttactggggcagattaagatgtctaatcagacagaggcgcgagtcgaagaccttttgtccaggtcaaagtggaacaacaattctgcaagcacatcaactgtctcaacgagacaaattttccctggcgcatcctcgtctgtagttgaaccagcagcaccaattgataaagaaaagctcagttcccagcttagggagttgcagaattc

SEQ ID NO: 192070 - DNA, 294 bp, Zea Mays
tcaggaccagccgtaggaatagagcgagaataacgaatataggtttggatgataggtggtttggaagagtaagaagatggcgtggaggtggaaggtggtgttatgggaatgagaacatcatatgtggatgtagaagatgatggttcacatgcaggaatggaaagaagacacatggaagaagtagattctgtgggataatatgaggagtgagtagactagttgtgaaagaaggggcgattttcattggaactcacatctctagaaattcgaatacgacgagtagatggatcataa

SEQ ID NO: 192071 - DNA, 403 bp, Zea Mays
ggttagggacgctggcgccagcaagaggggcaacaagagttggagggggcgtcgggcgctgctgcgagctgctagagccggaggcggcaccgtagaaagcggaggccaagtcgggtcccgaggtgtctagggtgatttctagcaggaggtcgttgcggacaacgtgaaaggaggaggaacaacaccgtgcacttgatgaagcttgagatggtcgtgcttcttattcaggccttggagaaggttgaggacgtgagcacgatcggaaacatccttgccgaggttgtgcagggtgttggccatgttcttcatcttgcgacagtagttgttgacattgagctcgccttgctggaagacctggaactaggcgtcgaggtggagaacacaagtctagtgtgttgctgag

SEQ ID NO: 192072 - DNA, 640 bp, Zea Mays
caaggctgccaaggtgctttgccccagccataacccaacaacctaattcattaaggaaacaatgttacgccttggaaatagaaggtgatccctcaaaaaaaacctgtttctttgcaaccaaaggcaccaggctccaagaatgatagcgcaattaaggcctttccttttatccttgatgatcctgcaattcatgtctcgccaccattctgcaatggaagaggcagaagaggagggagcaagatgccccaaaccacagggggagagaatactgaaccaaaactgttgggcgacaacgcaggaggttaagatgtgttgcactatttcctgggcttggtcacataaagggcaaacagcagggtgaggcagcccctcttttgcaatctatcagcagtccaaactctgtcccgaattgccagccataagaacttcatttgggggtgcccaagacttccacaacctctttcaaggttcaaacgatatagaacctatgaagatggccttgtaacgggatttggccgaatagatacctgaggtttcatgcctccaagagtgaatatcatcctcatccttcagaaccacctcattaaccatatcacacagaaggtactgctgtaaaccaaccaaagataggggaggtttg

SEQ ID NO: 192073 - DNA, 602 bp, Zea Mays
ttgtaattcaacttttagtctataagtggttcaaaaatctagattgtttttttagtcaatagttggtgattaggagagcattggtatatatgggtatagccactttattatgccggataaaagatatctttaaagcatttataggtttgggtaaaaagcagtggggtaagaaaagactccatccaagattgtggatcttgattcatctggcgatccaacttggtctttgaagacttgagttgatgcttatccttctttgacgtggtttgtcttctttggcctttattcttggagttgtcatcgtagttaaggacatatggtcaaggacatatagttcgaatagctggggtacacgaggtagatttgtacagagttttactttgcttttggaacaaatggattaggcaacctatgatgtaggttaggttgttgtttagggacgagttagtccaaggtattaatttagggtaagatatgtttatataattagggcctcatttatgtcgccaacattatctaacttatttaagtaactcaatttggattagatcatgttagattaggtgggatctagatcagattagaataagataaaatctttc

SEQ ID NO: 192074 - DNA, 410 bp, Zea Mays
ccctgcgctccggaaccccgtcctcctcctccgccccgctacgccaagactcttgagacgggaacaccagatgtctcgatccatgcggcgcccggctttcccgcggcgctgcgtctatgctctccccaaggcagaaaatggcccacgagaggacgactataggtggcgggaatctcccttcgcgcgggggcggcaaggtaatgcccccccgacccagacggggaccccacctcacctcaagcggagcggctcgggttccgttgccttgcctctttccgacggtgaatcatgtggctcctctcgaagggaaaaatcgaagctccgggacagggagggaggagacggacgagaggggcgaggtcaatggaaaatgggagtgagcaggcgccgcgcggggcggagcaacgcaa

SEQ ID NO: 192075 - DNA, 468 bp, Zea Mays
gtgggcgggaagtccgtgatcacaccgtcgacagagaagtctggattgtcgatgaactgcaagtactcggcagtgggatcgtagctgtagttgtagctcaagatgatatcgttggcaaacccggaggcgtacacttccaggccgagggcatgagcatccttgaccaagctggtggatggcgccaagtactggtcctttttcagtggccagatgtacgtcttgggcacaaggacgccagctgcaaactccttgatggacttcagatctttcaggagctccccgtacgttttcttggtcgaaggctcctcgacgtcttcgttgaggaaccggaagatgagctttgtcttggcgttcctgagcttcccactcaagcttttcaggaacccaatctccggcgaggagatgtacgtgaggctaaaatcttttggtagctctagtatgtagtcctcgctgcttaacttgtgctcc

SEQ ID NO: 192076 - DNA, 427 bp, Zea Mays
acagtgccatgcccaccatgacctagaacacgagtagcatcaaacttgttggttgcttcctctagttcatccaaagtgaatatctttgttttgtttgtagcattttcatttgatattagttgctccaagagtagaccttgatttttcttgaagtactctcttcgaattctcctttggataccttttttccacttaccggtgagtacaattgcaccaagtgcaaaacttatggatccaagaccacaaacaagcccaattacaatccctacatccattaaatgagaccatgaatatttcatgtcttttaatttgttgcataaagacatgactcaccaaaaattagaatacgctgcttagctgacatgacacatttatgcttttttggatcatactctttcccatgagggcaacttgtacaattgaagcc

SEQ ID NO: 192077 - DNA, 338 bp, Zea Mays
gatttaataaagacaaccttactaacatgcaaaggatcaaccctctgtgacgactccgaaggcctgatgtcttggtgaaacatttagagaagaggaaaggcacgggagcagctgtgttggatgactaactacttttaggccatatggtgggccatagctattagctgtcattatctgtcatagtggggaatccagggttggcagtggcttataagccaagtctgtaacagaatcaagcaagttgagaaataacagaatcaaaacagaaccataccttgcgtcggtctctacttccccaccgattctgcttttgatttccactaccgtctcacgtctcg

SEQ ID NO: 192078 - DNA, 1452 bp, Zea Mays
cagcaagctgctctccgtctcctctcatcagtatgtatccagcttttaaaggtttgtctcatgttgcgattcttgtgctagtcgaatctcgatctagtaaaaaggtcgatgaataaatacctttactttatttggattctgacggatcacattagtattaggctgtgtcggaaagtaaagcctaactatacctttactttatttggttttcagcacggttagtggttgcaactgtagtatgttgtcttccattctatcttctaacttccatgtattcgcagcagaaatgccttgggtgctatgcatttaaataaaaatatcccaaaatcttgcttgctttcatgtacaaattgttgtggtccatcttacaaactttgattcgttctttgccatccaacttacaaatcaggtgataaatccaagattctgccagtaaagatgccgatctgtagctgtgaagaaactatccatgagttcgagatgttaacacgcgatgctgggcgtgtacagaaggatacactgaaaaagatcctcgagttgaatgctgatgctgaatatctgaacaagttcggcctcaatggcaggactgatgtagagagctacaaatcctgcatcccgctgtgtgtgcacagtgatcttgagccatacatccataagattgctgatggtgatagctccccactcctcactgggaagcccgtcacctccctttccctcaggtaattacactgcttgaaaaatgtgtcgtcttatcgtttatattagtgtgtggatgtcggtgttttgtaacttgatgttttttttcttcctttggacgcagttctggtacaacgcagggaaggcctaagttcttgccgtttactgatgaattgcttgagaccacacttcaaatattccagacttcatatgcatttaggaaccggtaagcatcatcattatgtttcatttttcacaagtatcccttctacttgtgaatgagcagggtttcatctcacagtgtgcaacataaggtttttttttatataaagctctaatcaatgtgatgtccatgtgaataaaccattggttggtttcggattccttatgtcatagatcttaagtacagttttcttttcacagtgagtatccaattggaagaggaaaagccttgcagtttatctatggtagcaagcaagtggtaacaaaaggcggcatccttgccacaactgcaacaacaaacttgtaccggagggcacgatacaaggaggggatgaaggatatccagtctcaatgctgcagccctgatgaagttgtttttggctctgacttccaccagtccttgtattgtcacttgctctgtggtctaatatactctgatgaggtccatcaggtgttctcgacattcgctcacagcttagtccatgcatttcaaacatttgaggaggtttgggaagatctctgtgctgacataag

SEQ ID NO: 192079 - DNA, 677 bp, Zea Mays
gatggagacaatcatggtgagtgctgcttgtggggtgatgaattccctgctgcgcaagcttgccactctactggagaaggaatacatgctactgaaagatgtgaagcacaacattaccttcttaagaaatgagcttgctagcatgaacttgctcctcttcaagctggcagacatagaagatctcgacgtgcaagtaaaggagtggaggaataaggtacgagagctcgcctatgatatcgaggattgcattgataactttatggttaatgataggcccaacagaagccttattcggaagactataggtaggataaagaagttatggtttcaacatgatattggcaaacagatccaagaactcagaacccgtgttgtggaggagagcgatcgccgttatagatacaagctggacgattcaaccttcaggcctgaaatgatggaaatcgaccatcgtctcaaggcgctctatgttgacacaaacaagcttgagggcattgatagcccagtggaacaaatcatacagtggcttacaggaaatgggaaacacgatcaagaactaaacataatggccatagtgggcttcggaggtttaggcaaaactacccttgcaatgcaggtatacaataaattcaaggacaaatttgattgcacagcttttgtgtcagtgtcaagaggcc

SEQ ID NO: 192080 - DNA, 402 bp, Zea Mays
aagaattcctttctgagctagtccgtttgagcaatacagaaacgttacctattctcattgggggagactttaatattttacgatctccatctgagaaaaataatgatagatttgatcatcgttggccgttcctattcaatgcggtaatcgatggtcttgatctaagagaattgcagatgtcggggcgaaggtacacctgggctaatactagggatattccgacttatgagaagttggatcggattttgctagctacagaatgggagggaaaataccctagagctttggtacatgccttgtcgagaaatatatccgatcatactcctctgcttcttagtacaggtgttgtaaccgcccaaacaattcctccgttcaagttagaactaggctggtttctgaggg

SEQ ID NO: 192081 - DNA, 486 bp, Zea Mays
aacaaagaggaatgaagaacagagggagggagagatcagagaacaaagagtgaagaacaggcaaaagcagctgcagcacaacatccgtaccttcagaagagctgctcatcttcggttggacttctcagctgctgtttttcgcgactaaaatggcggagaaggctgatgctgctgactgctcacgtctaaaatgggggagaaggctggtgctactgactgctcacgtccaaaatgtcttttggcctcccagacagcatttaaagcactgctgactgctcacgtctacccaggatgtatctgaagggattgggcgtcctttggcctcccccagacagcatttaagcctaaaatggcttttggactaccaggcctatcggctgatcgcccaacacggcgattaatcgctataaatcgcaattaggcggacgataaggacgatcagctaccctgatcgaatcgttacaccttatcgagttctaacaaccg

SEQ ID NO: 192082 - DNA, 1573 bp, Zea Mays
gggagagctgaggccaagggggtcaggttctgcgtcaggccgccggacgtcatggagacggtgcacgaggtggccatttacatccaccgcttccacaacctcgatctgtttcagcaagggtgagaattgctcgttttgtccgcaatcccgatcttgtttcagccacggcgtgaatttttcgttcttctctatttgtgcgtgtcttatttctcgcaaaacgttttctcgggtttactttctttactgccttttagggagaacatgtttttagatagaacatataaaggtccgagctatatgtttgtattttctcgaggtgtttctgtccttgcctttctcgttcggtcggttgtttccaggcatttcttctcgcagctggggaattccgattttcctcatgattatgttcccctcaggccctcactgtaacttatgtgcgacagttgtaattgatgccgcgtgtggaacctttctggcacttatctgtcgagtgtaaacatttgccatttatttttgtttcttatgatatgtttttttggattatgcgcagatggtatcagatgaagattagtgcaatgtgggaggaaggtggcaacaaaacaccggcttcacctgccagggtcgtgcaatatgaaggtgtgcatctctatgggcactgaatagcgtgatccagtcttctggtcccatatccatcatttcaagatgtgcttacattgaaagcgaatatttagtttcgtacatgtgctagcattcagctggtaactgcttgattgttgtctgcagtagtaccagatcctatcaggactataggatactgagaacagaaaacttacatatttatatggggaggaaaacgttatgattttttcacttttcaggtttcagaagtaccttgtgtccagagactactgtaccatctttgttgtttccatctaattctactttggtaacattaacatcaagaaatttgttgcgtagctggatatggaacataactgtgcaagcgtgtcatgaataatatctccttgttcctatacttgccatgtattacttagagcatatctaacaatgtatgtataattgtctgtattcctttcaatgttacctcaatagtagtcaaaatgtgcaagcccaaggatacatttccattttgtgataaagtggtgatgatgaactacggaaaagtgaaaacacaactaaagtatgatcatgagggagctcctgtcaaaccttttgtagtgcttatggtgaatgtgaacatatttgcactggatcatctcgttaacttctatgacagtgctgtagtgtttatctttcagccctccccatatgtgtttatatatattgctttgttgtaaattaaataagtatctcaaggaattttggttgctgctgatcatgggattcttttttaagtcctctgtagctgtcaatcttttagctaatagataatgacatggtaggtggattgtgcagcttctgatgttggtgcggatgatgcattaggcatttggaaaatagatgacgtcgacaatagcttccacacacagccgtttcggatcaagtatgccag

SEQ ID NO: 192083 - DNA, 304 bp, Zea Mays
ggcgtctcctgcaaaacgagagatgcacataattaagaattttctaggatcataaagcagtgatgggtttgattgattaactttagggcatttttcctgattgcccaccaatttccgccatggcaatccgcccggactaatgcccgattctccatctgacgatcctcggtaggtttggtcctgcgtgattcacatgtctcgtcaggttcttgcgggttcttttgtttttttgttgttgtggttcgtcttgtggatttccttgttgcctggtcgagtatttatatttttcatcggcccattcgcg

SEQ ID NO: 192084 - DNA, 338 bp, Zea Mays
cgaagacgatatccctgattaaaaacatcgttagactcataattgttagtacaagaatcaggtacaggatcactatcaggaccagccgcaggaatagaccgggaacgacgaatgtaggtttggaacagtaagtagaggatgacgtggaggtggaaggtggtgttatggaaatgagaacatcagatgtggatgtagaagatgatggttcaacgataggaatggaaggaagacacatgaagtagattatgtgggataatatgaggagtgagtagattggttgtgaaagaagggacaattttcattgaaactctcatctctagaaattcgaatatgacgag

SEQ ID NO: 192085 - DNA, 426 bp, Zea Mays
gaaaaaggttactggcgcgcaagcttagtggctttcaccgtggcaagctccccagcgatgaacggatggctaatgcgagtcacggcgatgcggtggttgtgccaaggcacgtggcgcaaggccgtgaagcggctgtctccggcgaactcatccgaatccgccgtggtctgctcggtacggtggccggagtaaaataatggccggagtgtttccatgatgtgatatttactaaccccagcgctatccaactgatctgagcgtgaatcatagtggcgaaaacacgaatccgcgtgtggctcatcggcggtgtgagactgagctggcgatccaatccagtcactgtacaattggaacctctattcagtcagcctgacagatcaagtttgggctggattttctcctaattttacatggcaacaaggccat

SEQ ID NO: 192086 - DNA, 752 bp, Zea Mays
gataaactgagtacagaagatcattttgatgatgctggtggtggtggtggtggtgatgatgataagctcacattggttggtcgtgttgaaatggatgttgatgatgctacctcagaccccaacatgcctagtgatgcaaatcacgatgataacctggttcattctgatacaaagcagaaacacatatctgtggttgagcaacctactgaacacaatagcagtgaacctgatgaattgaggaatactgaaaatagtaaagggaggtctggtagcagcaaagatcagcagaaacaccttgaatctggtgaagaagttcttcaagataagcaattaaggagagtaaataatgtaagaatgcatcatgacgcggaagaacacaaacttcgccaaaaagatgagcattcacgagatgcaaaatcagatttggaaagatcacgtttaccctccagaggcagggaagatatccaccaatcttatgcaaacagagatagggttgacatacagggcaggagttataataaggtaagagagactgaaattttgccaaggagagatgatggtgttcacagccgacgtgctaaagaggaagatttgaggctagagtacaatgttgaaggtggtgcaaggcatagaaataaggtgaggcccattgataggaatgatagagatgaagatcattcacggaagcgtttggatgatggcgataggagaggctctcgacaaagagagcgtggtgatgtggttttgaatcg

SEQ ID NO: 192087 - DNA, 315 bp, Zea Mays
actagcaagcttgtcacaggaaaaccaagacctcaaggacaggatctcgtccatgttagagcaaggcaacaaggctgagtgcgagatccttcgcctcaaggagtcccttgctcaacaagaagcagaaaaggagtctgcagtttcactatgccagcaatcaactgctagactacaaaacctgaagtctgaaattatgcatacccaggagaaattcaacaggctgaaagaagagatgcaaactgaactacaacctttgaggaaaggagatgaacatttatttttacttgaaagagctaatcaggacttgcacttgga

SEQ ID NO: 192088 - DNA, 689 bp, Zea Mays
cgcatagctcacaactggagtttctattgatttttttttgataaacaatgaaatggtggcctttgtcactttgttactggaaggaatcctctgatgcatctgcatcctgacgtggtgacatgcggaccagctgggtgtgggacccacctgccattgaccatgtcacgatgtggagttatgtcaggggtaccatttccccaaacagatgtcattctggtaacgacttttttcttctttccagccactctaaaggatcatcagatgggcacaaattatcaaaaggtgggataccattggctaatggagatgtgcaactaccaaaaccacctccatgggcctatcctttgtggagcagacacgaaacacaaaactatgaaacagacagaatgctgaagtctacttctcaggttattgaccaagcaatggctcaactctgggagactaaagtaaaatttgtaaatgttagtttctctattgagaaacttggtcgctcaaggagcattgtactttctgaaacgggtcgtaggctgcgacatgatgctacggattctcatgatccacctggagattcgcaaacagttgctgatcagcctattgaatgggtgaaggttacgttgtctgcagttccaggagttaacatggaagatgtagatgataatgaaccaacacgaaagaaggaccatcgccgt

SEQ ID NO: 192089 - DNA, 415 bp, Zea Mays
ctagtgtgggtggtggggttggttctggcagtgagtgtgttgtgggcgtgtgttgtttcttgtatctttgtttttcctttctctttaatggaatgatgcacagttctcttgcgtgtttgagaaaaaaccttatatattagagagaaagaaaagccttacaaaagagctgagcaagttccccaagggcccaacacaaacacgaaggaattacatactggtaccgtaacttgatccgacctcgccaagagctgcaactatgcctaggttctccagctctttagctcctaccattgcccagataacacactcatctaggaaacatctaaaaattctagttaaggagggggactagaggaggttcttttaattgggattgccaatctgctgtcaaatctgttgaatctctgtagaccct

SEQ ID NO: 192090 - DNA, 445 bp, Zea Mays
tcatgtgcgatgttacactcatcaacaaggcagtctcacaatcagtgtcaaaactcttccatctgtgaagctacccggggagcttgatgggaaggtatggatgtggcacaggtgtctcaggtgcaaaccaaaagatggaattcctccagccacacaaaggatagtcatgtcagatgcagcacgtggattatcttttgggaagtttctggaacttagtttttcaaatcacacaacagccaatcgaattgcctgctgtggacactccctccaaagggactgccttcgtttctatgggtttgttgcttcttattgtatactattcagtttcttatctaataatgaccaacctaacagttagcgttctcaatcaaacaggcttgggagcatggttgctgtcttccgttattcaccagtagacattctttctgtcaacttgccatcctca

SEQ ID NO: 192091 - DNA, 338 bp, Zea Mays
tatgttcctcatcaaggaaacatggaggcgaggctgcatagcatatgaactgatcgatggccactttcttcctcttctccacaaactcctcataggtgatcacaaccttcctcccaatgcagtcattaatgtggttgatatcaagcacccgatcatactggtaatctgccttctggctgggcaccaccagggtacgtccaagaagcgctgccatgaacatgtgcttctccaagcaaatcaagtggttggacatttgcccggagatgcagatgactaggaggaaccggtctttcttggggttccactcaatggtccgccggctggccggcaattccctc

SEQ ID NO: 192092 - DNA, 508 bp, Zea Mays
ggaacagcaaagatagggcgtgggctgccttgaagcttccttgtgacaaaactgacgaagatctcttcaacgcttccacaactgtcacggtaggcaatggaaagatggctgaattctggaagtctagttggattcaaggccaggcccctaagaacattgcgccatcattgttcaagaagacaaaaaggaagaacatcacagtggccaaagcgctcaataacaacaactggattcgtctttgctcaccgtatacgggggagggagagtttggagagttgatctctctttggcgggccataggtaatatgcacgagcttaacgggctagaagacaacatctcttggagatggacggcagatgggcagtacagtgcttgtagtgcttataaaatccagttcgcatccaatttcagtagtatgaatctaggccccatttggaaggctaaagtggaaccgaagtgcagattttttgcttggactcttctccataagagaattctgacggccga

SEQ ID NO: 192093 - DNA, 353 bp, Zea Mays
agataatgtagggttaaataaagttgaagattttgagtatgatgtccaccccatctttggagccaaacagtaacgaaccctgggactttctcatgatgagcaatatcttaggttcggttctgcgagatggacggtggcggtggtccacgacaagtcaccgagcagcctgacagttctccctgcggcgacacggacgatctgtaacacgaggttagacgatccacgacctagcaacagaagcagcttctttcctgtgtcgagccaaacggtccacgctctaggtcgcacgatccacgacgcctcggggtcgtcttcttccttgcaggaacctagattccacccccttgtggaag

SEQ ID NO: 192094 - DNA, 657 bp, Zea Mays
agcgaaagatgtgcttgacggtggctagatgctggttatgcaccagactgtattacttgggttactcaaggtgcatatgatgttgaaaacaggataattcaaaaattaatttgaattaaaacaaggcaatttgggatctaactgagctatcacaatgattcaagaaccttcaacgggcctcatgtattcatgttactgcagagacaccttttctcgccctccatgcacattgatacagccgtctatgcaagcagtttcacaagaacctccacctgtgcctgacttcggtgagtaaattatttgtaattcttctatcagattagatatccacttgggcttgattctgatcttgatggttttatcaggtcaaaatttttgccctcctatatatccatttggcaatcaactattagactttgctgctggagttcctttgttttccctctattgtcttcagaccaccccttctccatcacctccgaagtttgcttcaaaaacagtcatcacatgccagtctatcatggttcgtcgcctttacatcacagtgaagcatatttgtttggccttttctgctcaattaaatattgcctgtgattttcattcttaggtaaccctccaggagcaatcgtgcttaagaattgcttcattcttggctga

SEQ ID NO: 192095 - DNA, 1033 bp, Zea Mays
tcacgtagtgtttttgaattcacattttcttccctctaggtgtcagtccttcctcctttgggttcaatgatcattacatctattgcagcaccttttgcagacaacttgatatcaaatggagttgacaccacgaaggtaaacattcacttttttttttaatttacctccacttgaggtggttgtgtatgccttctttgcagagcgttaaacctcagctgtgtaggtcctatgattggcttttatatggggaactggtgcgagagaaaacaagaggggctggtagtagcagctggaaggaagtaggatgatactttgcttgcttatttttagaatatgcaggaaagtggatatgagcatatctatgcatgaagaaggttgttacaaaattgatcttgacttaacctattagaaaatctgtcatacaagaaaggaattggtctgaacacgtatcttaacacttgcatgatctaatgaggtagaattaacctgaacactagtactagtactagcaattgacaagtgggaactggagctagaactaattgaatctgtgctgccccgcctctgtttaactagatgtgtcctcgacacaccctcttaacttcactagtgatactagtacagcgtcctcttcctccgagatcaagacctaattcataagaaattcggactattttctctttctgtttgactgactaccgtgtgctagcctctgctgcttgcaggttgcagcaaactccaaaacttcctagactcccaatttgcttctgttggcttcaacttgaagtccaatatagaggctgcataaacctgacaattctcaggagtgaacataatatatgctgtgtgataactcataatagcattttcagttagctcgtagaataaaaattgctgaacaactgaaaaaattgaatatgttgcttaaattctgtaggtgcgaaaaatttgccaaacaattgcctttgtgtcacctgcgactttcatgatgctttcctctgtggatcttggactgcctccctgggaaattgtt

SEQ ID NO: 192096 - DNA, 376 bp, Zea Mays
agccaacagaagatgatctagagtttcttcagcttggtcacatagaagacatttctcagggtggtttaggcctcttttagctaatcgatctgctgtccagcatctattatgggcagcaagccaaataaaaaaccgacactttggtggagcccaagttttccaaacccttgtgtagtgcccacaagaaactaaacccatgaacagtccattataagcagattttgcagagtactttccatctggggcaatactgaaaatatgtctgtcttccattccaggctgcaactcaatggctgaaagcatctcccatagctggaggtaatcaatcaacacacccactgagagagcccctttatgtcagcaatccacttcctgt

SEQ ID NO: 192097 - DNA, 689 bp, Zea Mays
ctattggaacaaaaatatttgaagacgctgcgaatggctgaatgaaacactaaaaacataatcgaatgaatctgacctgaccttctgtttacaaatttgtcttgaataggcaaaattcattccactttattattttctttgttctttttgggaacaagtgcttcaaatgatgaacactagtgcaccttaatgatcgttttctgtgcaatgattttctttaaattgcaggatgatgtattcttaatttgcagcaacgcgatgcagtacaatgcacctgatacaatttatttcagacaggtatacagtccctaaaaaactttctgcgcttataataccatgttttgactattggtattgaacatttttgcactatggttgggaatataggctcattccatacaagagctggcaagaaagaagtttcaggaactgagggatgaaggcatacctacagaaaatccgataaagagtgaacagaaaagtagaccaaatttctgcagtggagaacaggttaaaaaacctgttttgaggtatctggatgatgatctagacttcctgtcccgcaaagatcaagataaaagatccaattcaaataatgtgaatgatgacatgagcttcaacggtcatgttaagaaaaccttgtccaagaatgcaccggatcaaagttgcttattacagaaagagcggat

SEQ ID NO: 192098 - DNA, 1355 bp, Zea Mays
cagcctttgatctcttcgaaaatgaggtgcatacatttcttcagcatagatcagaagtaatagaactatatactttttatgtatatatgtccctcctgctgctccagtaatctcgatattttccagcatacatgcgtgtccttactcgcattcctcatttcacttggggacattaatgaaatggcatgatattattgtgccaacattatttaattatatattagtcttaaagaatttattcttgcttctcagattggaacatatgagggtgaataactgaatacactcctttctaagtataatgctgtatgatgttacccctgatgttgtatgatgtttctctaaacaatgttatatgatgtgatgcagcagtaaccccttcgcgaaaagtacctctagttctttatgaatttttagatttgttgtatgattatgtgggtacatttgtcaacagaaactctattatattacagttttatattcttctaaatctaaataaaagatgttataagttttatcatatattacagttcaagttagttatagcttagatgttataattctcgtgatcatatattagcgttcaagttggttatagcttatttctagattgtacaccaagtgcctataatgtcatgcagaaaagtttttaaaatacttttggtctatttttgttacagtgggtggttatgctaagtctaagagcatctctaaggctcttctaaaatttactctctaaatcattatttggggagccatttgagtaaaaattgctttctatatcttcgtaccctccaacaacttttctatatcttggacactctagacagccatccttactctatatctttggctagcgagaaatctggaatagcggatatctatatttggagatccaattaaagaggctgttaggggatactttttttaaccaaaatctctatttctataaattagagagaatataaagactcagagtttctctaagtacatagctatactttcctcttattttctcttgcactgttgcacccatgcatatataatacatttatgtgaatattgtattcaaatggtaactaaggtcaattgttgatttgtatgaacatacaacagatatctaagaaggctccgttgtggaccacttcattatgtgatcgaggaaattcagtgacgcaagaacttgtttcaaagtgcggggggctcccaatggtaatagtggctatagctggcatattggctaccaaggtagtctcctggatggacactgcaacatccatcaatttgaggtttatgtttgagctagagatcaatccagacctgcaggatctgtttagctgggtgcattcctgctt

SEQ ID NO: 192099 - DNA, 368 bp, Zea Mays
cgcctcaccgcgcgctcccctcatcgctcgccacaacgtcttccatgacctccaccactacgcaatcggggttgcggccacgatcgcggtcatggtccgacgtcgcattgtctatgtcgtcatcattctcatcctcgtcctcgtcgccgacgcccttggagcgggagccaccccgctccccaaccccaccggctgcaccgctagtgggggcgctcatcgaatcgctctcgtttcgcggatgcggttttggccgtgctgccacgtccgcatttgagaaggaggatctcaaggcgcgagccgcatttccgcagcgcctccgtactgccgtgcatgccgcgatgcgcgctagggatcctactgcaggggca

SEQ ID NO: 192100 - DNA, 459 bp, Zea Mays
gtcctcgcccccgacctcggcgtgcgggattcggtaccgaaagaagagacaggaggagaatacaagccctcagcctcggtgttccccattcaccgctcaggcgcagtccatcgctccttcgacgagggctccagcgactacggctccatcgctcctcatggtgatgccgccgagggttgtcctacgaagccgtccgcgatgccgagggttgtcctacgaagcagacacgccctgcggctgcccacacaaagggtgcgtccgccgctgctcatacacgcgatgaatgcacagtccctatgagttcttggatcccgaactgcttcttgattcgtgatcttaggtttggttcttgttcctccaagctactgcgcgtgtgctttcacattcggcacagtgggagccctcatggcagcagacgacgtgtgactccagactcggcgtagacgacccacaaggagg

SEQ ID NO: 192101 - DNA, 353 bp, Zea Mays
gcttgcgcttgttccatgtttgttgattggattaatgtttggcgtggcaagattgtttctttgttgtttggattgaggtatggtgcgctaggtttgttgcttgactgaagtttcctttgctaacaaataatgtggagtgattgcctgctgtttgaggggttgtctcaacgggagatctgttctctccgtgatttgagggggttggactttggctgtgtattttttctcagattcgttttgttctttgtaatgccatagttgtttgccagccaattggtgtgggttgtatcagtactagtaatttgcccgtgccctgcgcggggtcattggtttatttgtttacaccgtttaaa

SEQ ID NO: 192102 - DNA, 819 bp, Zea Mays
ccccgcacgtctgctggttatgattctatatgggtgattgtggacaggctaaccaaggtagcccactttattccagtgaagaccacgtattcaggtgccaagttggcagagttgtacatggcacggattgtatgcttacatggtgtgccaaagaagatcgtgtctgatcgaggatcacagtttacctctcggtattggaagaagttgcacgagtcattggatacaagattgaatttcagttcggcttaccatccccagactgatgggcagactgagaggactaaccaagtgcttgaagatatgttaagagcttgtgctcttaaacatggtggtagttgggataagagtttgccgtatgcggagttctcatataataatagctaccaggccagcttgaagatgtcaccgtttgaggctttgtatggcagaaagtgcaggactcccttgtattggaatcaaactggtgaaaggcagttgtttggacctgagattatacaagaagcagaggaacaagttcagcaaataagggagaatttgagtactgcacaatccaggcagaaaagttatgcagacacccggagaagactacttgagtttgaggaaggagattatgtctatttaaaggtgtcaccactccggggtatgagaagattcaaagtcaaaggaaagttgtcccctcgctttattggacccttcttaatcttaaagcgagtgggagaggttgcatatcaattggagttaccggatcatcttgcggatgttcatgatgtatttcatgtatctcggctgaagaaatgtctcagggtgcctgaagaacag

SEQ ID NO: 192103 - DNA, 296 bp, Zea Mays
attagcatgtgggtggtgatagatagggcactgattagaggagagggaataatgatatgtcagccaggctaggcttgataatcaatcataggatggaatgggagctagctctagtagagtagacactagtgctgtaccggctgaccactgcgctggcttggtttttcttggcttctgcttgcttgcagcagaaaccagcaatgcatcagaggaaaggaagattgtactggtgtgtgcagcaaaacggaacccaatgtgaatactccagcttctgctagcttgggggcatgtgtgtg

SEQ ID NO: 192104 - DNA, 430 bp, Zea Mays
ttcacaactaagcccgaggcctctccaaagcaatccaggatcattttgacacaaataagatcgtcaactgcaggcttgacaaaaagaaccaaaacatctgcgtaaatcgagagtctagatttcacgtttctgatggccaggtcatgcagcaatcctctttcctcagcatgcttgaataagctactaagcacatccatcacgattatgaaaagcataggagataaggggtcgccttggcgcagccccctccgatgacgaatataatcccccggagttctgttcaatagcacttgtgtggaagaagtggataacaaattgaacacgagaccgcaccacctgggcccgaagccaagatgggataacacttctaggagaaaggcctaggacactgagtcgaaagcttttgtaatatccagctttagaaacagac

SEQ ID NO: 192105 - DNA, 302 bp, Zea Mays
catcaagtcgtccgacttaaaaacattgcttttattacatttcctggtacatcgtgcatgcacaagcggggccgacgcacaaaccatgtagtggtctcaaatgcatggttgttatgtcgtccattaagtgtccacttaattgtcgcttaagcgctaaggcgctggaggaaggacgactccggtgacaccttaccatttaggctatggcgtccacaaggtgtccatgttcctctacgacgccttattgctcgctcgcccacccctactcgccctacctgcacctgctcgccccgcccaccgcg

SEQ ID NO: 192106 - DNA, 318 bp, Zea Mays
atgggtatgttagggcaagaatagcctagggtaagaaagtttatggtgaggaagaactccatgttaagtggtaatgcatctgaagattgagtttgacttctctcctcccttgatgaggttggtcttttctcctccgatcttggtcccattgattcgcggtgagtgcatatcatcgaggttggggcatatggttaggatagatatggatgagatagactacatgatgtttgtcaaaagtttggatagtccgattatgtaattcatcatgactctactggttgagttagatctattaggatgacataaaatcttttcaag

SEQ ID NO: 192107 - DNA, 353 bp, Zea Mays
gctcaatctcaccggccaaaacttggctggccaaatcagctcctctcttggaaacctgaccttccttcatacccttgatcttagctacaatagcttcagtggccccctacctcttcttaacaagctccgaaacctggacgtactctttctgggaagcaaccatttgggggatgttattcccgattggcttacaaactcttccaacttagttgatctagatctctctgaaaacaatctcaccggccatattccttcaaacataggcttcctaacgaagctagaaggtatagccctttacaataataatctcaccggtgtcatcccaccaaccttgggaaacatctccacactag

SEQ ID NO: 192108 - DNA, 579 bp, Zea Mays
gcgaaatttgcctgagagtatacttatcggttagggccaccctttgtgatgacgcacatcaagctccaccgcaacttatcgatgatatatcgtgcagctcacacaggtcaatcgaaactaatgaatcaccattatcagctactgttaacagtctggatatgtcagcctgtgccagcatggatcggacatccctcaaaagttcggatggcttcaaccaaagcatgacggaggtccgaggtcctagaagcacagggccactatcttgtgtcagcatagagcaatcaattcttctggagcctgaagaagatgatggcagtgccatcgttgatacatcctcagtagtggaggtcatgtctcggtacttccggaaaactgctgatgctacacattctgtagcatcagatcctgtgtccctagaccagtttcgaagcacacaaatgaattctgaatgtcgtgaaaatgaagagggttgcacactgcctgaggtcagccttgatgaactgctgaaaaatatggagtccaaagaccaagcttgtgaactgccaggaaacttgcctggtggtgtactaatggaccaat

SEQ ID NO: 192109 - DNA, 510 bp, Zea Mays
actaggtctggaccattctcttgctaatgttgttagctctccatcagagggaaagcttgaagaccttccaccagcgctacattcatccaagttgtcatttgaagaatcattatcatcattgaaaccatcgagttttcatgccactgatgtcgacttatcaattgaagcgaagaaagtcttgcatttggctctgaaaatgtaccaaatatctgatgtggagaatcttattcccaacctaagaagtgcagttctctcagctatttcaaaatatgtgactgctagtacaaatcatattctacacactttgagtcaagattcagcaaatgcgtttatcaacagtgattttgattctcaggaaattaacaaaattcttgctgaagctggtaaggagctctctgaaatttggaagaatgtccatgctgttactgagagtaatcttttcaatgataatggttttaccattggagtagatgaagacttgcccacgaccaagattctaattgagttgtt

SEQ ID NO: 192110 - DNA, 522 bp, Zea Mays
tcatatgacacctagtgtataaaggtagcctcactaatcaatcaagaatattaagggctttgctcaccaatctggcgtcaattagaacctcaagatacaagtgagaaccctagcaacctgagggtgatcaaaccttattttgcctgtcactattttgtctgcataccacatctccacattgcatgcactagttctatttggttttatttactagtaaaggattaaggatcgaactcctgcaagtgcacacaacattactaaatggaaggggtagaaggcgaaggaggtggatactagggcaacttcgggtaggaatggtgtcaatatcttgatcgacatgagccttaaggatggagtagttgatgttaggaggcaaggtgacgtgattgtcctagtttggttgatagttggagatgtggctctaaatgtgatcaacgcctatgcctctcaggtaggtatcggtgagagcaccaagaggaagttttaggaagatatggataacatggttaataccgtgcttat

SEQ ID NO: 192111 - DNA, 529 bp, Zea Mays
gatgtatgatgctatcttggaggtattacatttgcgcgagtgccattgttagttaaatgtcgttgtactgcatacaattcatttacttgtggacaacttttctttggtaggttcctgcatgtatcaatgtgaattcatttgttttcttttattcatgtttgcttctgtgccatccatcaagttgtgtacactctcatatttttttggcattcattgctgttgatttctgcatgagatgagtaattgttggtgtcttatccaataggaaaaccatgggattgtatatttgtttgttttttggtgcatggaagcaaaccttgtgcaaggttataaaaagtatgtcatatttgcatcaagtgaaggtgcattgttctaaatgaaatattattctatctgttagcaatttcattattcctagaatgtatagtgttctgggtctttcctgcttgatcttgatctacatggacgatttgccctggggctgctattttcatgcctatattttcactttttaatatttatcattctt

SEQ ID NO: 192112 - DNA, 432 bp, Zea Mays
ttgttttggtggaaagggttgaaaactgatgtcaaattgtttgtgcaacagtgtttagtatgtcaacatgctaaatctgaaagagttctttcaccagggttgctacaacctttacctattcctcagggtgcatggcaagatttgactatggacttcattgaaggccttccaaagtcggaagggtgtgatactattatggtggtggttgatagatactctaagtatgcacacttctttgctttgagacaccctttctcggcagcaactgtggcacaagtgtttttggataatgtggtgaaacttcatggaactcctaagtcattggtttcagacagggataagatttttactagccatttttggaagtctttatttcaagctttggacaccaagttggctctgaccactgcttaccatcctcagtctgatggc

SEQ ID NO: 192113 - DNA, 770 bp, Zea Mays
gtcgtactgcgtggatgagggcgttcaacgccactacgcgccgcacagcccgcaacagaacgacgtcgtcgagcggcgcaactagacggttgtggggatggcttgggctctcctcaagcagaggggaatgccagctgtcttctagggagaggcggtggtgacaacggtctacatcctcaatcgctcgcccaccaaggcactcaacgagatgacaccatacgaggcttggcatgggtgtaagcgccgcgtctctcacctacgagtctttggctgcctcgcgttcttggccacatcagcagaagcacccatgggtgttcattggctatgcgaagggctcgaaggcctactacatccttgacctaggaacacagcgtgtgagcacggcgcgggacgtagtgttcgaggaagggcgaggatgggcattatgggacaaggcggtggatgacgacatgactccaacgtacgatgacgacaccatcgagtatgtccacttcgagggagctagggagtaggcaactcttcttctccgagcaggtccccaagtctccactgactccgtgctatgctctccagccacgacttcggctacagtgagctcttcgccaccacgtactccagcaccgacagtaaccccttcgggaatgtcctccccgacgccagctcgtgtcgagcacgacttggtggggcttgttaccccgctctcccacgaagaggagcgcatcgacgcgtgccacgacgacgagccgttgcggtttcgtacggtggagggc

SEQ ID NO: 192114 - DNA, 1194 bp, Zea Mays
ggcagttactgctattgcatttagtccaaggccaggtgctgctttccagctgttgtcgtgagtggctcttttctcttgtttcctcatattgtataatttttgtgctacttagttgttcttgttgccctcatggctctgtgtccagatcagtctttctttgacgttctctaagatacacagcttacagatcagtcattctttgactttatctgctgtagtttgagtgtttgaatgaggctaacacttatctgaaagctagattgccaatagtggaacatgttcatttttctcttcacaagaactttttggcgtacatttacccatactggaggcagtatatacagcaatgaaatatctagtataagttgatcctatgttttctgtgtgtactttggtttatatgagcttagattctctatgatctaagggcagttaatttgtgtggattatgtgctgctccatactccctcccataatattaggtattttataagtttttgaataatttaagccaggtgagaaatggcgcatgtacccttcgttaaagccaactctcgctccaacattacattaaagacaggtttttattggctcatgtaacagtaatgctaagggaacaaaaactgtattcctgggaagtgacaatggttttaattctccccaaatcccttatattatgctgttttctgaaataagagacatgctgcattgctgcttatgtattacatatttgtagtgcagctttgttttgtgtggattttcactgtcattttaaacactgattatttaatgacacatctaaggtgtattgaaatgtgtttggttcatattgtttgtgctacaactggttttctgtagtacttcaccgcacacaactttttatagggttttacttgccattgttagttatgttccctttgaagtaatctaataatatttgttgacaggtcatcagatgatgggacatgcaggatttgggatgccagatactctcaacaacctccaagactgtatacaccaaagcccccagatgttgcccctggtcagttaattgaagcatgcatcatgcattagtgatgtcgaattctggataatccaatccatgtggtgttgatgccaggtaagagtggtgatgcatcttccagcgccgctcaagttcagccaacaaatcaccagatcttatgttgtgcattt

SEQ ID NO: 192115 - DNA, 276 bp, Zea Mays
cgcacgagaggaagaacgcgcacgcggggtgaacagcagaacagaaggcaggggtgaattccggggatgttactggatggtgatagctgcgccgttgggccaccgggctgaaaccgtgtgtgtggatcatctgctcttggaatgtgccttctcccatgcgacgtgtgctatactattggattcatggcgccagagtttcccaaactcggaagaggtccggcgagcggtgtctcggagaggacgcaccaccgtgggcgctggacggctggaggggac

SEQ ID NO: 192116 - DNA, 617 bp, Zea Mays
ggggggccttgacccgtggtggatttgggtttggatgtgcttgggcgtgggctaattttggcggtatttgggtttggggttgcggaattgctgccttcggttcgggtgtatctggtgggatcgggattgaatcgggcaagcattgttaggatctgaaattggatatgagttcatacggtggtgtagaagctttcaacgaattggcgttggatggtttggtgcgcaggttgagccgtgttcttggttgattagccatgctagtacaaacaattatttgcacttcgtccttccaatggtgacaaaatgagatgtactctgaggaaaacataaggggaaaatccctgtttactttaagctacggtggaaaatttattcatgccaccgtatgttgtcttgcctttctagtttcaatggtaacactaccatccttttgctctgatttgaacatgatgtccgcattagtcatatatctcatatagttttcactatccgtgaagcagcatatggaggttgcaacctttggactttgtgtagatttcaaagaatgaaaatggacttcaattatcaagtctagctgacaagcaaaagtgctctattttcagctttcctaaaatgcc

SEQ ID NO: 192117 - DNA, 1365 bp, Zea Mays
ctttgttgttattatctgtttcatttagtatataatttcttgtttaagtttcttgtgacgagttggacgatgctatttgagttcatttgcatactctgtaattaggttgaagcaaaacctaagaaacttggttgtttctatttatccgagagtctggatgaagatatggactatatatttagggtgccggaagcataccagcgtgaagaagtccatgacttcaaccacataccagctgagactgccttatattctgatggttagtagtctgtttttagatactcatggatgggtcttttcatcaataaatcctttcggttgttcctttttcttttgtgtgtgtatatgtggtggtggtgatgggggtggggtgggttaggtagcatgttggaatctgtaactttcttgtttgaatgccatatcatccaatgatccaatcttaacttgaggacccggttgacactcggcttgctgccctcaaaccacacgagtttctgaacttcaaaatctcccaagccactatgatgaaaagaatgttaagccccttccgtacttctgcatacctccaggagctttctagcaggttgcaggccccagccgcctaggtttggtggtccggtcgtgtcccttctcctgtgagaagtccctagtgtgttgtgttcgggatgggcttcttatgccccattttacttgactctttctttcttaaatgaaatgacacgcagttctcctgcgtagttcgagaaaaaatatcatccaatcttaactgttataatattcatcttcgaagactaaccatattatacttgccttaattagggggacatccaacaccattgggcaccttctagaaacagttaattgctgaaattggtgcaagagagggctgtggaattctgatgtaatgattgatttgtttgataatgtctttatctttttcatgactttggttgttctcttcatttttataaggtaatctggaaaaatacaaggacaaacacttttgcttgtaccttggtcccgaagatggcgaaatgggacagtgcaatggtcctgaagcttttgcaaacttttttggtctacttgactcccttccgcataatggaagcaaaccaaatggttcacactcctttggcaacacgatcgatttcaggtacctttccatttctcaaggaacattttgaatacatgttttgagggaaaagttctgtgtagttaatatgtttcgaattggataaccttttgttccttcttttatcatgaatccatgatgtaagcatacctgattatcacctatccgtggtctgtttggtagagctctagcttcagttaaaacaactctagttgtggcttttctgtcgaaac

SEQ ID NO: 192118 - DNA, 443 bp, Zea Mays
ccaactgaaattcatcacctgcagctccccttccacctgattcttgttcgccttcatcttcatcatcattcatttgtcttgctgtctcttgttcttgttcatcttcagcaggagaattgtcatcttcttcacgtatgtcttgagctgtagctgttgcatttctgggtcgttttctggttctaacataggtttgtgtctgagtttgagaggaggaaccagcagcagcagtcctaggcaaattttgaccccgaagaccctgagttgcacctagagcttcatccacaacatcccaaatgttatcaccatcagattcttcttcaacccattaattttgccacgtaaactcttcaagcaacagtggattgcttctctttcccttggaacctagctctcttatatttgtgaacctattatccatcttcctgttgtagcttacataggcc

SEQ ID NO: 192119 - DNA, 378 bp, Zea Mays
tgtttatcggcatcaacaattgttcaactgtgcagccagttgtttcaattgaaagaacggtcttctacagagagagggctgctgggatgtactctgctatgccatatgccattgctcaggtaaagaaatgtcgttgaactgtgcagacacagtgataactaaggtgctatttgctctccgtagcctctcaaattttatgcttcgcaggttgttatagagataccatatgtatttgtgcaaacaacgtactacaccctcattgtatacgccatgatgagcttccaatggacagctgtcaagttcttctggttcttcttcatttcctacttctccttcctctacttcacctactatggcatgatggctgtctcaatctcc

SEQ ID NO: 192120 - DNA, 585 bp, Zea Mays
cgaagatgaagccgccgcatcgcacgatagcagcagcggcggtggcagtgccgcctcggaagagccgtcgacggccgaggccggcggcgaatcagccgatagtccacccgagccagcccatgctttggagtcaccagcagagtctcctggcccggccgctgaccacgagagcggcagcccgagcatgggcaccggtatcgtcctggccatgctggccgccgctgccaccgcgatgcttcctttctagatgaccatggtggctttgagctagcatcatagtcacagagcagcaattcttctgggaatctatgttctcatggtcatgcatgggaatgggagtcgatatgactacgcttattaggagtttatgaatttctcctcaagatatctaggcctttgtttcatcctttgggactggttggttaacttttttgcatgtttttcttcgtttgtaatttgaatgacaatcaatgaatttattgtgtagttgtatttgatttgttttttgttgtatgcatgtaatatattattagagcacttgtttatctatttttcatcataccatggtttggtgagtgagcatct

SEQ ID NO: 192121 - DNA, 779 bp, Zea Mays
catggctagaactagaatgaccaagagatgctgaatgcatttcatatactttgtttggtgcaaatgcggaatttacagagctagcatcgacaatgtatggctcgatcactctatcattagtaggataatgcagccttggatcctcataccgctgatgactttggttggtatgcgcataccagactctatcgtgaggacgtgactcattataaagcatgggagtatgaccaccattttgctctttaacataaacaccattttccaatctaacatcttgacctcccgcataatgctcaccagggcggcagtaatctggacaagaattagcatggtgaccgggataatcattaatcatgcttggttggtcaaaatgttgttggactggccgagtccaacgaggattcatatagataggatcagtcaccgaaccctgacccttgtggaatagtgaaccacagtgatcacatccactgttcccatccaaaaatttattgtgcttgctcaaatcaccagggaaacctgcattttgctgaattacagcaccaggtggaagccagactaaattatccatatgtgatggtgattgagcctcataataatgatattttggtgactgccttacaaagtcgtcaggaatcctgtcatcaaaatcctccgctcctacttggaaccttgcagatgacggtgaaattggaaaatccctcgggtcatgcactctgtactggcttggtgagacataagcagggctccaaggagaatccatctctccatacctctga

SEQ ID NO: 192122 - DNA, 326 bp, Zea Mays
ctagggtttctgaccgttggatctgagttcaacgcttaggattagatctagcctttaatgaatcggtacgtgatctggttcgtcggatccgtgatcaagggctgcgatcaattatgcgcacgacccgatctcgcccacacgtcgaccatccaacgaccgagattctattttacgaaacgatacccttcggtctaatctacgccctccctgatcgaatcaacggccagcgtgctacgtgcctcacacaaaacgcccgccggcggcgagaacccaccaaatcccccccacggccgcgctaaggtctccggcgagcaattcctactgcg

SEQ ID NO: 192123 - DNA, 306 bp, Zea Mays
gcagtgcttgaagaacgggcaatgctagtgatcacgtacatcctccctcttcctcaagcgcttcccaatgcagtattcatactcctcatccttaggttcatgcaaatgacattgcacgtacttgtactaatatttcctaagcagatgttcagacgctggtcattgatatcgcgcatgctggacctgctctttagtgacatacttcttttcatctttttggggctggtctcctggatcggccttattttttccacgtagcccggtgcctcgcaggtcccaccatgttgttgtcgcacgagaagacct

SEQ ID NO: 192124 - DNA, 405 bp, Zea Mays
ggcggatttcttgtcccattcctgcaggtgagcgcgcacagtgtgaaacataaggggagttatagtattggttccaataactgttcttttgcaagttacgggtctaattttgttgttccagtgctatcctgcctttgaggggtgactgtgattacagcgagcagtgccagatgaagcagaagcggagtgcgtcccagtcattcttggttccttgtgacaacgactatgtcaagaagcagcgagttgcccattgtggtggctttgaagctctaaaggttggatcaagatacgctatccatccatccttagcatcgtcatatgataagtgatttcatgagtttcaactcttagtttggttctttgcaggagttagatgataatgtagcttccatgaagcaatgcatc

SEQ ID NO: 192125 - DNA, 450 bp, Zea Mays
tatttgatcagactgtatacatataagatgttttaaaatagttccaatcagtattaaataggaatcatttaccacatttttatgatcgatgtgagtggatagtctagcaaacgatgtcgttggagagttctatgtggttgtaagaccaaatgtcatcctgtgtgagcatttcttgttggggatattatacatggtagatgatactgatgcttgtcttccaagacttgttagcacagaggaaacagaaaagactattggtgacagagaatgctgacatgttaatggtaaccgcaaaggtaaacttaagcgacacattggtaccaagtctgtcggaggaccttgagaatcattcgctgttctaacaagggtttcacaaggctttctactatccatctagctatattatcgaaacaaaaaactgctttagatgttccattagtagcaatgaag

SEQ ID NO: 192126 - DNA, 542 bp, Zea Mays
atttgcgaagggggcaggtgtcctcgccttcaacaatagacagcaaggtagtttcctaaagaagtgattagtgagtttgttctcagtttctttgatctttaggaaggtgctagtgctactgctgaatctgatatcatgaacttgaagcaagaggtttcttatcttcatgggcaggtcaggggccagcagctgtgctgtgaatcatgcaaccaacgtctcctaaatacagacaggcttagcgggtaagattttggtccttttttccctcactgttggacatcatttgggttgtagacttgtactaaactgaggccctttctccagacctgaaagctcatcagtggaagcgtcaccgactgttgggagtgatcctgcatttgacatggtaagaaggcaaaatccctttcgttctgctttcattataagtgggaggaaagtctgttatcaggttaaaaagaagagaacatttcagggtgatatcgagcaatcaaggaagcaagccgcacagcattcgccttcttcaagagacaagccaagtcacg

SEQ ID NO: 192127 - DNA, 407 bp, Zea Mays
gatgatctagcattgctaaaaaagaatatagtaaagagaaggactaataaggaaatttgtggtgctgaaaagaaacctggggttagcagaaacagaagctctaaagatatccttgctaatagagattttagaaacaagcatcagaacaaggaggatagggtaaaaattaaagatcggagatgtgggcttcttgtccgtgggagtacccatgatactgaagataacatggatggctatattccatatgaatggaagcgtacattatgttcatggatgatagatctgggggttatttctgaagacatgcatgtcaaatacatgaacagcaatagaaccagggaaatgttggcaggtaaaattaccagggagggtattttctgtgggtgctgttccaagattctcacaat

SEQ ID NO: 192128 - DNA, 610 bp, Zea Mays
caccaccacagctgtcatcacttccagtatcatcttgctccaatcagaatctagggtcaccagttaaagtccagcttagctcatctcagtcatcttctagctctgcaacagctaacaagtcaagattgaggtggacacttgagcttcatgagcgttttgtggaggccgtgaaaaagcttgaaggtcctgaaagtaagttggtcattctgctttatctctcacatgttttcaggttatcttaataaatagtttgttcatatatttacagaagcaactcccaaaggtgtgctgaaactaatgaaggtagaaggtctaacaatttatcatgtgaagagccatctgcaggtatacaattgtgtccgctgaaaaattaattctcccttctatgttttcattaacttacattttctcgcatatactcttcgtatagaagtatcggcttgcaaaatatattcctgagcctaaagacggtaagcttaaattacctactcactgtatacttctttataatagcactttttttctgaaaagaacaaacatcctaaatgctgactagataagaaggcttcctcggaggataaaaaagcacaattaggaaagggcagcattg

SEQ ID NO: 192129 - DNA, 430 bp, Zea Mays
caagagtgccatgtactcttctatagcgcgacaccaattgggatcgacaatagcgttatggacggaagacagaacagacgaaatagacaaaaaagaagtcgtagagagaataagacaatcactagctgtagggcactgacttcatgccgagtaaccattgggtgaacatgacgagggtcatggtggagaacaagggggtgatacactgacgactcagcaacagagcgagttatggtaccatcgggtacacgtcgctgatagacgaataggatcggcgaagcgcggtgtggccgcgcatggcgcggtgggggcctctgtggcctcgcgtggcacaggagatcagggtcgcgggtgtcacggtaggaggctctggggccacatgtggcacattaagtggcaaacctacaggaggaaagtgagaaggtggcgc

SEQ ID NO: 192130 - DNA, 484 bp, Zea Mays
atgtttcttcattaggtgaccttacattagtgttttttaccgtctagtaaaaatgcactagggttccggataggcatgctgggtatctaccttatagaactatggattattatgatggatgtatactagtcatataattcagtgatttatttgaacttgggtaccacgtttaatctgcatttctgtgtttccggtggttattttctattaatgtacaaatgtccttttaagatgtgtttggttcaggggatggtgactagggaaggggctatcccattttgaggggtttgattgcatcctgcccaccccaccatcacacacaaaagctgggacaggctgatcctgccaaaactgggtagactacgccatcctctcactccttgatctcttgagtcttgacatcatgggtcatgccttctaatccctccacatcactcaccgacagaaaactatgatcatctcatccctcataccataccataca

SEQ ID NO: 192131 - DNA, 503 bp, Zea Mays
tcttctaaacgatgtgcttcctcctcaagtgactgagcaagctcatacacgcgccacattgcaaagttcactgacacctctttggccgtatctggcgaatccataatctcgtttccggccaaatctttcaactccctcccaactacaagcatttttgcaatggcttgtgcgaggtcactacgaaccgtttcaaatcgggttatctgcgaagggaaaccataccgacattatggattaacatagaactaaaaatttatacaaaccatagccctaaaattggtggaagggaaaccttaccgacactgagcgaggtgccgagcactgaatctgctgctggggagtacatcgcatctggctgttgttggattcgggatcttgctggtgagtttgctgggtgtggaacgtgcctgatgtggccacgcaggtgacgggcttgctggtggagtgctccttgccgctaccgtcgcctgtaggcttggcgaggattgacactgacaaacgac

SEQ ID NO: 192132 - DNA, 331 bp, Zea Mays
tctaaatctttggatatattttaacctttcgagtctccttttactgcttccctatatcaacttcggtcttcctctcgtgcaatgagcggtaccgtttttcgacgacatgtgagaagtagcatcgaagtccatgatctagcctgtctgggatggttgcaccatgttgttgaacgccgcaatgagacctgtctgatcccattgtggctgggatggcgatcgctaactcgataaccaccgctcccgtgtccaccctcatgagcaccagtgttgccgacactggtgcagccgccaggagggcaaggaggtgaggaggcagccgcagcgagggccg

SEQ ID NO: 192133 - DNA, 357 bp, Zea Mays
ggatgactaatgtcagataataggtcctatgtgtgtactactaaacgctcccaagccgaagctatgttcaggtccaggtcccagtcgaggctgcctcctaggggtcgttcccaactcttttaggtatgctggcatccagtctcgacacgtcgagcctacatcccacgggggccaggtaccaaggaggagtcgacaacaccacacacaacaggggcgaatagtatacagataagtgctaatattgcttgataaatagtactcaaaagtaccttataaaaagcaaaagttattacatccgccttcaagcggagtcctagctccatctctactctacaggtatggactactctgcaccag

SEQ ID NO: 192134 - DNA, 408 bp, Zea Mays
accagcatcagaggacatatgtgtggtggcgccggagtcaaagaaccactcgttttggcgtggtggttgaagtatcatggtgctgaagttggagaggagcgcctgctgatcccaggatagagtggtggtagtcggaaatcctagcggcggtggtgtagaccatggttgttgtggcgcccctggctagggaccttcaatgccagcgatcaaggattgagacagggagtggccgactgttgatgtggcgccgagggagcagccgacatcctgggtccgggccacatctaaatagacccggtccaaggattgtagaagctaggccaggtgttggtcgatgtagaccccgacccatgttgtttggtgggaggaccagagtgatgcccgcctttcttgccgccacgcgtcccg

SEQ ID NO: 192135 - DNA, 645 bp, Zea Mays
catcgttggagtgatcccgtagtctctgaccatcaaatcaaagtattgctgaccttcttcaacaagaccagcatgagcgcatcccataatcacagaaaggaatgtaagaccatccatatcaatgccctcaacttccatctgtcgaaatacatcaagggccttttggctgtaaccatgttgtgcgtaccctgatagcattgagttccatgacagcaaatctctatctgtttgcctctcaaagacacactgagcattctcgatgcttccttttcttgcatacatactaacaagtgcactgctcacacagagtgcatcatggcatctgtgcttgatagaaatagcatggaactgcctacccaggtcaactccagctgccggactagcacaagcatcaatagcactagagattgtaaactcatttggcttcaagccatgcatggtcatcttgatgaatgcatttgtggcaccattgcaatcaccagcttgcgcatagcaagtcaacattgcagaccatgaaacaacatctttctggtcaatcattttgaatatagaaagagcttcttcagtgctgcaaagcttagagtaagagaccataagtgcagttccaacagttggtgtacactcatagtttgtcttgatcacctg

SEQ ID NO: 192136 - DNA, 1479 bp, Zea Mays
agccgatgagtcctcatgtaagggtggtagccctttgtaccgatgtcgagatagctgggcttaaaggcaaagctatgctgaagatagccgaggtcgacgtagttgtggtcggtttgtgttggtggagcttcaagcacatgagaggcaacagagtgatgaaggagacatgtcgaggcaattacgtgtgggggggatgctgaggtcgatgcagttagggtcgatgtagatgaaaggcgataatgcaattgaggctgacagggaatcagggatggaacaggagggttgatgttgacatcgatgcagtcaaatcgcttgaatcgaggcatgggttgggtttgccagacccagcaatgtgttcggaacgaaaacgtgtgccaatgtagccaataccagatgaacgaggtagagggcctcaatcatatatcagcatccgagggaccaacagagaaggtctcaatgacgattgcggtgtgcagaataacaggtagaaggtgctgatgtagcatgcaactgtcgaagtagatgatgttggtatggacgaggcgacgacactaacaacgtggttgtgctggatatagtgtgggagcggacgaccggacgcgtcaaacccgaaggtgagcaatttgtgtgggcatggtcgagtagtccggacgtagggcatggtcgtagtggtgtagcggtggcctcgcggagggcggcgacgttctcatgctcacaggtagcgctctgagttgacaacaaagactcgatgagtaggacgaagaccttgtgcagatagatggtgcaacaaagattgcacatctgagtcatcgatgcacggggaacgacgatgtaggtgtatcgatgaagcgggcaacaatgttgcgacttgatgaggcaacacaacagaagccctgttgctcagagaagatgcaagtagtactcgataatggacgtcacaggagttgagtggatcagacataatcagttgtacggatcgagtgcgaacgaggtggagcaatgatgggagaagttggctgagccgtccgatatgtgctggcaatgacaaaccgacgttgtagacgtgtggacaggatgatcgagaagcaatgtgggaaggcgccccctcgacattgcatgctctaccagccacatggttgaagaagtatattgcggtgtagtcaatgtcgatcccaatgctggagtagtgcgcgaggtcgacgggcggtgggcaactcaatccagattagtgatcggacaaactaaaaaaggatattgtagcagcatatgagattcactgtggttgatgaacttgccctcaagaaacctctaggcacgagagggctctgtgaatgcgacttggcaaatcagtcagtgacaagggtagggaagcgtagaggagaggcacaagtgatcaaagcagcaattgtttggctaggatcacatgcaggcaatcagatcaatggtggcatgtgtatagcagtaggcaagagattaggt

SEQ ID NO: 192137 - DNA, 618 bp, Zea Mays
gttcagaccccgccttgccctagaatgttcctctctgcagtctgcttgctgctgcgatggtgaattggcgattccctagggggcggtaaccggtaactcgtcagctgaactcgattgtgcctgggaggtttttatgaagtgagatccttcagctcgaggacgatgagatagacatctcagtttcatacctggaatactaacaacgcgaaactaatgagaaatctaagctaaaaatgagaataaaagaagatgagaatgccctgttctgtttcagtcttgcaagttctgaagacacaggaaaatatttttgattcgtaattaaactaattacagttttaaaagtgctccttctgctttgtgacctggatgcactaaaaaaaattgtcgagacatacataaccataatttctagctgtcgccaagagggaaagtatcaggcaccactgccctcagaacatgggctagcgtatggtagatgggcatcttcaggtctgtctgtcgacattgttaaatgcagggcactgtcctatttccagcaatcagtctccaatcccttttcctatatatcaattatactggggtcattctttccttccgccttggcttgcaccatttcct

SEQ ID NO: 192138 - DNA, 1222 bp, Zea Mays
aaagatgagcttagcagaactgctgctacgttgcttgcaaacagtcatatgtttatacatactgcaaaagagttttggttgcgagaagccaaattttgttgttctcgtaagtagaaccacaaccgatctatttctattgaacaatagatgcaacgtctcaaaagagtagctatgtagaaggtaactaattgttcttcatctttggtctttttgcaaagactgaaagttggtcagcaccatgtgtttcttcctataaaagagggagcaatataggttaattaaaaatattaagtacatatattgatatctatatgggtattatcggatgtgttgaaaagtagttaccttgtcggagtcatcaattgcattgaaatttctcttgtatgatacactgaggttgtcaaagcaactgtaacatatcagattaaaagatgttataacaaaacattgtatattttctggatgatatgaaaagaaagatataaaaagtagacccactaacctagtctgatcaatctccataagctgtaattcatgtggtgatgctgcttctgaaccagaggtcttacatagcaatgtacatgttagttttatttttgcggattaagatttataattgagatgttttgatagaaagcagtacctgtatatcttgtgtctttggctctattggtactaggggtggtagctttggaagttgagatgagcttgcgctgtggagaacaacaggctcttcttttttgaacacggaaaggagtaggtcttttccatgcctctttttgatactaagaatatcaaatgttggatctttgttgtccttattaggtcctctctttttaatactttttcctggaaacaacttggtcacaacagtcaatttctcacccacaattgctttaatctcttccggcaattcagatttgttgctttgtctcagtaatttctctacggttttcccaataagtgatgtcgctctctcatcaaagagcacgaattctagctcataggtgccatcagtggcatatagagatattttatacctatttagagtataggttatagacattgataaaatacaagaagttttgtgtataaaaatgattgtacagagagtttacctgtggaccatctgagaggagatgtggccttgtttacaaatgtatgtttttccttcatatcttgttgatgtattgcattttgtgcatccttgatagaaccaggg

SEQ ID NO: 192139 - DNA, 295 bp, Zea Mays
ggcatgtactctacacctccggaatttgctgcagatgtgaggctcactttcagcaacgctatgaactataacccagctaacaatgatgttcatttaatggccaaaactttgagcaagaactttgagagccgatggaagcttattgagaagaagctccctaaaccagatgagaagcctcctcagccagatgagaagcctcctcaaccagttgagaagcctcctgtgaggaagcccacaaaaaagaattcaactaagagagtttccattgagaaagaagacctcactaagaaaaaac

SEQ ID NO: 192140 - DNA, 484 bp, Zea Mays
tggatagccccatgtgtgccgttttgaaccggctttgttataaggaaatgtgactgtattgtcagaaaattgtttccacatactgtttcatattttgtcttgtgtccttgactgttgatcagcttcggtaatgtcaataatctgcaatttttgtgtgaaaatgggcggatacataaatttgcaaacagtatctgttggcctgcatttatgcttcaggagtatcatcagcaaaaaattcttaatgctcaggccatcctgaaagctgataaagaaagcactgggccttcaccaacattggaatctttctcaaatcctgtagatattcttgatacatcagaatggaacgagtattctgtaaaattaagcataacactttgctcatttctccttcctcccaaggagatcaaatactgccctgctccaactgatgttacccaaatttcactatccatctcattggcttactgggagcaatgtgcaaggt

SEQ ID NO: 192141 - DNA, 1913 bp, Zea Mays
ctgaaacatcctatctccttgttgagcattgaggcttccatgagaactactaggcagccaagctgtatctccaaacctgtcgctgttaaaaaactcattatcaaattcagattgtttgctgaaacggtcaatctccctaggcgcatcccatcgtggaaccttttcatgatggaaatcttcaagtgcccatgaagaatcagttgttcggcctgttgaagattgcctaaccgaaacactcccaaatccatcattaagatccttcttggggaaatttcccctctttgaagcaaaagggtcatgctgtggcctatgatgcacattctcttgttctggaaatgcaggccttgaactatagtgtgcagtttctctatcaataaatgaagggcgtccatctgtaagagtgcgcacccttggaactgtctcactgaacctgttaatactagaggattccaatggtgttgaggtattgatgcgctcattcattttgtcaatatcctttctgtcaccaaagttagcagagtgtgacaggtctctgtccttgacatctccaggaataaattcatcattgacagctcttgtgctgtcaatgtttgtttttgcttcccttttagcaattcttgcctccaattctaagagcttctgatgtgctgcctccctgcgccgctcctcctccatagcgatcctctttctttcctcttcccttgcgattctctgctcttcagcccttctagcagcttctagcctctcttgctcagcttgccaagctgcctgctttgcctgctcctccgccagccgttgcctctcctcctcttctcgtatcatcctctcctgttcctcttcttgcttccgagcaacttctctggccctttcctgttcttccattacccgttgtctctcctgctcctgtaccctcaagatcctatcaagctctgcctcaaacgactcccttgctgggtcatgaaaatcagctggtttagctgcttcttttttcttctttattgcagtcaagttaacggcagaaatgctgtcaaaaccactatcatctattaaaggctttgcaggggaaccagtcagccgcttctccctgccaaattttgccactggatcattatttaaaggccctttattaccaccaaagggctgcactttggaaccaacattattctggaaagaattcaacctaggccaattatttgaactgtcgccgtaacgctcgctagcagcttccaccccattctgtccataggcactcataggaggctccttaccattactccacacatccttggatccactggcagctatgttttctcggtatgattgcccactgcttcctctgccaccactgtaaggtcgaccatctgttcgctccctgtcgtgttggtttgacacgggagatcgccacagcctgtcctgcccaccttctttatttgttgcagccacatctctcccaaacatctcctttttgaagggatccctcatcgatacataaaggtcgcgccctggaagcatggcctcagtcctgccaaatcccctctccctgctgtcccgctctggaaggctcagccctgtgtcacgctcgtcatcagcccagtcagaatcatacctaagccggaccatcggaagcggccccagatcaggcttctgcaccctctcagcggaagtgcggccaccaggtcccaagctgacaccagaggccagcgtctcagtggtccgcgaggttgtcacctgtggccgcatcccaagagatcctggtcgcgcctctggcgtgacgacccggaccccatcagcatccttctgccgctgcgcaggctgcgggggtgttggcggggcaacagctgctttcaaggacgggaagtcctccccacgcaagacgccggctttctccgcaaacccatatgacggtggcctgg

SEQ ID NO: 192142 - DNA, 819 bp, Zea Mays
agccatcgcagcataaatcatttttgttgtgagaacaaattgaacataaacagctcttcccgctttgacacgggaaatctgaaatggtgcaggggagaaaagcttggacccgcatcaaatcatcttcgatacaacggatggggaacacactacttttctggacattggtcttgagccccgaggcttccccaaaaaaccgaaggatctccaggaccaaattgatgtctgaagccaccggcctaagaaaaaccacagcgtcatccgcgtagagagaaagcctgtgatgcaaagtcccagatgatagctgctgaagtaacccttcatcggaagccttttgaatgagcaagttcagaacatccataaccaaaatgaacaacctaggggagagtgggtcgcttgccttagacccctttggtgcgaaatgatctccccaggaacgccatttagcaagattcttgtggaggaagtagccaacaacccactaacaacatcacaccaaatctgcccaaaccccatcttcctcaaaacctcaatgagaaacggccatgacaccgagtcaaaagccttggatatgtctaacttgaagaggatacgaacttgtctttgttgatggagatacctggccgttcgctgcaccaatatgaagttgtcaagaatgaacctttttttgataaaagtcgtctgattaggtgaaaccattgcattcaagtgcccagccagcctatttgccatcatctttgttaccagcttggcgaagctatgtatgaggctgatcggacggaagtccttcacaagtgttgcaccctcaatcttcggcaa

SEQ ID NO: 192143 - DNA, 770 bp, Zea Mays
caattttggtggtcataacatggcacctccgcattcagtaccaaatccatataatcttggtccattgcctattggaacttcagtgaggccaccgtcaagtatgtttgctcctccagattttccaagcgtatcttcagctgatgcataccgtcaacaccatgaagtcactgccatggtaaggagttgattgcatggacatattttgttgcaaaactaagacagttcaaaatttctccagaggctgtgtgccattatacttcttaaacattatagaaatgctgttccacatgtggtttgtaacgtactctgtatctctgcataatttaataacccatgtgcataatagtggtactggttgatatctaacatttacatgtatttttttgtggcacacatatcagacattttaagaatgatatatacatctctggccaattgccactaaagaaaaccagacagaggtactttctaatttgttttgcacagagaaatacattcgagataccaaaatctcataaagcctgagagatgcacttctgcagttggccatactttactatgccctattcccttgtgtatagcttggtaacagggtattttagaatatttctctaggtgtacaagctcattttcttctttagttaggctgctatctgttcattattcttttgtactgctatctgttgattacttatttttcgacttttattttttaaaaaatattcagggtgagaacgttcctgctccgtttatgacatttgaggccactg

SEQ ID NO: 192144 - DNA, 280 bp, Zea Mays
cccgtttacctttctctagttctttcagtcaagcttcgaagccatttgagttggttcattgtgatctgtgggcatctcctgttgttagcgtgtctacttacaaatactattcgatcattcttgatgatttttctcattacttatgtgcctttcatctgcgattgaaatttgacacgttcactactttgtcccacttcttctcatatgcttccacttagttcgattcttccatccaggccatctagtgtgacgatagccgcaagtttgataatacttccac

SEQ ID NO: 192145 - DNA, 322 bp, Zea Mays
tgctgtcattatcaacttacagaaatacagtggtggaagatttgactccatgacaaaaacaaaaactgttaaagagctgcttctcaaattccataatgttgaagattgtttgtatcttgtgcaaaatttgatggccctattcgtggatgaagaatctgttacagacgaaccatctgatcaaagtcagacaactgatgataattcagaaaatggcccaactgaagagcaggacctttttagccaagggaatgctgatcttctgaagagctgggtggtgaatacaatttcttgtgttctaaaaaatttaaagcttacttctaaa

SEQ ID NO: 192146 - DNA, 379 bp, Zea Mays
ccgtgatatgaaacaaggatgtttgtctgtctgctgaaaattactgatatagaacagatttggcctcatttttatgacggggtgtagggatagaactttctttcctggaccaaaatcatcaaattaagagcgcatatttctggggggttggatctgactgtggctacagcctccatgaaataaaaagctatcctaattttgttgtcctagtttggtgctttggtgaactaactggcaccttggcttatttgccatggactcatggtcgcatggacttatggaactgaatgttttgctttctttcaggtgtcatttttgctaggtctattccctgtcctcatctcatggatctactctgaaatcctcgaatacaagaaat

SEQ ID NO: 192147 - DNA, 328 bp, Zea Mays
caaatgccgacgtgttcgcatgggaaccgtcgcagatgcctgggatccccagggaggtgattgagcaccatatgaagatccaccctgacgccaaaccaatgagttagaagcctcggagacagtccgttgagtagcaggacttcatccgtgaggaggtccggaagctgctacacgctggcttcatcgaagaggttcatcacccagtgtggctggccaacctagtcatcgttccaaaggcaaacgggaagcttcggatgtacatcgactacaccagccttaataaggcttgtcccaaggacccgtatccacttccacgcatagatcaaat

SEQ ID NO: 192148 - DNA, 1043 bp, Zea Mays
gaagttaatttatgtgtccaatcttgtctttggagatgcatctgtattcctacttccttggaaacgtctgtttggggtgactgattctcaggtaattaattataaaaatgcttgttaattttttgcatgccttctctcagttttatgctttgatctcacagagttatttgttctgtattttgaagttcagttcgttttttctggcaacgttgctctttgcatagttgttatgctgcttttgatgcagttgatatttcgaagagtttggacaaatgttcatcaagtgttaatgccactactcacagtccaaataagaatgtctttctttacttaccatggtattaagtatcatttgacattatgtttctagattgacattgctatgagggaaaatgccaagaatttatactcggtgcagctcaagtctattggaagaggtaatgctagaacacagttttgtttaggtgttagttcaattataaagtcatagtgtcatattattcataagttttgctttatcaagtaaatcatatagtgtgctgtaaagacagcaatatcaattttgttgttgttatatttattgtttgatatatctcttattgcatctcaagaacattctgaaatcacaaaatgctctcggtttaggtcttgacataggcacactcattgaagtaaggagagcacaacttgcatataaactttctgatgaggtaactcttttctcaactctgttgctgcttatttgttttttcttcatttgggatgaaatctacatcagtacttatagaacaatgtcattttatatccatgctatgatgcatatacactagctgagagtttagacaaaaataaaaggtcaattatcattggtgcttggaaaagataatagagtcaatgtaagcatgtttttgtttttaagtgacattctaaatttcttgcagattgctgctgagatgttccgtgagcacgcgaagcagctagttcaagaaaacatttcatcagcattagacatcttgaagtcacgtattccgtatggaacctac

SEQ ID NO: 192149 - DNA, 2157 bp, Zea Mays
gtaagcacgataccccactccctcgattcactgcaaattatgatcccccacccaatcaattccgaggcgagtcagctacaccccatccgggagctctagatgctcacgacaaccttcccaaaatgtcgttccctcatttcaatggtgagaaccctaaactatggcgatcccgttgtgagtcgtactttgagatgtactccgtagactctaccatttgggttaaggtcgccaaaatgtacttacaaggtcccgctgctcgctggttccaatccattgagcggaaactcatccatctctcctggtccagattttgtgccctccttgacgatcgttttggccgcgatgagcatgccattatgatccgcaaactattccacattcgccaaacccaatcagtagcggagtacatagctgaattttctgaactggttgataacctccatgcttatgagtcggccccagatcccctatattacaccactcgtttcattgacggccttaagggtccgatccgctctgctgttcttcttcagcgccctcccgatttcgatactgcctgcgtgcttgcttctctgcaggaagaggagacggaaactgaagcagctcgaaaatcggagttcaaacgcccatattattcagcagctcgactagaatcccccaatgcaatgaagccagcattccgaggtgcctttccattgccggcaccaccccaagcaacagatgacaagactcccttgccgatcaacaaatacaatcaatcagctgctgataaaatggaggctgtccgaaattaccgtatggccaaggggctgtgtaaagtctgcgcagaaaaatggcacaaggggcataaatgttcaactgcagttcagttacacgccgtgcaagagctttgggatatctaccagcatgaggacacaaattcaccccaagtggacgaggactcttcttctcaactttatatgacactatcctcagcagcttacacaggatcagttgctccgaagactgtgaaatttctgggcccagtgcagtctcagcaggccttaatattggttgacagtggcagtactcactccttcatcagttctgccctcgccgagtcattgcagggactatccccactaaccactacactcaaggttgctgttgctaacggcaattctctacattgttccactcagttggctggctgcaattggtccacacagggcgtcaccttccaaacagacttcaaagttatcccccttcaatattatgacatcatcgtgggtatggattggcttgaaaatttcagccccatggagatacactggaagaacaagtggatgctgctaccttataacaataccaaggttttgctgcagggcaatcttccagagcaccctccgcatacagtagtccaactccttccactcacagttgcttgttttgctgttgatttttcacaatttcctgaagacctgcaagcagttctatcagaattcagtgatctgtttcaacaacccgaagggctaccccccagtcgagcctgcgaccatgccattccacttattccgggagccagaccagtgtctattcggccataccgttacccgcctacactgaaaactgagattgaaacacaagtgcaagccatgctgtcttctggcatcattcagcacagtacaagcgagttcaactcacccgtcttaatggtcaagaagaaagataattcctggcgattctgtgttgatttttgtcacctcaacgcaatgacggtcaagaggcaatttccaatcccggttatcgaggatatctttcaagaattagcaggcgccagttggttcacaaaactagatttatggtctgggttccaccagatcatgcttcaactgggggaagaacacaagacagcattctctactcacgagggccatttcgaattcagagtgcttgcctttggactcacgggtgccccagcgacattccaaggcgctatgaacgccacactcaagccccttcttcgtcggtgcgttctcgtcttcttcgacgatatcctagtctacagcacggattaccaatcacatctgctcaacttgcatcaagtcctgtccttgctagcagctgaacactggaaaatcaaattaagcaaatgctcctttgctcaacggcagacaa

SEQ ID NO: 192150 - DNA, 488 bp, Zea Mays
gaagacggaatgggcccgggaggacggtttcaaggagatctgcaggtcatggattgttctgaggaaagaatcgcggtcgtggtttctgagcttcctggaggatgcacttgaatcaggattcatgtccgagggccaaaccaccaagaacacgagagaacgcgtgcggggacaacccaaacccaagggtggggacgggaggatcgcggtcctgctgtcgcagctcaaggagacgagcaactggctcgatcagctgctgcaggacgaggcggacacttccgcggacggtttggccgaaaccgttgaccagctgaagcagaaggtgtacaaatgcttgcttggaacggtcgaaaccgcggcgtcggcactcggaggaagataaaaaaattgatgtaatggtgacgaagacgagcattaagttattgggtgttcagtcctgcaacaggatgttggggtgaagaacacaatgaggggaagatgtaaatagtcgg

SEQ ID NO: 192151 - DNA, 427 bp, Zea Mays
ctcggagctggtagatcaactctatgcacagcagcaaacgtggggaggcaaggaagggctgtctcacttgcatcgccgggagatgaatcaggtgggtgtgcgctgtactcgtcctccatggagccgggttaagggagcagcgaagcagcgtcgcgcggggatacagcgcgggcagcgagggcaggcgatggcggacggcccgagcaccagatgcgcggcaacgagggaaccagaggttgaagacgcaggaaccaactggtggcggcgcgggcaccagtggccagtgctcgtgggcagtgggcagggagagccgcgctagtttactggacacgagacgcaggaaccagatgcgcagtgctcgtgggcagtgggcacggtcgctaggggtagattagtacacaggaatatacgacgttcattaaacata

SEQ ID NO: 192152 - DNA, 531 bp, Zea Mays
ttttagcacaagttgcgtttcatataatctggtacattgagggcaagggatggtctgtggctcattcttggtgggcgaagctggtgggtttagcaaggtatctatgttttaccagtctattttgctgattctgtattcctggatgtgcacatattcatatgtccacctatttgtagattcttcctatgcaggcacctttggattgcatctaatcatggatgttaatgcagggaccagccatgggaatcaccatcagttatctattttcttgcattacagctatctgctgcaggccttgctttggtcgaagtccttggaggaaggcttcaagattcttgctggttgaacttctcttttgaggttgagcaaataggttagtttactaagctatgtggataagcgtggactagacacaaatcagtatattcttagactgtaaatgtttactccagtgcatggcataaaagctgtgattatgtgtacagaaaaattgacaagatcaccttgtgtccctgttaagattatgtttct

SEQ ID NO: 192153 - DNA, 367 bp, Zea Mays
gtgacagtgaaccaaacacccacgcaacaacgatggtagttggcatccgatgcgacctgtcgatcatttgcagcaacacgcttgcaggagctatatctccaacctgttgaaacagttaagagggccagtgctcgccgactattctcagagctatatctccaacctgttgaaacagttagaggaccagtgctcgccgactattctcagctctctctctccatcccagctcagctgcgctagcgcttgctaattatgtggtctgtgtttggcagacagtggtagctgggagcagtttatatccttttcttgcagccatgtgctagttatgcggccttcatgtggttgttattggtgtgcatatttcaag

SEQ ID NO: 192154 - DNA, 602 bp, Zea Mays
ctgggccttcgctgccgccacctgcgtgaaactcctcctcgtccccacctaccgttccaccgacttcgacgttcaccggtactggctcgccctcacgcacgcgctccccgtgcggcagtggtacaccgacacctcctctcagtggacgctcgattacccgcccttcttcgcttacttctcccgcctcctctccctccctgcgccgctcgtcgacgccaccctcgtttcaatccccgtgcgtgacgcgacgcccttcgcgcatctcatctacctccgcctcactgttgctttctccgacctcctcctcctcggatccgtcctcttactggcgagggacgcgcagcggaaacagcggccgttcctcgctctcgctcttgtcgtatggtcgccggcgctgttagctgtcgaccacgtccactttcagtacaatggattcctcattgggttgctgctgctttcgctgcacttcctcgagcaggggtgggatcttattgggggagtcgtgttcgcatgcttgctgtgctcgaagcacctgttcctcgtggcagcgccggtgtactttatgtatttgttccggcattattgctgtggccggggtgtcg

SEQ ID NO: 192155 - DNA, 288 bp, Zea Mays
aatccgggggagaggtcaaggaaggcgagcgacgctcggcaggcagggcatcccgcgaggccgcgacagaggcggcactccgctcccaccaacccacaacaccgatcccctcctcgccgagccgccgccggggataagcgtggggaagtgagcagccaaaatctaagacaccgatccccgggcgtgagtcgcgaaggtagcggcggagaaaagggcggagccacaacgcggtcgtgagcccgcagccaccggttccgtgcggctagacggagagagaggtatccgctc

SEQ ID NO: 192156 - DNA, 352 bp, Zea Mays
attcaagtctgtatcattacccttttaagtaatgtaaaatggatggtttgctttggcatattgtattttccaaatgttctttgcctcagatgtcgtccaggactcgtggataggatggtacgggaacctcccatgggagggaggatactcctaacccgccaccaatacccccaaccttggctgaggctatcgctgccttagtcaatgcaacagccgataacacccgctttttgcgggaaatggcgggacatcaaatgcaacagcaaggcgagcgagcgtatccgcaaggaccccgcgaaacttcatatttggacttctcggagacacgtcccccattatttgtcaaggctga

SEQ ID NO: 192157 - DNA, 987 bp, Zea Mays
ggcacaatcacagatgtaaagaagctctccatgtcaaccaccgctgtgccgccacctgtggcaccaggcttctgcataagagcaataacaaggtatattgcagcatccttctccttccagttgtttgcccgattcgcggcatatgctgccaacatctgctggacctgtgctgacacgagtgcagccacctgctcccggtagttcgctgcaaggcctcgcagcaaccggcacgctgcccgtctgagcgtatctgcatcgctaccctcagagtcacgcctaacatattccacccaattgcactcaaacaactcctcatcctcatcccgcaggcgcaagttaggcacaacaacactatcacatatctgcttcattgcttcaggactcccaaataaggcatggtgcacactctcagcaactgtagtcaagaaccttatcgcagtaacagcaagctgtgcacgggatggagaggtggtctgcgccatgaggagcccccacacggcctcaacaaactccttcaggtatcccctaaactcctcctcgtacttctccatataaagctgcaggttatcacagacagcagcacggagcgcatcaggggcaccatctgcctcaacaggcggtgagtaggatgtggtaacgaaagttcggaactctgtcatccactggcgcatgttatcctcgaagaattcaggcaggtcgatggagttaagcgagtagaagatctcgcagcagaggcggaggcactcaaacacggggcggagctcgagcgggttggccgtggtggcggtggcctgaaggcggcgggaggcgaagaggaagacctcgaggagtggggcggcaaagatgtcaaggcagtacttgaggtcgaggcggagggcattgttgtcgaatgcgttgcggaagcgggagaagagcgacaccacggcggtgaggagggagttggtggcggcgatgtcccccgcgttgacggcactgcctagggaggac

SEQ ID NO: 192158 - DNA, 1021 bp, Zea Mays
gtcatcatgtgcaaaaaagcagcccgtgcaggattagcacaatctctctttgaacgccttgttatccttggagtgaagccattcaggctacaggtaatacctgcatatgatgtaccttggtgttattatcctttccctgcttcatcctgcaactttggcactccatgtataaaggctatagttttttcttgacttagttatagcagttacttacatttttatgtcatgataattactcctcattagacattttggaaactattgttttttgtacttcacataaatgagttcatgctgatgttatctggtttttcctgctgttatcgatctattaagttatgtcaaaacttgaaacaatggtattgccaggattaatagtcataattagaagtgagctgataactctataccatcagcaataattctaactcaaatcatctctgatttataggtccagtatagaatgcatccatgcctctcagagtttccatccaactgcttttatgaaggcacactgcaaaatggagtgactgttaatgagaggcattcgtctggaattgattttccttggcctgttccaaatcgcccaatgttcttctatgtgcaggtagcttctttgacaactatggaaatattgatgtgtttcatacacaaactcttatctggatgtgctgcatatccatactaatatctgcagatgggacaagaagaaatcagtgctagtgggacatcgtatctcaatagaactgaagctgcaaatgttgaaaaaattgtaacaacttttttaagaagtggtgttgtaccaagccaggtattttttcactcattgtgtgtcttatcatctcatgacctgctattctttactttatatgaagtcaaaatccctgatggtgtgtctcatgcatttttcacacagatcggagttatcacaccttatgaagggcaaagggcatacattgtaaattacatgtcaaggaatggctctcttcgccaacaactttacaaggaaatcgaggtcgac

SEQ ID NO: 192159 - DNA, 501 bp, Zea Mays
aaggagctgcttgaaaagcacaatgtctggcttgatgaagaactgaaagcaaaagtgaagaacttggctgaactaagaaaaacaaatatggatgaggaggctcggttgtcagcaagtattgctgaggcgagtctttgtgatctaactcatgatggatagtcattgtgatctatctcatgatggataaatatgatttagaacacatgcgctgacttaatcttcgtgtttcagcttgaaagagagatatctgaatcctctagctccttgaggcgaagcaaagaacgcatctctgaactggagcaaagggtatcctacatggaaaaggtaatttctcatgcagatgattgcagtattactgtttccatctaatcttttctcttcatgttttggtgattgaaggagttgcgctcaacaaaggatactgcagctgctaatgaacaacgtctgggtgctgagctttcaactgtatggtttaatatctcttaattctctctctttgtc

SEQ ID NO: 192160 - DNA, 366 bp, Zea Mays
attcaaactcgtaagaatgcataaataccattttttggaaggaaaaaaaaagacaaataacatctcacgactcacgtgttcctttgcgtgacctcatgtgaactgggcatgttaatttcttacatatgctcattctccagttcaactctggacgctggatgatagatgcttgttaatgaataatgcaatatttatttggtgctgtttaattaaaatcctgatgtattaattatgctgctgtccttctagtcattgcaaaataaagctgcgaaacaaaacgttgatttattgaacaaagttgaaagtcttataattgagtttaaacatgtaagagacgactatgacagtttactgtcttatattgca

SEQ ID NO: 192161 - DNA, 557 bp, Zea Mays
cctggcatcacgtctggaggttgatgaaggatccctggttattaggcagctatctacttcttctttcctgctggtgctgccttcagatggattggtgcaacaattgtgtggaagatggtcagttgtgcgtgctaattccttctcactttcttgcaaaagatggtcacgcctgatgaattcctctggaagcacccttgctcagttgttagaagttgatctggttggcatccctgtacatgcctgggaagtacccaccgtggagagtttgctcagcccttttgcatggattgagagtgtgcatgaagatacattgcaactaagagatctcagcagcttccgttgttctgtttggtgtctggaccctatcagcatacctcctgctagagatctttgggttgttgaacctctgcaactgggtactggggatggttctggtgtcagatcactggtctatccggttaacattcggtggaaggctgctgctggcactgaaaattcagctccccgcccccctccatcctcagtgatcactcctgcagaacctcgtcgacatttgc

SEQ ID NO: 192162 - DNA, 390 bp, Zea Mays
cttcatcattcttggcgctgatcgattatgacgccgaaaagtcagcatgcatgcatggacagtagtccactcttcgtaccgcgcccgcatcctccgttctccagaacgccgtcgttgatgtccggaactgagaaatttgcaagatcaccaccccggaaaggtggcttcgctgcattgccactatcaactgatccctcactgttgcaggcccaggcgaagctggattgaccgccgaggatcatcagaaaagccatcctttcatgtgtggtggagttcctgctgaaagtgtagtcagcgtttcatggccgacagtcagctgttcctgctgatattgtgttgttatacgggttgctgaaattgtagcacccacttcttggtctgcagtttgtt

SEQ ID NO: 192163 - DNA, 630 bp, Zea Mays
gtgacaatttttgtgcgaattactgacgctgcattgcatagatcagttccgttttgcatgtgtagggcggtgaaagcactccgttactagaattggggatatggacgcggttattctagtttttccgcggcggttttcagtgagtgcagaacttttaaaagttccgagaatggattatgacgtgtgcttcagttctgccgtttcttgttccgaatgtagaacgtggtatcaaagaagattcagtttatatggctgcgtatgcgttactggtatgaattgggggggggggggggctggtcggggctactggagaagatacacttacctttagtgacaatttttgtgcgaattactgacgctgcattgcatagatcagttccgttttgcatgtggagggcggcggaagcactccgttactagaattggggatatggatgtggttattctagtttttccgcggcggttttcagtgagtgcagaacttttaaaagttccgagaatggattatgacgtgtgcttcagttctgccgtttcttgttccaaatgtagaacgtggtatcaatagaagattcagtttatatggctgcatatgcgttactggtatgaatggtcgtcaaggaaaaacgttaa

SEQ ID NO: 192164 - DNA, 314 bp, Zea Mays
gcaactctcagcccctctgacaagggcaagggagccgtgagcagttcttccaccccgggtggtttcgggaggtcggagggagagaggcggcaccgactgtgtcgtgccgacggatctttcgtcacggatccaccccttgattcggaccttcctcagaagcgccagaagacagccgacgggattggggaggccggctccccagctcaggactcgcaaaggcgcgctagtcctccaccagcaccaccattagtccctccgccaccgctgccaccatcatctggcctgccatcgccacaggggcagcaacatcaaca

SEQ ID NO: 192165 - DNA, 438 bp, Zea Mays
cggcgccggtccctgcgaccacggagactccggggtgcactgtgactgctccttctccaacggcaccgtctgccatgtcacagagatgtacgcttcacttgtccacacacacacacacactcttttttttttaatttgcgttggccgcagttttctttgattcactgaaccaacaaaaccgcatggcccggtttggcaccatgataatctttgcagattcctcaaggggcagaacttctccggtgagctcccgcctgacttcgctgacctcccctacctcctccagctgtgagttgtcaatcttcagatcttggtcaagctgacctgtgcacaagctccacctgttaagagcaataggaataacggtgttgttcctgtgctgcatgcagagatctaagcaggagcttgttccatggcggagtgcctcaccagtgggcc

SEQ ID NO: 192166 - DNA, 778 bp, Zea Mays
gcagatgagggagcacatcaccaatgtttgatggcaatgtgccgcccagcatattgtggtcaaggcctaatatcataagagaagataagttagtgaaagtatctgggattccacctgataggttatttattgctagatttaccatttgtatgttcggtatttgccaaacttcattaggaatgcttccatttagttgattgtttgaaagatcaactaacaatagtgtggagaggtttcttaaggttggagggatgaccccactgagataattaccataaaggttgataccttctagctttttaagaaaggctatgttcggaggaatatgacccgtgagatggtttttagagagatctaggtagactaagttggaacagtttgtaagccaatctagaataacatcctccaaatggttgcttcccagaaagagtaagtccaggtttcggagcttgttaagaagaggtagggggccaatgaagctattgttgctaagatcaagggtatgaaggaaggtcaggtttccaacagaggagctgatttggccagccaagttttggccggtgaggttgagctccgtgactcgatatggtcgcgtggaactgcagttcacaccatgccaatggcagaagtggatgctggggttccaattgctcaaggctccgtgcggatcactggtgatgcccttcttgaactctagcagagaatgaaaatcttggctgttgttatggtgcgtcgagcaatggactttgtccactgcatgacatagcagcagcagcag

SEQ ID NO: 192167 - DNA, 407 bp, Zea Mays
cgtagatcctcatataactggaaggtggggctggacactgcgttgagcaggccgtctgctgtgttgcgacgagacagggcgtctgcaactgtgtttcactggcctgccctgtattccactgtgcaatcaaatcctaacagtttgctgacccactgatgttgaggtactgtggacagtcgttgatcaagcatgaacttcagactatagtggtctgtgcgcaccacgaaccgtcgaccccagaggtaaggtcgccaatgacgaacggcctgaaccaagccaatgagctcgcgttcatatgcggtgagcttgatatgccatgctgcaaacgacctactgaagaaagccaccggacctgctccttgatgcaaaaccgccccaaagcctgatcctgaagcatcacaatcaac

SEQ ID NO: 192168 - DNA, 346 bp, Zea Mays
tgagcatgtcgcaccgccttaagtcattgccgacttaagccgattgctccgttagtagggcatagtggtcaccctgagtttagtaagcatgagcatgtcgcaccgccttaagtcattgccgacttaagccgattgctccgttagtagggcatagtggtcaccccgagtttagtaagcatgagcatgtcgcaccgccttaagtcattgccgacttaagccgattgctccgttagtagggcatagtggtcaccccgagtttagtaagcgtgagcatatcgcaccgccttaagtcattgtcgacttaagccgattgctccgttagtagggcatagtggtcaacccgagt

SEQ ID NO: 192169 - DNA, 370 bp, Zea Mays
ggccttcgcgaaagactgaggctcgttgtcgtcgcctgcaagatgcaactctcccgctagaatgcgagacaccgggcccgacaccgacaagtcgatgagaaggccctccaccttacgatatcacaatggatcgccgttgtggcacgcgttgatgcgctcctcgtcgtgggagagcggggtaactagctacaccgggtcgtgctcgacacgagctggcgtcggagaggacgtttccagaggggttactgtcggtgctggagtacgtggtaccgacttgcgcccatgccaagcctcgtacgatgtcatcccgttgagtgccttggtgggcgagcggttgaggatgtagaccgctgtcaccaccacctctccc

SEQ ID NO: 192170 - DNA, 578 bp, Zea Mays
aaggggagggattcgccatcaccaaaccatggcggatgctagctggggatctcgtgggcaactggctgggtggtccggcggcaatttcatgtcgtgatacctccgccgccgcatggtggtcgcgagtcgtggccatgaccacgacaccccggcgccatagctgaagagagagaaccgggctgtgccatcgccggtgggctcatcgttgtcgcgcccccgctgtccaacagttcggtgccgtatcgccactccgccttcctcaccgcgggtagaagaccgagcagggcgccgccgacgtcatctgcggccatcgccgccattcagtactagcgtgaagatcccggggatagcaaccacccgtcacccgctattccaagttcactgccgattcgatctctgggaaggcgctcagagcaacatggttagaccgtgggggtgcgttgaagactcacagcgcctggggcgtcctctcgacgtctgaatcgctcgtcggagtcggggtcttgcggcgtaccgccttgtcgcgttgccgacctcgtccgcggcacaatctgctggtaagatgccttccaatctag

SEQ ID NO: 192171 - DNA, 1061 bp, Zea Mays
ggtaccggaggatccacttgaccacgctcaggtgtggctcccagtgatcgtgcatgtagagatagacatgttggacgacatttgcaatgtcgggcctggtgaaggtgagatactgaaaagcgccgacaaggctctggtaggcagtgaggttggtgacatgggcaccatcaacagagagctttatctacgtgtccaccggggtcgcatatagcttgcagtctagcatgctagtgcgctccaggatatctagggacgctgctggagaaataggccatccggacgacgttcaacaacaattcctagaaagtggtgaagaggatccaaatccttcattgtgaactcatgctgaagggttgtaatgatctggtgtaggaggcctgaagaagaagcaatgagcacaatgtcatcaacatataggagaaggaacacgatgtcactatcatgccggtagatgaacagagaggtgtttgacttagcttcagcaaaacctagcgagagcaaataagtggtaaacttgcttcaggccatagagggacttgttgagtttgcagaccagggaagggtgtgcagggtcatcaaagtcgattggctggctgcaatagatggtctatgtaagagtctatggaggaacacattcttgacatccagttgatgaacggtccaagagcgagagagggccagtgagggaatgtcacgaacggtagcaagcttcaccattggactgaatgtcttatcagtcaactctagggcgctgagtgaagccctggagaacccagtgagacttgtatcggttcaaagaaccattcgcctttggattatgtgctcagactcacttgctagtcatcacattgtcgcctgggcaacgggacaccaagtcccaggtgtggttggcaaggagggcctgccacccttcctccatagcgcgatgctagtgagaatcgacaagggcctatgaacggaagatggcatgatggagaccgacagagaggtttttacgaagaggaaaagacggttgacagggcaaagaaccctagcagcttgtcgagtcaccgttggatgga

SEQ ID NO: 192172 - DNA, 541 bp, Zea Mays
actcagcccactccccacccgagtcgtggtgctcgtcgccacgtcgggatcttgcacgcagtacatctactttgccttctaatccgcaccggtggatgggtaggctattagtaggattctaccttggcatcacagcaacacccgccctggctatctcacaagggtcccgttgcgccgtcgcaacgcgacaatggctgtcgcttgctgccactgcctttcgcctcgtcgtcaccatctaccgtcgcatcgtcgcctgccctcggtatcccatgcctattgtcgcctcaccgtcgtcattttgcggtggagtcgctgactctccacaccgacgtgttgatgcgcctgcttcatcctaacgtccagtccccgccagtccacccctttgttctctccaactctcctttagggtggccaaaatgaagtttcgatattcatgttattttagaacactactcatattatcacttaatctccatgttattatcatggaactatttttatcaaacgatctagtatattaatttgtcttatacgttatcgc

SEQ ID NO: 192173 - DNA, 394 bp, Zea Mays
gttgcacatggatcttggattcacatcttgtgtgtagagcaataatattcgtcacccactctataataacttaacaatcgttagattatctgtgatttttctaatccattttttaatcattctagcgtgggcgatcatgatctaggatgagcaattgcattctatacctgtggcggcggaatggttctacgcactggaacacgacaacaacgttcgttgacttcaccaaccttcgattcgactcaccaattcgctccagccccttggccgaattaaatgatctctagcgcattggcactgtcgaggaataccagcgacagttctcacttcttctgtgccggtgcaatgaccttactaccatgcagtaggtcagcatgttcacggcaggtctagg

SEQ ID NO: 192174 - DNA, 478 bp, Zea Mays
tgatgagacacaacaagctttcaatgctctaaaaacagctctaacccaagcaccagttctagcagttccagatttctccaaaccttttgttgcctgacaccctggagctaaaggatgtggctgtttaccgatgttctgcttggtgtttagacccgtccttggtgcctgcttcaagggagctttggatcgtcgaacctccctttgccgttgatgggatgtcttctggcaggagaacgctgatgtatccaatccgcatcacattctcgtctgccccacggagggatggatccgatcctaagcttcatgctattacttcgggcggggatggttctggtcacgtgcagcagggatcccctcctttttcaagacctccccattcgagtgggagaaggggagaacatggtcattcgggacgtctctcagttcatgagcgtttgggcccaagagatgagaacatgcagcagcggagcattagctc

SEQ ID NO: 192175 - DNA, 407 bp, Zea Mays
caggagagtcgtgagtgaatgtcgctggaggcaaagaatgtggtgagggcattattaacaaactcagtgcgattatcagcctgtacaaccttgatagggaggctgaactgtttgtggacataagcgcaaaaattaatgatgtgagtggctacctcggacttacggactagagggaaagtccagcaaaagtgagtgaagtcatcgaggatgactaggtagtactgcgcaccagagacactggcaacgggagaggtccaaacatcacagtgaataagctcaaatggtagagatgaaactgaactggaatttccaaagggcagcccacgtgcttgccaagttgacatgaatgacatagagtatgagcggacttattacatgagatggaattattttgtctaagcaaattt

SEQ ID NO: 192176 - DNA, 704 bp, Zea Mays
gtgttccttattttatattctccgtccgtttacaaagcaagcgaactcccaatttttatctccttttttattcaagcttgtagagttcaaatattttacagaaacgtggtggcaatctttctaaatatttttgtacaaatattatgtagtagtaacatgttcgggcttgaactccgggtgcagaacgacagagatatatggtatatagcctgagacaccatacatacatgtatataatgaataaatacatatatattacgccgtaccattattgttattctttagtttgatttgattgagtgaagctcttcagtagattcagatgcaatgaactgcggtgtggtgtactggtatgacctcgtgacattgaaaaggcggcgggcacgaggacgaccatgaccaacacaacatcgtggtgcacatgctagacaacaagcgtggcatgagtcggacgtaggtggctagaccgaggtcgtcacgggagcctctgggcacttgacctggttcgctttgacgacagacgacgctggcaataagttgtcatgtcaaggccatcggagtagctccaatatgacatggtgttcggtttgggcaactttaggtgcactctaccctatgactccgcaatttctagccacctcgccgtggtcgtaactcggatgtggctagacctttaagtttaattccgcaattatttcggtcag

SEQ ID NO: 192177 - DNA, 306 bp, Zea Mays
cagaaatgatatgcgaagtttctaagcgagcaaggaaaaaggtgttatatctcacagcataaccacctacagggacgtttccttcaacctcggtctcgacggccgaatgcctgctacaatcgggaacctcgcgcagctcaccacgctgtatggcgcctactacactactctccattttttccgaccctgcttttccttgtccgacgtacagagcttaaaactgaactatatacttctcaggatcctggcaggctgtagcttcaccggaggcatcccacagcaactcggcaacctgcagcatctctc

SEQ ID NO: 192178 - DNA, 500 bp, Zea Mays
gagaatgtggacatcgatgatagcgatatgctcgtgaacgaagtggaggtcgatatccacgtgcttcgtgagctgatgttgcgtgagattggtggagaggtagaccgtttgacgttgttgtagtatacgagggtggagcgtgctgtgaagctcatgaagaagctgacggtgccaggaagcctcggccacgccattcgccacaatgcgatactcgacctcagtgttggagctggaaacgacgggctgccgcttcgaggaccaggagacgaggttggtgcttaggaacacaacatatagacagtggttgtcagtagtgaagtgatgaaccgagagatgttaaatcatatgaggggcaacaaggacatcattaggacagtcaaaagcgactgttgtcctctagatgctaaagggactacaaatgacagtcaaaaagcgattgctgtcctctagatgttaaagagactacaaaggacagtcaagctgtcctctagatgctaaag

SEQ ID NO: 192179 - DNA, 420 bp, Zea Mays
gtggaactctaagtgactgccgaaacctacaaaattgtaaattgtgcactggtaataatatcaatccaacaaaaaatagaactcatcgtcaaaataaaattacctgaagttcgttgcctgtgtcgttgtaacaacctcgtcatcggcctctccatcggcctctccatcgtagtcctccccatagtcatcatcatcacgcattggtgaaccttggcgtgccagctcgtcctcctgactaggtgcattgtggtctgccgcctcgctcgcttgctcaaatgcattgtggtcctgctctagcataggtccacttgagcctatcgcctcacgctccggctcaagtgcattgtggcatgccacctcgcgctcttgcccaggtgcactatggcctgccacctcgcgctcttgcccaggtgcactatg

SEQ ID NO: 192180 - DNA, 321 bp, Zea Mays
ctttgtagagttgaaaggttggtgttgagatcgtatagaccgatccactggtggtttccctgcgcgaaagagcgtctgctactgtatttagccggccagccctatattccaccttgaagtcgaaaccaaatagcttactaatccactgatgctgaggtacagttgagagccgttgatcgagcatatacttgaggctgaaatggtctgtacgtaccacaaacttgctgccccacaagtatggacgccaatggtgtactgaatgtaccagtccaatgagttctctctcgtatgcagcgagcttgacatgtcgggctgcaaagg

SEQ ID NO: 192181 - DNA, 312 bp, Zea Mays
cacctccacacctgatggctattaccacgctcagcgcaaatacattcaggacatccttgatcgtgttggtcttactgatcaccgttctgtggacactcccatggatcttcaccttcgtcttcgtgccaccaatgttcctgttgcggatctcactcgctatcgtcatcttgttggcaatcttgtctaccttggcataactcgtcctgacatctcctatgttattcacattctgagtcagttcatgtctgcacccactacaatagtaccgtccactatggtcaccttcttcgtgttcttcgataccttcgtggc

SEQ ID NO: 192182 - DNA, 286 bp, Zea Mays
taaggtaaaaaacctacatcctccacatcctgcaccaactggagctggaggccttttacaccagccttgctccaacaccaggcctcctctccagcattggagagagcagtagagagatggggagtggcaccgttgaagataatatcattcctgtgtttccacaagatccaggcccctaaaatgatgagagaatttaatccccatttcaaagctttatcggtcacagacactgcctgcagccaccactccaaggactccgacccgggttgaggtgagaggacagaca

SEQ ID NO: 192183 - DNA, 360 bp, Zea Mays
aatgactagaaattttggattttctcccctttttggcaacaagtaccaaaaacgaagagagagacatggatacatgaatcaatatcctccaggaggaggataggacgaaggatatgatggagggtatgatgtgtagtcagggaagagggtcctcatcacgtcttcctcgaatgaggagtccctaggtagctcatcagccgcagaaaaaacagatgccgaagatgtacgatgatgaggaggtggagggtggtgatggtaaccagagccggatggcctagggtcaccgggagtgggtccctgacccgagtagggaggcggagggtgagaggatgattgacccggatccccatggtagggagg

SEQ ID NO: 192184 - DNA, 1177 bp, Zea Mays
ctttttcaactccttgcgaaattcgtagcatctggagcttggggaaagttccgtcgtgtgatctaatcccgtgctttttttccttcggtttgttcgagggaaacgttcttctgcttcggtattttggtcgtctgttgcaagcaagcaatttctggttttcaggtgtccgggaagcagcgttactgtccccatcgccgtcggggattaggggaaaattgcgccttttcctttctttttgcaagctgtgtcccactccatactggcttcgattggattggattggatagatagctcgtccgtggcgtggcacagtgtagcattgatagcccagcggagtgatgcttcgctgctgaagcaatcgcaggtttggcggagctaaggaaagagctgtagcgagcacgatgttagccttttgaattggcctggccctgttccatgagctggcgtgtgtgagaatggcgtgagtgtgagctgtgggcacgaggggaaaggtgagaccccccttggtgctggactgctggtgctgtggggggagcggcagtgcatgagatgcatgtgatgcggcattaaattttagtgtagccacgattgagatgaatctataggtgaagcgaatgaagtgactaatgtggtttcatcagactcaggaatttgttagtattcgtccattgccaaagctgactggtggatgtttaatctagtcgtagcaatagatttccaaccaatgtgtgtaattattgtctcgagctaaggtggcaagaaacttatggcgtattaagaattgtccaaggttttccatgcagaatgagctgttctttgatcagcttcgtagcaactggtgacttgagtagttagtaccttcctgccacgtatattttaatctacctggggtggttgggaaacaataaaggacaaaggattgcataaatcgtttgcatcatgtgggtcaaatttggttgccgtgcacctgtgttagtctcacatttggtatgtgaagataatgaatgcggaactgcagacaggggagaaggggtagagagaatttgtacatggtcttgtttggtgcaatgagtgcatgacccttgtaaccaggttcctggatcaatgaggtcgaagaacggaaacatggtacgtggtaagatactttaaacgagattttaacactacgtggacgaaa

SEQ ID NO: 192185 - DNA, 369 bp, Zea Mays
gaaagggatgcgggacgcgggcatggcaccggcaccacgggcgctggtggctagggcatgggaaacactagaacctggaatcgggcgtgcaattcgggcgcggggacggggagggatccaggccttagggttccgcctcctccgcgagcgccgcgtcgggattttaagcaagctcagtgggggagttcggggccgcgagcagggggttggggatttggagatatgcggggctgcgggtggaaggcggaggcggaggcaacgcgccgacgcggggctgaaaatttggggaccctcccccgagtttcggaatacggggaattgtggtgttttcaatatttcgaacgcaatgcggtggtcggaggaggcagg

SEQ ID NO: 192186 - DNA, 517 bp, Zea Mays
atagtctttgtaaagaagagcatggtgtaacagtctgtcacgatgcactaccgcgtgcccctcaacagaaccaattcgtcccggatgattaactaaaccatcaacgatcacgtgggcggcatcaaaaaacatatcattctcatcatccgaagatgacggatcaatcaggtcgttcattacaaactgattgaattcatcatctgactccataccgtcgaagtggtcccgtacaagacgtcgaagtcgcggcagcagctttcagcttctagacatccgattatcgacagcaccgtacaccacctggctgtcgcagtagtgtgacaatcttcaggttgcgggcgttgactcctacccactattcaccgttgatgttgagttcagttggcaggcgtcgagcgctctccaatgttcaccgcaggtgtctatttaaggttgtaggttgccgcatctaaatctgaaggtttccggcgtccgattcttcaggttggagaagtcaaatacttcatcgcacactaag

SEQ ID NO: 192187 - DNA, 562 bp, Zea Mays
cggtggcgcagaaggagggcgccatagacaaagacggtgacacaaccgtgacaatcgatgaagaagtcggtacagaggacgatgtcgttgaatcgccatggacgatgcgtgctctaggtttgctacgtctggaaacgcgtcgtggacgaaggcacgagttgatgttgccaatgcgaaacgtactaggtagagggccctaaccatgtgtcagactgtcagcgtctaacgggggccaacaaagaagacctccacgatggttgtggtgcggtatggcgggaatgctgttgcagctcactgttgtcaaagcggagtagatgaagtagtcgaggacaagacgacgacgctggcaacaaggttgtgctggatgaaggcgaagaggtaggcatggcgacacatcgaggttcttggagttgccgcagtgggagagtcacgatgcataggaagaagatcctccacagcgccactatagcgtgatgacactacttgaagtcggtgactcgaacagttggagaagaccatgtgcgagagacgtgcaccgacaagagtcgatggcgtgtagatg

SEQ ID NO: 192188 - DNA, 350 bp, Zea Mays
cctccatggattcagcgcagggctcaggtaactcacagtcactagtcgttgggccatggcgagcagtggattccttccccacgaaaggaagcgataacatgcaagctcattcccatccctcacctactaccccctttcgtctcgcttccactgtggcaactctaggacaaaaccctaagtgttcttattccaagggggtccatgcgcaaatcatcagtagaacttgaagcaacaagtgtgctgactgccacgtcaggttagtgaacatcctaatcatgcatggaagggtagtgaggagtgtggtggttgtgtaacaaattgcactgcttgagttgttgattctcaaactt

SEQ ID NO: 192189 - DNA, 534 bp, Zea Mays
aaaacagcaaggtgaagatcggatcgcagtcagacacgatggactggggcacgctgtggagccacacaatgtcggtgaagaaggcttgtgtgatggactcaatggagtacaggtgcaccaggggaatgaagtgacaatacttgatgaatcgatccaccaccgtcaagaggatggacttgctgtggaggcgtggtagtgcttccacgaagtcgagcgcgatgtccgtccagacgccctggggtacaggtagaggaaggagaagacccgccaggtggaagtgctctgatttgtacctctcgactcttcgccacctcgaccatctcttgcccccgcgacaacgttacttctctttgtcatgcttgtcagcttgggcgtcacacacgcttacccttttcctcttccctgttccgcgctacttgccacttcgaccttatccactgtgacctctagacatcccccattcctagcatctctggtatgcagtaccatctcgtcattttggatgacttctctcactacttctggacctttccc

SEQ ID NO: 192190 - DNA, 464 bp, Zea Mays
cttcacaccggacatcttccccggggcacttttgtggccttgaatcgggtcatgaaccctgttctccgtgattgcgtcgagctccacccttaggcgggtcgccacgctactgggtcatttgtgttccctagcgtcacgattgtctccatgatgatcgagatcttaccttcttccccacccatgattgtcgtcagcatgctcaccactaccggccctagcaccccttcctgtggttctatgggggtgcccccgatgtctctctcatctttccccatatcatcgccaccaccacctcccactaattgggttgctgactccgacgtctctttccacaccattcgtgaccccagagcggtctctttacctcatcctcccagccccatcttccctttcttcttcactattggtaatggaccgactatgcctgtcacctcagtaggtgacatgatccttcttggcccttt

SEQ ID NO: 192191 - DNA, 426 bp, Zea Mays
tttgttagagagatatatggaccctgcatacctagctacacgtgccattgtatgtcctaataaccttacgactgataaaataaacaattacattgtctcaatgctccctggacatggtgttcaatgccttagttgcgacacgatctcaaaggcgtctgaacgcatacctgattttgacatgttgtatcctactgagttcctaaactctattaatgcagcaaatttcccttgccacaaacttgagctaaaaaaaggcgttactgtcatgctgctacgtaacttgaaccagactgcggggctctgtaacggaacaaggatgcttgtagctgagatcggccatcgtattcttaaatgcgtagtactaacgccctccggagtcggagaagaagttttcataccgaggatcgcgcttaacactaccgacgc

SEQ ID NO: 192192 - DNA, 1596 bp, Zea Mays
ctgggatgagcaagattagagaggatgggcttgcactcttgaagaacctgtgtaagctgtcaatgaagttctcgacgccagataaccctgaggatcagatgttgctgcgcggcaaggtgttgtcacttgagttgctgaaaatggttatcgacaatgctggccctttctggagaacaaatgaaaagtatgaccccgtacctgtagttgtttccagccttgtggatttcaatttttaactaaattttatagaactacaactatttcggaaatagtttagggacctactgtgcatttcaccattgcagtgccgttgaagtataaaatgactaatgtctaatgggaggatggaggatggcgtagtgtataatgttaaatctatgtggagcattcttgtttgctaaggtgttccattaagcatacaccatattagctctaaaattatgtttcatcctttttatgctattatacataatatttctctaatttgcctactcagttatgtcaacatatttctcttattctatttttggtattcatctaaaaatatttattctatatcacgaatgcaaggtttgaaaacaaaaaggattaaggaaaatctataggtacttaggtataggttattaccagcacttagaaaagctctaggatcaaggtggatggctggtcggcagatgatttcttgtgaaagtgctgattacctatttgtcaaaaccctcacatgtcttcattctgaatctgtgttcgaatcaatcaggtcctgaggaacttgcttgaatagtctgaatgatatcttgattgttttcatttggggtttgttaagtttattgtatggttctttcactgaaagaccaaataaacaacaagtcacagggtccaaagcacactgaaaaggaagaaaatgggatggtattactacttggctgctatgtactataatagccacttggtcagaaaagggggcaaaaatgaatgttgtcctacatatagcttaactttgcactaatcaagcgaaataggcttaatgttgttttttccacttttttatttgtaaagtagaaagggtaattccgaagcaaatttattacaagagtatacatacagttatcggcctttatggttcaatgaagttttctttaggttacttttgtaatggagtgttgaaattactttgatcttgacataataaagcttggtacttttgaaatattatattgttcaaccttcgacttcaacgaatctcttacaattgtgctcttacagcattgagactttgtgaagtttctttaggttattttgggaaggagtgatcttgacagcaaataaaactatttgactgaaagttcttttctgattcaggtacattggagcaatcaagcagtatctttgtttgtccttattgaagaacagtgctttgtcagcaatgagtattttccagttgttgtgctccatatttgtgggcttactgtcaaggtttagatctggactgaaagaggaaattggaatattctttccaatgcttgttctaagggttcttgagaatgtccatcaacctagctttctacaaaaaatgacagttctaaacttgttggagaa

SEQ ID NO: 192193 - DNA, 453 bp, Zea Mays
cgatggaccctttgacgaagttgcatcccttggtcatgctgaagtgaatttcttgaaatataataatatatccgagcttgctgacatttggattcctttgaaaggaaagctggctcaagcatgccagtcaaaattgcatctaagaatcttcttaaacaatacaaggggtactgaagtcgtgaaggattacctggataaagtggagaaagaagttggcaaaaaggtgataatttcctctcttttcatcaattgtggccagtaatccagtataatcctatcttgacaatatattgacttacacagaattcattctacagattgctatgaggtctcctcacacaaacttagcattccagaaaatcttttctttgccaccagaagaatttcttatcaatgattttacttgtcacttaaagaggaaaatgctaacacaggtaaatgttcattacactt

SEQ ID NO: 192194 - DNA, 355 bp, Zea Mays
ctttcccttcctactcggccacaccttccacccccgtcgcaaccatcatgcacgctatcattgccgtcgtccactggagggggaaggtccccgccatcgacgctatcatctgatggatgcgcgatctacatcatcttcccactcattgggtctccaatcagagtcgtggtgaatgtggacggcagaggctggaagagggtgtctgcttctcctcgtggcatcatctgtagagctagaggtgaaggcatcatcgatctgctcgatggtgcacacgaggtggatgcggtagcgttgccatgggggaaggagacacacaatgacagcaaggcaaaggcaaaacagagggaatgcgaag

SEQ ID NO: 192195 - DNA, 751 bp, Zea Mays
tgcagatttcttgagcagatctgtgaggggacggctgataactccgaaattacggacgaactttcggtagtaccctgcgagaccgaggaaactgcgaagttccttgactgagttgggaactggccatgatacgatggtagaaatcttggttgggtcggtggcaataccgttagagctgattaaatgtcccaggtacgttgtctgccgttgagcaaaggagcatttgcttaatttgattttccagtgttcagctgctagcaaggacaggacttgatgcaagtggagcagatgtgattggtaatccgtgctgtagacctggatatcgtcgaagaagacgagaacacaccgacggagaaggggcttgagtgtggcgttcatagcgccctggaatgtcgctggggcacccgtgagtccaaaggcaagcactctgaattcgaaatggccctcgtgagtagagaatgttgtcttgtgttcttcccccgattgaagcatgatctggtggaactcggaccataaatccagttttgtgaaccaactagcgcctgctaatttttgaaagatatcctcgataactgggattggaaattgcctcttgaccgtcattgcgttgaggtgacgaaaatcaacacagaatcgctaggaattatctttcttcttgaccactaagacaggtgagttgaacttgcttgtactgtgctgaatgatgccagaagacagcatggcttgcacttgtgtttcaatctcagttttc

SEQ ID NO: 192196 - DNA, 389 bp, Zea Mays
ttaaaatccaatgatcttaagccatgcctggaccatgcatgcatcactttattatgtctctccgtgaggttattcttcacaagcagcacaaacaacaccacaagcttatccccttcctcttgctcacgcacaaaagttccagaccgtgtcttcctcaccaagttcgccactgttgaagccatgactggccctttaaggccagggggtttattttccaggtgagttcctctccctgctattatagaagctggaaccaagccagcttagaagcaggtgggaagcaaggtgatgctgcagcaccaaccgtggtggtgtcgacattgtcagggcagagtaatcttgccagaatggtgtgggtagaacggcatcaaggagtagtggttggggtt

SEQ ID NO: 192197 - DNA, 416 bp, Zea Mays
ctcccacggccagtcctgatgacgatcctgttgctgatacttgtactaacaatgatgactctcatgttgtttttaatcaggggtatcatcttcgtgatcgtggcactattgcagctccagaacgttatgggttttcccgtgctggtgcagtcattgctgaaccatcatcttataaagaggcgtctggtatacctgagtggcagcttgctatgactgatgaattaaatgcccttcatcgcacatgtacatgggatgttgttccgttacctgctggtgttgtacctatcacgtgcaaatgggtattcaaggttaaaaccaaatctgatgggtctattgagcgatataaagctcgtcttgtggccagaggttttcaacagacacagggtattgactatgatgagacttttgcacctgtg

SEQ ID NO: 192198 - DNA, 525 bp, Zea Mays
ggccctggggccttatccaaaggcaagcctttaatggtttccaaaacctcttgttctgaaaaaggggagtctagattctccagattatgtctagacagaccaatggcatccaaatcaatagtcctttccctgtttccacactgcccaatgaggtttgtataaaactgatccactgctgctgccttttcacagtggttggttaggatacgatctccatcaaccagcatggccacaaaattcttcctcttacgatgccttgcatgaatatggaaaaatcttgtattcgcatcgccctctttgagccatgaaattcttgaccttaatcttgccattgttcgcttgaaagaggacagcatcaaggattgttttttgagcctgtttataagccagatctctgctggggtaagtggtctttcatcatgtgccatctccagtctatgcagcaactcctttgccaaagccaactgcaaccttacatgcccaacctgcttgtcactccacccttgcagtcttcttgctgtcatc

SEQ ID NO: 192199 - DNA, 409 bp, Zea Mays
gcaatacctcaccgccatccgcagcctcgaaaaacaattcaagggtttcaccctgcagcatgtcgaccgcaacaagaacgaagaggccgatgcgttggccaaggcagcaaccaagggcgaggccctgccctctgacgtgttctaccacgtcatcggcacaccagccgttcgtaaccccgaaggcttgcaaataactcaagacgccgaaggccaccgaatcgtcaacctcataatggccgaagactggcgggccccaataacactatacctccagggccactaccatccaactgatcgcaatgaggccaaacgactgaaacacaggagcagggatttcgcaacagtcgagggtcagatgtacaaaaagggcatcagccagcctatgttgaaatgcataactgaaaccgaa

SEQ ID NO: 192200 - DNA, 463 bp, Zea Mays
gctgcgacgccgacgtcgaccggaggtgggacctcaagacggtcatcgcgcgcatcgacgagatccgggagcccgagcccgccgccgccgccgacgacgagtcgtcattatcgtcctaggcgagcacccgcgtgtgtacttgaccaagcaaatcccaccgatcgatgagcaagtcgtcgtgcgtgcgtgcctgaggtacctccgagacgaggatctacatacgcggcggccatgcgcatgaatgaaccgtcatcggttgcttatttggttcctcaatcaatcaacttaagtcggatgcgttggtggtcgactcatcgatctggtgaacaaattaaagcgtttgagacgggatgaatcatggtgattcggtttctgatatgctcatggggaaatttcgaccgtgtaaattggtgtagcttaattaatctgccaaggaaaaagaggtgctagtttagtagtgtgt

SEQ ID NO: 192201 - DNA, 273 bp, Zea Mays
ctgaggttacatcatttgagttgcaagagaagttcaaatggccaaagaatcccatatccacatcgctacgtaaagaatgcatagaacgacttcaattcttgctggaagatgcacaaaaggatgcatctttacatgttcctaatgaggtcaaatccaatgacttaggctactaccttatgtgtttcattaacaccgtatgcaacatcccctcagtctccctcttcaggatcttgagtggccacgatgataacgcattcaagaaattgatggcag

SEQ ID NO: 192202 - DNA, 679 bp, Zea Mays
tgtgcttatgcagttacaggaaaaaattatggttattttccaagaaaatgacccccttcagtattgtgcaagaaaaataaaatcacgctgatgttactagtactgtttgctcctgatttcagagcgccattgcctgatgcggtgaaagccatcttagatgaggggattagcttgttcaagatgcatcggagcaggcatggaaggtatgaaactgaaatgcatattaatattaaaaccccctttttagcacgttgtgaacagtaaacaacactctggttgtatagggtcgaatgcctttgttcaatagcagattaacattcctcaaaaacaagcagactagcagtataacccttattttatacatagtattacttcatatttatgtcgtcgagggaatacttttgtccaatcttcaatcacacttgtatagagaagaatgttctccaaatccccttttctgtagaaacagttaaccacacttgtagcagtattacttcatctgatgatgttgacataactagtggttttcacatgtctatatacattgcctgatgttttgcaaaacgatgtcaaatcagagcagagccatcaaaaggttcatacgctaaagaatgggcacaatgggaacaaaggttgcgtgcgaccttgtttgggaatgctgatcatcttaactcaattc

SEQ ID NO: 192203 - DNA, 315 bp, Zea Mays
tccagccggtaccagacgtcgactaggaactcttctcgttcctccatgcttttggtgacggcaaccaccctcgcggcccccggttcatatgaccagatagatggcggatcgcgcccgtagacgacacggaagggcgtgtcccgcagcgaagtctggtaggcggtgttgaagacgaactccgcccaaggcagccaacgtagccactagcgaggcctgtcccccgtgaggcaccgcaagtacatgatgatgacgcagttggccacctccgattgcccatctgactgacgatggaacgtcgcagtcatgtgaagcttg

SEQ ID NO: 192204 - DNA, 559 bp, Zea Mays
atgccagtctaatagacacaatatatgggtcgggcctaagcccattacagctgtaacacacacatgtctaacacccctgtagtctcaactttaggcattacaaatgttgagactggatcgaaactccgagaacaccagaggggagccccttggtgaacatgtcgacaaattgcgaagtggtcgggacgcagaggacgcaaacatcgtgacgatgactcgctcgtggttgaagtggaggtcgattttcacgtggttcgtgctctggtgctgcacagggttggagaggtataccgcgtatcgttgtcgcagtagacgagtgtggcgcacatgaggggatgctagagcttttggagcagttgatggagccaggatgcctcggctatgctgttggccacaacacgatactcatcctcagagctagagcgggagacgacgggctgccgcttcgaggaccaggagacgaggttggtgcttaggaacacggcccagctagaggtggactggcacgtgttagggtaatcgacccaatcaacatcggtgaagacgaccaactcagaag

SEQ ID NO: 192205 - DNA, 628 bp, Zea Mays
cttggaagttgccaacggtgaagctgctgcaacatcagaagttcttgatgcactggtgctgttatcgcgatcaaaggcatcaagtgggcacaccaaggctccctgggcaattcttgcagaaaaccctcacacgatacttccccttgtttcatgtattgctgatgctgcagcctccttacaagataaagccatagaagttgtgtcaaggctctgttccgaccaacatgatgttattggtggtctggtttctgaaactccaggttgcatatcatccattgcatggcgcatcattggctccaacacgcttaaagttaaagttggtggatgtgctcttctcgtctgtgctgcaaaagagcattgtcagaagcaaatagaggttctgaatgatgcaagtctgtatattcaactaatccattctctaattgatatgatccatatggcaaacacgcctgctgaaaatgtcagcagtgaaagcatatcagatattagaatttccagacactccaaagaaaactacagtgatggtgaaactgtgtgccgtactgctgtaatctcaggcaacatgattccactatggctacttgctgtcttttctcgtcatgacagcaaaacaagagcagaactccta

SEQ ID NO: 192206 - DNA, 333 bp, Zea Mays
ttcactacttcttgaatccatataggctgaatttcagagagaacagacaaccccatcatatgctccacccttgataaggcatccgccactacattctctgtgccctttttatacaccacctgaaactgcaagcccataagcttggtcatggctttcttctgcagatcagactgtaactgctgatctccaagataagtcagagatttgtgatctgttttaatcacaaaggcacccctctgcaaatattgtctccacatgtccactgctaggatcagagccaaaaactccttctcataaattgaaaggtgtttgttcttctcacccaatgccttg

SEQ ID NO: 192207 - DNA, 440 bp, Zea Mays
tctgttgtctcttgttctcctgcgatccgtgtccgctgaagatgacgttgacctctctgtcgacacgtgggaaggctccgcctcctccctcctcctgttgctggggttgtcgcggttctcctggtcctccccgtggcggaggaggaggtaaaggttggaagggtcggtcgtgcctaacagagtgcttgaagtctctatagttccgaagggtgtggcgcatgtccttgtggtatgggcactgggcgtcgaggatgtcgtccagcgtgcgtttgcctccatgaggtccttcccgggcgcgaggagcaggtggtccggcggcgtggacttcttcgcgaggtctcttctcccaacgcttgtcgggctgctgattcgtgtcgcgtcgcggtgccgctggtgctggttttattcctccaatgaggtcctgagcttgctcgtcggcg

SEQ ID NO: 192208 - DNA, 604 bp, Zea Mays
ctcagcattgttctccacagctccaaggttctccttctcctgacccagctcatcgtcgctgacaccatggttcctgaatgttggggtgttgggtggtctccttgtgaatcccttgcttcttagctgcttaacagcataatctgttcttgttccttggtcctcctcgcagtcgtcataatcagaatcggaataagaatcaacaaaggatgaggcctttgataccctatttagcctcccaacatccttggtggtccctttgttcttccccttgccacggacgtcatcacaggcataatgggtacaggctgaggagactaaatcagtttcgatcttgacctcggagcgtctggtgggagccctagcttcatcagagctagaaatttgaaggggtgaggaggcaccggcgtgagcatccacatcatctgggctatggtcatctaggtcgtcgtccacggtgatggcgcacggcaaaggggtgagctgttgtgtcctggacctcgcggcggtgctgggcttctggacggatagagagtcaaatcgtgtggtgaggtcgtctaggatgtcgagtatgctttcaccgtcgtcctggttgtcccactccgcc

SEQ ID NO: 192209 - DNA, 357 bp, Zea Mays
cacaaaggcaaaatgaaaaataaaaggccaactaggctaaagcaacatgctcagctccatcaggttatttctaaggaagcctgtaacgatggaaaatcatcagatttagcaggtgactattcaccaatggattgttcgccatatcctgcagaagctgaacatgtgccaacagaggcatatgtggcttctggtcagcccgttcacattggtgatagtgttatctcaaactggaacaccagctgtgctgaagatgatgtagtttctgcaaccgagcacttgattattgatgtaaacctaccaatgtttggagatgaaggtagaggaccgaaactagatgcatctgagagcaattttggt

SEQ ID NO: 192210 - DNA, 298 bp, Zea Mays
catcccgaagcgcccggaattcctcaccggtgttcgttgctgccgcggattcgcctgaccacgtgttccaagcccctgcgcgcacaattctcggtgagtttctatgctatagatttgccatgctctccgctttgggtagcatcatcaatggtgggtaacagtgcaacggtgcattgggctagaacctcgccggtgtggcatcgccgtctcaggcaagtgtcgccgtgtttagtgttcgccgtggggaagatggcctagccgttggatcttgattgagcgcatgcgatcggattctggc

SEQ ID NO: 192211 - DNA, 368 bp, Zea Mays
acctgggagttcagattgttcgtcgacgttggttctgcccgccggacccgccgcacgacctcgctgggactcgctgcttcgtaacccacggtaagattacccttgatcgactcccctcggtatgcgcactccgtaggcgtggcggattaggaattttgggcgtgaatgcggggcattgtgggctctggcattgtgcgccgccgcagtgtgttttccgccgccgtgggcgaggttcttcgcttcaccaatcgcgctaggacctagcgggatctatctctctgtgcacactcgacataaatccttgcgcgtagggtcggagcgggcattctgggggctcccccgctctgcgccggcgatgcgccgccgta

SEQ ID NO: 192212 - DNA, 3996 bp, Zea Mays
gaagaaactgatttttggcgaggccaagccgggggtgggattaccgggagcacgctgactgggatcacggcggatggcggcggcggataggcagttggtagttgccgtcgaggggaccgcggcgctggggccctactggtccaccattgtggcggagtacgtcgagaagatcgtgaggtacgtccgggcccctggccccctattctcttctgttccgttcccggtggccggtactgctcttccctttcaggttgtagtgagcgagagaaggggaacttgccaacttggatatgggagaagtggttctggggaaatttcttcttgcctcttcgttagggtttagagggaggaccagactcgcaggaagtttgattgtcgaggctgggggtggaagagagaatgcctgttgacatgtagtagagaaggattttaaacattagcttagtgttggattatttgatgttcctgattgggtttggtgatcattactcaccgggaagaagcgaaggacctcttcgctgttagtgatttgtatgatggaagggcatatagttcctatatattgcctaattggtgatcaggcaggctacgggagtaagcgacagttaagaactgccactggaagcttgttggatgagcttgccagtttttggaactgtgctcatggaggtagtcagttcgaagttgatgttttaggtaactcattgttgtagatgtcttctcgcctattttatctatctgtatcatggcttcgatcttctgtcttatcacaacagtacataagtatatttgtttttctcgaacacacaggagactgcacatctttttataaattagggaaacgaaacaaaacaaaagggtttgcaaagcagagaacctgctaaaaaaacacaagaccaaagagctagttagcaatggaaccggccacattcaagaccctagctaggtctatggatctcagagccttagcaccagccataacccaacaaactgattcatcaaggaagctcctttgaagccttcccaatgaaggggaatccccatcaaagaccaccttgttacggtcaagccatatacaccacgcccctaagatgatgacaccattaagcccccttttttgcttttgtgcacactaagctccacctgtttccaccactctgcgaaggaaggaacatcaacagtcggagtgaggtgaaccaatccaaatgggaataataaactgtgccggaactgacagacaaagatataagtgatgagaaggtgctggattgtttctggcccttgatcgcaaaatgggcaaacaaccgggtgtggtaattctctcttttttaatctgtcagcagcccaacacctattcttcttagccaaccaaagaaagaatttacattttggtggatcctaggttttccaaagtcttttccatggttcaaaagtagctgatcctgcaaacaagattcgataacatgattttgaggagaattttcctgaagcatcatgcctccatctatgttgatcgatatcctgtgataattcaacctccctcaaagaatcccaaagcagcaaatattttgtagacccaacagagaaagatgagtcctgatatcattgacccaccggaagttatcaagggcctgagctacggttgtagaagatagagctcatttacccaccttggcgaccacatctaggacaatgtccctgaccgcagccccattcaaccaattactagtctagaaaagagcgctggccccattcccaataatagatatcatagaatctgcaaacaaatctttgacatgctgctgcacaggtaggttaagaccctgccatgtatcaattctttctagccataaccactttgcttgcaatgcccaactcttaaactgtaggtttgggatccctagacccccaaggtagataggctctgtaaccgtttcccaagagaccaggcaactgcctccattaacctccttccttcctttccaaataaacccccttctaattttgtcgatttccttaaacacccatttgggaatattcattgcaatgagaaggtagattgcacaaaccgcacaagagttgtcctaccagcaaggttaagaaggcgtggtttccaatttggtagtcgctctgcaatcatatctacccatagcataagtcacatcttcttagttctttatctgaaattggaagccccaagtaagtgcaaggaaaggtagccgatgtacagttaagaatgctgtggccttgctgaatagatgacacatcacaacttataggaatggcacaacttttatgcatattagcaaccagaccagatgctgcaccaaagcaatccaaagtgtagaaccagacatagttcatctattccaagttttacccctatttgattggtttttgagctgtttctgacttagaatctaaattgttgcacttatgaacccgtgaatcaaagactaggcaagctagttagtccatatggttgtgatggtcatcaagcaccaacatcaattagagaaaatggtaaaggccatttcccttttaggatcagggagaaccacctttctccgggaataaacgttaaagcaaggaggtttaactttgaacctgtcatcaaggggggggggtcagaccatctaaatgcagagaggttccaatctcagaaccagaagcattcaaatctaagggcttcgccatccccatgcaattccttgcatatttgatttgaagttcattgacttaaccaaattaactcttgaaagttcctccccactgatttggtcaactgcggcacccgaatcaatctctggagaaaggatgggcgcatgagatgcttcggaaacaagacccacagggatcgagggcacaagattaaagaacttcaataacgaagagatcgcaattaaggactaggtagctatcacagggccatctggaagagggaaacccaaggtggcaggaactgaagcgttctcttgagacatttgaattgaagaccctgttgaaggcgctgtcagctcgggaacgaggcacaagccgctaggactgagtattaccggtctatggtcctaaggagctgtcaggagtaagtattgccgatctaggagtggacggggtgttacacccgatcaccttcacaggcctgctcgacacctatggaagaactggcacttgatcatcctaacgacccaatcgtgttgcaaactgaggccgccacagggagggaaggtcggacgataggccaccacactagggatcgctggactggacgacgcctcccatcggtgcgggcacacgtaaatacggtgcccaggaagccgacagtggaagcacctcactgggcgacgacacacatcaacacgatgggatggggacaagcaattgaaacacttcccacgcaagttgataggctatgctctgggaggagttgaaaagagggggcgttggcgaagagatcgtcaacccacaaccttcatcatccttcgcaacaggaggaccggaggagacaagcacctcttgaacgtgcggcgaggttggagaggagaaggaacaagatccacgtcgtcacaccagcgttgagctttagagcggccaacaggacgaggggccagagaggaagagggagaaggggagatccccgacgcagggtagaggttggctgtggccgccggacttggggtaagtactgacgtgaggctgttggaggtaggggcgctaggggggaggggaggaaaggcttaggcgtgtcatgccacaacaatcctcaacgatgtacaataatctaaatatatttgtaaatttgtttgtttttaaagaaaatcgtctgattagcatgctagcaatcttggtcaatggtttgaactccagttccaataccactttcgtaattcatttttcacgcgattgtgctatgcaaatgcatcattttaatttttggtaactgattcatggtgaaaattaaaacttgtgcaggagcttttgtgcaagtgaactgcc

SEQ ID NO: 192213 - DNA, 350 bp, Zea Mays
cacaaaaacacgatctaatctgacaagggttggcgcttcccgctcattagaccaagtaaattgtctacccaaaagatcaatttccaccaactcaagctcattaagaagacgacgaaaacggcccatcattgccctgtcaacattttgattatttttgtcttccactttataaatgaggttgaaatcccctccaacagcccacggtccaacacacgtaaggcgaatgctacgaagttcttgcagaaattgcaccttcaggacgtccgattgtgggccataaactccagtgaaccaccaaggggggccctcactctgctggaactgaacagaaacagaaaaaacatccaccc

SEQ ID NO: 192214 - DNA, 2831 bp, Zea Mays
ggaccaggtcgatgcgcgcttcgctgggcggtacgactgggcctgcttccgtcccggcaatgccaggtccgcgctctctgtgcttcaagtgcttgtggcgttgctgtgggagggtggtactatcctgtttaacctatgaaccgtggtaggaagctattattacgttccgtttgctagttgttgtgtacccacatcgcaagcaattagccagttcatccgtgtattatggaggtagagccgtgagattagttaccgagttgtccaattttacctttctctgattgtggtgacctaattattttctctgtcttgcaatggcctgggagagattctgagttatctgaattacaattaaagtctgttcaaagtctaaatttatttgctttagcattgattgctactgaagtgttaactagaacatagaactagtggattgccttcttagctgtttctctctgttgattgtattgcacaatctgtatctgacctacctgtgcttttgatagagtttaaaagagctaaaatcattggttaaggcagcagatttattgattatggcagattcattttttcattctatctttgttgcttctggagtctggactcatgttttcatctttagttgtagagaaagttgctgagaagaattaaatccatctgatagtttagaactacctttacacattcaactttctttgctttgcagtaattgattactggttagtgattttctctggccgttttatatattagtttaatgttacagggacttgtatctgagttttttgctattataatattgattttgtggggcttctctcctttagtactctcaatttgatcttctctgtaatagtatttataagttgattcatccttcaaaatagtactccaaccgcttttaatcattttcttttttatttctcaccgttgaccatattgtatctctctattttcttctctcctagctccccatcgttggctcgactcctctctcttctcacatacagcatcgcaccgacggcacaaaaaaacattgcagcagcacgccggcgctgctggatggtgaccgttcggccaactgccaccccttgctacggtctgaaccaccagacagaagatagcagtgttgctcatcgtcttgcactcctgcgtctctgcctggattatttgtgtttctgttatttgtatagctgcgagggtaatgatagggtcaacttatgttctgagaaataaaaaaaagaaaataaaaatgattgaaaatggttagaatactattttgaaggatgaatcaacttgtagatactattacagagaagactaaaatgagagtactaaaagagagaagcctattgaaatcagtactataatagcaaataattcgtatctgagttttttgctattataatattgattttgtggggcttctctccttgtatctacattagcaaaattttgtaggaattccttcttgagtgattcatgtttttaactgatttgctatccaattgcttagtgcttattttgatttgttttggcacttccgtttccctcttttcatagtgttttatgcagtatatttccgttttgctttcttttttatttatgaacaataaatcacaatcaaattttctgtcagtgacatgtcctgcatgtttagttgaatatttttttcttttgtattataattgcggactgtttacttcgtgtaaactgtaaagcaattctctttgcttgagcatgttagtacattgcttaattttgaagctacatgattgtgacattctttttttttcatctttttatccagccaaaagaatcataggtattctcgactttacctaaatttcaagcacccagaggatgttgttgagtttgctgaggtcttcaatggacacatatttgtgaatgaaaagggtattttcttccatattgttgaattttgttcatgataatctatatttaggatgtgcagcttttatacattttaatttgatcatattgtgccaacttcagcagttacaagcactgactctttagtctctttaatagcaaaaactatttgtccttagtgccatacccatttcattgttcagacttcctgtgatctaagtttattatgggtgcacgccttatcatttactatgtagcatcacaaacacaaattgatgttatatcttgatgctggattattcacatagccattaaactgaaagttgtatatgactgggtctagttatagtttgcttcctattggttgggcctaagttatagtcagctttctagaatattgtctacttgacctgatggtgtataggattctgttttcccttggtgagtgtggaagaagagatcaatagaaacacactagtaaaaacttgttatgaagtaaattttgaaatcgaattggatgtacttacataaggtcacaacattgatagcacgtgaactatgtcatactgacattaatattgtccttgacgttatcgtgcttgttgatccaacttaggtcagcgctagaggtggtggctggaagcaagaacaccatatgttggcttgataatatttcttgtacagtgtgttatattgttatgctgaaacagaaattaactacttagtgtctgaatgtttggtgttttttgcaactgtagaccacatgtctgaagttttttttgggggagtgccatctatgtttgctttgtgtaaattgggtctcatggatgttatttatggttgtcaggtgctcaatttaaagctttcgtggaatatgcaccatcacaacaggttcccaagtcaaatgtcaagaaggatggccgtgaagggactgttac

SEQ ID NO: 192215 - DNA, 344 bp, Zea Mays
gtttcgccaggtccgcgcactcgaggccgccggcgctgtacctgctgctgccgcgtcgttggtaactcgcggagatggaaagggagaaaaccaggagttggaggaggatgatgaattagatgaggatgtcgcggtggaagtggaggagaaggtcgcggtggaagtggaggaggaggccgatgaggagatacaggaagccgacagcgataagatttgcaatgatgaaaaggatgggaaggaggcgagagaggtggaagtggagaaggaggtggcggagttggagaaggccgatgaggatatgcaggaagccaacagcgacaagttttgcaatgatgaaaaggacg

SEQ ID NO: 192216 - DNA, 355 bp, Zea Mays
gccgcgacgaccaggtggtggcgtccaatcgttgaagggtaaacacacgagccaatccatggcgccagaaggttccatggcggcggacgcaagggatgagagcacccattccccacagctactagcgcaacacgaagtgacgagaaaagcaattagtatgggatgttccttaccgttggaaatggtgtgtagttctcaacccatggtgctacgcggtcttgtggcggaggaacaacccatcatcaatccgcaactctctaccccgacggcgcccagcacttcacccgattcctccctacgcaggcggtcgctcgatgcccacgcacgtgaccatggagcagcacagatgaccacg

SEQ ID NO: 192217 - DNA, 330 bp, Zea Mays
atcgacaaccaccaagatgcaagtgtatgactgtgatcgcggtaacgcttcaatgaagtccattgaaattatctgccacaaggactcaggcactagtagcggttggagaagccccggcaatcgagagcgatcggccttagcctactgacataccagacaatggctgacgaactgctgaactgaatgtttcatgcccctccaagcaaacaactgcttcaagcgagcataggtcactggcaccccagaatgtccaccaatgacagaagaatggaacgctgatatcaaccgggtctgcaaagaatgagactggcctacccatatatgattctt

SEQ ID NO: 192218 - DNA, 529 bp, Zea Mays
gatatcaatgagcattgagcatggcttgcatttcatcacgctcaaggatctcaatcatatagtaccgctgggagaggaagagactcgagcctgtgtgttgaacatgcatgcctaggaagttatgaagagcactgagatcctccataggtaactcatgctgaatggcaccaatggtacctcagagcagagtggtacaatgtcatcaacatagagtaggaagtaaaacatgtctgctccatgccgataaacatatagagacatgtctcatttggcttcaataaaatcaagttgtagaaggtgaaaagcaaacttgttgtgccaagcacgaggtgcctccttaagtccacaaagtgaacaattaaggtgctacatataatcaggatgagtggtatattcaaattcggatggctaagcgtaataaactatctctgacaaagtaccatgtagaaaggaattgtcgacaagacatcgagctgatgaataggccaggagcgtgaaacagccaaagagagaacaatccatatagtag

SEQ ID NO: 192219 - DNA, 614 bp, Zea Mays
gaagggcgttctgctctaggttcgggatgcacgaagaagacatcacggtggtgcagcattacccagaggatttcttcatcaacttcgagcaccagcaccaccgtgacgcggcggtggcatgacgcgatttcacctacgacaacattgacattcgggttaggccatggcagctccctattcacggtgaccgcatcaacttcgactaccatgttcgtctctgcctcgaaggcattccctctacatgcgtggaacgagggcatcaccaagcgggcggtggctaagagctgcgtgctagactacgtcgagtctcagtcactgcgaaaggaggacacaaggacactcaacctctgggcgtggacgcggaacccttcagacatcccaaaggtaacttggctaaccattgttggcaggaacatcattgtccacaatgtgccaccggcgggacaaagtggcttaaccttcagggtcatcgtccaccttgaccttgtggagggttccccgggcaacgagggtcaaggaagtacacatgtgttcgactggaggcttggagttgttgatggcaagagtgctccacgcgacaggcacgacccttcacctcgacgcaacgatcatca

SEQ ID NO: 192220 - DNA, 1107 bp, Zea Mays
ttcacgtcttaatttctctagctcatcgacagaaacaacagagtccagagtctgagaatctgtgcctctaacagattctagaatcttttcttcttttgtaaaatcatttggaggaccttcacctagtccaacaggtatatcagtcgaattgatcactgactcgttctgcgaatttgagtcatgctctgcagttaaggacttcaacgttaagtcttgaggttgctccattgcattatcctcctgtacaacaacagatgattcccctgactccatcttattgctttcttcctcacttttttcagtattaatattgctatcatgtaatttaacttcaagatgagtacctttgtctaccatatcactactctcctgtgggccactaagttcttttggggcatcatattcttgagcaatattgtcctcagcttccgttatatcatctgaactagctagcgcagactctgctggttgtgactgcaagatgttcctatcagacgtatcttcctttcctgtgtgaatagattcccctgtttcggtgtcacctgattgatgtattttagtaggcgaagaagatgcactaccatcaggtaagtctcgaacagactctctaagctgattcggctctgcttcatcactaggatcagaatgtttgctaacttgatggtgctggttttcttccactgttgaaggatgtcctgcagattgtgatgtttctgatgcttcagcatcacccaccttagatgcaggtgcctcagtagagctatcaagcttttcttctgctactgaaggatgtgttggagtttgtggtgttatggattgctcagaaacatctgccttagaaacaggtgacccattggaaatactatgaacttcttccgattttgaaggcagttttggagatgttgttcctgatacttccgaaggatctacctcagatatatgtttcttagttggtgtgctattaattccttcctctgctgacagattcttcagagattgtggcttttctgatacttcagtgccatcctcctcaccattgtgtcccatgaaagccatgacaggattgaagaatcctattctatcagagttggatgtctgtgatcctga

SEQ ID NO: 192221 - DNA, 289 bp, Zea Mays
ttcgtccccggccagcataatgtacattgcctcacaacagaatgcgaagacaccagcagtcctcgcacaaacaaaggcaaaaagattaacgtgcagctacagagtaacgagggaatcaagacagtccccctcgaccccgtgacccccaagcaaatggttctggtcagcgaagacctcctgcccgaagaagaaagacttctctcttgtctcaaccacaacaaggatgtattcgcatggtctgccctagacctagtcgccattagccgcaccatcattgagcacatcttgg

SEQ ID NO: 192222 - DNA, 956 bp, Zea Mays
gtaccattgtgcgggaggtgagtttgggcgaatacacgcccaaagtcggcctccgggctttgagagtcgacgcggtgccccattgggccgtcagccgtaggtccggcaggagtacgcgcggcggctgacccgtacgcgccgaggattccaggttgaagatgtggaggatcccggggctctggacgcgacggggaagcgattctggcgacggcggcctgtacggaattgactccatgcttgatgtcgtcgatcgttgattcgatgacgggacgccatgaatcgaaggccaccgaggctgattcgagggccgcaacgcgtgtctcggtggcggcagccacccgatccgcccgatctgccgcagtcgtaaggtggaactccaactgagcagcaacatcagtgtgtatatccgccttgaggtcgtagaacttgtcggaggcggatactgcggcgtgctccaggtcaacgatacgagcttcccagttagcgtcatgggccgcgaacttcttatcaagctcggcgaggaacaacttggtttgtgcctccagagccagcttgaactgcggatccatggcaccgactgatttcgcgtggcgggtgaagtaatggaactctagaacgccgaggatcgacggaatctgataccaatctgttagcaccggttacacggagcagaactgaggaagggaatggggtttcgtggagaagaagaacaggaggtggaggaataaggataggcttcgataggtattttcttcttcgataaccattcctccacgtttcagcagtataagtatttacttattacatgggcagcactggccctcatttcacccactctgggccagacagaaccacattgggcttaagcttcctcttgggcctcgtagccatgccttggtgattgccagtttcttcaacagccttgtcttccactattacatctccttgtgtgctga

SEQ ID NO: 192223 - DNA, 938 bp, Zea Mays
ctgtttcctattccctagcaagacattttgaaaagcctactatgcatatttatgcaagatatttcctttaaaatggagttcacatatggccattcaattaggtgctgaaatatcatctttgtgtaaactctatttcaatattttgtaactagtggaatatgaaatcattgtcgccttacatgaaatttggaaatgccaattgttgacgaataataaatgaatagttcaatgacggtgtatctgccaattgagttttgctatttattgtagatgattttgatattaaaatacccttttgctccaataagttacctaacagcctttctatttggtggttcattgcagctagtaaacactgggagagatcgtgcaaaagtaagcctgttaatgacatgggcggtaagtacaaatctaaaagtttttaatttatgcagtgtattttttttaatttgtgcgctatctgatgcaaaatttgagctaagctatctcggttttattaccatgatgatatgcatagggtatatctgtttacccagtgtccaaatctcagctcatcgatgatcattagggattatcacccttttgatccgctctaaagtttaggtctattatcgcagttgctttatgctcaattcaggatacactatgttgcaaaaagatattagatactatctaggtttgaagtattgcagaagtcaaatgtcagtgtgcattaaattattattcactcgaagcgtcctttagtgatattttcttaatgacagaattctattggaggtttttcgcataattcaggaggccactacaatgagcccttcatgtaagtagatcagtagatatagcctatactttttcagtttcttttgtggttgtttgtactcatagtttgatcttctaatatgggcagtgcggaagatggagtatcaggagtgcttctg

SEQ ID NO: 192224 - DNA, 457 bp, Zea Mays
caccatcgtagtggggaaaggagacattgggtcttcgatagccaccatcgtcgacgcggtcacgaagagcagatcctgtgctatgcatgaccccgacaggcgctgcggtacgtgggccggtttctgaagattccggcagctgctcgtcgattgggcgcttctccaaaagcgtgatccgttgtccatgcaggtcgaggcgtgagttgatggtggagagctacgccaatatctgatccaacttggctgagtcggaggaggtcttcgcaggatcgtgaccaacgccggacatgttggtcgatgcgtcggaggagtctgagacggctactgcggcgtggcacaaaatcaagagggagtcgcttggttctcttcgtcatagctgggggaggtagtaggtagcttacttctttggttacctcggccacaaatgcttggacaggggtgcttttctcaagcgtcg

SEQ ID NO: 192225 - DNA, 296 bp, Zea Mays
gaacggaacacattgacatcacctgacggttcaggcaagatcactcactacaaaattctgtaaaccctatctgtaaccgctcaatgtaatccaatcgacgcccatgcatagacgacgattctactactcaatgcgtgcaaccactcaaataaatgggcacaaatggtacaaatatacaatttgacaagcaaatatcgtgaaccacgagcattgcatcttggcatgcctgcagaaggtttgttgaaacctactcacaggctctacatactatagaatatccctgcaagggtttgttt

SEQ ID NO: 192226 - DNA, 293 bp, Zea Mays
gttgtttggtttgtgggggcaagaactataagcacaaccctgaaatacatatacaagctaggagctttacactggcagagaaaaggatgtgatcatgcaatataatggcaaatctgatggtttttattagagtgggtgtttctttagtagcttgaacttggttacagttgtagcaaatctgacaggcactaagtttgacttcttggcctactcgtcggcgctcaagcatttggtacttggtcaggtctacttattacacggttctttcttgttcaagtatccttgtcttcatg

SEQ ID NO: 192227 - DNA, 452 bp, Zea Mays
gtaggtgtgggctagaatctggtctgtgttggcccagcattttattgctgctggaagccaccacgaggagaaagttgcaatgtatgccattgattcgctaagacaacttggtatgaagtacttggagcgtgctgaattaaacaacttcacatttcagagcgacatactgaaaccctttgtcattttaatgaggaatagtcacaactcaaaaatccgaggtttaattgttgattgcattgttcaggtatgtccatatgcatgaattttgacacatctataaatctatgaaatgtaatgatctggtgtttcttatcaaatgatgctacatataaaaactttgctggatgtacatgtagttgatcaagtcaaaagttggcagcataaagtcagggtggcgttgtgtattcatgatatttactgcagcggctgatgacgaggatgaatcaattgtt

SEQ ID NO: 192228 - DNA, 449 bp, Zea Mays
tgccacagactactccaatggacggttccaccttaacctgcaaaataatggtgttttcttctatgctactgctgtgcaatccgatcctcaacatgaatataattggtccatgcctgggaacgccacaaatttggtattcaatgcgactggcatgatatacatcaccttggataatggaacacaagtaaaaatcacatctgggaagacaagctccatagcggactactaccatcgtgccacacttgatccagatggcgttttccggcaatatatgtatccaaagaagttcagcaaccacctgtacactcaggcatggtcagttgtcgacttcaaagctccaaatatctatatcccaagaaggtcaatagcagagacacaggtcagcagtggaacatgcggtttcaacagttacagcaaggtggatgtcataaacaaccagactacctgcg

SEQ ID NO: 192229 - DNA, 592 bp, Zea Mays
cttcgcttcctccatagacatcctaacctaaaaccttatagaacagccacacaagaactccaaaacagcaccatatagcaggttttagatttcagaactgaaccaaatgcagtaaaagcactgtccgtcagtacaaccttgagcaagctttctctccaacttttgtgtaggatcaaaccaaagtcacttaaggagacttattcaccataatatgggcttaaactccactatagacaccacatttcaaaactttatggattaggcccaaatgagctccaaaaacagctacaaactctgaaattcagacttaatctcctattcataatctgaaaattcagacacattggcagccccactttgaatcaccttttctccaaattccatgtaactttaggggtgtgatctttaaccaaacttacacaccaatacatgggcttccacctttatatagcactgtttgcccataacgatatggattagccacaaacagattccaaagttgctccaaatgctgaaattcagattctgaattccactaagtctgaaatccacaatttctgacatctttactttttatcagtttttctcttag

SEQ ID NO: 192230 - DNA, 839 bp, Zea Mays
cagcttcttctttcgggaacgtttagattggccttgggtaagatcccagccctttgtactaagagagataggcaaagcatcatcagtaaaatcctcattcacaggattgtatgcaaagttggctgttgaaacatggctgtcaaccctttgatctcttagtgatttctcatatgaaatcactttatccctgacttccctcatgattgacaaagcatattcttttgattctgagttcatggaaccaaattccacaacttctgcaaagtataggtggccaagtttgtacagatcatcgtagcttcccagttcctgattacctgctgagacaggctgggatatggaagcacaagtttgtttacagtccttgcaccagcgatgaatgatgtatttttgtggaatcatcagcacaagctcctgtctcagtacagtgagtgcatgcctgcacaatattcctttggattggtacaaacggcagaggcaccatatgtcaccttgaacattatcataagcaactttgtagtctaccttgtttgtttgatcgacatgctccgaaactatgtatgtaaccactgactcattccgttcaagtatattataattgcaatgaaatgaatgtcctatttcattgaagaacttctgaaagatttctgcagtgtacacctttgctgcttgatcttccacaggcaaccccgtcaccattggtggcctcatctgagctgatcgtaaatcttcgtaagattccttttctaactttcctttaacagcttcctcatattgctctacaaacattttcaaagaggttcctgacatcaaccagccatcaaaatagtcagttacac

SEQ ID NO: 192231 - DNA, 359 bp, Zea Mays
ctggtcaagaaaacaaatgcagagagagagagagagagaaaagcgtgcagtactgtagctagtttacttggaagataaacatgcgtcaacgtcagaatgatctctaatcaacagctagcttttgctcgagcagaggcaggcctaatcaaactttagatgtggggctgtgggcgatccgttctgctggccgctccagaatcttttaaataaaggcgaacacggccgtgcgcgtcaactcaagcgcggcctgcttttacgcttgtctcttgtgttcgcgctgtgccacgcagcgtcgctattcaagacaacatccccatccaattctattcccgtccattcagaggaacgccgttgctagc

SEQ ID NO: 192232 - DNA, 577 bp, Zea Mays
cggggacgcagagcagagcaacctagcccagcagcagcaaactcatcattatcctaccactaccagcccagttgtgcactgcctgcaacatcgcatgtgttggtcagaagaagcaggctgcttcgtgctattaaaacccgactagccgggcatcatgtctgccggcttcttctccactccactccacattgtcgccgggcgcgggacgcggcaagaaagattctcctcgtctgtcgcgccacgctagctcatcaggaatggaaatcttctgcctcttgcttgccgcgacgggcttcaccggctgctccagcgccggcgtcaactacggtacgcacgtcctactacttcactgtaggcctgccgagccaaaaaaagtcgtttaattaggacatgataacacataccaatgagcgattaattagatgtgcattttcctactttgcccatattaaatagcattttttctcagcccatgcaacaagtcttctgtacgtgtgccttctggtttgctacatgagttggcaatgtctagcacctactgtagtataggtaggtttgattcctgcatttaggaagg

SEQ ID NO: 192233 - DNA, 379 bp, Zea Mays
gccacgtacatgctcggagtacacccatgatccaccctgatcggtggtctaaggcacatcatcgaccttgcgattctaggtgcggcggcatgcttctccttctctcctcgcgacaatcacacgaccctcatgtgtgctcccggtaatggagggttggcccagctggatggacgaggcggtgctcaggggactaacggcttttatagccacgaaggggctaagtctccgcggacgagaacaggcgaagtcgggattttcggacggagttccgctgttcttgttacacgcgacgcgaggagaagatacgaagaggagacgatatacccgacaagtgggtcccttaggtagtgaccattgcgtagatccagggaaaggaaag

SEQ ID NO: 192234 - DNA, 528 bp, Zea Mays
gcagtagcatcacaggtgcggcagagcaaaaatccagctggtaggcttcagcccaagtgcgcaactcaacaggcaagagatggcaataaatccatgtgtaacaagactggagatgaatgctacaagtagctgatggttcagtcaaatgtcagtaataaacttcatcaggacataaatagcatatatagttggaaaaatataaataaatcaacggttttgtttatttatttttctgagaataggacaagacagcttgcggttatggctatctaaagttgcatgtccagccaaagttctaaaggataattaaggcacactaacttttcacctcccatgtactgatgtgccaaaataacaaacctacacagtgaagtacaaaggaaaaaaaagagaaggcaaagataaagtgtctaggaaggcaagaaaatattttcataatgtacatggctacaattccaacacccagataaaagttttactactcacaagtcacacctacccaaaccaggacatccacatgaagcaaac

SEQ ID NO: 192235 - DNA, 628 bp, Zea Mays
gttgtcccttgtctcatcacaaaataatgagttgctaaaggcatttgcggaattttttgatgtcacattggagggtagtcagtctatggatattgccaaattggtacagcagggcctcagaaatatccaacaaagaccaaaatcttctcctattgagagtggcagctttgagaagctacaagcactactgtataccctagaccaggaatcaacactatgtaagatgattcttgaagaagacatgattaacagatctgagaggactggtgaacttcaaagaatggctgaggagattattgttctgaaaaatgagaaggtatcactgcagaaggaggttgaacgggtggaggagagatcagcattgcttagagagaagctgtcaatggctgtaaagaagggcaagggtctggtacatgagcgtgaaggactcaagcaagctctcgacgagaagagatctcaaatagagaatttgaaacaagttttggaagggaagagctctgagatagagaagttaaaacatgctctggatgaaaataagtctgtaacagagaatgtgaagcaagttttggacgggaaaaacactgagattgaaaggcttaaacatgctctgggtgatagttgcgtggaa

SEQ ID NO: 192236 - DNA, 495 bp, Zea Mays
tcccggttgtctacctgacggcggctttggttacggaggaggtagattatatccccggcaaggatgtgattttgcggatttcgaccaaaagttgccacctcccatgctgaatgataatggcttcggacaaggttttgtgccagacgaaggccctcaccgaaagtattttgacggtgccaatcaccatttccatcagttccacccagagccattgcctggtgcgccgctgcaccctccactgcctcgctaccctgatccccatggttcacatgcttggcatgttgaggcaggtgctgtgccacggccagcagagcctccattcccctctaaccatgattaccgtgctgcaccgccacggttgactgcaaattcatcattgtttcctgtcctttctggttcgccaacaacggaaaattttccatcaaccgctggtaccttgcctccagcccatcccatgccaaacaaaaaccgtcatgacggacacatcaacgatga

SEQ ID NO: 192237 - DNA, 416 bp, Zea Mays
gtcgacaccatagccatgaatgccatgagtggccgcaacaataatcttggtcttggaggagtatctttcattgaagtgataccaacaatctagggtaacgtgccctactttgccacatacttggcagatcttgttagtgtgctgggattgtgagcgtccattagacgaggagaaagacacacattgatggctacgaccactaggaccatgacgccctctgccccgaccatggccacgacacagttgttgctttcgtgaccttgaccagcaacattagcagaagcttgatgacctccatgaagtagatccatactgacattgaagctgggaggtggctacagtcacggtgacctgctcaacatgggccaccagagttgagactaccagattgtactcttcatctagtcccaccagga

SEQ ID NO: 192238 - DNA, 284 bp, Zea Mays
aaaagaaaaccagactcatgtcttgccaagcgaaactaccactggttttggcccccttccacaaactaccactattctcctcctacattatcctgagcagtgagcatctgagccaactcggcagtgtcacatagtgcaaaacagagtaaaacaaagtagtggtaaaatgtgacaatgacaagtgggcccaggtgctgaggatactgtaggaggcatagctttatgagaagcgcccaaagtagtgtggttctgtgaaatggccttcagaagttatgtgacagtta

SEQ ID NO: 192239 - DNA, 352 bp, Zea Mays
ggccagttggacagctatgcgaggaatcaatggtttccgcataaattgtttagtccactggacggcatatctgttgtgaagattgcttgtggtccttggcacacagcaataataacgtcttctggtcagttatacacatatggggatggaacatttggtgttcttggtcatggagatacacaaggaactacccggcctaaagaagtagagtctttgaaaggctcaagagtgaaatgtgtggcatgtgggccatggcacacagctgccattgtggaagtgatcagtgatttcaagagcaattcaccaagaagcaagctgttcacatggggcgatgcagatcgggggaagctgg

SEQ ID NO: 192240 - DNA, 649 bp, Zea Mays
gtttgatatgtccaaccttgagtggatagacaagattccagagtgccctgtgtattgtcccaccaaggaggaatttgaggatcccattgcatatatacagaagatttcacctgaggctgctaaatatggtacagttgctttatttagcaaaatatgtatatgatcatttttcactcattggtccaatggtcttgctagacattttgaataactatgactgttacttatatttcaggtatttgtaaaatcgtctctcctgtatgtgcgtctgttcctgccggtgttgtgctgatgaaggaacatcccaattttaagttcatgactagagttcagccccttcgactcgctgaatgggctgaggatgatacagtcactttcttcatgagtggaaggtatgcccactgtttgtctattttcattattgctttagctcatgttctgaacttcatcatttttggcatgactctgcagaaagtacaccttccgggactatgagaaaatggcgaacaaagtgttctctaagaaatattccagctctagttgtctcccagctaggtatgtggaggaggagttctggcgtgaaattgcttttggcaaaatggatttcgtagaatatgcttgtgacgttgatgggagtgccttctcttca

SEQ ID NO: 192241 - DNA, 396 bp, Zea Mays
ctcgcttgtccttcacgccgctgggcaacataaccctcagatcgcctcctcgcatcccctaccctcacccgttcaattgcttcaagcactactgtgatgtcgccccacgtctgttcttctcctctcgtcccactaaataggacgtttcttctcccctcattatctccattaacaagcagttttctccattaatgacgtttgaagtcttccttttctcaatccacatcaattcggcagcgatttcctccatcctcgcctataaatcgcgtccgccgagcccctttcactcgaccctcatctgtgctctctctcgcgcttgttgcttgctgcagcgccgtgtcctactgtgccacttgccgttgccgagccacgccgtgccttgctgctctactcctg

SEQ ID NO: 192242 - DNA, 383 bp, Zea Mays
ggtgcatcgactgacttctgcgaagacctggttgtgacatgcatgaagctaggggaggtcgtggtcgagcaagtccttaaggaggcattatcatgaatgttgaaggtcactcagggtgagtggcttagaggtgtgcctattccatggaccgttggcgaagactttcttacgtctaggctagtacaatcatttaaagtgttcctttatgggcgtaacattgatggtgttgtgtcagcttcgatggaaagttcccagaaggagtcaaagaagatggggcctgcatggttggggaccctcaaagagttgtgcgagacttgctagggtctagaatatcccccgcgaaggctatgatgcctttgagtgttgcggctatgacctcgttc

SEQ ID NO: 192243 - DNA, 315 bp, Zea Mays
cgagtgtaggtgagggagagctgcaaagtctgtttgagggtgatgaattgaggataatgctattcaactacagggagatgggtatcatcctgaaggttgagccaatgtaatgtgtgatgccctcgctacatgtatgtaactataatttgtatgataaggctgcgtgccttcgctgatccggccgcgcccgtaggcgacttgtgcacttgatgttgcacatttattgtgttggtctggctgcacccgtagttgatttttgcatggaggatccggctgcacccttaggcaacttttgcacggatagtcttttgagga

SEQ ID NO: 192244 - DNA, 439 bp, Zea Mays
ttcccgccgacggtgataggcccagagagggcatgtggtttgtcgccgtcgacgaccttgagacaaccaatcgcttcttcgatcgtcatcgtggacaggtctagcagagactcaattgagcgagcgatctgcttatacttctcggggatgcaacggaagagcttctcgacggctctctcctcatcgtaggtgtcgtcgtcgaactgcaccatcttctgcaacagagtgttgaggcgaagagcaaagtcattaacatcctcacctggcttgaaggccaggttctcccactccttgtgaagtgcctgcggtgtggtcttgcgggcacggtcgctgtcgatgcgggtcgctgcgatggcgtctcaggcttccttggcagtccgcttctgggaaagcgaaaactgcacctcgggcgggactgcaccaatgagggcatctagcg

SEQ ID NO: 192245 - DNA, 413 bp, Zea Mays
cggctgttcttgcagctacaatatggcagtcagagtctattttccgaagcattgaaaaacaatgtcaggatttggcacagccacattctttcatgattgatacaaattcagaccagaatgcttgtcaagggactatgacatatctaacgtcgatatcagaagatggcaagatctggtcgtggcttttgaaatttgacaagtccgcacttcctagcaaagctaatctaggtgcgaatctatgtgatcattccagtgcaaatgaaattatctattcaactgttaaacctactaatgtttctatttctgccactaatattgggaaggaaccaggtagaccgagccataacaatgctgcaactgccaacacatgctccaatagacctgattttataataaaggttacatcacagaac

SEQ ID NO: 192246 - DNA, 853 bp, Zea Mays
ctgcgtgtttcatctggattcacaggagcagatgacatcaaagaatgcagattactggatattcagcaaatttctgattgtaccataaataaaactattaagtctgcacctcactttgaaatggaagctgctggatcatcacagaattgcactttggacataacacttggaattaaccgttggatcgaggtgatagagactcatctccctcagggattatcccatggttctgctatggtattttaccactctagaacctgtattctgcattttcttatgttatttgcagtaaaacacccattacatttcattgtctatcaaaaatctatgttattgatgcaatgttcctaacttaatgaagcagtatggcaacaaatgcctgccacataacaaagaagccagctaatttataatcatcaaagtgttgcatggacatcttgcatatgctgttgttatactcactacccccaaacgattgcacatcttgtttcccaagaaatcgaccaatttcaagttcgaccaaatctatacaaaaaagattaacattattaatacaaaataagtatcattagattaatcatgaaatattttcatagtaaacctatttgtagacataaatgttgatactctttttataaacttattcaagtttaagattaattgccttcttagaaaacgatatgtgcaccctttctgggatggagggagtagctagaactaggaccaatttgtttgtgttttccctggtttgaataaagtatctgtttatttctaggtcaggacagcatccctcacatgctttgctggcatgacttctgatgtattcttctccctgcctgaaaataagagagac

SEQ ID NO: 192247 - DNA, 301 bp, Zea Mays
cgaggacaaaggcattgaaagtttaagacatggatataatgttccaacgacaaggacattaaaccataaatataatgctccaagaacatcgacattcaaacatcaatgtctaagtctaaaccatcttgacgattatcatcacttggtccactatcacgagaagtaggtggtgtttggccataatcatcattgatgtctagatcatcggccaccaaaggttcatagactttatcctcgtctgatccttgctcttgtacagctggtgaactcaaatttacaccatgtcgagagtacgtcctag

SEQ ID NO: 192248 - DNA, 311 bp, Zea Mays
ctaatacaagagaaagcaaagatgattgctagtcgaaactgttacctgcatacattactcaagatatgaggcaataaccaatcaaaatctacgacatgtggtgtccatctaagaccttgttcagttaaacggggaacgaaacgaattgaggaaattaaatatctttctattcaattttgcaaaggatttaattttatcggatccacgcccaaatgaagaagctctaatctggtactacaatacaagatttattaagcttggagaggatcattatattctggacgcatcatatgacgtatatcttaaatcac

SEQ ID NO: 192249 - DNA, 719 bp, Zea Mays
attcgcacccaattcggcaccgtcatcaagagcatccagtgcgacaatggccgtgaatttgataattcccaggcccgcacattttttctctcccacggcattgtcttacgcatgtcgtgcccctaaacttctcagcaaaatgggaaagcagaacgttctcttcgcaccataaatgacattctgcgttctcttttgtttcaggccagtatacctccggcttattgggttgaagcccttcacactgcgacatatcttgtgaatcggctccccactaaaacccttgctttctccacaccatatagtgccctcttttcctcccaaccctcctatgatcatcttaaagtttttgggagtgcctgttatcctaacatgtcctccacagcacctcacaaacttgccccccgctcctccttatgcgtttttctcggctattcctcggaacacaaaggctattggtgtctccagcttgagtcgaaccgcattcttatttctagacatgtcgtttttgacgagtccttcttccctttcgcagccatgtctaccactcccatggcatcctccgccttggattttcttcttgatgaacatgatctaaccgctcctattcctggagcaagacttgtgcatgcaggtacacctcacgtcgcccatgggcgtgtagaggcacccacgtctcctcccactggattggggacgcccagtccctccgccacgtcgac

SEQ ID NO: 192250 - DNA, 394 bp, Zea Mays
atttaaccgccacagtagccaatctttgttttgttttttattattattttattaccaagccggaagcttgtgtcatgcatcgtgtgaattgacgttgtcctggccttcctcagaaatcgctctcgcaccgtttgctaggatgtaaccgtctccggatttggcgctactgctatatggaccaagccctcgagtctccccttcatatccttgaccttgccagccgtggaagtagttcaggtcgagagtttcatcactgccggatctcccgtgagggagagagccgctggtagatagtcaccacgtgatacagttgggtgtggccgtcggcgtcgaactcatcgttggctgcctcctagcttttgggtgggcctgacgtacgatcatcgtggcactc

SEQ ID NO: 192251 - DNA, 831 bp, Zea Mays
gctatggtggaattcttgcagatgatcaggtataactagctaacaccttccatgttgccaagacaaatggtcaattgtgtcttaaggtcatttggtatttttcagggccttggtaaaactgtatcagccatatcactgattcttactgagcgcccaccagttccacagtcatctactaagaacgagccatgtgaagctgtaactctagatgaagacgatgactgtattggacctcattcggaaaagctgatgcggacatgtagctctcaagtgacaagtaacacagtgaagcaagaaaatcctattgtagcggttaaggcaaggccagctgctggtactttggttgtttgcccaacaagtgttttgcgacagtgggcaggagaactgaagaacaaagttacaagtaaagctaatttatcttttctgatatatcatggtagcaatcgcaccaaggatcctaacgaacttaccaaatatgatgttgtgcttactacatattctatagtaagcatggaagtaccaaaacaatcaaatcctgatagtgatggagaagagaaagggaagcctgacccgtatggtgcacctgtgtcctcttcagggagcaaaaagagaaaggcatcctcttctaagaaaacaaaaaataaaagtgttgcagagagttgcttgcctgaaaaacctcttgcgaaagttgcttggtttagggttattcttgatgaagcacaaagcattaagaactaccgaactcaggttgccagggcttgctggggtttgcgagccaaaagaagatggtgtttgtctgggacacctatacagaatgctgttgaggatctc

SEQ ID NO: 192252 - DNA, 280 bp, Zea Mays
ggggagctcctgcggaaggtggaggcggtggacgaggcctccgcctcctctggcggggtgctactcaggtaccagctccctggggaggacctcgattcgctgatctccgtctcaggcccggaggactacgacaacatgatggaggagtacgagaagctggccgctgccgcgcccgacggctccgccaagctgcgggtcttcctcttcccggcctccgggagcgatgcggccggctctggctccgggtcccacctcgtcgccgcggtggacgagtctgggc

SEQ ID NO: 192253 - DNA, 377 bp, Zea Mays
agtttctctatttccttaaaaattaaataatggaaggtcatgacaatgaggaagattgggctacaaaggctaaggcatgggttgctgctaaatctgttatgggaaaccaccagattcaacagcatgccatatccacaagtagaactgaaggtcatcataatggttaccatgatcagtatcagcaaccagctggtctgccaacagaagttacagaagctttgcacccaccagtacctcaatcaagtattgatcatgtgccatttccaatgacaggtcaacagagagaaacaaaccatttattaggtaaagtatcttattgcccttgatctatatattttacttatggatgtgtaagtttcagaatggagctgaagatt

SEQ ID NO: 192254 - DNA, 678 bp, Zea Mays
ctccgaaggatcatctttgcaggcttaccacactttcagcccttggcctggtggggtaatgctggcaatgaagctgaacccatagttgctctcatttcccagtctgaatccagcggcaatcctgattttggccagctcagcaatttggtatggaacaagcaggagctcatcaagcagaaccaggtcatttctaaagtctaccagaggcaggtgaatagatagtctaaaatcagcaagaaaaacagtcgtgcaacaaggaaaagagtggtaatgcagctttagccaccgcaattgaggagaagcgaaagaatcaacgctagaaacaagggcctcaaggtctccgtcgacctcggttcttcatctcaatcctctgaggtaccttcccagcatgattgctctcttatgctgggaaatcctcatacctccaatattttccctggacctgtcaaatttccatccttacaaaatctcttagattgtgatggaatctacccggaaattgctgcttccaccttgcagaaggtggctgttgatagatgcggtgtgccccctgtggaggcggccgtggaggtgctgcatcgtccaggaccaggtgaggaggacaacacccttgctgcaaggcttctcgagtgatcatgatgaacaaaagacttttgaagtgtgttgtgggaaggacaa

SEQ ID NO: 192255 - DNA, 341 bp, Zea Mays
cactgaatcatcactagaatacaatgaattcctgtcttttttatcctcttgctttctgtgcgctgctatgctgtttatatacgtaaaagcacccgtgccttcttatttggattttgtgaattaggtaaggttaggaacaaattcccccttgagatggctgagattcacgcaccagtcattgctgcggacatcaatgatgatggcaaaatcgagatggttaccactgattcccatggaaatgtagcagcatggactgcagagggagaagaaatctgggaagtgcatctaaagagtctgattccacaggcaagtttcatgtattttttttgtaagatgttgat

SEQ ID NO: 192256 - DNA, 412 bp, Zea Mays
gtggatcgatgtcggactggtcgccaatgatgtgttcgttcctcttctctttgacattgccatgtcccctgcaagcatgcctccgcttgctgctgcagcggtggggtgcctttctgctgtggcaacaaagaggatggatttcagggcgaaggtgggattgttgaggtcactcctggctgcacatcaggggcttggtagcccagacagtggggtgaagatggcacccttggtgacaacatatgcagccgaggctctggaatgtcatcgcaggcttggccctactgatgctgatggagctgcagcgttggagatgctggaagaggtgctaccagctgtatttgcagctgcagagagcggtaacgatgaagatgtggattctggttccgtgcttgagttcttatctggctatgtg

SEQ ID NO: 192257 - DNA, 311 bp, Zea Mays
acctaagatgtcatttcccaagttccagggaactgaaccaggcgtttggtttgataagtgcatggagtatttcaacgtctaccaggtgcctgagtttatgtggccttcatctgcttatttacacatggagggaaacgcagctaggtgggcgcaggtgtacaagaggaggcaggggctaggaaactgggcacaattcactcaagcagtgcaagagaagtttggggcagaggagaatgcacagacgatgaggggcttactgcacttatcacagaaatctagtttggaggagtacattcatgcattcgaagaag

SEQ ID NO: 192258 - DNA, 558 bp, Zea Mays
agatcaggattagagggataaggataagtttgttagattagatatcaaaaggagagatagtaggaatttgttagagaataagtaggggcagcacagtttatgtgcgcctgtactggactatataaagtccttagtttgtacctaggaagattagcaaagatcaatctaagaagagtattgctccttgccacattctatctcagccgtgcgccaacatggctccctctcgccctcaatcctcaaggcctcgccctactacccactcatacaacctcagaagtcgagatcattagaatctggtatcagatatgtcaggtcatgatgatgaagatagcatggcagccactgccctgcagccgtccctggcgtccatcgccacgacactaggtgaagtccaacgttagctctgcgactttgcctagcagatgtcctccatctcctcccgtgttgcggtcgtcgaggcatgtccatcttcatccacgccggccatcccgcaggacattccctatggcctgccgggctacggcagcatccccaaggtaccgatgaataccaatc

SEQ ID NO: 192259 - DNA, 464 bp, Zea Mays
taatggggatgcaatttatcctgccaaaagtaatgcacagcagcctagcagctgtgctcctgacatgagaaaacagccaaaagcaagcatcacagtttatcagcctgacataggtgtctatttaacttctgacatggtcagttcttgtgaggggtcatatgcttctgccagtgagccactgcaaaggagcttgtcatctggaagaactattgggaaagcaaacgcggtgaataagaggcctccatacccatcaagtaaggtggtttcagcacaaaagccacaggatagggtgtctacatcatatcaaaatgatggccatgagaagaatccttgcaacaaaaatgaccaaagttagtagtgttctgataaagtgggctagctttatcttatagtgctacttttatctcatataattactgcattattcaggatctacccccaaatgtgaatcaagtcaatcaaca

SEQ ID NO: 192260 - DNA, 335 bp, Zea Mays
aaacatcaaccaacaacagtatctgctatcagagctacacttgcaacccctgattcctggagtccctgaacctcaatcctctctattgaacaacatgctacagctcaggcagcaggagcaacagcaacaatacatttctcagtccatacctcatgatcgttccatgcagcagctttatgattcttcccatgggacaatacatacttcattgtcatctggtgaccgtatgaagctttgtcttcaaagaacagaagagattcttgatcttgctctgaagttacctggtcatggtaagcataatctacaactacatgcaagtgtgaaattgagagaca

SEQ ID NO: 192261 - DNA, 440 bp, Zea Mays
cggctctgccctacccgtcacctcagtaggtgtcgttgttcttcccggtccttttcgcttaaccaatgttcttgtgaccaccaacatcattcaaaaccttctttcagtccgtcaattcactaccgacaactcttgttctatggaatttgacccgtttggtctgcctgtgaaggatcttgccaccaagacccttctggctcggtgtgacagcctcgagcccctctacacgcttcgcctccctgcttcctctacatcgacctctgccccgcctgttctagcagcggtcgcctcctctgtgacttggcatcgtcgtctcggccaccccgggcgtgatgtgatggccaagctctccagtagtacctccgtttctggttgtaggggatcttttgagcacctctgtcatgcttgtcagttaggtcgtcatgttaggctcccatttc

SEQ ID NO: 192262 - DNA, 597 bp, Zea Mays
agttcaaaataccactgggaaactatctgcaaaatctgtggggaactctgtaagttgtaccattttgagatcatttactcctgaatcttgaatctggatcagttatacactcaatgtactgagctgttgcactatttagactgtacgtgctgctgttttagcaaatggaggtatcttagtctgtgaagcttttggaagagttgaagtggatatcccagtggctatgacattgaatactcaaagtgaacgtctttgtattggctgtagcatgccagtttatccatctctgcctaaggtgtgctttgtatctgtttgctatatgcttatcttttcacgtttgccattccttaaatgataatgcttctcagggagatctattttccttctatgaaacttgccaaagttacagttggatgatagcagatgagaaggtcagaattcagaatactcctacttcccttgcataaagttaatctgtactaataataagttattctgccttaggttgtgacattccaatcagctaaatcctggcgatacagacttgaccaaggactatattcagatggaaaaaagagtccatggttttccaatggc

SEQ ID NO: 192263 - DNA, 755 bp, Zea Mays
ctgctcaaagtttggataaaaagcttggaagaatggttactcgtgttgtcctaccacgagttgtcatgcacgcgagacatcattatggagtaagttctaactaaagatgtggaaaaagttaattgagtcattggcgacagttatttattttcatgctctttacttagaaaaccccttcatataaactaaccaatttgttttcatgctctttacttagaaaatcacttcatataaactaaccggtttttgtcttgtactcttgtgctaggcattttcccaaaacttcactgggttagaattggaagacgggggaggccggggcacctcaggtagataacatgcaccctttatggtcttaatttttatttttctttctttccttttttcatttgctgttatatgtatgcatcatgcaagtttccaaacacattcatttgttttgatgtttgatatactattaggttcacattgggagaagaggctcttaatgaatgagatcatgactgggtcagtggatacgagatctgtggtttcaagaatgactttagcattactggaggacagtggatggtatcaagctaattacagcatggctgaacatttagattggggtcagaatcagggaacagagtttgttatatctccttgcaactcatggaaaggggcataccattgcaatacaactcaattatcaggatgcacatataatagggaggcagaaggttactgccctatagtaaactatagtggggact

SEQ ID NO: 192264 - DNA, 484 bp, Zea Mays
ataggatctgttggctctgattcgggccaaacactaggggttgtatgattgtatctctgatggtgctcggcggcgaggacggcagaaggtccgcgaccctgctgcaagcaagtcttctctcctgctggctggatggtccgtggtttaggctggacggtacgcgaacgcacaaagggtcgaagaaccctagaactcactccaggagggatcccacaggagagttctagagagggtgccctaggaacggcaggccacccaggaggtccttagacgacgaagagtcgaagagagatgaatattggaggtttggaaaaagctaagctaggtctaaattacgtcacctcctaatacgataaaaaacgaaggaaataaagtagatttgattgattggttcgattggtgatactcgcaatcgtatgtaccccttcatatatatagggagaggtctggatcagttcctaggtgtttatcaataaaatttgcg

SEQ ID NO: 192265 - DNA, 409 bp, Zea Mays
aataataattgctttagtggagcggggaaagccgcggaaaccagtggcctggataacgttgcttctgcagttctgcttcctcggtgaacccatcggcggtcagctgatgagcacgtcgcttggctccaaatcagcctcatcaaggaggaaacaagatttgtcgagttattaaggccatgcagaatgagaggcggcactgaccaaacaagtagtacagtaaatttctcgtgtcaccttgacggcaacaaaatacggagtagttggtggcggaaacgcagcggcgcaaattaaatgcagacctgcgtttcgcaacaaagctttgaatggaaagatggcaagggagcgtttccggacagatttcgtttgggtcattttttcccctcaacaactaatagatcctcagtacttg

SEQ ID NO: 192266 - DNA, 347 bp, Zea Mays
cgggggtgaggcgcttgaacgggactggtgattgtgttggtggctgctggggtgtattcttggcggcattgtcgtcatgtgtgtgagcactggtggtcgactaaatggtttggggccctaccagtctgttgccgctgttgagcaccatcaatgacctgagagcgacgttcatatgcccttgctagtcgagaagcctgctgcagattctgtgggttcatcagctcgacatcgattttaatccgctctggcaatcccgtcgtggagagctgcacttgctggtcaggtgccaatggagaggtgtggcacaacagtgacgagaagcgctcttggtaatcatccacggttgt

SEQ ID NO: 192267 - DNA, 310 bp, Zea Mays
cttcaccattggactgaaagtctcatcaaagtcgatgtaaggtcgtcgagtgaaaccttgaagaacccactgagccttgtagcgtttgagagttccatcagcctgaaacttgtcggagacgacgttggtgcgagggggcgcggaacaagaccccaggtgttgctgtcaagaagagcagagtgttcaacttcaatagcctcgcatcaatttggattaacgagagcagtgctgaaagtccgaggcactggagacaacgtattagcctggtagatggacaggaactggaggccagatttggcctgcgtggcca

SEQ ID NO: 192268 - DNA, 782 bp, Zea Mays
ccgcacgcagtctggggtctggagagaaggaaatgtttccgccactgttgaaaaacgcatccaacccatgggcaagcatccagacagtgtcataagcatagaggccataggtattgggcaagctgccgccgtcctcctcctcctcctccttcgccacttcactccatcgcgaaaccaacgccttcttcctactggtgttctccgtgtgctgacgcaacgtgagaacaccctgcatcgtgttcagtaatccagttccaagacgaggagctgagtcgaggcacgcggtgagccaatctgtcgcgatccacacgtatccaccggatgtcatgctcagattgtacgccagcgagaacacgtcgattccagaatcgtcacgcgcgtgcagcacgaaaacccgggactccatcatcgcagccttgaccagcacggcggccatctcgctctttcttgcccctggcctgatcgcagctttgtacaggatcttcagtctcctcttggcaagctcgtcgtctaaggaggacacgccgtttcttccgtagtcgtcatcgatgtacacggctgtcaccatcttccacccgtagtaatcaactatcgcagccacggaagccatctggaactggtcgctgtggacagtgcgcacaaagaaaggatactgaagcggtgtcagagtcggatcggttgcagcgaaggacatcagaggcacctggagttcatttgcgacgtgggatatgacgtgcgcaacgactgaagactgtggcccgatgatcgcgatcgtgtctttc

SEQ ID NO: 192269 - DNA, 508 bp, Zea Mays
acatcggcaagctcgacgacaggagcaccctaggggtgttcattggctacgcaaagggctcgaaggcctaccgcatccttgacccaggaacactgtgtgtgcgcacagcgcgcgatgtagtgttcgacgaagggcgagggtgggccttggacaaggcggtggacgacggcacgactctaacgtacgacgacttcaccatcgagtatgtccactttgagggagccgggggagtaggcgacccttctccgagtaagcctaccccagcccccaagtctccaccgactccagcgccacgctctccagctccggctacaacgagctcttcgccaccacgcaattcagccactactccggctccagcgagctctctgtcaccacgtactccagcaccgacggtaccctctccgggaacgtcctctccgacgccagctcgtgtcgagcagaacccagtggagctcgtgaccccgctctcccacgacgaggagcgcgtcgacgcgtgctacgatgg

SEQ ID NO: 192270 - DNA, 301 bp, Zea Mays
ttctaatttcatattcccaaatcaattttgtgtttcaaattcaaatttgactctggtttgacatttaatcttcaaaatacaaaccacaattaaaatccaatatgtgatgtagtatccatattattttatttatttatttgttcaccatccggaacgaaactgctgaagccatcaagcatcctcgcagagactccaaggaaaaggagaatggctagtgtgctagatgttgttttggagtccgtgaagacatcaactcctgcctctgccgaagctcttggcacacttgcaaaaaaatttaagg

SEQ ID NO: 192271 - DNA, 473 bp, Zea Mays
gtttcgtagttcgaaatgctgcacgggatgctttactgcgtattaatgtttgtatctatactcttttctttatttttacattttccagaagatcactacatctgttctgttgcttaagtgttttttgtgtcccagaattaattatgctcgtatttaatgtttactgttatataccctttttacatttttgcttgtggcaggttcattcttccactttagtaaaatttattgaattaatttcaacacttggtgatgcaagaggacattcaaaaaggataaagagaaatgaagatcgggaccttaatgtgttctgcaattttgcggagatatttggagaaaattctgtagcttctattcttgtttctcttctagatatcttgtttcttaagaaagatgtgaagcaaaggtctggaactacataactatttttgtgtagtaccctatgttctttatggctgacatgtcaccctcat

SEQ ID NO: 192272 - DNA, 345 bp, Zea Mays
atgggtaaagggcctgctgcaacctgacccgagcacaaagcgagtgggatctgtagcgttgtcgttggtctgcggcggatctacagctgtgggggtgttggtctcttggcgccggcggcgcccctcccctccgtgagctctccaggcagaatagaggaaggagggaagaggaggggggcacgcccatagcagatttggtggcggcgactgggtgctggcagtggcagtgagttgagcgttggcggcggctgcgggaagagcatgctgccatagggagggaatgggaggggaggggaataagtggctggatgtgtgggtaacctaattttgatgggctgttgggct

SEQ ID NO: 192273 - DNA, 331 bp, Zea Mays
attttgatgcagtggctgaatgtggacccgaggttccggcattggttcaacaggaaggtgaacgggctgttgttgatataggtgatggtgttgctgatgagaagagcaatttgaatgtcgtgaaactggagggtagtgatgtttctgggaattgtgcacagggtttggatgatttggggttgaaagactccttggcagtgctgtttacaagacctggtcggaagtcacggcaggtctcagaggaggcagaaggcatggaagtttcttgtccgcatgatgaggatggtcttaacaagggatctggtttggctccagacacagcttccaaggg

SEQ ID NO: 192274 - DNA, 2087 bp, Zea Mays
catcaacaagaattgctcctctaagttctattggagcgtaatctgatcggtttgggtcggttcgagaacttgagattgcgatttgggagttgcgggagagaaaggaagagatgggccagagcaaggcggagtttttggagcagttcggtggggactacggttacccggacgcgcccaggggcatcgacgatctgcgggccgccgagttcaagcggctggaaggtgtgatttcgcgtccttctcaattcatacgcgaaaacttgaaattgaatttgttggttcctgtaaaaatgaagacagctatttaatgtttgggttaattatgtccgtgccattataattttctacgttttgatatgtgccactaaatttcttaagcttgtaaatatgccatgaaatttctaatcaactcttaaatacaccattttgttgaatcagacgtaactcttaaataagaacacattttcgtatttccttttttacccttgttcaaagtaaacccagcagaaacgttgctacgaacgcagccattttgtgacttttcgtctctccaaacatgcgctccgtaaccctagcagccgccaccggagctgcacgcccatcgtagctgcgctccactcctcgctagagctgcacagttgatgtactgacaaacaaaggtaaaaaaggaaatccgaaaatacgtgtgccggtggtacttcagattgtgtatttcagagttgaatagaagtttaatggtatatgtgcaatcttaagaagtttagtgacacatatcaaaacgtagaaaattataatgacacagatataattaaccattaatgtttttgtcatactcattcgcatacactcctttattgggaattttgagttttgttgttgtggctaagagaggagtgacgccaattttgcattttgcggacgtgactgagagcatgcttgattaggatgagaggataatcttaggccttgttggattccgattaggcctaggactaaagtttagtcctagaactaaagtttaatctctattttggctccaagactaaacaggttcagaacacattaaatgcattatcgaaagactgaaataccccttgtatgcataagacgtcacatagagagagagagacggcaataaatgaagggcaggaagaaataaatccgctgtagtcacgtttagctaccctttgagagactaaagactaaagcaaaaaggattaaacatgactaaaaaccaaggactaaagattagttcctgaagccatacgggaccttaagctttacatatatggaaattgaagtttgctatgctagcttctaaagatgtgttggttttgagcagggatggtttacctggaccatgctggtgcgacactgtactcagaggcacagatgacggatgttgctagagaccttatgtctaatgtctatgggaatcctcgtatccttaaatttgggtcttatgtcacgaaagttcttttttccttggtagctatttacttagaaaaattattgtggttgtgttctttgacatgcttttagatagtcagaacgatccaagcatggctacaagtgatattgttacttctgcgcggcatcaggtactgcatattataaatatctggacttatcattcttatgtctgtgttttcaattatagaacacttccttaaaaatcagcaagtacacggggaagaccccaaaccctagacgggtattctaacagttcctttgaaagaaagtcagtgctggtgattggtatccgttattgattttatgctcacaagttacaacaaatgtttaaatgtctatttcagcgtatgttctaaagtggaaatactcaattatatgtaattgaagttgaaaaggagtatgtatatacttttcatgcttcgttccgatcaaagaaattgtgaattggtgctaacatcttacacaactgtatgtgatcgtcagaagttgcaaccagccttctcttgcttatgatgcaatctttattctcacaggtcctaaaatacttcaatgcatcaccaaaggactacaaatgtatatttacatcaggggcaacagcagctctgaaacttgtt

SEQ ID NO: 192275 - DNA, 344 bp, Zea Mays
aggagaacagagattagggtgctcattctatagatcatcaagaaccatgtcgagcatctacaaaaacatgaattacttatgggctaaagagtctttggctagaatggttgcatctggttttttggcttacatcacacactatattacttaagtggatttgaattactaatgttaatttaggctctagcttgttgatcttgtgtgtcgtagcattgttttttatttgttagctcggtttactttctgcattgactatagctttggctctgttttgtgatttatgaagccagaaataagtatcttagggcagtttagacataagggtcaataatcaatggatttaa

SEQ ID NO: 192276 - DNA, 311 bp, Zea Mays
ttcagtatacgttgatgatgtggttttacttattaagccacaggattttgaattgaggtgtagtaaggttattcttgactgttttggggaggcctcggggttggttgccaacatgcaaaagagttgttttatccctattgcttgtaatgatcaggcggttcaggaaagtggttccttactgcaatgcccttcaacaacctttccatgcacctacttaggggctgcccatatccaacaagaagctatcgaagagtactctaatggtttgggttgaaaagaaagctgatcgtttaccttactggaaggcctcc

SEQ ID NO: 192277 - DNA, 323 bp, Zea Mays
ctaccacatagctgatttgttcatggacagcagtgttccatcacgagttcttgaatgtactatttaatatgactaccaggaggctgatgagatactggaaataagaaagcaaggtacactaaaccctggaagtcagaatcgctgaagaagggaagactggaaataacaaagcaatgcgctgccatcaccagcaatgttatttctgctgaagaagggaagactgaaaataacaaagcaaggtcccagcacctataatcattctagactggaacactgcaatgattctagactggaagactggaaataacaaagcaaggtcccag

SEQ ID NO: 192278 - DNA, 1014 bp, Zea Mays
tacgtgtcagatgatatcctcttcacttttgttttctttcatttcactgaacttagaatgcccaattagcagtctagcactaaggttgtttgattccatgctgcgggattttccactaatgatcgatgatgcggagttttacttataatcatttgctgcggagtttcacattgatgtcgacgcttcagatgcttgtagatctatcaaaatttgtttcagtgggcgacttctgctctgtttctatggcaacatgagcagcactaaacttggagatctgatttgttcagtgtgagcactagctacttgtttatgttctagatttgagtaggatcggatggattaacgattaggtggatgcgagctgatttgtggaattcgtcgaactatgtctctggtgccttcatgtaatcctttttgaacttcctaatagtaactgcagtaagagttttttttcgatcagatttgcaatcagtagtttccattgtcgcccctggtatagccattatatatctgctttgatggattgcacattttttgaactgaatttctactggaacgctgtccttcagaaattgtcactgtcagcttgggtagtaatttcacactgcagtattcgaaaatataccttacctgatcattgaaaatataccttagctgatatgccatattgaactgtgttagactccttgctgacagatgtcgctcttcctggatgcatgcagacgcaaagcgattgattttatagcaaacaactacaaaatcgtggtagaagttgaattgcttctgtttctgtgggaacagtaaacactgaggttgtggttgatctgatgatacttccctaattggttcctctttcttccctgagattttatagttgtttgctcgtttgcatgtttttggtccctaaagaagtgtttattaagcatttaagctgcagggcctccagctagaggcgcacgaaggatcgttctctatgttcacatcgaacatagtgattggtggcactgctcggac

SEQ ID NO: 192279 - DNA, 271 bp, Zea Mays
tggcgacgtctccatcactaaacgcgtcctctgtccccaaccacaccaaggggcactacgggggagtggacgacaccctattcttgggcattccgacgggcggcggcatccagggcgacacacccatgcagtatggcgctgtgccacccgttgcccacactaggccacaccctggcctggcacttccccacgtacgacgatgccctggaccctcttagttggctcaaccagtgtgcacagttcttttgcggccagcgaccctagcctcgga

SEQ ID NO: 192280 - DNA, 292 bp, Zea Mays
gatcttcaaaattgatcaggatcttcaaattaaacctgcatcatctatgtcaaccatgtcgcatcaacaagatcaccacacatagatggcatctacaacaaccgctagtcagtcattctatcaagttttctgctttttattatttgcaaataagctacatgatgatgtcaaggttgtttattaatttttgaattaatcactatttgtttctcaactgcaaaggtaacggtccgaagcatctgtctcgggctaatttatagggacgggcgatgtcaccaagatgcgaatcgtc

SEQ ID NO: 192281 - DNA, 610 bp, Zea Mays
agcgcgaatccatcttctctacctcctcgtccattcctagggttcctcctctgccgaatcgcggggaactctgcgggcccaatttggtagggtaatctcctaccaggaggtcaaattccagtcaacgccgcttggttttgtagccgaccggtcgatttgaatccaggggcaccgattggctgggtgagagggcaggctcgatttgaacccgcctctgcccttttcgtggaagttttgggtcttattaggcgcggattactggggtctagggatgtggtagttactagctgcttgggttaggcggcgcgccgaggtgcttccgtgcttggctgactagtgtcaatggcgggatctgtcggcaaggccagggcggcgctgcggtcgtccccgaagcggtacagcggcacggacccaccgttgtctctggcggggccgacgttggcggatctgcagaggacggccgagctggagaaggttgttctttgtctctgcttacgttttgcagctctaacggcttacttggcttccattgtgacgacgttccgtttattttgctgaaaaactgggtttcagttcttggttgaagcgggcctctatgagggtaaagagg

SEQ ID NO: 192282 - DNA, 450 bp, Zea Mays
gggtccttaacaggtaagttacgagaaatagtcgacgttgcggtgaggagacgggtaaatattttatgcgttcaagagaccaagtggaaaggacagaaggcaaaggaagtggaaggtataggcttcaagttgtggtacacggggactgcagcaaacaagaatggagtaggcgtcttgatcgacaagagccttaaagatggggtagtagatgttaagaggctaggagatagaatcatcctagtcaaactggtcattggggacttggttctcgatgttatcagcgcgtatgctcctcaagtaggccttaatgagaactcaaagagggagttctgggaaggcctggaggacatggttagtagtgtgccagttggcgagaagctcttcataggaggagatctcaatggccatgtgggtacatctagcaccagttttgagggtgtgcatgaaggc

SEQ ID NO: 192283 - DNA, 292 bp, Zea Mays
ttcagtctcgtggtcaaacctgctacagtccggacggtgctctcattgactctttcacgagggtggcctattcatcagttggatgtcagtaatgcttttcttcacgacactctgtctgaaagaagactccactcatccagattatgtatgtcgtttcaaccaatccctttatggactcaagcaagccacccgtgcatggtacagcagattcgcctctcaccttctacagctcggtttcattgaggccgagacagatacgtccctatttgtctatcacaagggtgcagacatg

SEQ ID NO: 192284 - DNA, 549 bp, Zea Mays
tgttgacaaacaacaagttatctgagttggcatgtttggcattatatctcatgtatgagaaaaagcaaggaaaggattcattttggtacccctacattaaggaacttgaccgacatcgaggaagggggcagctagctgttgaatcaccacttctatggactgaaagtgaactggactaccttagtggaagccccttgaaggttagtggttttactcttttgtatctcaattctcaatgtaacattattgccatttgacgttgcaggattattcaatattctgcaaaaacatcaatatcctaacttagatgatatgtttgcaggatgaagttgttgctagagatgaggcaataaggagagagtataatgagcttgacacattgtggtttatggcaggttcactatttcaggtattccttgatcttccaagcatatttccttcaaggattggctatttcgttaacttattctatttctcacagttattattgttttgcagcaatatccttttgacatacctactgaggcttttccgtttgaaatattcaag

SEQ ID NO: 192285 - DNA, 412 bp, Zea Mays
agaagatcgacacatcggtacctcttgtgatcagaagaataacctaggaaaagacaacgagtggagcggggcgcaagtttgtggggagcagtggcggaggtgttgggatagcaagcacaatcaaagacatggatgtgcgtataggaggtggcgctgtcgaatagggcgaagaaaggagtgggatgactaaccgccttggaggggaggtggttgagaagataggtgacagtattcagtgcctccaccgagtagctgacaggaagagacgtctggaagaggaggcaacacaacatgttgatggtagtgcgaatcatgcgttcgacctggacgtttggagggaaagtgtaggggcacgagagctgcaactaaacgccgtgagaaaggaaaaaaggagtgggaggtggagtggtcg

SEQ ID NO: 192286 - DNA, 663 bp, Zea Mays
gaattattagaactgttcaaaagttaggaaaaaatacatatttatgctttcttatgcacgggtaaattgctctgttcatatataaaaaaaataattgtagtattattgcttatattgattttaaatgatgaccttattagatgtgccatcgagaccacatatattagcattttgtaactaaatacaatgcatgaatatatatagatagcctttacatcgtgctacatgcttcctagaaataaggaaccattacaacatatatatttttgatgatgtacaacttcgtcatcggatataccgttccttcttttttacatacattttgataagaatgtcaaaatgttaaaaaaatagcgcgcgcatggcgcgcgttagacactagtagatttcagaactatcatgaagcgcgtgctcgctggttgttagttgttacagagcaacagcccagggaggccaagatgctacttagctactaaaaccaactgacaacaagtgcacagcccagtgggccgctaagctgcaagaaaaccctcgcccctcgttctggattgagattctctgcagaggctgcgatgttgggccgtcctgccctgcccggtgggtatatgtaagctcagaccgccaccggaaccttctcgagcccgcggccgcacacctccgccc

SEQ ID NO: 192287 - DNA, 432 bp, Zea Mays
taataatataataatagtaatcgatggggtctcacctcctcttgccgttcctcctgctactgtcctcaccatatgtgcaagctcaacagagaatcaccttgggctcctccttaacaacccaagggcctaacagcttttggctctccccttctggtgactttgcctttggcttccggtccatcgagggcaacacctcctcctacttgctcgctgtctggttcaacaagatcagcgacaagacagtggcatggtatgccaagaccgctgatccagatccagcgctggtacaagtttcatccggttcatgcctcgagctcacgtccagtggagcgctctcgctccaggaccctactggcaaagaggtatggaatccagaagttgtgagtgcaacctatgcttccatgctcgatactggaaacttcgtactggctg

SEQ ID NO: 192288 - DNA, 368 bp, Zea Mays
cttttgttctaggagatctattgtgcgatgtgagcaagggaacccatatcgtccttattcttgattagtactattggattacattgcttgcttcacagtggagtatccgtccatccatggttctggtttactagtcccgtttcagtttctcttctgccgtgcgtgtaggatcgcctcagttgatgttgacgccttgccaagctgcgggagcacatttattcctaaacataggataattcgcagtttttactgaatcctcatgctccatgccaaggccgccccaggttttcctttgtcgtctatgaagattacccttcaaggagataccttttggtttatgctttagtcgtaccaaaacggaatatagc

SEQ ID NO: 192289 - DNA, 607 bp, Zea Mays
cgccgtccctcccaccccggtggcggcggtgggtgtcccagtcgcctttgattccttccccagtcttcccctcagatctgcgatccttatccctcccggttccccgtcctctcctcggccccagtcgaggagacgccgctgcggctctcgactcctgttgcaataattttgtaggcgagaattgggagagtctggaggctgccagccggtctagtggctcggccaaggcgagcggtggtcccagcgccgttctttccgcctggtgccggagtttcagtcttcaaggctgtgctcggagtttctgtgttctaggggccgggaggtgtgtgctggtgtgaatttggctttcttttgatccaattggtgcttaatttcagcctgtcgaaagaggcttctagcttgcaggttcatcgccgttggcgccgaacttgcctgccgtacagtctttctagtgccaaagttgaattttgaggaactgtgaagccgctttaagcaattacctttgccgaactttcctctaaaggcttgaccttttgggttccggagttcattgctgatcgacgggtcttggagtttttgtctactacctgcgttatgaacaggacat

SEQ ID NO: 192290 - DNA, 308 bp, Zea Mays
cttgcaatgcctctcacgaaccacatcttcaggtgctttgcgaagcatggatgcaattgacttagaagacttcgacatgtgttgattgttttggcttgcttcagctgagagccttctcttttgggctgttccggaactgggctgaacaactgaatgggatgctctactttccccttctccaagtacttcaacttcatcatctttatcaccatccttatcaccatccttatcatcatccaagtcaataggcttatgtctagcattcttcttcaaataatcactcatctctttgctgattgccgatcttg

SEQ ID NO: 192291 - DNA, 1056 bp, Zea Mays
ctctacactgctcgtgaagttgcaagatgaattttctagttatttgaaaggggaaagtgtagatggagatgcggagagaccaatggttattaccaagttgaaactagcaagtgctaggaaggagcttgaggacatgagggaggacataaaaaaggccaaggatgatgccaggatattttggaatgatgctgctacattacgagttgaaatagagagggaggaggcagatctactagcattgaaacacaaagagcacctcgcttcgctttctgtgtcatctctccaagaagagcaaagcaacatgacatatgagctcaacattgtccatgaaagaaagaaagctgctaagatgccaacagagctacaacaagcaactgaagcaatggaacaagcacaaactaaggctcagatggcacgttatgaggttgcaaaagctagggaagaggtggatcaagtgaagtcccaatttaatgttgtcaaactgaggctagaagcagcgtcaagggagatacttgcagtgaacgcatctaaagaaattgcaaatgcctcagcaaatgcattgcaagaatacaacgatgatggacaaatagagccccaagatgaacgaataagcaataactatatgatgttatcacttgaggagtacaatgccttaagtaagaaagcccaagatgctgaaggcctcgctaagaagcaggtcatcaaggccgttgaaaaaataaaagaagctaaggatgcagaggtgagaagcttgaatcagctggagcagtcgatcaagaagaccaatgagaggaagttggagctgagggctgcacaggagaaagccaattcagcgcaatatggaaagctcaccatggagaatgaactacggaagaggagggccaacgatgagcagcaaagtaaagcgaatgagtcggacgttcatgacatccccaattttaagagtacatcgctttcttttgatgcatcatcatcaacatccaatcctcacatggttggaacattgtctagagctgacactatagcagcaactagggtgaaggagccaaagccacg

SEQ ID NO: 192292 - DNA, 1399 bp, Zea Mays
cttgactgtcgttatggaggacatgtatggggcattgcatgtttgatgggatcaaaaagaaggtaatcaatttcgtatccctcattttcttgtgcataataagagcatcactagctaagtttagtgtaagtggaaaataatcaaataatatagaatacactgcttaatttatcaactaaaatagttgtgtaaattaccagggtttatggacgacctcacataatgtgaggttctcttccaaaacaacaaaatcttgcattaccatgttagctcataaaacccacacacaaaatgtgattagatcttctaattttctaagaaagaatttagtactagtacttttataacgagtgaggagcctttccttatttgcattgttgatgcgtactacaagcaaaatttatatcgaaccatgccaaaagcaactgccgatcaaatcaccatgtaggagcaaatttatttatttatttattgtattcttgcaatgcaccttttgaattattctcacttcctattatgccaaagctgtagaccaatggtgtttttgtcggataggtttgtaattggacaagaaactgcattaacaatcctggatgttggtgaccaagaatgccaggacatgagacaagaaggcacaagttctgaggtgagctcactagatgaaacttactataaagctacatgttgttgtgtccacacatgaaaacactagaccatgcatatcgccataatattttctataaatccactctttgatagtttgacacatcgaaaagcgagatgtgtggttgatggtggtgagtatgcattacatgcttgtgttccacaaccaaagactacccaacgtgcaacgtagtaacggtggtccctgcactgaaactggcatattttacaaccttgtttttctagtatttggttgggtccaaccattcttcgttcttatatcaaactacatagctgaagaacatgatcaatctctctttaatttcttgattaattaggctgtgatcatgtggaaatatggaggtcgtcgttaataaccaccctggtaatgttctgcaggtgataaccccagggtcaagcgagcttttgcttgacgtccacccgctgacactccactttcccttccatgcccacaagttgatcccgtgcacgctgcacctaacaaataaaacagatgaacatgtggcttttaatcttagtatagaagacggaatggagtcttggcagcagatctttgtaaggatgcccctaagtggaattgtgccaccaaaatccacttacactcttgttgtcacaatgagggagctgacgtatctaccaacacaaaactttaatttgaccctgcagtctaatatatgcgaagataggtacatctattcatttatgagcctatcag

SEQ ID NO: 192293 - DNA, 486 bp, Zea Mays
cttggatggttcgagctttggtcactgccaccaccaggaggagggtacacaaagagggactcaacaaaagtcgatccagctggttcagttacactcccacccattcctagtgtagcctatgtaagaatgcaaatatcaacaagttaagtatacaaatgtatcaaatcataagaatatttcgagagttacaaaacgtatctggtcttcagttgcaggtatatatgtgggggtgatgattgttgcatccccgatccctatttaatcgacatttgattaagtttagatacaattcatgtgttgctataataactagatgaaattatacattagacaatgttataatagaatttgctaaagattaccatattttaccaatttctcatacaattcacacaaacaacaagaatataatgtatatccatccacatgcatcacaaacaccattcacaactcacttacatcacatcatcaaatacttcacattac

SEQ ID NO: 192294 - DNA, 286 bp, Zea Mays
gggggctcggcggctggaggatggagacagtcagcgcgcgaggaggcaagctgagggtaggagaatggcgtggaggagaagggagagggaggtggctgccatttatggaggagaagctccagagcacggctgccacttttctccattgcagcaattcatcgaacacgtggtgagtgctacagtaacgacattgggcggccatttttggtgttttctacttggattcggacatgggtcactgtagcaaagatatttcccacacaatactctacaagtttgattaagg

SEQ ID NO: 192295 - DNA, 908 bp, Zea Mays
caaagccaagtgtgagaacattctccttgatctacaggtattcattttgtccgtactgatacagcagtgcttcatagtccatgcgtcattttagtgtcaccaatcttggtgtttaatatttttttcttgttgatatctgcagacttacccaaaatttgtaaggttcaaggcatcaattgcccaaattaagcttgatgaatactaccatgccagaaacatctgttcagatgattcaaaccttggtaaccacttcttgaacaataacttgcagcaaggagttcaagcttccctccctcagtgcctgtttgctgctggagatcactcggtagaaacctatgaattttgtggcaacagttcaagtgaattgacacgagttgaattgctaaaaacttttggcaagtccacattctattatgatgtcagtaccaaagatcaagatggcaatttagtaagctcaacttctatgtcgatccgtttggctcctttgcttttatgggtgcacttccatacaatatacatgctactgagttttgtaagtaaagttgagtctgatttgtcacatggagaaaagcatggtgacgaaaaaggaagcagattgagtaccagcacaaactcatcctcaatcggaagtctaaaagttcagatattcctatcaccggcaagaatcaccctgtgctttccatctgagttttcatgggatttgagccacccatctgtcctggataagttcctggtgatcgaccacacttcatgtctgaacatggtagaaactgtatcataccctcaaaatgagtttcatcttagcaagtcatgtacctcaatccatttggctgtagggaatgtagacatatatttggttaagccagtcaataatgtattggttggtagaatctgttcttcaagtaggc

SEQ ID NO: 192296 - DNA, 385 bp, Zea Mays
gtgaaacctggcgtactaggtttgtgtgaacatgtttaatgctatcttactatctcaattttcatgtattgtatataattttgtattaactcatgtgattacacacaatttcatatagcatagcctgttgtttcatttgttccagtggaaataaagcctatgaaaatgggcactttgctactgcagaggattattatacccgtggaataaactctgttacccactatggtgtttctggacattgttctcgcgcattgatgctgtgttacagcaaccgtgcagctacaagaatgtcgcttggcatgatgtgggaagcacttcaagattgtttgactgctacatcaattgaccccacctttcttaaagctaaagttagagctgccaa

SEQ ID NO: 192297 - DNA, 434 bp, Zea Mays
tgagatgtctagtagtccccaatcacaaacatagcacaaaagcaactaaagtggaatgcaatgtccacaaccacaagcacacaagtgttactcaagcactcaataaccatcatccaaatcatctaaaccaacatcatccttgtcttgctcaccaccacagtcaccactgttgtttgttgcttctttatcatccatgtcaaggttgtcaagcacaaaattttcatcgtcttcattctcttcacccacatcaagaccattttcatcatcctcaagaattggcagcagtgttttcaagtcgtccaactaatcgcgattaatcggtggattgcaatcgaccagccccaccgatgcgactaacggaccagaaaattagtcgtttgattagtcgtccgattaaacatgggacgactagtttggacatggcactgttgatg

SEQ ID NO: 192298 - DNA, 310 bp, Zea Mays
ctctaacatccctcgtagttacaatgggagcaccacatatgttgagactggagaagaagctgacaagctagcatcgtccctcattaataacagtcgatgcatcacgtatgctatggctggagaagaagcgaacgagtcttcatgcaaggcaatagccctttttgtcaatgttgaagtagtcgagcttgagggtgtaggtgtcgtggtcgagtataccatgttgaagatacccgtggtcaacatagtgtctgtgtcgtggttgcgaatattgttggaatgttggaacctgacaagtgggcccaagcactcg

SEQ ID NO: 192299 - DNA, 309 bp, Zea Mays
catctagtcctagctttcatggagcttgcgcatccagggaaaaggaccggcacgtctctaaaagcacaggctcgttagatagaggaaggaaaagctggggtagtggtagctccacattagcctctgcctcggcatggtgacagctcgagacggaggggattagatctcggcctatttacagctcagaccgtagcagtacctggctctggctgtagaggactaccacgtactttccaagtccacgctgtacagcagcactgcgtgcatccctcacacacaccacaccgtatcgggctactaccggagcat

SEQ ID NO: 192300 - DNA, 759 bp, Zea Mays
cctccagtacatcaccctgacccgaccagacttggcctacgccgttcagcaggtgtgtctcttcatgcacgacccgcgcgagccccacctggcgctgctcaagcggatcctgcgctatttgaagggcactctctcctccggccttcaccttggagtcggccctgtccagtccctcaccgcgtattccgatgcggattgggctggctgccccgactcttgacgttccacttcaggctactgcgtctacctcggcgacaacctcgtctcttggtcctccaagcgacagaccacggtctctcggtccagcgcggaggctgaataccgagctgtggcccatgctgttgctgagtgctgttggctgcggcagctccttcaggaccttcaggtctctcttgcctctgcgacggtcgtcttctgcgacaacgtgagcgctgtctacatggcagctaatcccgttcatcatcgccgcacgaagcacatcgagatcgacatccactttgttcgcgaaaaggtggcactggggcaagttcgggtgctccatgtcccctccactcatcaattcgcggacatcatgaccaaaggcttacctgtccagttgtttactgagtttaggtccagtctttgcgtccgtgactctcccgctgcgactgtgggcgggtattaggcatatatctatagccggctgtcttaccttgtataggtgacagccttcctagtttagccttaccttgtataggtgacagccttcctagtttagga

SEQ ID NO: 192301 - DNA, 275 bp, Zea Mays
caaaaatggttttatgaagcttcaacatgaaacctctgatgccgaggtgctggtctcggcagcatcaaggaacctgtcgtcctcttcatcagcatttgtttcagcaaaccagtcccctttcttcacgccacggtcactgtctgcccgtgtcccagagcacactgaccctgagaacaattgctcctccaatggtattgtgctgaaaatcagtgatatactctctggtgattccttcacaccacaggaggagttaccatcagctagcgttggggtct

SEQ ID NO: 192302 - DNA, 348 bp, Zea Mays
ccaacctggaatttttgggatcatcgaaccaggcaacctcttggtgcacgatgctccgaaacgacagggcacggatgcgctcgataagcttcccgccggctaccccaaacaagaaatactccaccggtattgacagtatcgacacgatgccaagcacaacacacatcaagccccagaagctcgcgtcctttttcagctggtgcggcggctcgtagaacgtcttgatggcgttggagatcatcaggccaaacaacgggaagagcactccatggactccagcggctagcgaccctaacacaagtatcggtacctctggcttgtttaggctggctagccgtcccatcggag

SEQ ID NO: 192303 - DNA, 285 bp, Zea Mays
gctatgtattcaggcatctagcgcacccacccgtacctcagatcctccaccagagagatccaatttgggatttctcccaaatcaaccaagaacaccgtgccttgagacctcgtcgtggccagcccaattcaggtccgatcctgccctttgctttcttgtttctgcacccttgcttgctcctgatactcactgacccgttcaattgagctgagctaccgtagatcgttgggaacgcattagaatgtccgttgatcatacggtcaccgtggacagagtaggttagag

SEQ ID NO: 192304 - DNA, 705 bp, Zea Mays
aaaagaggtagagggcgacctaggaaaaacccaagtgacaaactgacagactcatctggtattgtatcagaagatgtgtgtacagccctacctccaacaactgcaatctctacaaaacctaaaagaccacgggggaggcctcgaaaatatccaattccaatgaatgatggatctgtttcaggcgctgatgttgaattagggaaagagacaacttgtcagactgcttcatttggctgcagtttggaccacactgcttgcacagagtttaatgccaagttatgtattgttgcagttgatgcagcattgccacctattgacaaactgacctgttcacctggtactgtatcaggagatgtgtgtacagccccaactctaacaactgcaatctgtacaaaacctaagagaccacgggggagacctcgaaagtatccagttcaaatcaatggtagatctgtttcaggcactgttgctgaattaggacaagagtcaacttgtcagccagtttcatttggccacactgtttgcacagagtttaatgctaatttaagtattgttccagttgatgcagcattgccaattgtcgacaaactgtgcagttcatctggtactgtagtaaaagaaagtgtgtgtaccgaaccatctccagcaactgcaactcgtaagcaaccaaagagaacacgggggatgcctcgaaagtattcagac

SEQ ID NO: 192305 - DNA, 761 bp, Zea Mays
cgatcaaattcagggtcaatattgaagtcatatccaaacattcatcgatcacaagctagttctgatgattgggaacatccgtctggtacaaataagttaatttctgctggtggatctggcattcataaacgtacaaaatcaacacattcattatctcctccgatccaatggggtgggcagaggcctcagaagatatcccgttcagcaaggaagtcaaatttagtccctataatcactactgatagtgcactggtaccaggttcgctggacagtcctgtcaatgaagattgtgcaggtttaccgaggcgtgcatctgtaaatagccttcaacaaacaaaacgaggagatcatgggctctcaactggacctgaaggcaatgagcctgtagttgctgagaaaaagctaagggacaagggcaaaagggctggtgaactggatgatgggcatggctctggttttcagaagattgctatgcttgggcatccttccaaaaggaataagttgcctgctgatgaggatattggagatgctttaaggagacaagcaagagttgtcccgggttttactctgaccaggcctgggactcctgtatccattgacaagcttgaaaatgctccgattacaaaacaaagaagtgtgaggacagtctcagagagaactgagaggtaacttgtttccttagctgaaaagcagttttatgtggctaaatactctaaccctgaattctccctgtagtaaatctgggagaccactgatgaaga

SEQ ID NO: 192306 - DNA, 409 bp, Zea Mays
tttactaaggtcaatccacattgcaggtggtactaccttattacctgtttgtcatttactcattttcgtagtcgagacctactctcacaaccggtagaatattgccactgcgacaaccccttaggcaagatgtgatgtcattatgatagagccatgccatttagttggtgagagcagatgggaattgcatttgttgtatattcctaattgagagattggatgcacagtacattttatagtgacttaaggttaagaaacaaagaggcaacatgcctggaggagaatttgtatttgggagactctgcaaggaggaggtttatggtttacagaatcatgcatgaatgaactccaaaagagttcatgtatacccagcgccagcagatcatagtgttagatagatagcacatca

SEQ ID NO: 192307 - DNA, 431 bp, Zea Mays
ctcccgggtataaagcatcgcgccgccgctccttatccaccgccctaacctcgcgaccacctttttgcggccgcggtgaaaacgacgccagaaagatcaagccaccattgccgccggtaatctctgctcaccttggcgaacggccctcggatcttcgacccagaacttcgccgcgagtcgtgggagctctcgtggtgtcttcggacgtgggtagccactcgtgcgctggcgattgctcgccggacgctcctcttctgccacggatccaccgcaccgcggacaacctcgttggcgcttccatcactggtacggccctgcattgttgttacgttgttctagactagcgtaggtcgaccggattgatggggtagggattgtggctcggtaatttggtcatcggcgttagtttttcgctagatgtcgtggcccgc

SEQ ID NO: 192308 - DNA, 561 bp, Zea Mays
tcagcttgggcaagcaatcaccctgggctggaatctcgttcaggaaatcttgatgaaaaaacacctcgcacagcagaacatacgaccaatcttggtgtttctgatgcacacacacgttcccaaacgctagggaaggaaagcagtgatgatgttgattgttctcaaggcaagtcaccaacatcaaccataaaaaggaaaattggtctaaaaccaaaacaggttcctgggaaatctgttcgacgaaaagaggaagtattatctgttgacgctgataataaaccaactgatacaacagaaattattgaagcaagtactactccggttattgaggaaaatttggatcagctgcctgttatggcccccaaggattcttgttcttcacatgacattgttggaaatagtcctatgtgtctaggtgcagacatggcagcacctgtgaaatatgtggatatagttgatgttgcaacaccattggattatgaagacaaggagaacacatcaaaggtgaaacgtgttacacgaggttccaaaaaacgcaaacatggtgacatggcatatgag

SEQ ID NO: 192309 - DNA, 397 bp, Zea Mays
tctcctccagaatgccatacacagatcttcaagatcccaaaggatgggtcccaaagtgcgcagaaatgtgatacccaatataatgtcaaaggaatctagaggaatggcatatgcgtccatcaagaactcttcaccggcaatggacataccaatactgttagcaatctgtcggcagtgaatcttgtcgccatttgctactatggcctggaaaccttggttggaactgtaggctagctgcagcccatctacagttttgagactgacaaaattgtgggtagagcccgtgtcaagaagagctgtgagggtgtatccccgaatgtcgacttgcagttgcatggtgccctctgagcggatgcctgttaaggcgtggagtgaaataatgggtgctggatcctct

SEQ ID NO: 192310 - DNA, 490 bp, Zea Mays
gcaagggtggcctgggcaggggtggagttgctgtgacacccaccccgggtagtacaattggtggtgatgagggctgtgctggcagcaaccttgttgtcattggcgaggcgcagttccttgaaagtgagcatggcgcgtgctgcagcgaaggtgaggagggcagtggcgttggcaatgatgtcggccgtgttggaaaatcgagggttgagaccatgaaggaggttgagaatgagctcagagtccttcacgggatgaccgacatcacggagggcgtcgacagtgttcttcatgggctggcagtaggtgacgatactaggatcaccctgctgcatggagtgaactcgtggttgaagaagattgcctgaggttcagaagatgttctcgatggcgacccaaagactccgagcagattggtcgtcatcttccattgcgaggtcgagaacggagtcatctatagagctgaagatccaactatcgacgcagcagtccg

SEQ ID NO: 192311 - DNA, 435 bp, Zea Mays
gtggagtgcttcaacccagaaggttggtgggatgctggcctgaaagagaagagagcgaatggtgttattggtagtacggatgatgcgctcagctttaccattctgagatgaggtgtaggggcagaacatgcgtaggaggacaccgtgggtgaggaagaatgttcgggagctggagttgtcaaacttgcgcccgttgtcacattgcacaactttaatcgtgacaccaaactgtgttttcacataggcgaaaaactgagtgagagttgggaaagcatcagactttagtcgtaaagggaaagtccataagtaatgggagcaataatcaagaacgactaagtaatatttgaaacccgagacacttaaaataggagatgtccacaagtcacagtgaataagatcgaaattgttaaccgcacgagaaatagacgtacggaa

SEQ ID NO: 192312 - DNA, 375 bp, Zea Mays
cgctgccatccctagagaagacgttgcccaagttgcagcttcattcatagcagccaaccattcttgatcatcgccaaggagcccacgtgctttgctgcttccttgaatgtatcatacacaatattgttgtaggttcgaacttcctcgtaactacgtgcacctttgacaactaacaaaagcattctaagataatatttgtcgcctgctaggggatgcacatagtatagacgtcctattttcccttctcttgcttgtctaggatgccaagtcttggtcttgtcatcccacctccattttgatgggaattgagaatatgtaagatctctagcattaaaatatctttgattagtagtaaaccattcagtaagcatggtt

SEQ ID NO: 192313 - DNA, 426 bp, Zea Mays
cacccccggattgctgatggcctctaccaccgccccggcctccctgatcaccgccaagcaccattgtattcctcgctgcgtccacgtatgagatggtggctgacttcctgagagttgaatgaactgcccaggcactagtcacccatgtgcccgtacgtgcaaaaagggaagctagccctggcgtaggtctgtaaggaatcccagggctgagtttcagctgctgggctctcccaaatctacgcctaccatacacatacgtactatgtctccttgtatccggaaatgaagatgtgagcgattcctgcagattttcccgatctccatcctttccaaataaacaaggaagcaaatttgaaactgcctccggctgccccactaacccagccgtacattccgccttcttcatcccctgaacactacgcccat

SEQ ID NO: 192314 - DNA, 1012 bp, Zea Mays
tatgtgcgctccctaggatcattgatgtcataaaacagttctactcggaaaagctagatccaaggttttctaagcctttgctggtaagcaaaaaggtgactggggagagaccaagcatggaagaaattcgcaagatccgacttctcctgttgagtctggcagaaatgagcttaaagtaaattacttgcaactgttcgtcaaagattatcttatgttttttctctccattagcagtcccaaatttctgtccttttcattttcaatgttgccctgtacacaaatctgaaacttttttttcttgatttgcatgtgcttacattttcattcatattattttgggctgaattggtgatggaattatctgtttcaggctaaaggtttctcaacatgatatcagagctcttgtttcctttcttgaacgaagtcaagatgttgcatgtgttgaggatatactccatatgattatccgcgccctttcacagaactcgcttgtaccatctttcttggagcaagtaaattcacttggtggttgttacattttcatcaatcttcttaagaggtgatttgctttgatttacttacagatactagctaaaagcaagcaaagatttcaatctacattaattctcacgttgatagggtacttttgctcttgtcgttactcattagggtttatcaaattgcagatattatggacctttttttttaaaaaaaactgaactctgtttccgactggcgaaaaatatttttcctttacttcgtgtcatcttttttgtgatacaattcatggcaagatgcaaatgcagtttttatatctgttttctctctgtatcgtactttttagtttatatatgaagatgtgaatttttacatcatttgtttgccagggaatttgagccaatccgcctattgggccttcagcttcttggaaagcttttggttggggttccatctgagaaaagagggccaaaaatttttggcctccctgtaggacgacctagatccattgctg

SEQ ID NO: 192315 - DNA, 275 bp, Zea Mays
ggaacgtagcggcggctatagagcaccggggtacaaacctccctggtataagcaataggtaagcgctagatgatgaaacaaggagggctgcaatgcaatgcggcttgcaacctaatctagggctagcgtggcgagaattcacacaaggcggctagcgagggcaaatcgagtaatgtggtgtctcgacttgtaatctgggtaaggtggatgggatagcggcggaaacaaataacagcgatggagcggttgaactacgatgacgacacgacctaaac

SEQ ID NO: 192316 - DNA, 326 bp, Zea Mays
ttagcttcctggcggcggcgcttagaagctagttggttcggtgcttgccgattgcttcgccgatctctgcgcaaacctctcgaggacgcctccttaattagtgagacaacctctctgctcaggtctcaccgaaaaatcccagctctctattcctattcctcctctcggttccagtcacggtttggatcgattccttcgattcttggtgttctggtgttaatcctgctggaggaagaaggtggaggtggtgctgttcttgtgcagcgaggttctcctgtgccccattgactcaccagtgcacctgtgtggtgctctgtctgttctga

SEQ ID NO: 192317 - DNA, 271 bp, Zea Mays
acaaaatgaagtcacaaaatcacagttacttcacagtctcacagatttctcaggtcacaaaatgaagtcacaaaatcacagttacttcagtctcatatactataaatacagttcacacttctcaggtcacaaaatgaagtcacaaaatcacagttatttcacagtctcatagtcacagatagtagtagttagtctcatagactataaatacagttctcacttctcacttctcacttctcaggtcacaaaatgaagtcacaaaatcacagtt

SEQ ID NO: 192318 - DNA, 425 bp, Zea Mays
gtgatatcggacaaagtgccttctaaggctaaggagcagctgcttgcatattatgatgagcaactggcatcttatgaggctcagtttagtgcttatcgaacatggctggatgatgatgctcgagttggttctattctcactgtcagtatggatgatcactttgctgcagaggttattgagtctgatagttcacatcagatatggaattttcgtgattgctacgagcatattggtctctctacttatcttgctactattcgtcaggagcagtacttacgacagggtgattctacagttgatgaattctacaattagatgtttggtgcctggtgtcaacttgattctcttggttcacatatgtctcctatcactctgtctcggtcagaagactgatcttgagttttatcgcactcatgacttcttga

SEQ ID NO: 192319 - DNA, 516 bp, Zea Mays
gttacggtagaataggattagtttcgatctatatatctaggactgcttgatctacgaggctctatataaaacataccgtggcttggatctcaaacagtcctatagacagagatgaacaaatcctaccctacgatagcactcggactctggatctatgccatatgctctaacagccaaaacagttgtcaagactgtccattgaaatcttatttaaaatgaatattcattttaaatcagtaagaacacaaaccgtcaggatctgggtggccagttgacccctagcaagtggattatgcagaagcacaaccaaacgagcaaacaaatcctgcatgatacgcataatcatgagaaataactaaccaactgatgaaaagattttgtagataaaagacatctgagattaagcaagctacctcaggattgggggtttcgttggaggcattaaattcagtatatagtgggtttgtatgtgaaaatttatgcctgcacaattcagttatgcatttgcagacctgc

SEQ ID NO: 192320 - DNA, 372 bp, Zea Mays
ctgtcttcggcgatgaagttgtgtgtggacctggagtcgagcaaggcgtagaggacaacgttgcccatggtgatgcgaaccttcatggtggtcgaggagcgaacgctggctatggcacgaagggagatgagcggtgcttcttcttgtggatcgggctccatgcagttgtcctcatcttcggcgtcatctaggtctagtaagaacaatcgggggcaaactttattgtgcctgcgactgaacttatgttgcagttgtagcagaggcctagccgatgtcattcttccatctctgcttgagacagcttcttgattggacgaccttcaatggtgatggtggagctctaggatctggaaggtgcctatgatatcctag

SEQ ID NO: 192321 - DNA, 607 bp, Zea Mays
gaaaaaaagattctcaagtatctctttattctaactctgctaaccaggcttctgacgtgttagagcttatcaatgcttattttttggcaggtaatggaaaataccaaccttgtgctccagtataagaacctgtgttctcagctaaacaatcggtcgagtatggcttcatcgtcatctgttaaaaatgatttgaaccagaaaattcagtcacgccctttgaatggcctcacgagtatacaccctgcagatacacgctcaaagttttttagtggacccccattgacatatcaacaatgttatggtcctgatggcagaactgtgtctagtagtacattggcaaacatgggcagtaatgcttcaatgcttatggttgcacaaagaaatggccaagtgggtaaagaacacattgtatatgctcctgacatgaggttcagaccacaaaacccttactgtgacaggagagttgggagtaacacccaaaatagtgttgtgagctctggttttatctcgtctatctcagcatcaatggaaaggcatccattaatgaccaacaatcgacagttagaacaaggaaacactggagaaccatcagattccagaagtgttc

SEQ ID NO: 192322 - DNA, 818 bp, Zea Mays
tagaaaaccagattcctaaactatgtcatctggcccaagagatgggtgaaaaggagaagatatgcattcttcatgcagctgggctacaagctctttcatctatggtatttgtttctcttgttatgccatgtgctcttcttagtgcacctgtttggttcaagagtagcttgtcctgcattgtgtattcattgatgggagtaatttatagtatgatgtgatatttttaaaatgttctttctttctcatgcatcatactattcaagataaccaattcgatcccttctatcaaacaatgatcgtggactgtcccatttgggaaagagaatgtaggctctaagttccctcctagtttttttttcttcctacggtgtttgtgtttgtttggctatttgcgcctttgtctttttagtgcaatgatacacaactctcctgcgtattccaggaaaagatatgttgcctcttaggacctgcttgaaagaggaggatttttttttgtcaaacttgaactaaatcctttggatcttaacccttcttcctcttacaaaaaggtcattaatgttccaacaaaattaaacaaaagtatcgtttcatttttcactctgctacatttgtgtttctttttgtttccccagaattttgatgcctaatgttgatttgggtgcttgcagatttggtttatgggtgagcactcccatatgtctgcagagcttgataatgtaagtgtgttattttgccttccccttgtgcttcttagttgaataagaagtaaagcaaacagttgttagcccaacgaaagccttcacgtttggcgattctga

SEQ ID NO: 192323 - DNA, 509 bp, Zea Mays
tcacacacactcaaggtcaggtgcacctaatgcctttgtgtaagcatgctatcgcatttacaaaaatatctagtcaggcaatcacaatggcttccaggcaatggaaaatccaattagccatgaataggtagtacagtggtacattcatgtaacaaaaggtacaagaatccatgctaagcactcattatagcttactagggcaattaaggcaccaattctcgttctagataagtccccataaggtcagattagtagatatgattgcacctgcgacaacaacacatgttgtatgattacaagggagacgagctgctattacatatggctgtaacaagataggggcagttgattcaatgacaaatagtgcccacaagtagagcatacatgtaagcttaaccacttccttggactataaaatggatgggtggagaagcatttaagcgaagccaatgcagactccttttatgaccccacacaagccaaaagttggtagtctagtttgccgcaac

SEQ ID NO: 192324 - DNA, 413 bp, Zea Mays
caggatctcaacttgtggaagaaaccatcagcggcaacgttattaactcttactgtggatctcgttgacagcacaagatggcggagctcggccaactccccgaggatttgcatactatgctcgtccatatcgatcacatataattccaggtgggagagtttaacaaggcataggggattaatgcacgacggtagcctgtacaaatggacaaagtactctgacacaagcaaatgtctgagatgtcccggtagcgccattgcatcaaacattgcattgtcggcacgaccgcaaccaggatgactctccagttttagactctggatcttatggagatttcctagagattgcataagatctggcagtatgctctgttccatcgtgctaatgaccttaatctttagcaccctaagttc

SEQ ID NO: 192325 - DNA, 2237 bp, Zea Mays
ggccacggtgagctccgccagtgggctccttgctatgctgcaggagcctgcgccggagctgaagctgcacgcgctcgcccgcctcaactccgtcgtccacctcttctggcccgagatctccaccagcgttcccaccatgtgagcccggcctcctcccctcctcgcttccgctgagtgtgcccagttgccgccgctgtagctgcaacgtttgcgcgatttgttcaggcgctcaccttggtttggctgaatttctcaagtgtttcgatctgcttctcttattgatgatgatgactctggaagagaccttgccatggattttttttgttgttgttgcgcaattcgttcagaatctagcgtttgtgcaaggtgaccatgggtcaagggttggttctgataagttagatgcggattagagagacccaattcgcgtccgtgtgcaagagtgtgataaccatactttcgtacagtgattgtagctgaattggtttcagtcttcttctgcccttggatttagcgtgggttttggttagaggctaagctattcgaggtaaatatagaaggaacaatggaaagggtatcagtaggagtgggctgaggagtgtaggtaattcagaattgtttgaaatttcatgggtggacagatttacattttagagttcctgatgtattttgatgtaccaagggaaatactgtggccctgtttggatccctccagataatcataatctgctaaactttagttgataggatccaaatatacccagctaatagatcaactaaagtttttttccccgaaaaacgcaggagaactgcgcctcaattatatattaagaagagagaaacaaaggtctaaagagaccaactaaagtttagctaggggtcagacactcattatctgttaatctacctcatagcagccaatttcagctaataggtacctctggtcttttttgcccatgtccgtaaccattcgccatgtccattaggcattagctatgcatccaaacactcatccagctaatacatattatctagctaatatcatatattacctagattatgataatttctagttcatccaaacaggaccttagtcttgacagatgaaaggaaaatgagttctaccatcttcctttaacaaatttctagtttccctgttcggttcagttatgcttatgcaacattcagatgcagtatgataagcttgtcatttttggtggctatgtatctcaatagttgttgctttcttttatatcataaacttgttcctcgaatgcttgttccacatagaggcataaagcacccttctttgtttgaattattaacatcaatttctgtttgtgattgctatacagctagatagatttcattgcacgtttatgttggtagctatctgactttttgatacagatgtaactttagttcccatttagtttgtggagctacacttccccttattttttgtagtgaagatgatcggctcattgattgaagttccatgactggacaagcacagaaagtgtgccttttcttgtatttccaatttccaataatttaagtcactaattactttccaactgttatatatttcctgcagtgagagcttgtacgaagatgaggagtttgagcagaggcagcttgcagcacttgttgtttctaaggtattatgcctcaatatttttttattatggggaaaatcattttttgtattgttaatactgaagtttgttgtatatcatgtaggtattttactacctgggcgagctaaatgattcactgtcatatgcacttggtgctggacccctatttgatgtttccgacgattctgattatgcccatgctcttttgggtgagaagggccttaagtttttagcttttgtgaatggtagttttatcatcatatcttttggccatcatgttgaagtgctggttctttttcagccaaagcattagacgaatatgccagtatcaaaaccagagccttgaaagctacagaggaggaagagaacattgatcctcgattagaggccatagtggagaggatgcttgaaaagtatgataagattatattgtttattgctgtcaatttgtcagatgggttatgaatctgatgtaaattctttgagtcaggtgtatttttgatgggaaatatcaacaggccatgggtatggctgttgaatgcagaaggctggataagctggaggaagcgattgttgggtgtgataacattcaggggg

SEQ ID NO: 192326 - DNA, 349 bp, Zea Mays
atattggttggcaagactattgaattcatctcagtatggctagcatgcaagcccatttctttaaggtgcccaataagccaatgcttaataaaaaatttctgccttgacactgattcagaaatgctctcaatatctgcacctcgaatatttttgttttcactgtaacgagctttctggaagaaatcaccattttctgaaggaattctggttatcctcgaagtgtccacttcctgactgactaatttactgctatcatgagcatctttcacatgcatcttgaactttaaaggagatattgtcactagaggttcatcctccttgatgttggctgaatatgtcttaatatata

SEQ ID NO: 192327 - DNA, 590 bp, Zea Mays
ggactgtcctagcagtataccgttatctcatagataggccgtgaaaaccactcaaactcttattagtgggtcgttacccccacagatgagcgtgaccatccaagcccagcacgaaaagaagtcacatgcaatgtagcgctcccacatagtactacctcgttagctaaagaaggacaagcgaccgagcgaaatataaaaaagagggtcggactccttttcaactaatacatttctatgcattttggctaaggtaaagtgtaatattttttcttgtgtgtcgtcgtaacgcacatgtattgtagtagtatattcaaacaggacatcatcatcaatgcatgcttatggaaaaaatactcatactaaattgtccatatgatggttacatacttacattcatgcatataaaacaatgatttaaacaatgacaaccaaacagtttaggcacatctccctccgtccaaaaatataacagattcatcggacaaacaatttgttggctatttagcaccttaggtttcaaacgggctagctaataaattgactaattgctagttagagagccgataaattatttgcctattagccatttg

SEQ ID NO: 192328 - DNA, 441 bp, Zea Mays
cggtctatcccttctcaccccttcggatctgctaagcgtgaggcacagccgcgtctatggtctgcctggctggtccctccctctccgcgcgcgacgcgcctctccaggtccgaccggcgtcgagcgcgccaccgtgggccccctcctctgccttagatgacaacatttggtgagtggtgatgcaactgggcagagtggtgaactggtgtttgacgcgcttgccgacgagttgcaaattgggtgaggatcgacttctcatctgcttgttcttaagtctgaaaattcactcatagttcatttgtgttgtgttttttagcccatagcttttagatgcctggtcattttggagatagtatgggggtcatgtaggtttttggtttagaaaatggtacttaaatgaaagcaaatgagataaaagggtaactttgtatagacaaggaa

SEQ ID NO: 192329 - DNA, 409 bp, Zea Mays
gtgcatgggaaattgttttgtacaacaactcttagatgttaaaatttgactgtttttactgtcatcaactggggcttgggatttcagaggaggaatatcagaacttgccattttgtcgtggaatcctccaagaacctgtcgccggcgagctccttgagcagggctacacgtcgctctacataaggctagagcccttgagatgcttcacgcacacaccacgtccttgcctcccatcttgaccccgtcgatgacatgagtcccagacttgtcgatgaacctgcagggagggagctaacagcaacatcagttttcaagacccaacacgactcaccaccgctgggacggtcgtactcggcgagctaccacaacctgctcaactccgcggactgcagggaggaacaacagtgag

SEQ ID NO: 192330 - DNA, 328 bp, Zea Mays
ggctttgcgcacagattagttatctctatggtgtggctctatatagtagaaagtcttgttgaattaaacctgctacctgtgctgcgttttgttgtcaaaagttctaggcatcattcatcatcacgttgggtgcaagatgtggctgccgtcgtttgttgatcaccggggaggatggttcggtggtgctgtcagatctaacgcatggttggtcactgggccagcagtgcccagtggcaactggcaaggcagcacgtacacgaggtggacttggaggttgagagttgagacgcgtcgtcgaaatgctagctctgctagtctctggttcagg

SEQ ID NO: 192331 - DNA, 355 bp, Zea Mays
cgcggctgcatcaacgaaggcgcgcaaccttatcatacaaattatggttacatacacacagcgagggcatcacatattacattggctcaaccttcagaatgatactcatctccctgtagttgaacaacattatcctcaattcctcaccctcaaaaagatttcgcagctccccttcacccacactagccccagccggcgaggacagcaattcccgtttactagtcccgtccacgcgaagacgaccactctccatctcaccacaatgacgcctgccactttgcgacaattcactcactctccgtttcgccatcgcccttcgtcgcctacacccagtactcgcaaccggaagatcctc

SEQ ID NO: 192332 - DNA, 429 bp, Zea Mays
gagtttcggccctccatgtcctgctgtccacgacgccaggcgccggctgttcctgctctcctcgatgtccaactgccccacacctctccatctcccctctctgttcaaactccgcaatgcacagtggacagtgttgcaaactgccagcgcaatgggctcaactggccaacaatccaaggccgcagtgcacaatgagtgattctcctttgtccttcccttttcactacttgtgtactagattattaagtgttacattgttaatttgtaatcgtattagaaagctacctccaaaaagttaagtggtatgttttgtgctcaattgttgtattaccatctctcatttattgcaaatgtttaacttccaatgtgtatgtttaaattcacgtgctaatataacaatattgatgaagctattagagataaggaagg

SEQ ID NO: 192333 - DNA, 652 bp, Zea Mays
tgctgttccaggtttcttgttttagtttttgtaatgttccatgagctagtgctcttttattatgttgctaattaccttagtttcaggggatcacttgatgaggcatatgcaggggatctatcatttgcagattctctgcaagcatttggtgctggtctggatgatcctattagtgttgccattggaggtcagcaaaccgctaatgtatctattgcttaaatgcttagttctgtccttccatcctatctatatctagtaaaacaacaacaacaacgccttttagtcctaagcaagtcgggataggctagagttgaaacttaacatttgtgtttttttccgtttctaatttctagttgttccactgccactttgagtgttttggatatttacggcatatttttttaatgtctgtagatcagaacaatggatccttagaatataaaagtacagatacatacatatccatgcactcattaattaatcaaattcctcctatttaaaattgcagagcatgataattgatagctacaaatttagtcatttgttggtgtttctctattgaaattctctcaaaactatattctttactatgttgcagggcccgtgatgtccaagtttactactgctttcagggagcttgggacatacaagg

SEQ ID NO: 192334 - DNA, 1048 bp, Zea Mays
aacggatcggagtcggagtccttcttgtgcttctcctgctctgctggtgccgctgccatgggtttccccagcacccccaacctgaagctggagcctcgccctcgcacgcggaggctcctgcgctgcgccctcagctctgagcctgtggtatgtatagtgtactgacgtgataatctctagctagcactatctcatacagtagatatgaatccatccatgtttctctgccttgccaccaatcaatagacatacatcattactatactacctaactttgatatgcttacttatcggtttcagcagcctcccatgactgtttccatcactggagccacaggtttcattggacgcagattggttcacaagcttctatcgggtctgcttccttccttggctcactactggactggattcacttattgcctgccttctctctctcatcacatacatacacatgtttcattgcatccagatgatcacaaggtttgcatcttaacaaggtctgcctccaaggctgcgtcagtttttcctggtaagaaaagatccaactcaacaatcactacttcctgatgcatttacccatgcatatacactaccgatactactgtcaggcggctataataataaacgatgttcagttctatcgttgctgaaaccaaatttgtgatccgtgcatgtgcatatgacgacctgatccatccatcgcacgcagcttccacctatcctggactcacaatagcccagcaaggggattgggaggcatgcgtcagaggctccactgctgttgtcaacctggcaggcatgcccataagcactagatggtcacccgaggtccgttccatttgttcaaatctccagtctgcagtagatacatagatatatctgtaatctttgccacgattcgatgcatttatctccctctctatgtcgtccatcatagactacctgccttctctttcgcagattaagcaggaaatcaaacagagccgggtcaatgttacatcaaaggtacatcccatcccatccctccctacatacaattcaaaac

SEQ ID NO: 192335 - DNA, 467 bp, Zea Mays
cctaaatcgactgaggctctggagctaaaagattacagaccaattagtctcatccatagttttgcaaaaatcataatgaagctgctggccaaccggcttgcttctaagctgccgcagctggtctctctcaaccaaagcgccttcgtgaagggtcgatgtattcatgacaatttcatccttgtgcaacagatggccaaagtgcttcaccggcagaaagaggccaggatccttctcaaacttgacatcagcaaggcttttgactcagtttcgtggccctttttgttggaagtcctgcaatttcttggctttggctcgttctggtgcgacatcatgcctaagatgttcagaactgcttccactagagtcctggttaatggagaaccgggtgatctcatatttcaccaacgggggctgcggcaaggggaccccctctcgccaatgttgtttattctagtcatggacgtgct

SEQ ID NO: 192336 - DNA, 868 bp, Zea Mays
cttcatcacagctattccattattcggttagtaagtattctacatttagtttgtcattttggtggctttaatttgcagattcttttaccatattttgagaacattgactaatctgtattgtcccttcgaagttttctgtagcagaaaatattccaccaaacttatatcgttcagttaattttctaaattgtcacgtagttctgcatgatacatattttttttgtgcatggagtctcatctagtcatgaactgatcttttcatatcaacttcaaaagtatatcactactgtcgtgtggcgattgcatgtagcacattgctactgctgagatttgtaacggcatataaaatgtgcaccacaaacctatgttagtcattattagacctctctatagctaagttattaatgtacagctaggcatatttagcgcttcattatacccattgctcagtacttgacatcttctgtgatttgtgactttatgatctgttttgtgaaccctgcttgtttctgtgttccaatgctctgaactgttgccaatttatctgcttggtttctttctaggactatgatgtcgaggatacagctttgcctcttcaaccgtcgttgaactatactgcaccagaattggttcgaagtggagattctaaagttggctctgcttgtgacatgtttagctttggatgtctagcttaccatctggttgctcgtagaccacttctggactgccataacaatgttaaaatggtatgttttaaacatctgattgatggcatttacccaatatagatttgtccttttagcatcaatcaatggcctcaactgtaattttactttctcgcttcagttttgcatgtagatcatcttgt

SEQ ID NO: 192337 - DNA, 347 bp, Zea Mays
ccctgctcgccgaggtagctacctaacttgagctccaagaactcattggctatgtcaccgctggtcgcaaaggtcctagctagaccatcgtcgataacctgatcacgatacgacaccatgtctttgtcctcgcctcgttgcctctgctttcatgcattctacagcagctccaccaaacctgccacgaggagggcattcaacatatcctccatcacctgcacgccgacttccatgtacctgccggcaaggccctggcggaggcctttgttggtgattgcgcggtgtgtcaacaaaacaagacaagcaatgtccacccttgcagccttctccaacccctaccaattctg

SEQ ID NO: 192338 - DNA, 446 bp, Zea Mays
attacagaaactatattgtttctactactactgaagcaaacattgttgataaaggtacatctagaagagggaggaagagaaaagaagttataccttctcctgaggtagagacaacggatcatatgcaggactcgtattggtccggattgagcttgtataatcacccagttcatgacctaaaaagagagagtccgactacaaggccaagacggaaacggagatcctcaagacatgcatatatacctttgtcggaacttggggagccggttcctaaaaaacagatacaagtgatggaaagatctatcatccatgtcgatgagaagatggttgatgagttgaagcccactgcacttgttttgacctttggcaggtcagcgtctattccttcagaactggatcttgttaagatgttcagtctctatggtccactgaaagaaagggggaca

SEQ ID NO: 192339 - DNA, 482 bp, Zea Mays
tgattctgcaacgaatgactggtaaagtgctactcccttccattccaaattaaaagaacgctttgacaacttttgctatgcacttagatgtacactaggtctagacacatagatagaaaagccaaaacgtataataatttagaacgaagggagtactaaataggcttgtgcacctgtaggatatctgcaccttatgataggcttccgtagctagttctagcattcatcattctagccttttagggacttctaatatcgaataagcatatttaaagtggctactcgctaagcttctgatcatgaatacaactttgccacaggtatagatgcaagattgattattgatcaaattgaaaatggaatatacaccaggacacaatatttatgtagaccacatttcaataccaatactatccatatgaagacagggcatgtcagcagagaataacatcatccatccacactaggaaggtacaaaatat

SEQ ID NO: 192340 - DNA, 333 bp, Zea Mays
aagtcttagcaactgatctccttttggggataagtcttagcatatttttatctcctattattgggggaagagtcggctggccttaggcctatatatttaggattttgtaatcaagaaagcaggcaatgaaatcaatctattattcctacatcctctgtctagtctccttcctgcttgacaccattgatcgacgacaactcgccgtcgatcgctactccctgcgcagcagaggtcctgcgccctcacctctaccccttccacatcaacgcagccgtaacatcttggtatttggagtcggcgatccctcttccacttccacagccatgaccgatc

SEQ ID NO: 192341 - DNA, 357 bp, Zea Mays
atcgaggtgatgagaggccgccattgatgagttcgtggagatgtgaaggaaccactggcgccaatggatttggggcgtgtgcttcgtctcggtatcctggatgcagacggatggtgctggccattgtgtggcggtctggaatggggaatgtcgcggtggggcgcgtggattccacgatggcgtgctgtcaccgtggttgaggaccgcagacacgcgcaggcgctatcagcggggccttcaagaccggctcgggagcttcacctggaatccgggagggcgtccgaggtctcgcctggcgcgtgtggtgcgcggaacagtcggcgatttttcaccggagttggggaaagccgggtgccg

SEQ ID NO: 192342 - DNA, 752 bp, Zea Mays
attaaacaagtccatactaaaagagtacgacaatagacaaaaaagtattaagcaagtaaatcgtcatccacttggtagcctcctccatcaatgtttgtcgcaggtcgatctctagctccaccagaatcttcatcgtcctccatttcttcagctgtatttgttccacctataccagtttgctcttgtgacttgtgaggcttcatttccatcttgcccatcaccttcatctccttctacatcaacttccttacttattgctcttgtgtgcttccttctcctgccatatgtattgatggtttgcgtacgagtagcagcatcccttgacccttggcaaatttctccctcttagagacttagactagcaaatttcacctcatgaatttgcgtacgagcactggcagcttgatcaaccatatccacatcatttctgtcggatctttgaacttgttcagaatcggtatccacccgcttattgtcccactgaaaatcttacggtgcaaagggtttgattgctttcctttagaaccaagttcatgaattttttggaacctattggccatcttgcagttgtagctaacataaaccaggctcttttgggtctgtatccacaaaggtagatagaaaacaaaattgatgtcacattgcttgtcattgcagcctgcaagataaatagttggacctccaattacttagtacttaatgaaaaatgcactccatttgcactcacaccccgatgccgaacaacaaagact

SEQ ID NO: 192343 - DNA, 305 bp, Zea Mays
atggagtggtcatacattctttttggaggcaatccttgtggcggcagaaataactcctgatagtgctccaacagtgtggatatctgctctggtattgcatcaccctccaatgcttctgttggtctgagctcaaacatgtgttccacagcctctttacttaacagacccctcaactgcttgtcagacaaaggaatacaggaatctagttttggttgaattccttgcagctgcactgtctgcccttgatgacagaattctaacttcttttctgcccagtacacagacatgggactataaccttccag

SEQ ID NO: 192344 - DNA, 492 bp, Zea Mays
ggtctgtttgttctcccaaaagtcagggtggtttgggtgttttaaatcttgaggttatgaatgacgcccttcttgctaaatagctttggcatattgaaaattcgaatggtttatggcaaaagattattgctagtaagtatcttaagggaaagccccttattttagttaagcaaaaacaaaatgattcacacttctggaaaaagcttctgagtttacgtgacttcttttacaaatactgtaaatctgaagttggcaatggtttaaaaactagtttctggaaaagcatttggttgggtaaccaacctttgtctattcgttttcatgttttgtttgacttgacctatgacaaagatgtctctgttaacgaagttttcacttcaaaatttgcatcccttactttcagaagaaggattgtgggtaatctgaaattgatttatgatgagttgattagttattgtaatcaggtaaatctatctgatcaagaagataaga

SEQ ID NO: 192345 - DNA, 409 bp, Zea Mays
ccacactgctctcgtgaacagtaacgcactgctctcctcctgctgccctaatctaggacgacggcaccaaacaccgtggttccgagcctcgaccttcccctcactactcataccacctcagaagccacagttccaacaatctggtatcggagatgtcaggttccgacgaagtgccgctgggatcaactccacccaccactaccgctgtcaacacatctgtcgcaacaccatccactgctgtctcccaggctgatttcgtggcgttccagcagatgatgctgcactagtttgctgccctcaccacggccatcaaccgcatgtccagcaggtcgccaacaccaccactgccaccagcactacttcttttccatatggcatgcctggctatgacggcatacctaaccttccg

SEQ ID NO: 192346 - DNA, 369 bp, Zea Mays
ctgggctcaaagtgaatatggcaaagagcagcgttttccccatccactgtactgctgaaaatctggataccattcatagtctgctgccatgcgttgttgccaacttcccctgcaaatatttgggggtgcctctatccttaaagaagcttggcagacagcacttacagccattcattgataaaattgcacatcgccttctctgctggaaagctgatctgttgattagagctagaagatttattgttgtccagactgtcctgtcttcaatgaatatctacttaatgatggccatggaccttccttcttgggttttcaaagcaattgacaagatcagaaggaatttcctgtggagagggaggaaagaagctt

SEQ ID NO: 192347 - DNA, 346 bp, Zea Mays
tagtgatcggctaagcatgtttgaatggctctctagtaagtcgctcccacgttcttgaggccgaatgacatggaggtatagcagaaagcttcaaacagggtaataaatgcaattttctcctcatcttcttttgccaagctgatctgatggtatccagaatagcagtcttggaaggacaacatagaacatccgacagttgaatcaaccacttgatctattttagggagtctgaagggatccttcggatattgtttgttgagatcggtatagtcgacgcacatgtgccaatccactttattctttttgagtacaagaacaggatttgctagccactcaggatgcagta

SEQ ID NO: 192348 - DNA, 326 bp, Zea Mays
tgttgctgtactatatcgtcaagaacacgacgggaaagacaccatttccgcgggtgtacgtagaccaagctttagggtagcatttgggttaaattagtggttcccagttagtcgccaaggtctaaattaggtgtagaccatattagggtgctgattattgtgtatcacagtcggtgtgagttcgtcggagtacgcacgccgtcgtccatcatcggggacccgagtttgcgaagataagaaagaagaaggggctcggtgcacttgtcagtgagacagtgaatagtaactagggactcttcatcagatattcgaacagtcagggtcct

SEQ ID NO: 192349 - DNA, 527 bp, Zea Mays
cactcgcaaggcagcctcactctccaccatcatagagaaaaggattcctgacttccttgtccgacgatccgaaagtaattgggacaacaaggaaagagtgtactttggagagcttcccaagaataccacctccctacccgacggcgcctgcaaagacactgtcttccaaaaacaggatataactatgcgatattgagttaaccaatccatacccaaaataacatcaaatgactccagggaaaccaccacgagattagccgaaaagatctcatcagcaaggacgacggaacaactcgggtagactaaacaactacttatggagcccttaacagaactaaccccaattgggtgacccatcctttgcaccgaaaatcagcacacgacacaaaatcctccgaaacgaacaaaaaactagagccagagtcaaaaagagaatgtgcatcaaacgaatcaactgagaccgtacctgttaccacgtctccatgatctctgccatctgcagagggtagcacatatgctccgtgaac

SEQ ID NO: 192350 - DNA, 314 bp, Zea Mays
ttcccctgaggcccatagacacatgttaaccaccatggctggccgtcttgtctacagaactgcactgaaacacaatgattatcaattctctggagtccagtatgaccaatattcctcttccaagccactagtatgcccccactgtttcctatcgaaggcaggaacacaaattctgtgaattcgacaccaagcatggatagtatatctcttctagaaatagattgcattttagtctcttgacaacatacaacatcaattttagcagaatcaaccagcattctcacagcatcttgcctgatcgaagagttaagtcc

SEQ ID NO: 192351 - DNA, 755 bp, Zea Mays
cgcggtagtgaggatctgggtgatgcagacgcgtggtctggcctatgacctggaagactacatggatgccttctcctgcctggacaagaccagaaaatggtggtcccgcttgttccgagcatgcctggcaccaccggggtctccatacatgtcagtgacatctctggccgtggaactcaagcatctaaaggcaagggtcgaggacgttagccacaggaacactcggtataacctcatcagcgacgccggctcaaagcccggcctcgtgaggcaacagccggtgcctcctggtgctgtggcatacgaaaacgacacaagaaggaaacacatcttaggggatctcacccagcttatcaccaacaaggacgatgctgatcttcaattgatttcaatgtggggtgcaggtggaggcaccgggacgacatccatcataaggaagtgctacagtgatccagagatcatccaaaatttcatatgccgagcctgggtcaacctcagccatccattcaacccccatgagtttgtgcggtctttgatggctcacttttatgcaaacagttgccaagaaagacaaggagggatcatcggtgttgatgtcctaactagcatggatgcgactgccacccagggggatctcctcagcgagttcgttcagctagttgacaagaacaggtaccttgttgtcttggaagacctgcccaccatggcagagtgggactctatcaggacgttccttcccgacagaaagaatggca

SEQ ID NO: 192352 - DNA, 1476 bp, Zea Mays
aggagaaagtaagggagatggttgaaatgaagcagcgaagcatggctgaggatagtcagaaaactctagaagccctgaaagataggtatgcaaaatcatctgtagtactacctttggatcaaaccaggtgctgttttagagttggccacaagaactaagaagttcaatcatacggccattttactctcattttattattacccagttgtgtcttctaattggtgcgtgcatgactgcttacgtgcaacagcacgggaaacgagatatgcatgtggataatttagttaaattatgaaattaagtaggggtaagattggaaatttggctaaatttccctagaaactgtagaatgacatgtatttcgaaggtagtagaagaggctatactacatctatgaaaaaaatcgctctgttagagtgttagtctgttatcacctgaactgccatatagaattcttgcctgacatcaaaggctaattcatgtaccatgactcatactgtatattttgaccttcggcttgccatacttgtagggaacggtcattgcaggaccaactaaggcaagctacagaaagtgtaaagaatatgcaaaagctacatgaatcggcgcaaagccaattgtttgagcttcgcactcaatcaggtctctttccaaccagtgtgatcatgatcatctttgtgacttatattttaaaggttatagtgaattgaagcatttcatttttttccccagaggaggatcgagctgcaaaggaggttgaagtcagccttctgatggatgaagttgaaagggctcaagcacgattagtcagtcttgagagggaaaaggtagccttgtgatttgaaattccagtttaatgcttctgagttctgactgcttaacatgtccaacatgttacaatattttttaccaccagtcatgtgtgaatggtttaacatacttactggtgtcagtttttttggtggccatttctgtcctttattttttccagtttctgtagaaatttgtctatcagaatcatgtataaaatctatgtttccgtggcacgcaagcaagaggagcttgttcccacatactcattgttggtatgaggataggacattttggaatatgatttgaacttggagtaaactgtaccaaatctttcctgatgatctgcatccttaagagtcagggccaaattaactaaactatgattcaatcattcagggactaaatagtgttaccttatattgaaagtttagtgtcaaacactaaccacatttttctgagaaataatgctatgtagtggtaccgcgttaacgtttcacctttccttattcattatgttagcatcaaattgtggataacttcaaatgtgtaaaactattgttttgctcagtgcatggcccaagataacttttcctattcttttttacttgactacagggggatctgcgttcacaattgcagacaactaatgaggatgcaagcaaa

SEQ ID NO: 192353 - DNA, 397 bp, Zea Mays
gacaagggcctccatgacgccatcctccttcacgaggctgctgcgatcgtcaacctccactcccaggtcgtcgctgtgcaaaacatccagagtctcgttcacgtcgtcctcgacctcgccaacaacaactacacccgttggtgcgatgagttccttctcgtcactggcaaatactccctggacagccacatcctcgacgacactcccgcgcctcacttccccgacttggcacgcatggactgcgttgtcagtcctggatctccggctccatctccccggaccttgctgaaatggccatggaacgcggcgccactgcccgcaccacttggctgactctcgagaaccagtttctcgggaatcgggaaactcgcgccctccacctcgacgctcagttccg

SEQ ID NO: 192354 - DNA, 424 bp, Zea Mays
tgggccagcagctttattgcgttccatctgaaataaggcatctttgatctctttctcacagaattgaccacaaagaacttggttgtctatatcatccaaccgttcaattccactccatattccatgccaatttgaaacaaattacccggggcagggccaaaaagctcagaataaaactgagtagcatgttccaaaatatttttatccccaaaaattctcttatctccatcttccaggaagacaatattattttttcatctcctaccattagcaatgcgatggaaatactcattatttccatcaccatgcataagccagttttcatgcgtcctctgtttccaaaatagttcatcttcatcaatcattagaaaattctctttcataagatagcatcttgcttcaagctgctgaatattaagaggac

SEQ ID NO: 192355 - DNA, 334 bp, Zea Mays
ttctccacaacaaagaagctatcgaaaggatagccaagtgggcatgtgagctgggagctcacgacatagagttccgacctcgcacaacaataaatactcaagcactggttgacttcatatcagagtggactgagcatcaggtcccagacaacccagagattaccgaagtatggagaatgtactttgatggctcgctgaagttgcagggagcaggtgcagggattctcttcattgctcctggaggtgaacaactcaagtatgcactccagctattatttctagcatcaaataatgcggcagaatatgaagcactgattatggcagaacctctcaa

SEQ ID NO: 192356 - DNA, 399 bp, Zea Mays
ccacgaggaggggcacgagggtgtccaacgcacgatgcaccggcttcgacgtgactttcattttcctaatatgaagcaggtcgtccaggactacgtgagggcgtgccgacgtgccagcgtcataagtctgagcaccttcatcctgcgggcctcctccttccacaaccggtgccccaaggcgtctagacggatgtagcgctcgacttcattgaagccctgcctcgggtccgcggcaagtccgccatcttgacggtggtggacagattcagcaagtactaccactttattccgctagcgcatccttattcggcggagtcagtggcccaggctttcttcgccgagatcgttcgcttgcacggcgttccgcagtacatggtgtccgaccgtgacgccgtgttc

SEQ ID NO: 192357 - DNA, 629 bp, Zea Mays
gtttggtttcttctccctcccccaccaccagtaccccctctctctctctctctgtctctctcttcccttcccttttttggttagcgtgacgaacctgcccctagcggtcagcgaaaaatcatttccttcgttctctcatctcatccaccacggaactctttgcctctcagtctcagatccacacttccatacggacctgttacgctgctcgcctcgacctcgacatcgtctctactatttcgagccctacaagttttcttgacgcggacgccaagttttttttcttcgtggtgattagggcaagggaagggaagggagacagagaagaaaaaaaaagagttctgcagtttttttttcttcacggtgtctccgtccgcgtgtgttttcctaataaattcatttatgcgccggtggttgactcttgcgtactcggatgaggggtaattagggcaagtcgtgatgagagtcggtggtgtgcggtgcggccgaagctgggcccttccaccacggcttccgtgccgccaggttcgccacttcgccagaggccagagctgcccctggggtcccgatcccgacggagcgcttctttttaccgggggcagtccggtcattttcggccgtcctttttt

SEQ ID NO: 192358 - DNA, 776 bp, Zea Mays
gatattttgggtcgtcatactggcatgcaaatttacttttgcatattttctccaggtggctctactaacaacttgcagaaagtttatgtttgttctatgttttgtatgatgataaaaaatactcataccttttcttacacgtttgcagattaggcctttagttgaaccaaccaatattattgtgcaactccatgatttgaagtattcctggcatgatcttgtatcaaggggttagtagatctgaaaaatattacactagaatcataacccaattgttgcactatctcaactaaagctgttattacattgtttttctatgcacattaaataaatgcaactataatcatgataatgtgttcattttagggaataaaaatgctttgaccattctgagcctatgggcaccagtcttagctgtaagttccggttttgacttcaaagttcctttgatataagaaaaatgactgcaactgataaattatgttctttcatttgtgtttacaattttacagatatacctgatggacatccacatttggtacactcttttatcagcacttgttggtggcgttatgggtgccagagatcgccttggagaggtgtatatttactcttttatgtcctggtcctgtttttggatccaagttcttatcaactatgcatacatttcttctgatgtgcaagctagattattgttctgacattctctaatgtaatgcagattcggtcaattgaaatgcttcataaacgttttgagagctttccagaagcgtttg

SEQ ID NO: 192359 - DNA, 393 bp, Zea Mays
tccatcaattgcaattggttggaaggttggagagatttgatttgctggttgtactactgtcgaaccccagcccgtccgtaccctacgcatcttcctctcccatccatccactctttgcttcatcgatccccactgctgtgctgtgctgtgctgcgtagcttatccgaggggacaggtgagggagtcgagggggacggcgcatgaaagaaagagaccgagggggaggcggcgagagcgagaaggcaccgccgacggcgagacctaggatgcagacaaggccaaatccacatcgatggagccaagcccgatggccgttggtgttggcggcccaaagaggaggtggacgcgcagtcggaggcggaggtgcgtatgcccatcgtcgccatctagctg

SEQ ID NO: 192360 - DNA, 274 bp, Zea Mays
gtacagtggtgttaccgactcaacccgggttaccaacaagaggattcctgctgtggatttggtgagccgattggagatgatcttaaggggcaaaatatcaaatattggtgctcctattgcatattctgcttggaatctgccaccttctaagtcctttttcgattttgtgtccaatcctcctgccggtgatagtggtttgggtcttagagtgcgaccctctcttgaagatattgaggtcctagttgcttcacttggtgatcttcccaatgatgag

SEQ ID NO: 192361 - DNA, 382 bp, Zea Mays
aaagagaaaactggtcaacagtccttctagaggaatattcagccatagaaaacctcatcttagatgagtgtgtggcgcatcttcagcatccaaagagacactgcccctagcggatgattgggactcggaatcggtgacagggttataatctgtgtcatccgcacgacaacgcttggacaaaaaaatgccctgctaacttctttttcagaccaacgaaaccacagtaataaaatataaaataatcccaacaatcagaagacaataacttgaaaacatgtgcaagatggataagctgatctgctagaatgcgaacagtccacgctagagggacgaacggtccatgcacccacgaccggatggtgcgcgccacctaggaggaagg

SEQ ID NO: 192362 - DNA, 366 bp, Zea Mays
gaggacgacgctggagagccagctgatcaagtttgaggacgaggacagcgagaaggcaagagcagccgcggatgcgatgagtcctgtgcaagtaagtgggtctctggggagttctttagagcttttcctcgtttggattcatcatcattgggttgctttgtttcatcttgtgattgctaaagaaagagggcttttgtcatacaaagaagattacaaaatagaaaggggcaaagggagcctaagttttatctgaatgatactaggctgtatgttacttttttttagatctgaatttctcatgcctgtagactgtagatgagaacattttagaactgaacaaaaatgctagacgtggtttaattttct

SEQ ID NO: 192363 - DNA, 792 bp, Zea Mays
gacgcttgccagcccggccttcaatggggagatggccaagcagtacccgttcaagcttgaccccttccagagcgtatccatcgcttgcctggagcggaacgagtccgtgcttgtctccgcgcacacttccgcggggaagaccgtcgttgcggagtacgccattgccatggcgttcagggacaagcagagggtcatctacacctccccgctcaaggccctgagcaaccagaagtacagggagctcagtcaggagttcacagatgtcgggctgatgactggcgacgtcacgctccatccgaacgccacatgcctggtcatgacgacagagatcctcagggcgatgctctacaggggctccgaggtgatcaaggaggttgcctgggttatattcgatgagatacattacatgaaggatcgtgagagaggggtcgtgtgggaggagagcatcattttcttgccccctgccatcaagatggttttcctttcggctaccatgtcgaatgcgaccgaatttgctgaatggatatgcagcctgcacaagcagccctgtcatgttgtgtatacggacttcaggcccacaccattgcagcactatatgtttccaataggtggttctggtctttaccttgtagtagatgaaaatggccagtttagagaagataactttgcgaagctacaagactcctttgctaagccaaataatcaactggatggaaggaaaggtggtggacctaaagcgagtggccgaattgcaaaaggtggaagcgcctctgggaattctgacatatacag

SEQ ID NO: 192364 - DNA, 328 bp, Zea Mays
ctcatctactccgaccacatcttcgttcccacggagtcagtcctatggccaaccattctggccactgcccacgcgacgggaatgagggcatccaaaagaccctacatcgccttcatgcatccttctacaacaccaacggtgcggctcatcaaggacttcatcaagagctacgtggtgtgccagaggaacaagtcgaaacatcttcaccctcactaataaagctaaggggaagctagctccaaaatattaagggccatttaaagtgttggaatgccttggaactgtggtgtatcatctggagctgccacctaactcacgcatccacaat

SEQ ID NO: 192365 - DNA, 433 bp, Zea Mays
agtttccattcttttctacttacaaaaaatttacccaggttattttctcacttgcttaacaattacttgaaatgatattcatgcatttttttgggtttggcctctgctcactgaaactgactttttgtgtactaacctcattgaagatgaatggaaaaatttcctcgaaagggttggctgcaagaatgaagagggactccgtgaagatgaagaactagaagagaagcttcgtctttgggcgtcgtatagggggcagacattaacaagaactggtatagcgtacctcctgcatggttgcacctacatcttctctcaaggaacatcttaaactatgcatgatgcctttttgctgtcattgttgttcttgtgtatgcagtaagagggatgatgtactatcgaaaagctttggagcttcaggcttttcttgatatgg

SEQ ID NO: 192366 - DNA, 578 bp, Zea Mays
gcaatctacctgctagccaaccccggcggcacgatcaagctgtacgtgttcgtggccatcttcggcgtcttcatgatgatcctggcgcagctgccgtccttccactcgctccgccacgtcaacctcgtctccctgctgctctgcctcgcctacagcttctgcgccgtcgccggctccatatacctaggtactgatagttcccggaccagcagttcatcagctagaccaaaggactactccatctcaggtaacatgcatgacaggaaactccgataaggcgcccccaaaggactactccatctcaggtgacgcccagaaccgtgtgttcggcgtcttcaacgccatcgctatcatcgccaccacgtatggcaacggcatcatcccagagatacaggtgcccatgccctgatcatccctagctatatagcctctggtcgcagtcgtaacagctttcggtaacgatggtcgactttgccatgtaaaaattaattgtaatgtgtgccctgccccctcaggcaacagtggcggcgccggtgacggggaagatgttccgggggctgtgcctgtgctacgcggtg

SEQ ID NO: 192367 - DNA, 738 bp, Zea Mays
gactcggaggtggtgggcgccatgccggaacaggacgcggctgtagcgccggcgaggctcaggaggtggaactcagagtcgctggatagcatactggagcaggaggcgagagtggcggcggcgaggagcacgaggtggggctcggaggtgatggacgccatgccggaacaggaggcagcggtagcgccggcgaggctcaggaggtggaactcggagtcgttggatagcatactggagcaggaggcgagagtggcgccggcgaggagcacgaggtggggttcggaggtgatggacgccatgccggaacaggaggcagcggtagcgccagcgaggctcaggaggtggaactcagagtcgttggatagcatactggagcaggaggcgagagtggcggcggcgaggagcaggaggtgggactcggaggtgatggacgccatgccggaacaggaggcagcggtagcgccagcgaggctcaggaggtggaactcagagtcgttggatagcatactggagcaggaggcgagagtggcggcggcgaggagcaggaggtgggactcggaggtggtggacgtcatgccggaacaggaggcggcggtggcgccggtaaaaagcaggaggtggaactccgacgcagtggatgtaataccggagcaggaagcgccggtggctctggcgaggagcgggagatggagctcgggggcggtggacgtggtcccggagcaggaaaagccggtgatg

SEQ ID NO: 192368 - DNA, 301 bp, Zea Mays
tggaaacacaagtttaattgggctacatgctatcgtcgtcgtgcaagatacatctctacatggttagtaattaccaatgttggtgttctctgcagtcatatgtggctgtgtccaatcgtccccttccccagcgtcaccgatagtatcatgttctgttgcataagctgttgggtgtacaaccacagaggtatatgttgggtcctctatggtgagagacaccggattcaaagtgtcagcttgtagtgctctacgtttccttatgtactctaacttcccctctttccgccttggtgtctgatta

SEQ ID NO: 192369 - DNA, 340 bp, Zea Mays
gtgccctacaccggagataagcgcgttgatgggggatacttagaaagttgcatcctcaagatgagacataagagttcataagaactttgaatgtactagttagaagacagaggcggcaaaacaaacatggtatctctcccattgcaggtgttgataacgacattttctccagttaacatgggcctgctgattcatgcagaatatgttactacgagatgaacatctatgtaaaatctttgatttacaaggatcaggtcaggtagactcccttggattccttcagtcaatggcaatcaagaaagtaacaggcgtacttgaggttaaccatactactacagcc

SEQ ID NO: 192370 - DNA, 372 bp, Zea Mays
cgccggagctcgggaagcttccatcgctggagatttcgcttaacctcagctgtaaccgtctctccggggaaattccagcgcagttcggcgagctggataagcttggcagcctcgacatctcgtacaaccagctctctggcagccttgcgcccctcgcgaggctcgagaacctcgtcatgctcaacatctcttacaacacgttctctggtgacctcccagacacgcccttcttccagaagcttccgctcagcgacatcgcgggcaaccacctgctcgtcgtgggcgccggcggtgacgaggcctcccggcacgcggccgtttcggcgctgaagctggccatgacaatccttgtcgtggtgagcgctctcctcc

SEQ ID NO: 192371 - DNA, 551 bp, Zea Mays
catcatttggcgagaatcaacttcaaatgcccctacgaccacctcattagtggtaaggtctgtctctctatgaatctctataccatagatccttgtgggcatctcaccaaggatggagactgcggtgtttgcactagtgtcctgacacaccaaagagtcgacaaccgtgcatgcccctacgagagaagcaaggatcgacgatggtgaattgtgcttcactggagaacaggggccaaagagctcgggcaagtcggagacagaagcatgctccccatgcgtctctgcatgctccaaatggttggccacacgtgctagccacaacttgatgatagaaacctcctcctggagaggctgcaacacttcctcaaatgagctgaaacatgtgttgaaactctgctcacaacgactccaccaaaggggtgaccaaggactgaaggttcaaaggtgtctgaggcaagagaggcataataatagctacgacaaacatgatcgccgtccttaccatgcaaatcgatgggttgagaagttgacggaggattccgatgtccacg

SEQ ID NO: 192372 - DNA, 446 bp, Zea Mays
ctccggatagcctgccagcggtattagatctacatgttcaggaacctcttgttgttggggaggatggaaccattgtccctcgcaccttggtttatcccatttctgtgagggtgattactcctggtgattggctgggaggggacatgtctgaggtattgcctcctgctgtcgaagatgacgatgacatggatcagtttcagcagaggcggcgtcttcttgggcatgatcattcagctcggccctcggtgcattcgaggcttgggccgcgaacctcttcttcgtcggctgctgaacctgtcgatgacgcattaccctcggttgtgttggttgatgagttggctgtgcctgggtctgatgcccttgttgacgctgaatttttcccatgtgcttcggttgaagagttgttggctcctgggcctgctgaaccagttgatgctacaattctc

SEQ ID NO: 192373 - DNA, 385 bp, Zea Mays
gcaaaagcccctatcggttcgaagatctaagaaggagtcctcgtcaggtttttgatgagtcactgacatcgtgcaaaaaggtccctcaagttctattccttctccactctagtaccaagactgagccacggcgagcaacaaaccggagctgcgattctacggtgaaggtggtccgaacctgaggtaataagcacataaatgtgatgtgtcaacctatttggccaaaaaccctcgctcaatttgagggattcaacacatattggagcttgctcatggtcatggcggcgagacgaccctggtgatcacgttctgaacgactaacagcatggctgctgaaattgaagcatgggttagcttcataggttcaccattaaaacaaaggtga

SEQ ID NO: 192374 - DNA, 464 bp, Zea Mays
agcttatccaactatggatggccaatggttttatctcagatcaaaaaaaggtacctgctgaaaccgtaggtaaaaggattgtcaatgagctggtctcgaggtcatttttccagtatgaggagcgaagttggatggggtacaattctacaacttttttgaagattcatgacctcatgcatgatcttgcactgtctgtttcggaaaaggaatgtgtctgtataacaagggaattgattaaaaatagtgagttgcttccaagtgctgcccgccacatacttattcaaaattggataggtaaagagattcatggttatttatatggttctatgaggaaaatgtctcggcctatccaaacatttatgtttgatgggtctagtgaagctgccggtgtgcaacatttatcaagatatagttctttgcgagtactttctgtgccaggaattgggtttcatttaacaataaaa

SEQ ID NO: 192375 - DNA, 357 bp, Zea Mays
tgctatatgctgacacgcaaggccatgaattcatcatcctcaccacaagcacaaggtctgttctcctcgatctgctgtccgttatcgagcttgcattcatgtctgcatgctctaccattgcagagaaggcgcttcctgcagagcagaacaagttgcagaaatacccaagcacgcagcagctgcagtcgatcgccaccgagacggctcatccctacagcctgtgtgagctggaagaggcgaccaacaagttcgcgagcaggatcggctcagggggtttcgggatagtgtactacgggaagctgagcgatggaaaggagatcgctgtgaaggtgcctagcaacgattcgtaccagggga

SEQ ID NO: 192376 - DNA, 1036 bp, Zea Mays
gcagcaaccgggccttctgctactcccagctcgagctccacaagcacgtcgtcaaggattgcgaccgcgcactgctgctcgaccccgccctgctgcaggcctacatcctcaaaggttcgcttcggctataattgctcccctgttcaccacagccttttctgcagcttggtttagttcgccaggggttggcttggcttggttgtggggaattatgtctgcctcgtttagtctctctctgttcggctgtgtactagtctgatgcacatgtactttttaagagtaataaattatgtattgttagctcaggaataccgttttgtgtggcttcaatgcttaggatcactctttccagtgcttaggattactctttccagatagttgtagatacactgtgaatcacacgagtgccctttttctccactcccaaccaagcactccccatctgcatatattaatgaaactaacatgtttgccttcgaactcctttggaaaacactgagtctttcaagaactgggatccttcacatttccaacttgacacaaagatacaagtgtcccaccacatttgctttaactcctttttttttgtaatacaacacatcatctctggagagcgatctatccctgtactgcggagattattctgaagcaagtttcacctgtaggtctaacgctgttgttttctattagcaggcaaggcactgtcttcattagataaaaaagaggatgctctagctgcttggaagcaaggatatgaaattgctgtccgtgacacaacagacttgaaacaattgcttgatctggaagaattggtttcttctgttaaaatttgcgggacaacccagtctgcggaccatgtcatggatgcatcaacttgtgataccaaagttgttatctcagaagatcgtgttgctgacacgtcgttcgctgcaactacaatggctgatacaaaaactgttgtctgtgaagaggccattggcagttccaaagtttcatcaaatggtgataccaagttgacgaattataataaaaaagc

SEQ ID NO: 192377 - DNA, 491 bp, Zea Mays
ctcaaaattccatggtgagctcttcaaggtggaggttgttgtgcgcctgcaaaaaagaaaggaaggggcatcgacgataaagatgaagcacgataacttcaaaacaactgttgagactatagaggacattgaggacgaggctgtggttggagactggctcgccgaggtcacaaagggcgtcaaccatgcctttgagcttatggcagtagttggtgattgtgaggtccccttgggtgaaggtgcgatgggcgacattgaggaagacgacacgagttttgcgattggccaattgctgaataattgactcgaggtcaagcgaggcggcgtgagtggaggtgccacgcccaatgacaacattgacaagatcattggagatggtgttgacgatccacgttcacacgacgcaatccatgtggacctaggggagtcgggtagaaacggtctagaggacatggccctcaagggactatcgaccaatggcgaggtggaac

SEQ ID NO: 192378 - DNA, 337 bp, Zea Mays
ctgattagcgattgattgtaatctcctagattggctaactgccatgtatagcctaggattggtttccatctatagcctaggactgtttccttgtacagggaatagcttcccatgtatgtacttccatgcatgcctactggctatatataacaggctccccacccacaatgggtgtgtggtgattccctccattcttcccttctacatggtataagacttttagatcctgcgcctccacccctcctgctgcgccacacccttcttgctgcgccaccgtttctccctcccaggtcgccatgactgaggccaccatccatgctaccgctgtgttcgtcgc

SEQ ID NO: 192379 - DNA, 320 bp, Zea Mays
acaaagcatctatttaaatcatcaaaggagtcatccaattgggtgtccatagtctcattctcaccattgaaaagattgtcaaaatacctctaccacctctgtttgatatcttgtcctttcaccaagagttgatccatctcatccttaatgaatttaacttggttgaggtccctcgtcttcctttcccgaacctagctatcttataaacatacttctccccttcctttgtacttagtcttcggtaaagatcatcataggctcgaccctttgcttcactcacagctcgctttgcagtcttctttgccaccttatacctctct

SEQ ID NO: 192380 - DNA, 617 bp, Zea Mays
tttccatttaaaataggactacatcaggaatcaacaattcaacattggacacttatttatctgctttaatgatggatgagatcacaagggacatacaaggggatattccttgtgtatgctctttgctgatgatatggtgttagttgatgatgagagtaggtaaggggttaataggaagctagagttgtggaagcacacgttggagttgaaaggtttgacttagtaggaccaaaatcgagtacatgatggacgatttcagcgcgactagacatgaggatggagatgttaccttcgatgggcaattggtggccaaggagtctcggtaattaaggtcgatgggacaaaaggatggtggcgttggtgaagatgttagccgtagaatttcagcctgttggttgaaatgacgtcatgcttctggcgttctctgtgacaagatggtgccacaaaagcttaaaggtaagttttataggacggtgattcgtctggcgatgttatatggtgttgaattgaatgttggcagacaaaaaggcggtgtccagcaactgagtatagcagagatgcgtatgttaagttggttttgtgggcacacaagaagggatagagtccgaaatgaagat

SEQ ID NO: 192381 - DNA, 326 bp, Zea Mays
acaattcataggcagcgttgtggggccaacccctcttcgctagacaatctattgtccaaattctatcatggatggctaaccaaatgaagaatttacatttcggtggcgcccagaccttccaaatgatccagtacttctcaaaccacacgggaatggacgcggaggatctggctagactgcagggtcatgcgcaaatgacccacatgttcaccatggtcatggtgctaaacgggaccagtggatgccgaccactatgtagctcatggcgaggcgcttgtggagcatcttcttcacgacatactagaggtagggtaggtgggcaacat

SEQ ID NO: 192382 - DNA, 297 bp, Zea Mays
ttcggacgacatggatgaccagaggaatgatgagcctcggcgtttgggcagtcccttgccccagcgacggtctgttcaccttcgccttgggcctcccccgccgtctggacatggaaggacttcacatacatctaggggacatgaacagccactctttgacgcaccggagttacagcagatggcctcggataatgggatgatactccttaatgagttgtctgcagagaagccaaacagtctccatgatgaggcccctactgacagctggacatgcactattgggccgctgaactccac

SEQ ID NO: 192383 - DNA, 842 bp, Zea Mays
ctccttgtcccctggggttttgctgttcctcgttgctgagcagtgattggaggggctaccgggatttttgctacttgcctccattgatggcttatcttcttctccatcctcagttcacttgctcccagcccccttctcatcgattgaggtaatctctcaacatagtgaatccgttgctgtatatcccaattatcaatgcgagtccgcgtgaaacatgccgtttccccccgtatggtcgctgcagtctgtggtgcgatagaggagattaggagccagaattgtgtctttgttcattctgggactagaaatgcggctctgtcctgtgattcatggacctggatattgtctggtcaagtcatttggattgtgttgtgcgcaggggtcaaatacattacaagacaaacaatatggggaagaacatggctaaatctacagtgagtttgcttaaccgcagtgctaattttgcatcaaggacttcacaagatgccgtggatgggttaagcgatgaaagtgacggtgaaacctcaacaaaaaagaagagaaccccaagacgtggaagaaagaaagccaccgttgaaacatcgagagatgtaggagaagaaatcgaagtcatcactgaacaaacggccgctgaagagactaaggaagttaagaggagaggccgcaagaaaggtaaatacctacatattggttgcatttttgcagcacttctgtttctatatgctgcggttttcataatttttctcgactgggaacagcttagcaagtcacaatttttctctgttctgtctattctgttacagctgctacttctgcaagctcagaagaggagaaggataagg

SEQ ID NO: 192384 - DNA, 1460 bp, Zea Mays
ttcaggcttcgctcgtcacccttgtgcttctcttatggacgctcttgtatgttcgtaatgaggaaactcgttcatgtgctgctggcctgttgcagtcttcgtcagttttagctgctcattcttcgtcctctcaacgggcggagtatgattgaccgccttcttcgtcctctcggccggttgctactccaccgacaatgccttctccaagtgtccctccttcagcacgagggcgtggtggtcttcattgtgaccattgtgatagagatgggcatgtggagtcacattgtttgatgaagaaaaagacttaggctcatcaatcatcatagggtactaatggtgctagtagtactgaggttaacgacggagttcgggtggtttagatctctgttttcaaatcgtccgactaatcgcgattagtcgggctggtcacctgtaagtggccgaccagggggacgacgcgatttgtttttctggtcgtcctaatcgtcgattaggcgtccaaatcatccgattagtcgtccgattagccatctctggtcgaccagtgcgcagcgggctagatgtgctattgggcttcaccgttttttgggcccagtagccgaataaatctgttggcacccctaaaccctaaagcctcccctgtgcctgcacccctctcctaaactttatgtcctctgccggcggctgctgctccagcctccagggctctccaccagtgccagcgtgcagctcatccttaaaggtcatccctgccccctgctcatctacaaggcacaagatgagctcgtcatccgaaggtcatccctgctcccctccttcccccttgtatgcactctacagttttgcattctgcgcagcagtacccatttgtttgcagtctgccctggccctgctcatctagtgttctatacttctatgttctattgccttacttagatagttcttagcttcatagcagcgaccagtttatcccaccagtccagcagcaccaatgatcttattcttaccagtttccatcagtctagcagtagcacatatctagtgcccagtagtgacttgacctctatctgttgacatgacttatatgcctaggaatatacataggacgactagggatgaccagaggccgactagaaccgattagttgacctaattgtcgccctaatcgcgattaggcgcctggtcggtcctgtcgatcgactagctggtcgcccgacttgaaatcagtggtttagatacataagagattcttttgctacttcgtcgccttgtggtctctatgccgacatgagatgttggttatgtaactcagccttctttacctataggttttgctgctacttctcaatcttccactaagggaccacctccaccttgtacttcaggtacttaaccatagatgttagcctcgtgttctttttatttgactcctcattgcacatgtctttcatctatgagtc

SEQ ID NO: 192385 - DNA, 812 bp, Zea Mays
aaacacagaatggaacgactccattctcagaaattgaaatggagccgctctattccagttgactccctaaccaaacacacccttacgttttttatggatttcaactctagcctacaccaagttgcttgagacaaagactttgttgttgtatctgcaatgctttgcatgtttttcatcaactaatatgttgcaagatactaaccttgtacctgcttttatagcattgcgttcacattgcctctgatggtggccgtgtttgtcgcccacttataattgctgatatggggatatcaaggatcgatgagactcacatggaaaaactgagggtcagcattttgagctccataatttcttgacttgttatcctttattctctttctcataagttggtttgccatcagcatggaacttgtggttttgatgatttcctgcgtgatgggttgattgaatatcttgatgttaatgaagaaaacaatgcactggtacatcatgattcttttgctttttttatggtttgttatccaaattatggtggtgtatactaatattttcaaatagattgcattgtatgagcacatggatcaagatgatgttgaaagaagcagcatcacacacattgaaatagagccattgagtatcttaggggttgtatctggacttattccatatccacaccataaccaatctccacgtaatacttaccaggcaaggatgtagattatcattatatatctcattgtttcttggtttatttttctattgacatttctcttatttcagtgtgcaatgggtaagcaagcgatgggaaatat

SEQ ID NO: 192386 - DNA, 1173 bp, Zea Mays
cttcactgacatttgagaagcaacgacatgaggcaaatttgatagaattagctgaagcacgagaaaagattgaagaacttcaaagagaagttggggacactgatgaaaaattcaccctgcttcagactagtatacaaaggtttttcttttattcccttttgcaagagttctaacctcctgtgataatgcattgagttttttagataacttttaattataaatatacaatgtctagattaatttgcatgaaaaaggggaaaggattaacccctcacaagactaataattatttctttctttgatgggtggacatagcgttgaagaaaggttaagagagaaggatgctctattgacaacagaaagactagaaagtgaagcaactaagaaatcactaaatgaatctgaggatagaaaccaggacttactactgaaaattgaaattgctcagaaagacattgctcacttccaagaaaccgtccgaaggtatgttgcttaatggttaacttgccctattttgtgcttgagggcggttcatttctgatttgtttcctgattatgcagtcatgatcttgttaataaatcaatctacatgtcgctattctcttagcttatattttgttcccattggtttagacatgaagaaaatatggcagcactggaaacttcgttgagatctgaaaggcagcaaaatgatgcaatcatgaaacaactagctgaatctcagggggaaataggagagctgcaaaggaagcttgaagatgctgatgccagaaatgggcttcttcaagattctttacagaggttccattattaccttgtatcgatatcaagtgttatcgctattctcttagcttatattttgttcccattggtttagacatgaagaaaatatggcagcactggaaacttcgttgagatctgaaaggcagcaaaatgatgcaatcatgaaacaactagctgaatctcagggggaaataggagagctgcaaaggaagcttgaagatgctgatgccagaaatgggcttcttcaagattctttacagaggttccattattaccttgtatcgatatccagtgtttgtcgctattctcttagcttatattttgttcccattggtttagacatgaagaaaatatggcagcactggaaacttcgttgagatctgaaaggca

SEQ ID NO: 192387 - DNA, 730 bp, Zea Mays
cttgcctactaacccgattgctagccacttttctgatcactttccttgtttgattctgctgctccttttgctggatcctggcgcctgcgcctctggtactggcagcctacaaatgcatcagtaacatttctcccctccacaagaaacagctcgtccgcgagcttaaaaagaggatacttctgtgtgaagtcttccaattgttcccaagaggcatctgatgctggtcgacccacccaatggactaagagttcccaaactcctcgattcagccgagccttgaggaccttgtctggagttggaatgactctgccatgcagaatttcgggtaatggaactatggcggttggtgttgtgccttcaaacttttttaacaaggatacatggaagacgtcgtggatccgggcacgtgctggcagctgcaacttataagagactttcccaatgcgacttgttacctggtatggcccaaagaagcgaggacccaatttcgacggagcagccgcgatgacacccactgctgttcgctgttgtaaacggagccatacccagtcgccttcttggaattcgacctctcgtcgtgactgatcctgatatgtcttcatcacaagttgtgcttgtaccaacctttccttgatttcagtcagaaattcatctcgttcctggagctgctgatctaccgctgccacctttgcgacaccaggatggtaagctaataatgttggtggctctc

SEQ ID NO: 192388 - DNA, 378 bp, Zea Mays
agcgagcgtgcaaaaccgtccgatcaaaatccagcgtcctagatccgcagcggcgaaagggtatgcgcgatctaatcggaaccatccaaactacgatcaacggtcgacagcttcatctaggcaaaggggtagcactttctaatctaaggcgcttatcaccaatcggacggcccgtgttcatctcctacctcccgccccattcactctcctcgcaagccagccccggaagtgaccgaggccaccacggcgtacagtccggccacgacgccgtgcccgcccaagcactagccaatctgcgaccgcgcgtagaaggcatagagaatgtcaacacagcagaaaagacactcaccgatgatgggcccaccacgatggcgacca

SEQ ID NO: 192389 - DNA, 338 bp, Zea Mays
cttgtgttttcagccgtccgatctagagtctagggtttagattttatgaagcctaacgcattacgaaccgttcgattaaacctacggcccggattgactcatccaggaggtatccccgattagatctgcaccgcatatcaacgatctcacggacatctttcgcccaacccatcttctaatctcgaccagtcatctgagtatctacggcgacaacatcgtcttccacccaacagcccagacgccgtcttcctccctcgtgctcgcactctacggcggcggcccagccgatcccctacggctgaacaccataaccgagccagcacgcagttccgtgttcg

SEQ ID NO: 192390 - DNA, 288 bp, Zea Mays
gtttggggacctgtagttggaaaaacaaatagtggctgacaattggttgccacgaaatcaaggtcatggagaaaatccaactcaggaagggaggcggtgggtggttcggaagtaggcgagaaagggaaatccatcttgtcgaagatgacatgacgggagatcaagagacgatgagtggtgaggttaggacaccagtaccctttgtgatcaggggagtacccgagggagacacaacgagcagagcgaggagcaagcttatggggagtagtatcagaaaggttgggtagc

SEQ ID NO: 192391 - DNA, 361 bp, Zea Mays
atttgagcatgggttgactgatccctttcttgtatagctggccctcaataagtgtgaaatcccggcttcggtgtttgaggcgtttggcctcgttgacatcacttggatggtaatatccttgcaaaaacagggttattggggcctgccagtcttcggccatgatgaggttgacgatgcaatggccctcggtgttggtggttatttgcagaccctctgggttgtggacggctggtgtgctgatgacatgatagaacacgtcggagggcagggcttcgcctctggctgctgctttggctaacgcgtcgacttcttcgttccttgcgtggtacacatgctgcagggtgaaacccttgaattgttt

SEQ ID NO: 192392 - DNA, 292 bp, Zea Mays
aacaagggcataagggataaggcataagggccaataagcaccaggcagccacgccacagagacagaggcacagtcgcactcgcacagacacacagttcacgacttcacgccacactactcactacactagacatttagagttcaagacataggggccattcggccagcatggagcagcccagcaacaagccaacaacaactcggccagttaagcagcaggagtgcaggaccagcaccacgcgtcgccagtcgccaccgcccaccaggcaccaggcaccagcccagctgtaca

SEQ ID NO: 192393 - DNA, 277 bp, Zea Mays
ggaattgcgagataggtagcggtggctccaacgactgtcgagcggggtcgcgcgagcgtcggcacacagggacttaattaggcagggatagttaggtgaggaattgcgagacaggtagcggttgctctaacaacagccgagcggggacgtgtgagcggcgtcgcatagggacctaattaggcagggctagttaggtgaggatttaattagattgggttcggtcgggaagttaatgaggcaagggctggttctactgatgaatagcatcgttctctct

SEQ ID NO: 192394 - DNA, 363 bp, Zea Mays
ggtcactgaagggatcaagatatgaagtttgtcaagcaattgacgcagccagcagcactcaccaactgcatgagcaacaactcggtactctgtctccgcattgaaccgagacattgtgatccgccaacagctcggtactctgcctccgcactaaaacgagacactgtggtctgctgttttgaagaccagaaaactaggttatccccgaggaagacagagtagcctaacgtagagcgtcgagagtctagacatccagcccagtcaatgccggagtatgtcgtgatggatgacacgttgccaatgctgaggtgcagatcaatgttgaggatgcccttcacatagttcaaaatgtgcttgaacaga

SEQ ID NO: 192395 - DNA, 296 bp, Zea Mays
ccagcacacacacacccttcctccgctgcctcagctatggcagcgccgagctggatccggctccggcaggcgcgtgcaaccctcctcatcctgctgctcctcgccctcaacatctccctttcctccgccgccaacttcgagggcttcgactccgacgaccttccctccgcggccggtggcctcgatgctgacgatgacgaggaaggtctcgacggcgtcgacctcccgccccctccgcccatctccctctccacctctgcgccatcacctcccgtcacgacgacatccgcgccgaa

SEQ ID NO: 192396 - DNA, 417 bp, Zea Mays
aagggaagcagattgactaccagcacaaccatgtcctcaagtggaagtctaaaagttcagatatccctagcacaggcaagaattgtcctgtgctttccatctgagttttcatgggatttgagccacccatctgtcctggataagttcctggtgatcgaccatacttcatgtctgaacatggtagaaactgcatcacaccctcaaaacgaaatgcaaaatgaggttcatcttagcaagtcgtgtacctcaatacatttggctgtaggggacatagatgtatatttggttaagccagtcaataatgtattggttggtagaatctgttcttcaagtaggcaaactttctctgcaatgaaaattctttctgttactggatccagttataatgactctggcatcacactgatcaggagaaag

SEQ ID NO: 192397 - DNA, 458 bp, Zea Mays
cactaatgttgctcttcagcctggggttccagataagcacctttggagattctctagcaatggtctctactctgccaaatctgcctatgagctgatgttcagtgtctctacctccttggctgtcttttgagataatctggaggacttgggcaccgcctaagtgccgttttttcctctggttggttgcacataataagtgttgatcgacttgctaagagagttcatccccaccctgctagttaccctctttgtgatcagaaagggtaggatatttaccacctgcttatatcttgtgttctaacaaagacagttctggttcctcttgcttcagtgtgtgggcttggctgccctttccccgggattggatgaaatgtgttttgaagattgctggagcagattggccgagcttgttcctaaagacctcaaagatggttttaattccttggtgactccagggg

SEQ ID NO: 192398 - DNA, 371 bp, Zea Mays
gttctttagaaagagtagcggccgaagaggtatccatggatttcgaccgcatgatcaccatccgacggtcaccatgtgatcaattcacttaatgaaccagtacctaccctggccatccgatctcttgatcaacgcttcagattctaagtgctgaaagggtatcctcacgttctaatctgagccgttccttggagatccagcggccacggccccagaatcatccgatcgagatcaaacggctactgccacttctattcttatccgtccatcactagattagcggccctggacccatctccttcctccaaacacccatgcggctcagagcaaagagctccaaggcggcgcagatcaccggcaccataatcccc

SEQ ID NO: 192399 - DNA, 288 bp, Zea Mays
ataaaactcgagccctatcgctcccctgtggatacgccaagtcgaagcaagtagtccccgtgtcgtgtgtgcgtacagagcagaggtagagagagattgggcggccgcacgaccatctgggcgtctgggccgcggagagctgtagatcgggtcggtgatcgtctcaggtgcacggcggtggtgaccgtgggtgtatcagggagagctgaacgaagaagcggcctgaattgctcaccgtatccacatcgctgccgcggattcgcctcgcaccgtggtcggcctcctcgg

SEQ ID NO: 192400 - DNA, 283 bp, Zea Mays
gtggcagtccaccatatccaggcatgccgtaggggcagtctggtggcggcgccatggccgatgttcctggggtggattccaccgcggcaatgcgggaggacatggaggccatctgcgtggcaaagagccccaattggcgctggacttcagcaagggcggtggtgattgctgccaactccgacggctgggctgaagctgcagtttcagcttcatcagatcctggcatatccgataccaggttgttaggattaccccggctgcggaggttgtatgagtggctaat

SEQ ID NO: 192401 - DNA, 381 bp, Zea Mays
gctcctcatattggaaaaaggaccttgagaccaactcattgacaatccttttacctatggtttcagcaggttcattttcttgatccgagataaaaccattggccatccatagttggataagtttgtccacatcaatatgataatcctttggatatagagcacaaaaggcaaaacattgcttcatgtcaattggcaagtcattataactaagcttgagtataggcaaaattccagtctcatcattacatatggtgcttcgttgtaacacatcctcccattctccatcagtggtcttgttacgcagtacagaccctattgcttttgctgccaatggagaccccgcacatctctcagtgatcagaccagccaacttaactaagg

SEQ ID NO: 192402 - DNA, 365 bp, Zea Mays
gctcttaccaaggtcagtccaagcgtcacccatcacaggaaaggtgggtagtgaccaagcactcactcgactcccgcccctccatcgtattggtgacgtccactggtcatagatcattgtaagcgtccggctctggagtgctcttactaaggtcggtccaagcaccgcccgtcgtagaaaaggtgggcagtgtgcaagcactcactcgactcccgcccctccatcgtattggtgactaactttcctcgcagggaggtgggctcaagcattagaggagaggtcatattgctttcgtcttctagctcgtcggatggtgagtcgaaggctagcccttgtggcggcgaacctgcatcgttggttccgcc

SEQ ID NO: 192403 - DNA, 346 bp, Zea Mays
cttttcttcattacaagattctattgttttatgatcccattgttgatgttgtaggacaactcaatctttgctctcatctgctatttctcttactgacacacactcacgccaagaggttctgaatgctgtatccatcgatagttttatctatcatgtatttggttacattttccaatatcaatattgcggactatgattatgccttcaagcagctttcaccttaatttaaagcagatatcatgcctagcagaaaacaccaatcacgttgtggtctttgatgaggttctatctgtggctggaaaagatatctgtacaaaagacataccaaggattcgtggaggctggg

SEQ ID NO: 192404 - DNA, 590 bp, Zea Mays
ggatattggaagcagagcttgataaatccactgggagatcaccaattgctttgccatccatgaaaaagacaagaaatatgtcttctggtcctgagataaaccaacctgataagtctactggagataaacttattgagaataattgtgattcgggcaataagcgtgttctgagggaacggcagcatcgcaatcaaacaaatttgtcaaccagatattctaatcactctaatcaaaatgatatggagcagacacaggatcaatctgatgatgatgagatcagcagcgatacttcctacaggagaactcgtagcagacgtcgttgtggtgctgcccgtcttgctgtgccaaaacaagaggactctagtgattctgaagattttattgctgtgaaaaagaatcggcggaaacggaagaaatctgtgcataaacaaagggctggatctaagttgaagcatacttctggtccttccaaagcaggtcgtttgggtagacctcctctgatcaaatctgaatctagttccttatctctgcagccaggaaaaggggaaaggaaggtgcctgaaggtacaggaactcttcgcgaagaaaag

SEQ ID NO: 192405 - DNA, 445 bp, Zea Mays
cagcccgggctccatccccaaggagtttaaacttgaaattgttgatccggtcacaaccgatggtggtatgctgcgccgttcattggtctaccctatccgggtgtcggtgaaggtccttgatcgaccggacatgttgcagtccctacagccgtcacctcctccggcggaggatgatcccgatcagggcaggcggcggaggcgacgtcgatctaggaggtcgtcttttggtattaatgctcccggaaaaggttcgacgacagcggtcttgcctcgggtgtcggttcatcagcgacttgggccgcgcgtgcaagcctgtgggaaggaaggagtcagggtgcctcgcctggcggtccataaacggctaggccctctggggatatttaacgctgataaaggtgcagtcaagaagatgaagcgagtttggattcccaagagaaagttggag

SEQ ID NO: 192406 - DNA, 372 bp, Zea Mays
tcacgattaaagtggccaatggcgaatttatgttgagttcaagaagggtggtagcactagagtggtgggatgatggacatacttatgtcagtgatatgagagtgctggatttagcaacttatggtgctatactgggatatgactggctcaagagccacaatcctatggaatgtgactaggacaacaaaatactgacattcagggataaaggggtgagggtgtagctgaggggtgatggagtgggaaataaagaggtgctacaagtatcttttgtacagctgcaccgatggatgaaggtaatgaggtctgggtttttgtgatgttgggaacagtccaggaagaagtgactgaaggggatcaggaacctttgag

SEQ ID NO: 192407 - DNA, 634 bp, Zea Mays
atctcatccttcaatgggaagctgccatctgatgcttggttcaatcatgtaaaaaatttgacctcagatgcagaagaatctctcgaatatctgcactacaagatgatgctggccaagcttggggttgggatagagttcaagaaagtaatgcccaatgtgtcagggacttgttccaaaacaacagctttaagcttcatgcacttactagcttcacaggaacttgtttttttaccagttaccgacaaattggagggccttcgacctggaagccctggtttgactggtgtagttcttggaaactacagtgagatattgtcacttagttcttcggtcatgcggtgcatccttttgtgtcgtggcattttaggcattattaacatagttaacatgaggcttaagaaggatagtctggaacttcctgcatttgcttttgatgatctgacatatgctggtcagaacaagggaactggaatgaatgcgcatcgtgtgccggcacacatgactgaccctatatatttgttgcctatgtttatcaggagtcttttgtgtttggatctctcaaactgcagtggccttacacagctgcctgcttccattggcaacctttctaatctggttgcattgaacctctctc

SEQ ID NO: 192408 - DNA, 673 bp, Zea Mays
attttataaagtggcaaaaaaggagtgtgaggagagactgcaggatggagctaatcagaagcctcaatttagtttgagatctctatctcgtgctttaggatatataaaaaacgcagagaaaaaatttggcttcaggaaagccatttatgatggtttctgtatgttctttcttacattgttggatcctcctagtggaaaaatcatgaagaacttaatagtttcacttctgttagatggaagagtgccacctaacatttcttttgttgactacttcactgataagcctttgcaattaggtggctgtgaatcggatgattttttgcagagctatgttttaactcaaagtgttactgagcacataatcaaccttgcccgtgctgtttacattagaagataccctgttcttctacaagggccaacatcaagtggcaaaactagccttgtgaggtatcttgctgcaaaaactggacatgagtttgtccgaatcaacaaccatgagcatactgatctccaagaatatctgggtacttatgtgacagatagtcaagggaagcttcagtttcaggagggtgctttggtgaaggctgtgcgggaggggcactggattgttttggatgagctaaatcttgcaccgtctgatgtcctggaagctttaaataggctgttagatgac

SEQ ID NO: 192409 - DNA, 1023 bp, Zea Mays
ctcaaactggttgaaaattcaagcgacaatctacaggatttggcttgtgaaagcccccttgctggaaaagtcaagttcatgtgcagctttggtgggaaaatcttgcctaggccaagtgatgggaagctcaggtatgtcggcggggagacacgcctcatctcgataaccaggaacttctcgtggaatgaactagtgcagaaaactctcacaatctacagtcagcctcatatcatcaagtatcaacttcctgacgaggatctggacgccctcatttctctttcgtgtgatgaggatttccagaatatgatggaagaatactgcagtcttgaaaaggccaatggctctgttagactaaggatgtttcttgtctccctcaatgaatgtgaagattcgtcattggacgcaaagagcttggagagtgaaccagagtatcattttgttgttgctgtgaacaatcttgcacatttgggccggagcattagtggcaacaatttaatgagccagccgagccatcaattggatccttctccacactcctttagagactcacctgtctgtcaagccaatacagaagttaaagccaaagattctgttggagcaactctcaatgaatcttcctctcagtttttccttgctccatacacacaacaattggtggtcgagccatcgacaactccgtccccaagtttaagtcagcagaggaccatgaaacaatctaggaagcaaccccctgcagatgaattgacaacaaaccaagaacatgtgagtagaagtgaagtttccagtagctcaaatttgaaaaccatgcttccgaaccatctagataagaagcacaatgatgcggacaagggtattggaactggatctcccttgaaacatcttcacattcgaaggcaggtaaaagattgggctggaaatggtattgacttgattccacataccaactatgatgtttctactccagtggaagcgtccttatattctgaaaaggttatcatgcatccagaaaatgcaggagggaca

SEQ ID NO: 192410 - DNA, 449 bp, Zea Mays
ccccagattatctcttcctcctgcaaaccattttgcggacagatccacaggtaattggttattttaagcaaacttgggcttaatgtgaggtattcatttgtttggtacatgtttcttttatctcagaaatccttgcttcattgtcaatttgtatcttgaccagggagctgtcaactttgcattgatgatgtcacaaatggagggaggttgtccagtagactacaacactatcactgatctcttccttcaggtatcttttgtattattagcatataaattcttttctgtagtagtatataaaattctttgttgtctgggaactctccatgcagttcttttagtcttcactatgtaatttggttttttgctttggcttacattcttcaacagagaaatatgatacgggaggctacagcttttctgctggatgttctgaagccaaacttgcc

SEQ ID NO: 192411 - DNA, 486 bp, Zea Mays
gttcaatgaggtggttcagcaagcttggacatctagtgttcgttcttccgatgccattcttaggctgcatgtgaagatgatccgcacggctaaagctctattgatctggagacgaaagacagtaggcaattttaaagatcaattagcaatcattcagaccgtccttactcttcttgagaaagcacaggaatccaggcaactttccggggacgagctagagttcagaagaagtctaaaaatgaaaatccttgggctagtgacagtccaaaaggcaagagctagacaacattccagacttgtctggatgcgtctgagagatgcaaacacaaaaaaaattcatctgatggcaaataatagaagaaggaaaattttcatcagatcgctggttcgtgatgacaggttgctcaccagtcaggaagacaaactgcatgaggcccaccatcatttcactgaagctattggtagaaggggtgagagacagagggc

SEQ ID NO: 192412 - DNA, 718 bp, Zea Mays
aatgaaatataacaaaattgtttttattatctgcacattcccattatattttgtagcatataaccacaaggtcacaaccagtttgtatgaattaattggcgtatgaatccgagatgagtgtttcgtatgattttttttacagtctatgtacacaagcatttcatgaagaaattatttacttgactcgataagttccaagttcctgcttttgacatttattttcttggtcatcaacatgcgaagctttacatgtcttcatgtcagtggtcgtcaaattttctccagtactgccttgagtagctgcagtggtgaccacacaagtgaacgagatgcaaagaaggcaggtaagctactgcaaatttatacaataatttattgtcaagaaacgaacgctagattactgtgccggatagatcttagcaggtaaacagtaggagaactgatgtaaatgagaagacaaagttcttcacgtgaggtaaaatgttgtccagttttttttcttaaaatgaaatatctatgtctttgctgatttatttgtccagttttttgttcttcaggtgagaagacaaagttcttcagataaacagtaggagtataaccagggagtgtggattttctgaatataaatggaaaagaggggatatggtactttagaatttggttttcggtgaaactataaattccattggcatgcttgatttaatgttcacttaaattg

SEQ ID NO: 192413 - DNA, 310 bp, Zea Mays
ggcgatctggccgctgtctctgccccgccctcctacggactacggagaggacgcggacagcttggcagccgttcttagcctgccgggacggccggggatcctgtcgcctgcggctctgccgccggctgcgttctctgggcagttctcggcgctgccgtttgacccaagctgcctctcatggctcaaggagctgacccccttcctgccctctgcaagcagatgcgtagaggagctggaatgcctgttcacgctgaaacgaagcaccctgctgcttcccggaatgccatgtccggccaccgtctcgacgttt

SEQ ID NO: 192414 - DNA, 838 bp, Zea Mays
atgagtgcttcagatgtgaggaaccattctgcagcttagctgaaaatgtttcccacctatcccttgttctttcagattttaagacaactgcactttctaatgaagtaaggaatttgcagtcttttctggttgtcagaagatgtttcccagtggtgagaatttttactttggatgatattttcgtgaaacatagattcttaagggcactaaatttgagctatacagacatactagagttgccaatttctattggaaacatgaagcacctgcggctcttggctctcaacaacaccaagatcaaaagccttcctattgagataggacaagtaaacagtcttcagacattggaactgaaggattgttgccacctcattgacttaccaggaagcataagtaatttggcaaagctgcgacaccttgatgtgcaaaaagaatcgggcaacattattgttggcatgcctcatggtataggatatctgacagatctccaaactctcacaatgttcaacattgggaatgatatgttgcattgttcgatttcagagttgaacaatctgaatggactaaggggacatgttcatgtaactaggcttgagaatattatgacagccaatgatgccagagaagcaaatatgatgggtaaacacttgctagaggctttgacactggagtggtcttaccaggatgaaggcatggacgatgacatgggcaaagaaattgctagtgagattcttcaaaatcttcaacctaacagcaacattatggagcttatcattcgaaattatgctggagatctgtttcctgtctggatgcaggacaattacctttgcaagctcac

SEQ ID NO: 192415 - DNA, 398 bp, Zea Mays
cgttatgagccgaagtttcggaaaagggcttcatcgaccactaactgcccagccaaagtacgagtgaagttgtggggagataaattgttgcatatagagttggcgatccttgatcataatcacccagtgagccctgcaatggcaaggtttttgaactcttataagcagctctctggccctgcaaagaggcggttgcgtatgggtggccctgggactatgcctgttgaagagtcaagcaagatgcccatggataagctgggggagcttgagcagcttctgtttggtgagagcaagcacaacagctttgtggagaggggtcgtttgaagctccaacctggagattcggaggcccttcggcttttcttcactcggatgcaggccaaaaatgccaacttttt

SEQ ID NO: 192416 - DNA, 276 bp, Zea Mays
ggctcgatgatgattattcttgctttaaccacaccgaactaaaggctattggaagggtgctttcttccttcctccatttgcgccaggctcctctttcttggtgtttcctcatgaaaccttgctttcttgttgaagaatgcagttcctgttttcttccgcgagagtgcgaggtagaaggattcggtaagatttggtagcgtagcaaggggggaaagctggaggcctcgtccgctggttcttggcttgtagaaaaacctggcctttctctgagagcct

SEQ ID NO: 192417 - DNA, 308 bp, Zea Mays
ctgtccatggagagttgatcctgttgagacaaatcctgacaatgtgaaagagagagcaacaaagcttctagatcagtataggaaaaaatcaaccctgtacagaacgaatacacttctcattcctttgggtgatgatttccgatatgttagtatggatgaagcagaggtacaattccgcaattatgagaaactctttgattacataaactcgaatccacatcttaatgctgaagtcaaatttggtaccctggaggattacttctctacattgagagatgaagctgaaaagataaactattcacggtcag

SEQ ID NO: 192418 - DNA, 431 bp, Zea Mays
ctgtctgcgaaactacaaacatgaatatgcatcgtggaagatatatggtatccaatgatataaatggttctggggattttgattttctccctgtaggtgccaaagcaagcagagccaacttatcaaccagtgtgtcgagtcaaatattggaccacacaacaagaacactgcagcaaaaacagtctcttgtcccattcaaagtcacccaatcttctgaattcaataagaaaatggagaaccctgaaaatggatcatttcaaaccccttcagttccaacttctgaatctggtggtcaggtttctaacagtttcaacatggaccaagagaatcaattgattatgtcaaacaatgtacggcaagttcaaaagattaatagatttagtgatccaagtgctaatgtaagcactcagagaatgaagaacagggatgta

SEQ ID NO: 192419 - DNA, 1434 bp, Zea Mays
caggtattctggtgtatattagatttagacaggccggacacacagacaataaatagtcttgttgtgccttgtgtggaatttatttatagctatgctgaatgcctggctttgcattccaatgaaaaaactagtgtgtcagtgggacctgcagttgctctgctgaaggagctgctctttgcaccatatgaagcagtacagacatctagcaggtgattttctcttctactgttcatacatcagtaagagtaccacaattaatatttgctagtttttcttttgtttttgtatcattttctcacttgtgttttattgctgctttccagtttggctatctcatcccgatttcttcaagtccctttccccaagcagacaatgatagctaatgatgatgctcctgaaaaccaagctaaagcaagtgcttctgctatgaattcaaccagtgcaaactctcaggttatgattgaagaagatcctgtcacatcatcagtgcaatattgttgtgatggctgttccaccgttcctatacttcggcaaaggtggcactgtagcatatgtccagattttgacctatgtgaaacttgctatgagatacttgatgcagatcgtttaccagcaccccattctaaagatcatccaatgtcagcaatacctattgaagttgatacatttggaggtgaaggcagtgaaatccatttctctgtcgatgagctaacagattcaggtgttcttcatgctgataggagtgttcagacctccccatcatcaattcatatatttgatgcaagtgagtctgcagacttacctgagactattacagaccaggcaactgtttcgatttctgcatcaaaacgtgccattaactccctggtacttaaccacctaattgaagagcttagaggctggatggggaccactgctggtactcgagccatacctttaatgcagttattctacaggctttcttctgctgttggtggtcctttcatggatagttcaaagccagaaaattttgatttggagaagtttgtgaagtggctaatggatgaagtcaacataaataaacagttccctgccaaaacacgatgcacatttggtgaagtattgatccttgttttcatgttcttcacacttatgttccgcaactggcatcaacctgggagtgataattctcattcaaagtcaagtgggagctctgatttgacagataaaggtcctgctcaggttctgggatcaacaacaataactcttccgtcatctagtgctgacctggataaaaatgagtttgcttcccagttagtccgtgcctgttctgccctcaggcagcagaaatttttgaattatcttatggatattctgcagcaacttgttcatattttcaagtcatcatccataaatggagaagctggttcttctggttcaggctgtggatcccta

SEQ ID NO: 192420 - DNA, 363 bp, Zea Mays
gaatggtgaggagcataagagtgtgaatagtagttatgtacacaactagggcaaaggcctcatcgtttgccacaaccatagctccactaaaaccaagagccaaagcaacttgcaacagagctaggtgagattttgcaaacacggaatataataagctaagaaaaacatgcacaccatagattagcagcattgaaagaaggtccaagtatggcgtctcaaaatcaaggccaaagcataggagggggcagagtgcatacgatgcaatagccccggagtcgacacccaacgataaaacctacaaggaatactcacaagctccttgcaacttgtagtggaggttcttgtttgtggtgacaattgaag

SEQ ID NO: 192421 - DNA, 1190 bp, Zea Mays
tacctgcccttcacgtcctcttgttactcagcaaattgaggcatgtcacaatacagtgggaataccacaggtaccacaataaatctgctgttggtgattttcttatttttatttaggtagaagtctatttttggccatccaattattgcccgagtttgtttttggccatgcaactcaaaaactataaatccttggccactgaactatcaatactggacaaatgtggccagtttcaaagggcttttgtattttctgaaaatagtaaaagctggtttattttttaaatgataactaatttattttaaatcagaaaaacatgaaaacggcactgattttttttttaaaatataatgtgtctattggtgctgaaattggagttatttggattttatttttgccattcctagtgttttattgcttgcgcctgttatttttttaaatcaccattttgtgccatattaaacctagagatcaaacaagagaatccatactcaaaccaataatgttgattaaattaaccaaattatttttggaggctagcaatgctatactagttgcaatggtatatatctagtggagcacggcacctgcaaggttggtgtcattttccatatctttttgtttactcatagtgtattatggatttttaaggtcaatctcgggtataatatagtgcaaaacgatgatttaataagtaacgaacataactacgagcaataaaacacttgtaatggaaaaacaaataaattcaaatagagcaccaacaaatggattatattttataaatattttggtactggtttcatttttttctgatatcaattgaattggttattattatttttcaaataaatcaactttattgtcttcagaaaatacaaaagcacattcgaaacaaattgggtggccaaatttgtctaatcttgacagtttggcggtaaaaaattctacttttagagttccatggtccaaaacaaacttgagcaatagtatggtatctataaatctcatttttgctttgtgctgtacatttttctgtaatgcgctgcacatttttctctgccgcatgctggaaactaacatagttatgcattttcaggagtggataatagatatgaaaggagatcaatgcccttctattcgatcagttcactggaagtcaaagagagtgttctttgtcactccacaag

SEQ ID NO: 192422 - DNA, 416 bp, Zea Mays
ccaagctgttggctccagatgcatcagtggaagctatgagccttatggtgaagattgtggtgctcttaaagttaacccttttgccagcaagaacaatactgctgtgtatcagtctaaattgggcacacaacctgtctatgttgtggcaactagggcaaattgttttgcttctggttcgatgcagacaaataacagtgataaagaacttgcatccagtgccatggaacggattgatagcgtgaagaacagaacaagtaaagaaacaggatttgtcactgaagcttataacaatgatgcctttagtggtggtattactgaaaagggttttgcgcagttcagtaacagttctactcacataaagcccaatgcttctggccattgttcactacctgaatcaaaaactccaacaaatggaa

SEQ ID NO: 192423 - DNA, 367 bp, Zea Mays
gtcagcttcaactcgaatctccaatcatcgttcatgtacagatgggagcacaccgtcgctaagctccccacgttcacgagcggttcggccacctcgcgcccatgcccctatctataaatgcacgcaccccaacgacatcgctaagcctcgcccttgatcatcgacgtcgctaacccacctctctgctcatgtgccatcgtcgtagcagttgttgatgtgttcccatgcctgttgcttgtcaccaccatcgagttatgtcgataagcatcgccttcaaatctcgtacccaaaatacaccacagttcgctctctcacgcgtccctttgccccttttaccgccatccttgcagttggatcgtcgctctag

SEQ ID NO: 192424 - DNA, 469 bp, Zea Mays
ggactcaccatttactgaaaacgaggtctaggaatccattaaacagctaccatcagataatcgaggcctagatgagttcacaggcaaattttacaaggtgtgttggccgattatcaaggaagatgttatgtcagtaatcttagcagtttgaagtaggaaatttgctcaatttgataggttgaatatagccttggtaactcttattgctaaggagggagctgatgaggtcaaggattttcgacctatcaatttagtacacagcatggccaaactaaccactaaggtccttgcaaataaattggctcaaaagttgcaagatatggtctcaccacggcaaagtccctacattcaaggcctattcatccaagataactttatgcttgtgcaacaaactgctagattattcattaacaatgaagggaaagtgtacttctgaaacttgacatcactaaggccttcaactccattt

SEQ ID NO: 192425 - DNA, 481 bp, Zea Mays
acaagcatgacccagaagagaagaagaaattgtgctaggaaatagacaaggcgattctgattctataatattgctgccactaaggaagcgatgaatataattacatcaatttggttaatcaaaatggagtaaatcattagttgggttcttcgacaatatggctggatttgctcaaaaaccatattcggttttggtataatcagatgggatacaatcccttcagtaaccctaaaccctaataggagtcatcatagcaataatccatagataagcattacatgcacaataaatcaaaatatgactaaaaagatacgatatcttcaagacaaggaatggttgggcaggcaaaatagctttgctgagaagtcattcaattttggatgtagaagtttccaccgaacttagatacaatcctcaccattgggagagcaatcaatgtatgctgccactgggaaagggattgcataaaactgacacttaa

SEQ ID NO: 192426 - DNA, 937 bp, Zea Mays
gccctcgctgcatatgagcgcgagctcatagggctcgtttaggccgttcgacattggcggccatacttgtggggtcggcgcttcatcgtcaaaaccgaccactacagcctgaagtatcttctcgatcagcgcctcgcgaccatccctcagcaccattgggttggtaagctgctcggatttgatttcacggtggagtataggtctggcgccaccaacatcgtggctgatgccctgtccagatgggacacggccacggctgggctgctggccatctcagccccccggtttgacttcatcgaccgactccggcaaacccaggcgacggaccccagcttgctcgccatcctcgacgaaatccgcgccggtacccgcaccgcgccttgggctgtgcgtgaacgtgatggcatggtggtcttcgaggggcgtctattcatctcgccgttctcgccgcttctacaagaaatcatcaccacgatccacgaagacggccacgagggtgtccaccgcacgctgcaccgtatccgacacgacttccacttgcctagcatgtgtcgcctggtctaggacttcgtccgctcgtgcgcgacatgccagcggtacaagtccgaacacttgcacctcgccggactactacaaccgctgccagtgccctccatcgtctaggccgacatcgccatggactttgtcgaagcgcttccccgcgtgcacgggaagacgaccatcctctccatcgtcgaccgcttcagcaagtctgcctccacgggattccacagtccatcgtctccgaccgggaccccgtcttcacgtcgacattttggagcgagctcatgcgcctctcaggcaccaagctcctcatgtcatcggcgttccacccgcagacggatggccagacggaggcggcaaacagggtcatcatcatgtacctcaggtgtttcac

SEQ ID NO: 192427 - DNA, 594 bp, Zea Mays
gtcgatctgacttaagctatatgctccattagaagggtatataccctttgttttgtaagcgtgagcatgtaacaccgatttaagtcaattcgacttaagccgattgctccgttagcgggctatagtatgcaccctttgttttgtaagcatgagcatgtaacaccgacttaagccgatccgacttaagtcgtttgctccattagtagcatgtgagagtacacttgtatgtggagagaaaatagaagctttattgagagtgaagtcgtcaaattacaagtggtagcctaccatctagagtttatggtgctattatggataaaactttcttgaggtgcttgatgttccatgaattccctactggggtaccatccatatgagttagccgatatgatccaagccaagtgacttatgcaatcatgaaagtcgtccttctcccgattgtatgcagcggagcaccaggtctcctactgcaaatgttcggtgatgtacaactttgtcatggtagcacctcagggtctgttgatatctggccaactaaataacaacatttaaatgctcctcttctaacacatcaatctcctcaagccaggttgc

SEQ ID NO: 192428 - DNA, 693 bp, Zea Mays
gaggattctaagcaggtagggcaatctgctgtggaagctgataactttggacaacgtgctttagatgtatcagacaatctaagtggatcaacaggggtatgccaaactgacacatgtgacaagattacagaacctgtgactgtgaacgcaatgaatgatgttggtattgagatgaacaattcacaaacatggaaagatgattctactgtggatatcgagacactggtaacatctgtgtctgctgctgtgaacagcatacgaggcaaaataaataatttgctagacagtacaagtcatataacacctaataggtcagttagcatttcatccaaaatttgcgatatttctcttgcaagcttggatttaataatttaccataactgaatctcaacttggcgcaacagaggcagatctcggcgcagcaggggcattagcagtataattatttcccggtatgaagatgaccttccgtcgtctagctgctcagactgcaacacatctgtctgtggtccagttccaaggcgtgaccaggagactgctctactcaccttaaaagaccggcttcgtgagcttgggcagcgactacatgaggtgaatcagctgttctcaaaaagtattggacactatttataattatggtttaattattattgaatgttcactctaatttaggacagatctgtcttgctcgag

SEQ ID NO: 192429 - DNA, 756 bp, Zea Mays
agagaggcaagggcttggatctgcacctgggatagagaattgctgaaaatgctactatattcctccagcgcctcctgactcagagaatccccatcatggatcactcccagtgtcttcataatggtcttcttgcttttcttgaaagaggaaaggcgttggtgacactcaaccccgacgccagcaacacgcctgctgcgcctaggagtagccacccgccccccaggcagttttttctttctaagggggttgggggcagggttctccaacacagcatcgacctctttggtaatactggacaagaactcggacacccttgaggttgaaacatcaacagcagaagccggtggttgagacggagagctccccaaggctgtttcctcaaccctcctcgctcctcggcgacgccgaaagtaaacttgaataggttttgggcggaggagcaagggaggggaggtggcagccacaggggactccctgggaagcaacacctcgcagtcagccacagagcccagatttccagccagagcacaaacctgctgacagccaatctgattgtgatcttcaagacatccgttcaattgcccattgccaggaccagtaagcacagaaatctgcccaaccccctgctgacttccaaactgacagagttcctcaggacactcaatcaactgcccactgccagggcactcatgcagagaactgaccacccccttgcaagctggagcactcggcagagacagcgcaggaagaaaccac

SEQ ID NO: 192430 - DNA, 652 bp, Zea Mays
ccaatttaggcctcctgtcctatggagaggttgtcgctaaagcttaaaagtctggctaaaaatttgcagtcttgggggcataaggaagtgggtaatttaaggaaccagttggagcttgctcgggaagtgatgcataggctggaaacggcttaggacagcagagttttgtcgggagaagagctttggttgttaagaaaagtgcagcagcactgcctagttcttgcttctctagaaagaactattgcacgtttgagatccagaatccaatacttgaaagaacgagatgctaattctaagttcttccatatgcaagcttgctttcgaaagaaaaggaatttaccaaactagaggaggaaggaagggtggttatatacatgaagtgttagatgggtttttttccaacttgtttggtgctggttttcagagacagtatacaattgatttgatgaattgtcacagagatgcagttgatctcagtgccctggattgccctctctgaaaaggaagtgatggacactattgcatgcctcccatccgacaaagctaccgggcctgatgtgtttactgggaggttttataaaacctgttggaacattattaaggtggatctaagaggttttataaaacctgttggaacattattaaggtggat

SEQ ID NO: 192431 - DNA, 405 bp, Zea Mays
ccggatgcctgcacacttgatgatagccactacagagatctagcttggtaaagaacctcacgctacggagctcatccaagagctcgtgaaccactgagatcgaaaacttgtccttcattgtcttcgtgttcagcttgcgatagtcgatgcagaagcaccacgtgtcatttgtcttcttgataagcaacatcaacaatgagaacgctgaggtgcactcgcggatgatgttgtgttacaacatgtcatcgtattggatttcaatatcacatccttgagctgctccgggtagtggtacggccagacagccattggtgttatgcccgacagtagcctgatgtgatggtcatgacagcaacatggaagcagaccacaaggctcggcgaaaaggttgacaaaggagtccag

SEQ ID NO: 192432 - DNA, 310 bp, Zea Mays
tggcaattgagattctgaggacacatattgaagatcaatagtcttctgctgacaatgagatcgagtaaaagatgcatcgacaccaatgtgtttagtaagttcatgcttcactggatcatgagaaatctgtatagcactcaagttatcacataacagaggtgtaggagtgtcacaggagacaccaagatcagccaagagtcagcgcagccaaataatttcaacagtggtagtagcaagagcctgaagttcggcttcagcactagaacgagatatggccgcttgcttcttggatttccaagcaataggagag

SEQ ID NO: 192433 - DNA, 452 bp, Zea Mays
gatcaatgactggattttttgtcatggtggccttcttcctcaccatggtgagacccttcacctctccttggcatccttgttacccttggcaatttgcatacgtgatctcagtctaaaacataaatctggttcaaggtcagaacctgcccgacaggagcactgcataaaccaaaatgcaggataggctcttgcttgagcctaccattatcaagcaggaaccttgagatttaatcacaaatgttctttttaacaatacatattgcaccaagtgaaccgaagtacctcaattcctttcccttcctatttgcagttgaatatgggattgagcgtatgaacagggaggtatcaatgtggatgaaatgttcaggcgaagacagtggtgacgagacagacatccccttcatagctactagaggttatgacagcgtcgtgtggagtcgaatgtactcgca

SEQ ID NO: 192434 - DNA, 360 bp, Zea Mays
ttcaccaaaacagaaggcactggtcagatttctttctattcttaagttcccgtctctttcctatgtattttctgaatgtattcttcaagagcatacatgcataatcatttgcaacaattccaggtcacaagatttgttaagcaagtaacacataaagtgactttagcaataggtgatggggcaaatgatgttggcatgcttcaagaagctgacataggggttggcatcagtggtgctgaaggaatgcaggttactgattcgacgctgtataactttcgctaattgtgcccgtgatttattttcttattatttgtctcttatgatgttctaggctgtcatggctagtgatgttgctgttgc

SEQ ID NO: 192435 - DNA, 424 bp, Zea Mays
taaaaggggtaaatagaaaaggaaaagaaggaaacagacccactccccattcccatgctcgttcggcaactgccccacggcggagtgccatttgaaccccccacgtccccttgcctcactaccctctctctcattcttgcacagccaccaagcgccctcattgtgctcacctccccacggaactgccgccaccgtgccgcgtgttcgccgctcgcagtgtcgcgccctggcctcactggagcagtccccgaagcctcgccgcgtccgtgctccgccctcgctatccaaggtgagttccttccctcatctactctctccctctcgacatacgccgtctacccctgcacggtgagccacctactcgcgctcctagctccttggcacggcgagctctcccatccccggtgcctagaccaaagtagac

SEQ ID NO: 192436 - DNA, 393 bp, Zea Mays
ctcaagtggagatacatcggggggtagaagagctcatgttggtatttcctccagccttatgatgagtcgtcaaaacaccataactgaaaagtggttttgttatgttctatcgaagagaggtgggtgaggtactttagagagtcgatgcaatagtggaggtagaaccctgatgttggggctaaggcgtatcgtcattgttccatgggcgtcgatgatatggcaagggacacaatctcctagtagtaacatttgtatagatcgtgcgagtctattgaagctaggtacctggagtccatcgaagttgttgtgatggtggtggatggtattgatgtcattgcatactgtagattatggttgtcttgatgtagaagacaatgtagttgtctcgcctct

SEQ ID NO: 192437 - DNA, 1090 bp, Zea Mays
tgttgagtcacacaaagctgtgaataggatgtctcaatctgctttggcagcttgcatggcaccacttcttctccgacctcttcttcttggagaatgtgacatagacaatgaatttagtatgggaggggacagttcatttcagctacttcaagctgctgcggctgcgaatcatgcacaagctattgttattattatgatggaggaatttgatcagatatttgatgtatcctctttttacttgatccacttgaagtacttcacgtagttgttcatgagatataattcaactgattatcatacaggacttggaagaaggttcctgttcttcagatgcttataccgagtctgaggatgatgatgttgataaggaatattccacagataatgacattaatgatgatgatgacggttcttatgattctggtgaagatgacattgaagaagacttggactactctgatgacagtgaacatgacagtaagatcaacactaatgtcaaggatggcaaggtacttcactgatcattgtatcgattgattccataacattatagatgagatattctccatgctggcactggaaggtccttcgagacagatgttaactttttgcagcctttcatgatatggttcttgtttcaacgtgctatatttttattattttaatttatgatgttaccttgtttttttccctatgcatagaatagctctttggctcatatgttttgtccattaatataggttatgtgcgtggtcaaacttttctgcttctaaacagtggtgtttatatttttataaagatggttatatctataactgcttgtgtttcatggagacttttaaatgcattatatactgcaaatagctctgcggtgtttgtaactgtattcttacacgagaaaatcttgatcacactatgctcttgggtacaatattgaagaatagtttagactactgcttcaaagcacattcaaagttgcaaaactttgctcatttggcgtagaacacatgtatttttcagaactgcagctttaggtctctgacttcaatttttcttggcctataggttaaaaacaatatctcagaaactg

SEQ ID NO: 192438 - DNA, 525 bp, Zea Mays
tgctcctggcatcatttagaaccttttgtttgttcgtcagatcacactgacaattcatgttctatggagtttgacccttttggtttgtcagtgaaggatcttgccgctcaaagtcttcttgtgtggtgtgacagctctgggcccctgtacacccttcgctttcctgcatccactacttcgccatcttcgtcagcctcacctgctttgactactaccgcttcgtccactagttggcaccgtcggctcggtcatacatcgtcccgatgttatgtccaaggtgtctagtagttttgtcctctattgtactcaaggccaccatgagtctttatgccatgcttgtcagttgggtcgtcatattaggctcccttttcctcactccactcaagtcgtgcgcccttttgatctaattcactgtgatttgtgggcctcacctgttcagagtattttgggttgtaagtattatcttgtgattcttgatggttgctcccacgagtattctgttgcacttgaagtctgatatgttcc

SEQ ID NO: 192439 - DNA, 744 bp, Zea Mays
tagaccaatgatttgacaccatactttttaatgagatccgaatgcgtggctgctatagcatgtgcttatcaattgtgcttattctttattaaactatttttcatatcagctgttgttttgaagccctcctttcactgagagcatttagtgtcagtaagcaatccatgaatgcataatttctgctccagtatttgtgttttaactaagttagattctggtttagatgcctatatgacactacattcttgttaagttgatcatttaattagtttggtacctccagcaaatactgtaaatatgtttatggaatatgttaaatacttctgtatgtttgcttgccttatattttgtattttttctgtatagggctttgtaaacctgtcatcctttggataggagtgcatgaaaatctgcaatccatgtgtctgaatcatgacctgctattacttttactttatcttcctaagcattaaccttgcttctttgtatccccttaactggtggcttgataacactttgtattatgcattaaccttgcttctttgtatccccttaattagtggctcttggtaatgctttgtacacctgcattacattatagtcaagtattatgtttcataccttgcagtctgcactaacttgtaaaatagttcagataattggcacaagaacgaaactggcttatgcccttgcaaagcaatggtttggaatatacacaagtgcagaggagtccagtgacggtaa

SEQ ID NO: 192440 - DNA, 288 bp, Zea Mays
accatcatggccaaggcatgctaggtttgccaggtctgagaacacgtcggggatgaaggcatgcaccaatgttgttagtaccagacgtactaggtagagggctccaaccatgcgtcaacgtctgaaggaactagcagagaaggcctccacgatgattgcgatgcacagaagaatggcgaggaagaaggtatcgatgccgcccgcggttgttggagtggactaagtagacgaggacgagaggatggcattgcagatgaggttgtgctggacaaagtcgaagtatttggg

SEQ ID NO: 192441 - DNA, 469 bp, Zea Mays
tggcggcgataaagctagggttcggccgccgcgagcgttacgggtgaggagagctggaaaaactgcgtgcttggttgctggattcgtgggcccgatacacgtaatctgctgggcgaaatcaacgcgaaggcccatggaccgacacgtggattactgtttcgtaaacggaaacataagacatcgtaagatcgtctaaggaaagggtttgacgatgatctaagcattagatccttcttcctgatactgtgcaataggttgttgttccctactgccagctggggaataactaaccatgaggttcttttaactgaggaaatgtatcgtttccacgagatagactggtaccaactaatattcaatgatttatgccaaactgccaagaagtgacatactaggagcgttacaaatgtttctacaacaatttacggatgttccatcatcattcttgtaagcatatcacttttttgtc

SEQ ID NO: 192442 - DNA, 890 bp, Zea Mays
tgtactaaagttgcacaaggaatatgttcctatctgcatggaggtgaataaccactttatacttctagctatgtctgtttttatttttctgttttgtatttgtgctgatcagtttttcaatatgtagtgcttgaatgatggtactccagaagtacgagatgcatccttttctgttttgactgccattgccaaggtttcttcttgagaacttgcttttctcgtcacttcattacgttacatgtatcagaatgtggctttaaagcccggatttttttgctactcttgctctctatagatggttggtatgaaaccattggaacgatccttggagaaattagatgatgtgaggaaaaagaagttatcagatatgattggttcttccagtgacagtgttttgagttcaggaacaggttagttttgcttttgtagttttacttgtattcaaatggatcaaatatctctgttttggactaatttatgtacaaactacacttctccagctccaatcacaacatcaggagcagccacatctgctcgcggggtatgtttattgatattcttatttcaatattatacgaagatgtttgcaacctgtcagccttcctctcccaagtgcctatttacagttcttgtgctgtgttggggaattcttgttagaaaatttaccatttgtgattggattttgttagttatggtttaaaaaaacttccgtattgtcacagtaaaaaactagaaaaggggcagttgtttcaaaagctcaatgatcactagttatcaactttgtttgtcagggcaatgtttatttgtgaccagttctgttgatcaaatgtttgacaacccatgtaagattattctgtatcttgcaggttgcagatagcatgtcaatgaag

SEQ ID NO: 192443 - DNA, 744 bp, Zea Mays
ctaaacattaaaccccaaaccctaaccctcaaatcaaaacccgaaatctcgaatcccaaaagcctaatctctaaaccccgagccccaaaccctaaagcctgaacattgaaccccaaaccctaatttgtgaaccctatacctcgaaccctaaaacaaagacccgaccaccaaaacacaaaactctaaaccccaaactccaaaccctaaaaagtaaagtaaggctgttttggcctcgcgtgagctacaacacatgttttcatggccgaacaaccaatttagtgtccaaaccatagtacactagtgtccgaaccattgtacacgcatttggccccggaggccggtaaggctatttttggcctcccgcgacacatgttttcatcgtcgaacaacaatttcattcctcccgtccaccacccatgttttggccactgaaacaggtaaggatgtttttagcatccagtgagctatagcacactaaacctcgaaccccaaaatcctaaaccccgagacccaaaccctaaaccatgaatccggaaccccgaaccctaaaactaaaacccaacccccaaaacacaaaacctcaaatcctaaactccaaatcctaaactccatatcctaaacaccaaacttcaaatcctaaaactcaaattgaaatcctaaacctcgaaccccaaaagcctaaactctaaacacagagccccaaaccctaaagcccgaaccctgaaccctgaaccctaaattgtg

SEQ ID NO: 192444 - DNA, 315 bp, Zea Mays
gcagactcagagggacccaaagaaactcctaatctattagctatatctagcaagtctacattattagaatcaagcagtgaaaaagagttagtgtacatacctttgttgaggaaagcatctttggcttcagctctggaaatagctttatcggccaccttcacatcttcattcctctccagcctagagctttttctgatgccatctgagatgttggtgggcatttccagaggttttttacctttcacttcctgtaaatcctcaccactggggggatcgagatcatagcaccaattttggactgaaagtccatctggt

SEQ ID NO: 192445 - DNA, 1144 bp, Zea Mays
ggtaattcatcaaaagccaaagaaaacattggatgaaataagtcacgacctttgtccggtaagggacaagtgtttattttctagttttgtccctcgttctgctagcattggatcttgttaacaacctcatgacttccttttcaggtacttagtatacaacagctatacaggattagtactatgtactgggatgacaagtatggaacgcatagtgtctccccagaggtaagcttcaaactgtaccgagttttttgcatttcattgcaggtggataataattgaccatatatgattatcatattaggtaatatcaaacatgagagtgttaatgacagaagactccaacaatcctataagcaattcattcctcctggacgatgactcgaggttactttctcttcgctcatatcaatcctttgtcctgcgctactttctttttctttttgaagtgcttctacttatgcatctgcactttctaatgcagcataccattctctgtcgatgacatatccaaatcgatgcagcagattgacatatctgacatcgagccacctccattgatccgagagaactctggctttgtattcttgttgccgccacctgaatagatgtgtggcatgatggtcaattttgtcaatgattgcaagaacctaagaatggttattgggcgacaatctatgcagagctagatttacttatgcccaatggaatggagtgaatggcttcgtcgtaggtagatgttgatcatctacaccatggcaaatgtaacaaatccgctaggtttttatggcatgcctggactcacctagtgttgatccacctctagtcaagtagttgtgcaccccatagtgctactgttttcctttttgtttccattcagctttgcctttgattattccaatgctttggtaccctagttcaaagtatagtttagaaggtcttagtaaaaccagtagaaattccttccactggttgtttttagttctagagctttttgttctgagttcgctagagctgggtaataggatgtttactttcctccctcgttaatggttcagttctttggtgacatctttgtattattactgatcttgtgtatacattacattgaacacgatgcctacaatgttatagatggctattc

SEQ ID NO: 192446 - DNA, 339 bp, Zea Mays
ggcggactgcagctgtaagagatgttcccgctctgagacctatatgcgtcatggagttctcggcggggtttgctcgggaggaagttgatctccgacgtgccctcttcgtctccatcactggtaaccgtcctatggtctctcctgacatggttttggacgaagttgcgcggtcatacgatgttgatcgtggcctgttgagaattcatcgatccaaccctgaggatttcattctttttctccctgacgaggagttagctgtgagggttttcaatggcggcagacatttccttgctcctggcttcagtctgaaattcaagcgttggtcacgcttcatccatg

SEQ ID NO: 192447 - DNA, 559 bp, Zea Mays
gcgactacaaccagtcgctgcagttccgggacctggacagggagaagaagaagatcgacatgcaggtcacccgcgacggctaccgccagaaagtgtccatatatgacattgtcgtcggggatatcgtccacctgtccatcggcgaccaggtgccagcggacggcctgtacatcgacggctactcgttagtggtcgacgagtcgagcctctccggcgagagtgagccagtgcatatgtccagtgcaaaacctttcctgctcggcggtaccaaggtgcatgacgggtcggccaggatgctggtcaccgcggtcgggatgcgaactgagtggggaaacctcatggaaacgctgagccaaggcggtgaggacgagacgccgctgcaggtcaagctcaacggcgtggccaccatcatcggcaagatcggtctggtattcgcggtgctcacgttcaccgttctcatggcacggtttctcgtgggcaaggcgcacgcgcccggcgggctcttgcggtggaggggagcagatgcgctctccatactcaacttcttcgccgtcgcggt

SEQ ID NO: 192448 - DNA, 413 bp, Zea Mays
agaaaatgaaaaaagcatttgaaatctatccttattatacattggcactcaaccaccttgcgaatcattatttctttaccggccaacattttgttgttgaacaattgactgagacggctctttcttcaagcaaccatggactactgaaatcacatgcttactacaacttagccagatcataccacagtaaggtaatatactctttccatgtacatataaaactaatagcggtccttttccttgtttatgttagcattttggattcctttgttaaaaataggcaaccacatttatttatgcatatatttggtattttaataaaatgcagggggacattgagactgctggacgatattacatggcatctgttaatgaaatcagtaaaccacaagactttgtgttaccatatattg

SEQ ID NO: 192449 - DNA, 362 bp, Zea Mays
ccaggcactctcgactcaattttactccggaacgatcaccacggatcaccggccgccaacaaacttacagttcagacttgtgttctgtctattcctctcagttcgccgccaccttctcctagtgtaagccaatacttcttattacagtctgttacaaggccacttgggccaaataaacttagccactcacagctcgggccatatcgctctcttactccttctgagcccgtcgaggcctgcttctggcttcacatccttctcctttcccgcactggtattcttcgcttcttccgcgtcctggttgctgatcaccgggacactgacattttccctcccttgagttccagcttgtccccaagctg

SEQ ID NO: 192450 - DNA, 435 bp, Zea Mays
aagagttctgtaataaaaaaagtattggatccctgtgttaatgctgcataaaattctaaaagttaccaactagttgtagtacaccttttaacaggagcatgctgttatggcattggtgagggggtaatggtggttcaggtgatgatgatccttggctacgcaagtgtagctgcgggtatagttgagcgaggtttcacccctttagctccctattttattggagggaagagaaataggaagatcattcattgcttgattatgctccaagggccattcagcttacataggcatcaggctgccaatcagtcctcaaatctctctcaattattaagtttctaaattagcaccagctaatgtccgcttcccattgacagcagatcagccactttcctggctaggtgttcctgccttcttagtcctgcggctaaactgctt

SEQ ID NO: 192451 - DNA, 494 bp, Zea Mays
ggatctgactccgtagcagtgagcacgaggacgggagcggagtcgcagcgtcatgatgcgagagcggagaggagcgagatcgagggcgagagtttggaatgtgcatatctttctcttgtagcagcttaagaagcctaatctgtaacatcaaaatctgtttgatgtgtgacatcacttttttctttgctgaacgaatctgaccatatccagtagtgcgctgaatagtattcacagcgtccaaaagagtagttgtcagctcatctcctggaacaatctcaacgtttccttctgcggtagtacttttggtctcatcactgagctctttgttgcccataaaatttctaactttcagtgggacattcgacgctttgagatctttagtgtcatcactaacttcatatatcagcgtctcatcacttccatcttcactgcccacaatgtgcttctttgccctctcaccatgagcaccagaatagctaattagcagagcattt

SEQ ID NO: 192452 - DNA, 274 bp, Zea Mays
gagagagtgaacaaccaacacaatacacaaaaactgagggatgcaacacaattatataggatatgatgataaaaagaatagtattacacaaacgagtccatcattgcatagcataagatatgaaatgttactactggctattacaataagatcatcacatcacatcattaaaaagtttgtggctctaagccatcaccacatgcatcacaagtcagacgaataataattattacagaccaggtgttcattacataaattaaaggtgctgccaaga

SEQ ID NO: 192453 - DNA, 369 bp, Zea Mays
ttgggcatgagctcatctttcctcgtgcctatatatcgtgaccgctcctttcccctctactaatccatccgtgagctttcctcgacctcggaccgtgagcgagaacgcaggaggaggccgccaccatgaagtagagagaggaagagagcaaatcacgttaccggttgattcgtgatgtcaagtccccggtgggcgacggggggatcaacaatattattcgcacgtggttgtggcctttccaagcggggagatccaccagtgattccccaattgctcgtcggagtactttcaacaccgtgatgtcgcgggtcgtcgtgggccggctccccggaactcgattgccggtaaaatcatctccacatctttcac

SEQ ID NO: 192454 - DNA, 556 bp, Zea Mays
tgcagcgtctccgacgtgatttccatttccctaacatgaaggagttggtgcaggactgggtgcggtcatgtgcagtatgccagcgatacaaatccgagcacctccacccggcgggcctcttgatgccactaccggtgccgcagggtgtgtggacggacgtcgcgcttgactttgtggaggccttgccgcgcgtccgcgggaagtctgtgatcctcacagtggtggatcgcctgagcaagtattgccactccatcccgttggcacatccctactcggcagagtccgtcgcccaagcattcttcgccgaagtcgtccgcctccatggggtcccacagtccatggtctccgacagggacccggtcttcacgtctctattttggcaggagcttatgcggctaatgggtaccaaactccacatgacgacagcattccatcctcagtcggacggacagtccgagtcggccaaccgcgtcatcatcatgtacctaaggtgccttacgggcgatcggccacgccaatggctccgatggctgccgtgggcggagtacttgttcaa

SEQ ID NO: 192455 - DNA, 321 bp, Zea Mays
agaaagctagaacatttcgtccagaccttctcccacggatcaaggacgaaatccaccggctgctagaagatgattttattagaccttgtagatacgcagaatgggtctccaatattgtgccggtggagaaggagtcgggtaagcttagagtatgcattaattttcgcaatttaaatagagcaactcctaaagatgagtatcccatgcccatagccgacacattaatcaataatgcatcaggaaatagaattattagctttcttgatggtaatgccgaatataatcagatttttatggccgaagaggatgcgtctaaaacga

SEQ ID NO: 192456 - DNA, 416 bp, Zea Mays
atttggaagaaattcctggttctagtgctgaattggtggttaataagagtttggaggagccgaagcaggaggataatggggaagtaaagatagaaaaggcacaccgcctcaatgcaaagattaaggcggaggagtgcagaaataatgatgtgacgagtgcaacagaaggatggatgaagatatgtgggaatggggagaatgcagtaggtgaagaaggggtggctgttgatggtaacaccaatgtggatgaaagttcagagtttgagctgaaagatggagcactgcccttctacatactggatgcatacgaggaaccatttggtgctaattcaggcacagtgtatttgtttgggaaggtaaatatcacttctacactgaaatttcaagtacaattctggtaaattatccctaaggac

SEQ ID NO: 192457 - DNA, 513 bp, Zea Mays
gtttcggcaacggactggacaggtgcgccgtctgcagggtggccctggcgccgtctgccagtggaatggacaggacgcaataaatgccgtgggggcacatcgcccgtcagaagggtgacaggcggcgtgtcctctccgcaataaatgtgagggccgcgcggcccagagcccttacgtcatactccgcccgctggcctacgtcacggataataagccatgtgacagtattagaccctcgaccgagtggggagcggaggtgctccggatagagcccggacacacgtcaataccggacccatgcctaggtcacgacacttcctttcctgggaccttgttatgggtggtccggagctcacttggtggggtccggaccctatccaacggcttcgggctgctttacttcgggggtccgggttgtgcgcacaggggtcctgtgtcttctgggcccgatggcgttgtctccgagaacgccacctcaaccgctcacgagatactcctggggctgttctccgc

SEQ ID NO: 192458 - DNA, 419 bp, Zea Mays
gaattgcacaaggccattgttaatttgaaaactgtgtgggtcagactagcttttcgtcacctttctttgcccgtcctccaatggcagccgtgactcagactagcttattttgatagtgtactagacaggacctttgaaaattgtgtgtcctccgaactttttcatcacctttctttgctcctctaatccaatggcggccgcaagaaccgaaaaggtagcatatgtatgtgcccctacactacaccaacacacgaagagaactacgtagcctacccagcatgtcttcctcgtgcttttcgttccctcagtgctcgtcaaagaatcaccatgcccatgtgaaagggaaaccgatcgaaaccgcaacagatatagctgctgacctgtcacgtaaacttgggcgacggttactcctcggatgc

SEQ ID NO: 192459 - DNA, 312 bp, Zea Mays
cgaaaatcacaaccgaagctaaggaaaacacagaggatgctcagaaccttatcacaaggcttgagacagagaaggagagctttgaattgaggtgtagacatcttgaagaggaattggcgttagcaaaaggtgagatactgcgcctaaggaggcagattagcacaaacagttctcagaaaccaagagcaagaggaccaccagaggccagtgaaactctgaaggagcaacctgtgaatgattataatcagaagaccagtggagttgttgctggaactccacagcctgtgaaaaggactgtaaggagaagaaaag

SEQ ID NO: 192460 - DNA, 490 bp, Zea Mays
ctcaagcacagccatttccaaccacggcagctgttcaaggtggattctcacagggttgccttagtatgcctgttcccttgacagaacagcctctttttgggcatgaaagacagccaattgatccaagtgaccaacctttggaatttaacagtaggaaagctcctgatttggcagtacatataaatgtcaattccaatatcccagctcctcaaacactagcacctaatcatgatgtagctgcaacctctacacattcatggacgccatctgctacagtagggtacctgcctcgagctcctgtgccaccacaaacagcacaggtgtgtacacatgtttgaaattgaattactgaccttttctcttaagtccccttacacgagtgattctactctttttgaacctacagatggatccttctgtgcatgctgcaccactttttggagcagcatctagttctagttatgtttcacctgcagcatttggtgttggt

SEQ ID NO: 192461 - DNA, 437 bp, Zea Mays
taggttattggtaactgtcaaagacttttttgttgttttgtattgtgcggcccaggatatgtatatggtatagaacgtgtataattttgttatgatgatttttaataatatttagctattgccaaaatattagcattttcttgctgatgatatctctatattttagctgttggaaactgttataaaaaatgtgggcatcttaaatgtgcaaaggtgtctcgcgtgccgtaactgtaaaccagccgcgcccttttcctccccacgtcgtcgccgctaaagcgtccgccccaccatgccctcttcctccttgcgccgccaccggtagcaccgctccccaccctgccccgataacaatgagtggggctaggcacgctaaaagaatccaagggttttactaagcccatggctacgccgaccctcaaattagttgcattttc

SEQ ID NO: 192462 - DNA, 306 bp, Zea Mays
ggcagcttcagcacccagacagttcttgacccgcctgaggtgggcaggggaaccaatggctacacgccacaagatctgctgaccagtggattgtggatgcaatgaagaggcagcagcagctgggaggtcatggcaggcagagaacagtgctgtggcaaacggtgatgctgcagttctgcttttccaggcacatgagcttccaagcggctggcggctgtgcaatggatatgggaagagagcagtgtccactctgctgtgaagttgtgtatgtgagggaaaccccattggaccaaaataaagaaatcc

SEQ ID NO: 192463 - DNA, 284 bp, Zea Mays
gctttacaaaataatgaaggagcacaagaatcccaaggttcttagtgagggtattctttggatggtctctgctgtggaagactttgggatctccaatttaaagctaaaggtgcacttttctatgcttgtttgctctatacttactgtgttatcacacacttgttcttttctgtctttgttgttccaggacatgattgatttttgcaaagacaccggtcttcagtctagtgctgctgtaacaagaaatgctactataaaattaattgggatgctacataagtttg

SEQ ID NO: 192464 - DNA, 371 bp, Zea Mays
aaaaaaagaggaaagagaagctgctgaagctttaaaacgtgaggaggagcttcgtgaagccaaaagacaacaacagaggctaaactttctgctgtcacaaacggagctttatagtcatttcatgcagaacaaggctggtggctcagcgccacctgatgaggaagatgtccctgatgaagatgaggaagaagatcctgaagaagctcaattgaaaagagaggccttgagggcagctcagcatgccgtttctcaacaaaagatgaggactaatgcatttgatagtgaaactgtgaggcttcgtcaaacttctgagtctgttcttccaactgatgattcatctagcatggatcctagtaagattgatctattac

SEQ ID NO: 192465 - DNA, 825 bp, Zea Mays
ttcatttactcttcagtttggaacttttaactcaggagttattaacaaacaggcatgggatccttgttcaactatttttctgttggcttttcggtttgctacccgctaatgccatgctgatatttttgcaggaaactacttcctgcacatcctcagcccctcctgatctgaatgggagcaaacatgaaaaggtctactcaattctcatgatttatttcactgttatttcagacaccttttttgttgaaaatattgacccatccttttcgctcatgctgttggatcatttccttgattttgaatatcttttcagtgcttagacacgtgaactctctaatcaactaaaccagtatgcttggatgtgcaaaatttgagctagaattatttcataaaatagaaatgataaaattccatgcttctacacatcataccatacaaacttgtcaaatgatgggtgactctcttctgcacaccataatgtatatgcctgtatcctaatgtaaatcataatacattttttgtggagccatttagtaatatgactcatcttaattttgattatcatgcttctcttgtttgcatcaaatttgtgcttctattttgcgcttacctatatatacgtgaaatttcaggcctgccatggattacattattgcaagcccaatacagcttcctcacctcctatacaagagctgcaaaagcaggaagcaagagatgatttagttattggtggagaagcagacttaattggtaaatatgaggttcatgttcctgaattgcatgaaacacacacaatgctgaattctgtttctccatctagcaaag

SEQ ID NO: 192466 - DNA, 1446 bp, Zea Mays
ctccggcgaatagctcgagcacctcgagctcgccggaaacaaccgaggcggcgcggcgtctgttctccccggcgtgatggcgatgcaggggacaggcaacggatctccaagccgacccaacatttccgtgcccggtcgttgaacgcagcggtggtcccgtctcgtcctccaaggcattgggaacctgagaggcagaggctcggccagcgacggtgggtagcgaactggcgcctggttcccgggttgctattctccgggaggaggcgctcccgttgccatgggtgcgcggcggcggcttcgccagggctctggacggctccagctgctgttttccttcctcgtgctgctgctccaggcacaggccagcgtcggcgcggcttcgatcaacggtgaaggtaataacgtcctgttttgcagagggcagtctgcttatgggacatggcattggtggcgcggtcgtgttcggtggattcggtttttgtgatttgtgacggtcgagtcctgtttgtgtaactgtatgttaggattggcgttgctggaactgaaggtgagggtggaagctgatccccatggcgtattccaggattgggaccccatggacagcagcccatgcagctggtctggcgtgcgatgctttgacgataaagtagagattctgtaagtgtggttttcatttatttccatccagattgatgccatgaacagcctcctgatgattcttgaagttccattttaatagctcgctaatgatctcttgatgatttttgaacttccgtttctaatagtttgctacctctgtccattaagaggacaacagaggaaggaattgaaagaaccaatttatgttgttcctttcttgtagttagcatgaactttttacagagctgctgtgccgatttgatttgctgctattgtttatttgtgtcttcacgttttacacaaatcatgcacattggattcttatttcttttctcatgcacaggaacttaacaggccggcaattggctggaactctcgcacccgagatcgggagcctccgaggtctaaaatccctgtgagctggctcttctacacccatctccacattcaagtcatttcttagctctcgtgcaatgtactatgtaccgcaaatcctcgttgtgggatgatatttttcttactccttatgctgtctagtttacttccaaagaacaacttccgcgggcaaatccccagagaatttggagggctgtctgctctagaagtgctagatctgagcagcaacaacctggatggaacagttccagaagaactatgggctatgccactgctcaaacaactgtaagacttcttatgccccctgttatcctgttcattccttggtataatgaagggctcttatgtctcagatcccttcatgataatcagctccaagaaggcgtccaagcaatagctgatgatcaggca

SEQ ID NO: 192467 - DNA, 436 bp, Zea Mays
gacgagcgggcctaggacctcatcggaggaacgaaacctgcaccaccggcacccggcgcgacgcgaaccagcaacctgacagacgttgggagaagaggcctcgtgaggaggttcacgccgccggaccacccgtcgctcgtgcccgaggggcgcctcgtggaggcgagcgaacactggacgacatcctcgacgcccagtgcccgtaccacaaggacatgtgccacaccttacggaactgcagggacttcaagcactccgttgggaatggccgaccgttccagcctctaccacctcccccaccacaaggagggcctggtgagcccaggtagcctcagcaaccagaaggggagggggtggagcattcccacgcattgacagagaggttaacgtcattttcggaggccacggatcgcaagagaacagaaggcaacaaaag

SEQ ID NO: 192468 - DNA, 615 bp, Zea Mays
tccagggtggagtgggcagccgcgacataacagtggggaggagcggtcgacagaggcgcgaaagacgcagagggccaggacgaggtgcctgggatggtgggagctgcgtccaggcgatccaagctgcccacctaggctaccagcagcatctaggccactcgtgcccagatcgatgacaccgaggccgccgtcggtgcataggggcaagggctggcgactcgaggactggaggtggagaggtagacgacggtgatggcttcctagggcctgatagcggtggcaccgtggtggagttgggtccgacggtggggaatagaagggcagcgaccacggaagcctcgcgacgagtgagagaacagggaggaggggagccagaaggagtgtcggccatgggggctgggctgagggtggcgacatctaggggaggagaggggaagacctttggcttgataccaacaattcatgggatacaatattagtattacctatatggtacccctaatgtgttaccgcctctactactgtggccagttcgacaacgacatcaaacgaagaagagaacgcagctctcggcccacgaagcccaacccgcgttatgcgaatgcttaggaggct

SEQ ID NO: 192469 - DNA, 295 bp, Zea Mays
aatgcactgattggagggtgaagtatgagcaatctgtttctcagcacaaggctgaacaagatagatttgtcgctcagttggcatctcttgagtctaggcatagctctgcagaaggaaagttgggagcagctcgggaacatgcagcatctgctcaagatgaggctgcagaatggaagaagaaatatgaaatggctgccgtgcaggctaaaactgcattggagagactagcatcagtgcaagaacaaattaacaaaattgcacaagaaagggaaagttctataagggcagaatttgc

SEQ ID NO: 192470 - DNA, 438 bp, Zea Mays
gacggtggtgatggagtccaccatcgacggcttcgtgcacgggcaggggtacatgccctgggagggcaaggatagcctcggcacggccttcttcggcgagttccggaacgccggcgacggcgccaacgtcaccgggcggaaggacatgcaggggttccacgtgatgggcaaggacaaggcgctgcagttcacggtgggccacttcttgcacggcgcggactggataccggagaccggcacgccggtgagcttaggcttgtccggcgaggaagagtaattgttttgtgtgcgtagatgcggtgcgtgtcggacgagctgagctgagcacccgtgtatgtaaacgtgtgcgcgtatgcttgattgctcttgctccgattataatctctagcaaagaatggtaggtagtggtttgtatacaccatacacactacacgacgg

SEQ ID NO: 192471 - DNA, 292 bp, Zea Mays
attctgtttgggaaaaatcgcgtatttaccgctcacccaatagactcggatagtacaatgtcatcagaaaaagcaaactgcacacatgaaaccttatgtgttcttgtggcagatagcgtctctactgtgggacatctctaaattagcctaaggcgattcatgctatgtccactagagaagcaacgttctgaaacacttgtcttcgctcagaactgccttatgattaccgcagatatggacgtgggttacatgtttctctactcttgaaagtctttcgctccgaatctcggga

SEQ ID NO: 192472 - DNA, 311 bp, Zea Mays
ccttcctctatcgttgtggggaacggttccagtctcctggttatctcagtagttgacttagttctcctaggaccgttccacctcaaaaacgttcttgttgctcccaacatcatccaggatctttttgttcattgttttaccactgacaactcttgttttatggagtatgacctctttggtttatccgtaaagaatttggctaccaggacccttattacccgatgtgatatctcgggccattgtacactcttcggttccccccatcctccaccgccacgtcctccccgcatgctttggctgcgaccacttcg

SEQ ID NO: 192473 - DNA, 383 bp, Zea Mays
tttttcgggagcaaacggtgcttgacttacggagaatttcgcgtgatcttggttccatcgcgtgatccgggttcagtattttgatgcgcgcggcctgcaccatttttttggtcggttccggcttttatttcgatcacaggttgcttgtgtgcttttcgtgcttgtccacgccggcgtccattggttaattaatttcccggtctttttctgcgctcttttactacggccaaatgttgctggagcccatagttgaattctgtacactgtttttttaattaatcggtaaaagcgagcgcttctggcccggaattctgaaccccgaagctgtagatttctgccaagtgttccatggccccggttttgttcgggacccaaatttccgc

SEQ ID NO: 192474 - DNA, 360 bp, Zea Mays
agagtgagcatgtcgcaccgtcttaagtcattgcgaacttaagccgattgctccgttagtagggcatagtggtcaccccgagttaagtatgcatgagcatgtcgcaccgccttaagtcattgccgacttaagccgattgctccgttagtagggcatagtggtcacctcgatttaagtatgcgtgatcatgtcgcactgccttaagtcattgccgacttaagccgattgctccgttagtagggcatagtggtcaccccgagttaagtatgcgtgagcatgtcacaccgccttaagtcattgccgacttaagccgattgctccgttagtagggcatagtggtcaccccgagttaagtatgtg

SEQ ID NO: 192475 - DNA, 287 bp, Zea Mays
cttggagaaaaaatgtagagtattgaaagtgaattgaacgccaacctctgcatcgaatctaagaataaagtaaaagttcctagttcacctgaagtctttgtgcgtgtgtgtgatgaactgacgatgatggccttatcataggtgctctgctggagtccgaaaggcaggcaggcagacagacaaggccaatccccccgggtcttccggcgggcacacctcctgcaactgcacacccgttgggtcttggtctcttgggcgatggtggtttattagagcatatgcctgcc

SEQ ID NO: 192476 - DNA, 285 bp, Zea Mays
atcgcgtaaaaacaaagagctatccttcatgatcccgataggcaccataccaacctcatccagtagtacccaggttcccgaccacgacccacacggttccacggtggcgccatagctccgttgagccattgcccgattcgaatcacccccacgcactcaatactagctctatatgctgcggattgaacgaatgacttcatcggtcataccttacctccagccacggcccaagcgctgctggacacgtgatggcgcggcaccgcgacgacaccgaatcaatggcga

SEQ ID NO: 192477 - DNA, 365 bp, Zea Mays
ggattgtaagatgatacatggggagtgtgttgtctctcaacataagtttgtggtggcagtcttctatttttatgtgcgtgccattagggataaacaagccaagattgcgagaacgaagtggtggaaactgaatggggagaatgcatgtcttcaaggaaagggccatcaaagaggacacttggaaggtagaagatgatgcaaacaatgtgtgggacaagatgacaacgtgcatttgtaaggtggcctcagaggtgtgtggagcaactatagggagtggaggtgaagttaaagatacttggtgatggaatgaggaagtctaaagggctattaaggaaaagaaagaatgctacacacatctgtaccac

SEQ ID NO: 192478 - DNA, 2019 bp, Zea Mays
gcggaatggtttctggccttggctgttgtctgtaacttcttcgttctttctcatgcagagccaaagcagtaagtcgagtccagaagctaacagtacccaaagtcggccaagcatcaagcttgaggcctaaaccaagagatccttctgctcctaaatcttcaggtaagatacctctttgcacttctgttacaatttaatttcatgggaatgctaatcttgaggagctggtatttgtggcaaatggatctgagtctgacacggtagttttagggttgattaacttgatatgactaagagaacactaatagaatgtgccaaacggatgtctattttaacatttgtttgtatatggatttacctctagtttgtgcttgcattgccaacattacgaatttatgatcatcttgacaaggtttcttaaaacaaattatattgtccaaggtgcattaggctatccatactaagggctcgtttgggaaatacggtatcaagtgaccctggtcatttagcaccggcggggcaaacctgcaaataatttccccgtctctgtgctgtccggtgggttttgggtgccctgtggccatttggaaactgtcgagtagaacatgtttacattctccaaacaaaacagtagcggcgaacatcattgattccaaacaaaatagtagcagcacacatatgccaaacgtttggcttgtgcaccaaaggcaaaccgatacaagcattttgactggatcagttttcgctgaacaaaaacatatacaagccaaccgagaggcattttgattggatcatgtaaactcatgtaaatagatacaagcatttccctgaacaaaaactgtaaactacaagcaaagaagaccgtccaaacgtttcagtaggatcagttttctcaaaacagagcatgatgacaagttgactacaagcagatacaagagactgggttcagacacaagaggatgtagttcatgagacatggctggcggcttcttcaagatggctcccttccctgtggacatgcacagaaaattggcatcaaattaatgaaaaatgaagagcaatcaacaaaaaagatgacacaccacaactctgactctgcgaagttaactcaccctacaaggtgcataatcagcacataatcagtttaataattagtattctttccatgcatccataagaacaaagtgcagcagaatctacaatagaatcggaaccaacttgggactgaaagtcatcacctttctaaatccatctctcaagtatacctaagtggtgcgcggggtaaggaaacctgcatgcagtccttccaaacacgcagacagcgtgggcgtgttttttttgtctgtggcccgcccgtcccgccgaaaccggccagtgttggtgttcccaaacgaagcctaaaagggaataaagcagaccattaaagaattatattcgtatggcagtgcaactcaccaactcttgatgcaagcaatctaatgtagtaccatgatacaattttattgaagctcttgagttcaaaaataaagaaataatattggaaattttaaagtttcttgtatacatgtgactctttaacagctcacagaaaccttgataaagaacgatggtaatggcatgttttacttttactccctggggttattcatttccctctattttctgtgcaatttatttcctccaaagtgcatgttgtcttaaatccacataccattctgttagttatacatcatattttgcataattgcagtcacaccaggtgtgcgaaaaggtaccaccactcaagcaactccaccagcaaaagcaagcggcacttcaaaaagagtaccatagatcaagataatcatttggcgaagccgcttcccagccatttttctttttgcatagctttttcagatcttattgccatgtgtaacaccgatgccaattactgacttgtgcatctcaggtggataggttcttttcttttcattgtttgcaatgagggtgttaactgcatcagtatgtgatgttagcatg

SEQ ID NO: 192479 - DNA, 331 bp, Zea Mays
ctgcgccacatcctgcatcgcctggtttctctccggtgaatgcaggagagcctgcagcagaagcagaggagtctgcagcggaggcgtctgcgtcgcctagaacacccaaaccagctccagcaagtcctcaggtagaacatgtgacccccttggatgatgatgatgaaagggtggatgcctgccatgacggtgaagaactccgttatcgaaaaattcatgacattattggtgatcagccaacccctctgccggcgcagcggctgtttgcagaactgaatctcacccattctggtgagcctacaagctttgaagaagccaaggatgatccaga

SEQ ID NO: 192480 - DNA, 541 bp, Zea Mays
gctcctgcatctgttgtgaataattgggctgaggagttgattagattctgccctgacctaaagatacttccttactggggtccagagaggatgattcttcgaaagaatatcaaccccaagcgtctgtatcgcaggtgagttgctgtctaggagagaaacttgtgcgagtgatccttttctttaaaaagcgtataacctgattgcctaatcatctaaccttttctctcttaactctgcagagatgctagctttcatattcttattacaaactatcagatacttgtgaatgaagagaagcttttgagacgtgttaaatggcaatacatggtattggatgaggcccaggctatcaaaagttcaagcaggtgactttacatgttgaaatctctctctctctgtgtgtgtgtgtgttttcattgatttattaaggaactatcgtatatgccttcccttgcttgacaaattatctctctgctgcagccagcgatggaagacattactgagcttcaactgtagaaaccgtcttcttcttactgggaca

SEQ ID NO: 192481 - DNA, 1133 bp, Zea Mays
catttctctgcgttcggtacaatggtacatgtgtacaatgaacagaaaaatagtattagtcagacttcctcctgcatttacaccggttctaaactagagccagttttcttccatttcctttgaattatccattttccaccagccacaccttttatatagatgctgtctcgaccatatgaacatccttcttgctagataggagagtgccatacaaacccattggccaagaatgccagatctggtctgatgatttgtcattaccaacatgtcagtgtaaagccaagccaggtttcccaatttgattgttgcctttttgatcagtggatggcaaaaaatagcgtcacttcaccatttcccatcagtttccatgtattatgtatcaccgcactattgttttgaagggtcaaattcagtgcattcgaaggtgaaaacatggactccttgattcggtatacagctaatcgtcttcatcagagcttgaactgtctgcccttaggtcttgaattgctgggaatagtttgcgcctgggatcattgaaagatgcttgagatggctgagcggtctttgttttctttggagccacttttgatgcttctttcacctctttacaaaccttgtccagcatcgcaaggaaatctcgtactaccacaaataaccgcaggccctcgtccttccctgtactcccatggaaataatcaacagtgcccctgaccaaggaccgaattttcttttcttcctcttgcaacaaagaaacatcagtttggcactgctctgcgaaatgcttcagcttgcggtgaaacccactgtgttcatccagacttctcatgcccgtgttaaggaattctttggttttgacaagcttgtggccaagagttgctactgacattgtcaattgatctgcatccaggatcgctgccttcctgacattttgtagctcatcacttaaattggacacaactttcagcccaagttgtttgtaatcatcttcagttcgcatattattaccgtcagtatcttttgcagcccttgtagcacggataccttcagaacgaataatttcttcaaccacaaaatgcagaagtgttgtcttcccatcagttcctttgacatcagataacttaaggagcgtgtca

SEQ ID NO: 192482 - DNA, 498 bp, Zea Mays
gccaaggtcaagtatgtgggatcatttcattaagatcaaagatgacaagggtaggctaaagtctgctaagtgcaaatattgtcagcgtatccttaaggctgattccaatcagcatggtacatcttcattgaataaacattttaatgtctgcaagcgcaaccccaataaatttgataaagacccaaagcaaggtactttgcaagcaaccggaggggaagctcctagcacttggaggtttgaaataaggtttttcatgaaataaggtctagacaaagttaaagactctactcgagttacggttaataagatgtgaggacatctatattctataggcgcctttctcctacgagctggcgtggacgtgttgaccgatgagactcacgtgtttgactaatatatctgttgtgtaatagtaaaaacgagtttgagagaaagtgtcagttatgctttattgtagggaagaccctgattatatacagagcgaaggggtacatcccc

SEQ ID NO: 192483 - DNA, 750 bp, Zea Mays
ctgctgcccgccaggccgccagagagggaggattaggaaaggggggaaagagagacggacggcttctcgggagtgggtaagactcacatgatgcaattacctccatctttccctcttctccttttgcgggcatactcttctcctccgcctggctagatccttctttcctcgtcccggattagctcccaatctcgccaatggtccaggttgctggccgtggaacatttcttcagttgggcccactctctggtaaggcaaggcaaccagcccacagcacactacttctaagttctaattagggatatgttgttctctctcgcggctgattcatcgttttctgggtcgtctcttttgtctacctggtttcagtgccggttccatcgggttttgacgcaagagtagaggacttggtaggtcgttgtgttgtgactcattgttggagagcaggaccgatttcagattgaggacaatttcagccaattttgcaggaacccgtaaaacccatccggagaattttccctgcgcgtcccatgattaggagctgcggctggacagtgccctacgctctggagttttagtgcgaatcgttgccagtttcagtcaacttttgatggagcccaggtgttgagcgccaatttgggagttccagctgacgctgcagtctgcattcttctaaggccatcagtgaggaattttcgttccttggtggcagatgggttcctccagctctaaagtggacaatgaggagcc

SEQ ID NO: 192484 - DNA, 378 bp, Zea Mays
cgtgtcgccgtgactcccttgggccatctaatcgtcgccggtgagcttgccacggcgttagccacgtattcactgcgccgccttcttctttatctccggccgccaacacggctcggccaaattgagcaccaccgcccgcgggcgctataaattgaccgtacccccagctctgccatgcatccaagcacctactgcacccaccggcatcccgaaacccccaccagagcacgtgaatttcggatttccccaaaaccgttgaagaacaccgcaaagaacacctcgccgtggtcagcccgattcaggtccaatctcaccctcggtttccttgtttcaacatccttgcttgctcttgatgctcaccgacccgttaaatcgaac

SEQ ID NO: 192485 - DNA, 367 bp, Zea Mays
tgccttatattcgagcggacattcccattattattgtatttcgagcattaggatttgttgccgacaaggatatactggagcatatatgttatgacttttctgatacacaaatgatggaattgctacgtccatccctggaggaagcttttgtcattcaaaatcaacaggtacttgttcacctgcttgtttggtggaacttgttttttatttcaaccattgcttgctttgagcatgctgttctattcagttgttacttgtggcacattttgagatgtgctctggcttatgtttcttcttttaaaagctctagtttgactgctcataggttgctctggactacattggaaagcgtggcgcaacagttggt

SEQ ID NO: 192486 - DNA, 372 bp, Zea Mays
tagatttcattctcgctgccaatattaaaaaaaaaatctcaagatttgttagaaaatttaggcatgcagtacttttgggacttggaaggaaggtacaactgtcttttttactccatgcattgatatagatgtaagttgcactactccatatatgattatgaattatgatacaagtgatatgcatgccttatcatcattcaaatgtaggtgttggtatcgtggcttcgctttgggtactcttgcatgccacaactaatggttcagaagctctaccttaacatgagtcaagagaaagtgcactaattatttgcttgcgtttgcattattttcctaatcttgagattaaggctaataagttattcttatattttt

SEQ ID NO: 192487 - DNA, 566 bp, Zea Mays
atctaacaaggggactaccatctgaagatatctggagaaggcttcgaactacatttatttcagctttcaccttttcatcatcatcagaatcatcatcagggcaatttgataatgtagtaagattcccaagtgcaaaaacagcagcagctctgacctggcaaaaccaaatatttacttgtgaagtaggcaaaagaaagagtgcacagaatatgagggcatcatacctcaggtcgaggctccgacaataagcatattacagtttctggtgcatttgtttgcagaccaagtaactgagcctcagggaaatcttcccagagtttcccaaggcataaacaaagccactgcaaaagcaaaggttctgtttgtgcatgaagattctcaggttgcagatgtctcaggcaaacatctataagccctgcattcatacaagcctcttgacccatcctatgcccatccacgatgactgctataacaaaagcggccattgcacgctgttctgggaaagcatccaaactgtcaagaaacctaataaaatatgtatgtcctccatctttaaccaagtcaac

SEQ ID NO: 192488 - DNA, 430 bp, Zea Mays
cgttccgggcagctatagggaaatcagtggatggaccagccaaaagtactaacaccaatcaattaataagaacaaggaggtcattgcttcagaagggcaagaaacgtgagaatttgaccaaaaagttgtatggaacatctacaggaagaagaagaagcgattggcatcgtgattgggaagttgaattctggaaataccgttgctccccaggaataaatcctgaaaagattgagacattgcaatcagtacttcagctactaaagaaatcctctgaaatggacaaggaaagtgctaaggggaaaagggaagagaacaacaacagttccattttgtctaggttgtatttagctgatgcatcagttgttcccaggaaggatgatattaggcctctctctgcccttgcaggatgtgcgccattagaaaaaagtag

SEQ ID NO: 192489 - DNA, 314 bp, Zea Mays
ggctcggcgagaacgtttcgggcgaacattgacagacctctaagcatccaaagctttgtcagcctcagggatgggcgccaccaccaatgtttcagcaggagcagcatcagaagaatcctcagctaacatatccagcatggcacttatctctgcatcacttggattcaaaggcacctcaaaatgaacctgcctctcgtcgtcaggaatttctccgagcgaggcaaccaaagtaataacttctttgggagagggccgcactctaagacccaaaccgctatcaccagcaggaggatttgacacgaaactagtaaaag

SEQ ID NO: 192490 - DNA, 448 bp, Zea Mays
gcgggatgtggagctcctaaaggagttttcagagccatctcgcctcgctacgccattggcgacaatgagatactcaaccttggtactagagcgggagaccacatgttgatgcttgtagaactaggagatgaggttatctcaaaggaacacaacatagttggaggtggatcgacatgtgttcaggcaacctggcctgtcagcataagtgtagacgatctgctcgtggatggaggagcgccgaagaaacctgtagctgagtgtaccatgaaggtaccagaggatgtgcttgacagttatcaagtgtggttcccagggatcatgcatgtgaggcatacctgctagactgcataggcaatgtcaggtgaggtattggagggcaccaacaatgctccagtaagcattagggtcgctgactggatgacctcgctagagacctgctatccaccgg

SEQ ID NO: 192491 - DNA, 292 bp, Zea Mays
tgaaaacctctggccacaagacgagctttatatcgctcaatagacccatcagatttggttttaactttgaagacccatttgcacgtgataggtacagcaccagcagataacggaacaacatcccatgtacttgtgcgatgaagggcatttaattcatcagtcatagcaagctgccactcaggtataccagaagcctctttataagatgatggttcagcaatgactgcacaggcacgggaaaacccataacgttctggagctgcaatagtgccacggtcacgaagatgatacc

SEQ ID NO: 192492 - DNA, 646 bp, Zea Mays
agagttcgatgctctgtcgggaagcaagatagcttctattgaccttggtgcccgtgttgttcgtatggcatatagccctacaactagtcatgttgtcattgctattcttgaggtatgtattagagcttcacttgttttttttcttctgaaaaagcatttccttttattgctagaaccgaagtgccttcaaagtaaggcaaatgcttatgatactgttcacagaaaatcataagagtgacgatgcttcgttcttgttagtaggaaactaggcatacttttagcacttttatctagtcatctgccatgcagagtgaataatattattctctagcagcctgaatgcatgcactgctattggctaatggctgcgagttttgcatcttttattaatagcttgttcaactgttgacccctttgttatctcttgttctgcaggatgctacaatcagatcctgtgatttcgccacggagcagacacttgtgctgcattcgcctgagaaaaaaacagatcatgtttcaatagatactgaagtccatcttgcattgacacctcttgagcctattgtattttttggtttccacaaaagaatgagtgtaacaggttactctcttagcttggcaggttaccttttgtgtttgcttggga

SEQ ID NO: 192493 - DNA, 704 bp, Zea Mays
aatggaatactggaaacatttactcggtagagttcagagtgagagatcaacaatattgaaagaagttggtacaagacatactccacaatccagcatgttgagttttactccaacaatgtcaggagatggaagtggctggacaactttaaaagatggtggggacagtaaaacagtagcacttcctcaaacaaatgtgcaacagaaaattttcgctaatcagtatacagtgtgctctgctgaacaaacggagaagaatgttgatgtttgcaagcaagctctgtcagctcagaacaacatacataatgcacctagaaatggagcttctggaccatttgtggcatcccccgtttctcatcagaatggatccattggaacgggtatgtctaacatagcacaagcacagccagctcatagtatatatcgtccagacttatccactgtttctgcaaagtcagaatcatttcgttcatctttgcaaggtaaacttcaccttcagatgtgtactgaaagacctggaaacatgagttgtggcaaggcagcaaagttgtcttcttttaaaccacaagcttacatgaacctctacaatcatggcaacattgcagcatctgctgccgccaatctagctattattgcatccagtgaaggtaaggtttccacatcccaactgtccgcaaaaccaaagaagaaggtggctgcagacaatg

SEQ ID NO: 192494 - DNA, 771 bp, Zea Mays
tgtgagtccatctaattacatgtgtgtacatgcacatgccaacttcgatccctttcaaagattattatgcgtacatgagcacacccatgtcctttactggatatgcgcctgcagtcaggtgtgctttgcattgaatctttgtagcccttctattcttcatcctccccacagtggtggcatttggataggcagtgcaagtgggatcaggatatgtgatgctgagacagttaaagttatgatgaagaatcaacagaattgcagtatgattcggaaactagtttcagaagttagactatgggttagcctctcaataacttagttttaaatggtctacgttgacatgtctttgtctaaaattttattggtacttgcattatcaacctaccaagaaataaagtttgttctgttttttctgctcctttgatctctttgctaaaattcatgcggtgatctgtgttccaggccaatcaagaggttgaacagagctgtgcaggtgagcatgcattcattatattcccacagttcatattctttgcggtactacatctatggtagatttagtcgctgctgccatacatcagatgcccagatcttcttcaggcccttcgtcggcgaggagtatcacaaggtacgccaatcgcttggtcttatcttcctgctctgcaaaaacaagcacgcaaacccaatttactatgttacaccccttggcttccgatgaggtggccgaggtgtgaggctgacggtggcgctggtagtccgcaaggaaccgga

SEQ ID NO: 192495 - DNA, 597 bp, Zea Mays
ctgcaatcgaagccaacaccgcgcttcaaattggggaaaagttccctcccacgacacctagggcaagaagtagagtgggctcatcatcctgggccacatgggcttgtagcttgctcctccttaccttggcaatccttggcccaattgtctttcttggcataaattttgcacacatcgttgcctcgttggggttggcatggcccgcattcgtcccgatctatgaaccgttgttgctgtcagtgccgtgtcctcggccccatcgctggagtttgacctgccacggctagacctctagtcctgcttcttgtagtgctcaatgtactgctcctccgtgagcaacaacttgccaccgacggattacgccagtgcaggttcgttgtcatctgttgccttgagccttctagtcacctcgatcgagggcgtggagatgttgaggagagtttcaccggagatgacaagttgcttataccttgggcgtgtgatgtgtaggtactttgcaaccaccttctcgtctggctctaggtcactaagagttgctagatgttggacgatgttggtcagacatagtcatatagtgtagtcctcaatcaattcacc

SEQ ID NO: 192496 - DNA, 920 bp, Zea Mays
gtccagagcgcttatcgttcatccaacccagccatatttgctctctacctgtgaagaaatgaagctttgggactgggacgatgattggaagtgcatacaaaaatttggtagggaacacactgattccatacttcaagtggcatttagcccaaatgacagttttgccagtgtttcaagtgatcacacaataaaggtttgagcctctctcccttgttttgattcttatattgaattaacacaacattcaaaatataccaagatggttttcatcgtaacaaggtggtttttaatggggaacctccttccttagcaaggctgcagagaagcttcttggatgaattagtgtgttgggttatggttggtgccaaaatgtagtccccccccccccctctgtttatgcttctatttagcaggtttcgctgctttgtaagcctttttactctttataagatgcacagttctcctgcaagttcgataaagaaaatataccaagataagtgtaattaatttcctttgaaacaatgactgtgcgatagtgtgattaataagctatgctttgatgtacatcagctttggtgcctgaaatctcccacatcagagtgtactctgcacggccattcggacaaagtgaattgcttggatttcgtcacacatgatggtcagcaatatttgattagtggatctcaagactgtactgccaaggtatcgatgttgtctgtgtgtatagacacattatagttccgcgcataacaattgctactgatccatgctatatttttgtcaaatgaggcatgggccttgaaggaaaaggaatgcgtccagacaatggatgttttcatgtcgccagttgtttctgtcatttcccttccggacactccatatataactacaggttcagcagatggcactattcatttgtg

SEQ ID NO: 192497 - DNA, 325 bp, Zea Mays
gagaagcttggcctactggctgtccaacttatccacattgtcagttctcctgcaacgttcatttaaagccaccagggcaactgcctcaactccacatagacgaagaatttcctgtgaaaggatttttcaagccaatcaaacttcaagcagtggacttgcttgtctcagtgctcaatcagtggatggaggtaccgtgtttcaccaaattgaagcaaggtatccggcttcgctcttcaagcagcagctagtggatcaggttgaaaaggtgtatggagtgataagcgataaaataaaaaaggagctaaacccattacttgagttgtgc

SEQ ID NO: 192498 - DNA, 323 bp, Zea Mays
gtcaggtctagggtggtcgagacgacgatgccaagtggtggaggtggtggtggagaccgggacgggaggtggagacacgccggtggaagagggccggagcgtgtagaggggcccaacgctgtcacatcgggtgagtggggtcttggtggccagatacttcacagaaaaactagaggggtcaaactcaatggaacaagcattgtcggtggtgaaccgacggacagaaagaagattgtgagtgatgtgtggggctacgagaacgtcgttgaggtagaacggtctagggagcaccgaggcacctactgaggtgactggaagagtgg

SEQ ID NO: 192499 - DNA, 682 bp, Zea Mays
gaggatttgagatatttgataaaatgtgctcagagaaagagagagttcaaatgagtgaggctgctctgaccgcaaaggcacgtatggcgttgtccatgggtgacagtgatatggcctttgagattgtgaaacagatgaaaggcctgggtttaaagccaaagttgcgctcatatggtcctgctttaacagcattttgcaacagtggtaatgttgaaaaagcatttgaagtagaagcccatatgttggaatctgggatcacacccgaagaagctgagttggagacacttctcagggctagtgtggttggccgacgcggagacaaggtatattatttgctgcataaatttaggactgctgtcagacaggtatcccattccacagctgaattgtttgaggcttggtttcggagcccaacagcatctaaagttggaaagagaaagtgggatgcaggtgctatagcgaaggctattgagaataatggagggggttggcatgggtttggttggttggggagagggaaatggacagtggcacactcaaatatcaacgagaatggtgtctgccttgcttgtggagaaaagctggctattatagatcttgacccaaaagaaacagaagattttgccacatttgtggcaaaattagctattaagagagagaggaaatcgaactttgagaactt

SEQ ID NO: 192500 - DNA, 529 bp, Zea Mays
gaggtgccagctggagacttaaagctttgaagcgtgcaaaggagcaagctgctcgcgaaggaagaaaacttgaggaggtatgcaattattctcagtaaccaattcatttttttatttctcattaaattttgtgactattcaatttctataggttgttgaagagagatggagctcattaggcgacttagctgtttcagtatcagcatcaagagctgcccattcacatgctcatttgcatgccattagaggcagaaaatctggtaatgctgacaactcagaagaacgtgttaaaagaaatccagagggtcagctggatggtagcagtggcagacgtgaatatctacgggatgtttcttctcagcaccatgccatgagaaaaccaaaacctgattctgtcccatggaaaaagagaagacagaatatatcttctgaagatcaggcacttatctcatcagcggtagcaagcttaaataagttttctgatgatggaagctttatggaaaagattagcaatgttgagagcaagaac

SEQ ID NO: 192501 - DNA, 323 bp, Zea Mays
tccagaccagagttggtagaactcaagaagcagattgatgaattgttagagaaaggttatatcagaccgagtatctcgccttgggcagccctagtgttatttatggagaaggatgtcacgaagaggatgtgcatcgattacaaatctttgaatgaagtcactttaagaacaagtaccctctgcctcgaattgaagacctattcgatcagttgagaggagccagtgtgttctcaaagatagatctgaggtcaggttaccatcagctcagaatccgacctgcagacataccgaagatagcattcatcaccaagtatggattatat

SEQ ID NO: 192502 - DNA, 475 bp, Zea Mays
ctcggttggttgggtcaacccgctccttccgccgctgcatgctcgccggccgcgtggactgttgcggtatctcggtcacccgcgtgtccataaaaccggacgtaacctctctctcctccccctcgtgttcgcgtgcgccgccaagcgtaaatttcccctgtccagagaataccctgtgtcagtcgccgtcgcgcgctcggccgtgggtggaaatcctgttcctgcgccttctagccagtgctgtgaggtcagagagctccgcccgaacctcctattcgcgattgccgtagtgccgtgcgaggggacgggccgtgtgcctccaatttctcgccgtcgaatcgttctccgccgcgggactacagcgcgtcgtgggcaggattcctgggagcttgatctacggtaaggcacccaccattgcattcattatctcttccctactgcgtagccgtgggcaatttggaaattggggcacctg

SEQ ID NO: 192503 - DNA, 556 bp, Zea Mays
tcagcccatggccggatagagttagttttcttcaaccatagccatctcattcaaagagcccagcaaagctctgggaaactagagattcccaagactcccagttgcttaggcctgcatacttttctctatgcaaccaaacagtatcctcgttttgcttcctttcttcctctccataataagtcttttctaattttgtcaattgcatctgtggcccatttggggaaatcaattgccattgctgtatatactgacataccagtgagaacatgctgaactaaaactcttctgccttgcctgctcatcagatcagcctttcagtttgggagtttatcagcaatcctttccactatgggcaagaactgttgcttgcttaacttatgcaaggggagagggaggcccaaatatttgcaaggaaaggaagcaatttcacaaggcaaactgttttggacctctaggatggtctgctgagagcatctgatagggtaaatattggacttctgtgcgttgttgtgaaggccagagacatccccaaagagcttaaggatgtcaagagtag

SEQ ID NO: 192504 - DNA, 465 bp, Zea Mays
cagaaaagtcgtttaacactctcatcaaggcctacttagggggcatgcacactaattatgttcaagaccaaatcacccacaacaaagcttgactaagataatcttatctccttgcctcctcacatccaccacactgttcttgagactcctatcaatcaaaactcccactctatttcctcacattcgggcgtcgatgtagcacaccactaaggaagtagcgacccgatccttgctaacttgacactttgcccagatcgtgacatgacgcgtcgccagggggtcgactcggcccttgcccatttaacaccatacccaggtttcgatatgagggttacaccctaatgaatttctttcgtgtttctgaaagagggatatatgctgtgtaggctatagtatattgaatgaatagagagccagtctcctgcgctttcgagaaaaaaatgaatagagagccagcggttacag

SEQ ID NO: 192505 - DNA, 337 bp, Zea Mays
tcgttggcagataatctcaatgcatgtgtttcatttcctcagtttgatcccaaacttcttcgtttgccggccatcacagtttctcagaatatttctagctaccgagtaccaactgtggctagttgttggagtagagtgacacgtacgtaacgaacactaatctatatagtttcaacatgtcatgctaaaattagctaggcaactgatgaacaattatttgttcaacgtacgctttttcccaccacttctgacactagctaccacattttacaactcctacttttccctctgtgttaccgatatacactagcagaaaagagattaaatcctaggatgg

SEQ ID NO: 192506 - DNA, 378 bp, Zea Mays
cccagccgcatccccgccgcatgcgcccaagggaaaacccaagcctcattacgtcggaccataccgcatcacggaagtcatcaacgacgtaactgtgcgtctgcagcttccgctgggagcccatcttcacgatgtgttccatgtcggcgtgctcaagaagttcgtaggcaccccaccagccactactccaccgatgccccctacagtccatggtgcggttgtgccagagcccgcaagtgtcacgcaagctcgcctggcacgctgcattcgccaggtgcttgtccagtggaaagacgagcctgatacatcagcaacatgggaagacctcgacgattttcgcgccaggtacccagactttcagctcgaggacgagctgga

SEQ ID NO: 192507 - DNA, 511 bp, Zea Mays
tcgtctcaacgtttctctggctcaaaactactctgaagaagagacgacggcacctgcacattgggcctcagatgaccttgcatcaaattcagacaaatcaactgaattggtgaaaggatcttctttgctgaatgttcctattgaagtatccacagcagtaccagagatctatgagatagaagctgccgaggaggataaatcaaacgctgctccatcatttgtcaacaagctatatcaaatgtttaatagtaaaccaaaagatacagaagcttctgccccacttccctccaagctgaacgacccttcagatattgccgaagaaacactgtcaaccagctctgaagctcctgagaagcaggatcatgatgtcagtgcaactatgacctttgatgagctactaaaggccttcggttctcagcatgaagggaaagaaatgcctgaaaatttgtctggtggagttgttcttgatcaagtttatgctgttgcaccgagtgacctgaacacacttctt

SEQ ID NO: 192508 - DNA, 315 bp, Zea Mays
ccggtttaacaggcggcaagcggacaacaatatctccatagcaataatcataatctggatggacatccagttcatatacactcacaatttcgttacatgcgatctcctttggctcctctggatgtagaggaggcttaaaccatgacacagttgctgttcggtccttagcattaacacctctaacaagacccacacgccttggttcagaagaatcatcaacaccaacatcatttgtgactttatccacaacatactgctccgggaagaattcatgttcatttggactgtggatagggatcaatgctgttgcggcta

SEQ ID NO: 192509 - DNA, 344 bp, Zea Mays
gcagaaccaaccgcctccgtttgccgcagactcccatagaagaaggtcggtgtggaggaggatcactccgttggagcctgcgctgaaggcagacacttcaaggatgtttgctgcaggcgactctcaaagaagcctacacaacaagaagaaaagacgacgctccaaacggggcaaaggatcgttggggtttggtgctggtccaggctctatgtccccggtttcctctgatactgctgacgcctccaggaaggtccataggtcggcgctgaggtctggaggacaaatggagatattcaagaagtcattgccttcttgtgtgttggaattcaccactgagatggcgc

SEQ ID NO: 192510 - DNA, 363 bp, Zea Mays
ttgagagcagttaaaacaaaccaatttttcctgcaagagctctacgtgctatggagacagcaaatacattttcctttggttcacttcaattttgacgtacataatcttttattttcattgccaacattgttttcttgattttctgcctttatatcttcttgattaaaactttttgatcgataattctagttctagacaaaatatgaagctagttattttcctatgaactgaatgtttattctgatacccaaagacctcccttcaaacatagtctgtcttaaactattccactttattcatgcatgttgcttgtgctcagacagtactattgccatgaagcaaagtctgtcttaaattattcca

SEQ ID NO: 192511 - DNA, 726 bp, Zea Mays
gtcttgttgcgttggcaaactgcacaactgcgcacgaactcacgtacccggtggagtgcttttggactgtaaaaagatgttctccacctctgaactgccttttgcacgccttcatggccagattcatgagcttgggcaagaagtacagaccataatgacgatgcctctggaatgaatactttgcccttgaaccgtagcagaccatccgttgtagtccaacctagactagcagtgtcgtcagccaactgcttgcagattgcagccacctgtggatcagattcaacttctgcctttaaagtagcaaataaatcaaaggaaggcgaggagatggtgtacatagttcccatatcctcatcccgacgggatagcgcatccgttgcgccattgagtgtgcctggccggtattccaccgtgatgtcatatccaaaaagcttgttgacccacatgtgttgaggaatcgttgatcaagcaagaacttcaagctataatggtcagtccggactgtgaatggtcgaccccatacatatggtctccaatgccgaactgctttgaccaatccaatcaattccctctcataggctggcagtttctgatgatggcgagacacaggcctgctgaaaaatgctatggctccatccctttggtgtagaactgccccaaatcctgagcccgacgcatcacaatcaatgaagaatcttttggtgaaatcgggtaactgaagaagtg

SEQ ID NO: 192512 - DNA, 355 bp, Zea Mays
ctaaatgcatgcatatagaagctttctcttcatttggtcatatattcttcaaggcctgaaatattagagagttacatagctaaatgtactacatgctacgtgaaatggtacatttaagtagagtgcaccccaataggctttacattgcacttgcgtaagttttctccttttcaccagcacctaatttaccacaggtggaacaaataggtaatcttcaagatgaaagacaagatcgctacacaatgcacacaatagctcaggctcatgtgtgtgttgcatcccacagtctcatgcgcatgtttacttacagaagttcatgaaaagacacgtgcacttgtaagttgtaaccaccttg

SEQ ID NO: 192513 - DNA, 331 bp, Zea Mays
atgtttgtacgcagcgaggaatcgttggtatacagcttgtatgtatgcttagtctagtcttattattagttagaagtacaaagaatcattaaaatatagaaaaccaatggtaaggtaatcagatgcataaaaacgacatagaaacgtttgcaagctgtcatttttgtgcgtgaaagttgcctagatatctcagcacgtcaccagtaatgctcgaaagtcaatacaagtaaagaatgttaaaccctataccagacccgtgcttgctatttccaagaaatgcagacaacagctgtgtttcttccaaaccattccaaactgtctcagatgaaag

SEQ ID NO: 192514 - DNA, 396 bp, Zea Mays
tggtctagtgttgcaaatgacgaacttcgacaagcagttcatcatggactacaacgcatcaggtgtaggtttcagcatcgtcctacactgggggcagagcccttggccttcttcagtcgagccctcgccgcacgccaccacaagctagtggcgtacgaacgcgaactcatcagcctagtccaggttgtacaggactagcgaccatatctttggggccatcgactccttatccacactaaccacaacagccttaagttggtcctcgaccaactaatgtccactatgccctagcaccagtggatcaacaacttgttcagcttcaactttgcgatgtagcaccgcctaaggcgcctcaactcgacagttgacgtcatgtcccatcgtgactctaactca

SEQ ID NO: 192515 - DNA, 369 bp, Zea Mays
tccccgtgcgacggcactcggcgagctcgaacaagggggcggaccgcagtggtggcccgaaccgtagattcagcatctccttgaaacgctcccatgttggcgtgccatgctcatcctcctggagttgcatgtaccacagttgtgccacgtcctccaggttataggaggccatccacacccgttcttcggccatgatgcgttgttgacggaaatatgattcgcatttgttgatgaagagcatcggatcggacttgccatcaaagcgggggaaatccaatttctggaatcgtgggggacgatcagtgtggggttcgcctaagggcggcctgctgttgttggaagacgtcgtctgctgggccaccagatctg

SEQ ID NO: 192516 - DNA, 356 bp, Zea Mays
tagacatgttttcagccttgctcgagatggcaaatacacagcaaaagcaacatataaaggtctgttcttaggatctgctacctttgatcactacaaaagaatctagagatcttgggccccctcaaagtgccttttttcatgtggctgtggcacacaacaaatgttggactgctgatcgtttggccaaaaggggactgaatcaccctcacaggtgtcctctttgtgaccaagaggatgaaaccctgaaccacttccttatttcctgcattttcacaagaattttctggtatatgctcttaaggaaatttggtttacacgcactggctccgcagcctggcctcacatccttcttggag

SEQ ID NO: 192517 - DNA, 653 bp, Zea Mays
tagcctctaaggcagggctcaggcacttaacttgaaataattcggacagttccgccacaacaaaaggtcattagctagcccaataacgtcttcatccactagttgtactctaataccctctcgtgcgaatacaatgccctcaatatcatagaaacactatttttagtttcaaaggcatacctaaattgtgtttatgtccactcaagtaaaacaccacacatcaatatgacacatcatttctcaaaataaaataaagactatggaaaatttagccaaattgagagagagaactatccaaacatatgttaaggttgtaaggcacctttttccactaggctagctaatgaccttttgtgatacctgggctagctaatgaccttttgtgatacctggtttccaataatcccctctattcaagggatacctagattgtgtttatgtccactcaagtaaaacaccacacatcaatatgacacatcatttctcaaaataaaataaagactatggaaaatttagccaaattgcgtgagtgaactgtccaaacataggttaaggttgtaaggcacctttttccaccatacagttgataaaaagttgtaatataaagaattcaaaacaataggtcaccttttaaacctcaaatgacgtttcta

SEQ ID NO: 192518 - DNA, 623 bp, Zea Mays
gcgaaccgtacagcatcaacagatacaaatcctgaagcggaggcccaacttccacgccgtagcacgcggcccatgaagcccaacccaagatatgccggcggactgaagtagagtatatgtaatctgttagctgggagagagatttttatgcattttgtaaaacctgaactgagaagtaaactccagcttcgctgtcctatccttctctgttctccactttcccttcctccttcccccagagctaacaattggtatcaaagacctcatcgatccctccccgatggcgtcaaccacaccctccccgatcgatcccaacctcatagcagcgatcggcgcggagttcgacaagcggatctcatcgctggacaccaaatgggagcaacgcttctctgcgctggagaagtccgtcgcgggctgcaacgctgggttcacaacgttcaccgaggaaatctccagcgacttcaccaaccaaatcgttctctccgagtcaacaacttccgcatccatcacccgcacagagcagaccatctacgagcacatcgaccgcgtggaagggtctctagccacatggctcggtggcctggaatccgccatgcacgcgttcgacgattggcgcccccgga

SEQ ID NO: 192519 - DNA, 345 bp, Zea Mays
atatatggctaggttcatcatcaaattggttctcttttaccaagtgatggctcatctctcaaatttttataactttaaatataagatactgcaaatgaggtagaaaatagattgaaatgcctcagttcatctccttttctctgtaatgtatcagaatttgttctctaaggcaacttcacaagggaaattattggtctcctttcaccatgaggtccacttctgaaagactgaaaggtatgttgcaccatgttaatctgacacaagaaaaattgttaatgaaagaaagggatgggcaagagttctagatcttcaattatttctggttgattgaaaacagatacttgt

SEQ ID NO: 192520 - DNA, 539 bp, Zea Mays
catcctccagtaatttgtcaactgtccatatgggtggactaacatgtataactcagccgacagaactggggtctgaggatactgttatcgcacaatttttgaggtacacatgttttgactatcttttacagatgtgtcattcttttttctgttgcttgttttggactgattatattcttgcgccttccatagtaatcctgcccaagttggaccaagcgagtctcctgtcctatttagtggaacagttggtgctgcatctacattttctccattggcatctaatgaccttcctgttagtgtaaacgactgtctcaaccaatgtatttttcctgttgacctcatgactatgttgccatatattatcttctaagacctttctaaccttctgccaggaaataagtgctatggtgccccctccatcaacatctgctgatcgtctgggatctattttacctgaacctttgaatactggggatgctttggagagatacaaacaggttgctcagaaggtactgatattttggctcgtgcttagagat

SEQ ID NO: 192521 - DNA, 708 bp, Zea Mays
cccgcctgttggttgcagcaccagcagcggtgacagagaattcttttcggcgcatattccccggttacatgattcggctcgcttgcttgggctctcgctcttctctgcttttctagaattgtggctcgtccgacctcggtgggtgcaaccgatcctttttcgttcccatgggtgctgttatgaccccaatgattggctggtctcctctcgattatatgctgcttgtgctagagctcagggttttcctgatccttgagggctgtgcgggcatacctggtctctccgaattgtccagttttttggtgtctgtccgccgggttcttgagctggcttggggatctgtagctttgagagcttcatcggggaattcctgcggcttgggggggttcttgcggttgtgttgagtggcctttcttgtggaagtgcaggtattgagctcaggctgctgaattcatggtcctcatttacctcaaaattcttgaacctttttaattaaaattcttgattttttatgtgggtgctcggggaaaccatccccacttctcaacctgggctcataattcttgcttaatttcttgaattcagcgtttcttggtggtgcttgattattgccgtctgatattgcacagtcctgagtttctagttgcttcgtcagcaaccggtagaggtgtcttttttgcgggatgatagaattgagcttgattgcgg

SEQ ID NO: 192522 - DNA, 346 bp, Zea Mays
aacggtccttgtgaaacctaaagtgaagccaaggaagaagcgattgatggtggacatatacaagactgctcttccatgcacacttgaggatcttgatcagaggaatggcactaattgggcagttgagttgtctatgtctccagtgagcagagaggtttgcactgagaaccgaagcccagaaatggtatcatttgacagaagagatgatgaaagagaaggagatgtctatgttgattctaacggcataaaaattagaattttgtccaagtgtaatgatgtacctttggtgttgagggatgaccttggttcgaggaaagttgcgaagcatggaactggaaaaggtata

SEQ ID NO: 192523 - DNA, 553 bp, Zea Mays
ctgtcgccagcaccatccaactccgcgtgcacgtggggtcggaggccttcaccgcgctcgtcgacaccggctccacacacagcttcatcggggagaccgcggcccagcgcgcagggatgcccgttcagacgcgccctcgcctaacagccacagtggccaacggggagcgcatctcttgcccgggcgtccttcgtcaggcaccggtcgtcatcgatgggctggaattccgcgtcgacctctacgtcatgcccttggcgggctatgatatcgttctcggcaccaactggatggccccattgggggacatcgtctggaacgtcgcggcaggcaccatggccttcaaacatgcagggcaggacgtcagctggcgcggcacggcgcctccgcccactctccgccttcatgcggccactccagtgaccgaacccctcctcgatgagctgctggacgccttcgaggacgtcttcgcggcaccgtccggtctgccgccggcccgggggcgcgcacaccacatcaccctcaagcccggctcggcccccgtggcagtcaggcc

SEQ ID NO: 192524 - DNA, 593 bp, Zea Mays
ctactctataactacctccattcccgcactagcacaagcttcctccttcccacatgggcaccgtctcctccttccccaattgcaagctccattcgcgctcctcgtcctccgctgcctccagcctagtcccatctctgctcgattggagaggtttgggccatgcttcctcctcgcgcgccacgttctcgacggaatttctcgtctacacaggagccaaggaacgctagaattagacgcttcccggggtcccttttagttcccctctaacgaatcataggtttgcagtttggtgtggacgtatcctgtgatttgtggatggttttggtgtagagtttagagagatcaagaacttccaacttggggtttcctgtagccttttttagctgttctggggcttttatgggagtgcccgtcgcgcagaagtccgattcttgggtgactgtgcttgcgatgacggacagcggcggcctcggcgttcggcctattaacggaggccgagggagtgccgtggagcagcgtgggctcggactcggagacaacgggcctccagtgtccccaccagagcgtgtttctacgccgcctgcgccgagact

SEQ ID NO: 192525 - DNA, 533 bp, Zea Mays
ttttgatccgggagatgagtataacaaggatgaaacatcgaatggccatggtgttgagcaaggcaactggagtgcattccaaaatttcttgttgagagcagaagaaaaaacaagatctagtgatgcagacctgtttgctggtgagaaagaacccccatcacggagaaaacagaatgtaaacacagcagatcctattattttagttgagagagatggtggcaacgtctgtgagcagaacaaaataggttttgattcagccaatgggaggactagagttatccgggtcatgtccaatgatgaacttgttatgtctggagaagggagaatctatatggattgtgaaatgaaggagattgaagctggtggaggaaggtacaggagagggacaggtgacgactacatggtttatggtcagggatgtcagatagacagacattgtttgttggatcctcttgcagaggcccagtacaagaatcctgttcagcaggacaataataggaatggtgttacggatgagtcctttatgattcctc

SEQ ID NO: 192526 - DNA, 1098 bp, Zea Mays
gcttggtagttgaagatccttaataatatgtaggaaatcgttccaatttgatctgacctgatgttaaaataaacaagaaatgtcatatggataaaaatacatgtatgttacccaattaggagacagataagcacacatatagagttacagaccaaaaaatatcatgccactcatggaacccagtaggggtaaaaatcttgatgagcagtcttttattaatctcaatatgttacagtatcagtccaacaaatctcaacaataaacgtctatatacgacgagtttgtcccttcagaaacacttttcaaaaagaaagatgtaagccccccacccccaccccaaaaaaagatctagaaacctttttgctacatcaaaattcatccagcgcaccaacaaaaatgaggatttgggtaagcattaaacaagggggtggtttaaaaaactggccaaacttcttaccattaactggagggtattttctgaaagttgctttatgttcttccagaatgaaacagcacgaaggtaccattttctgaacaaaaatgtcactgctgctttaaatgactccttagcagataaagggtggtgtacagaaccctctccggctgccttcaaatctggtaagcctggaatagtcgtggtaacagttgtgtcagctgtattctctgattgaggttcaaattctttgtctcctttccaagttctaaacattagcttactcctcctagctccagggccaacccaggttgaccaaaatttagatgccaaaatgttgaacttatcaccattaacctctaaaattttctcagctgaacgtcccaggttctggagatccatgatgtaagaagcacctctgctggaccataatcccccactgataatctacaactcatagcaaggtttaaaattgatgccaatagaatagaaacaggaatcatcaaacaaaagcaagaagaataaaacatacataatggagtttcagagtagcaacaaattcaagattaagaacaaaagcaaagagcaacctgtcattaatactaccttgatttggacaagttgtgcttctccaaattcaattccagaaaattcacttgagcaac

SEQ ID NO: 192527 - DNA, 323 bp, Zea Mays
tggtggtggagctgtcgtgttacgaggtttcttccagagcttgaggccaacgaagcaaggtcttgccctcaatgttgacctctcgcttacagcgttccatgaaaatacgggcataatcgcatacttgcagaagcgctgtgactttatgaaggacctttcgcaggtgaagactagggcattggcggtagatgagaggagggaggtggagaaagcattgaagaacatccgagttttcgtgtgccaccgtgaaactgaccaaaggtaccatgtgcatggcctgaccgaggagacaacggagaacctcaagttccgagaccgcagcg

SEQ ID NO: 192528 - DNA, 478 bp, Zea Mays
cgcacgctggacgcgacggagccggcgttggaggtcaccgtcttgaggcaggacgatatgatccgcagcgaactcggcagcaacccattccttgcccccttcccccgcctcatccctccccgccgctccctcacctcctctccctgccccagcccggagaccagcacaagcacccgctccgagtccaacttccccgccgccaccgctcctacaacccccgccccgcaatcccgccgctgcccatccacgatcgccgcctccggggctggcgaaagccagtaccatccgagtgccgccgcccctcactgcctccgatccccgctgccgccgcaatccgcagactcagctggccaccatatccctcctcccctcgcacacctcttcctcgccgctcgtcgtcccttcccctccgacgccgaccagaaccgaaattcaacaactccctgggccctggcttccttcacccttttcccttctc

SEQ ID NO: 192529 - DNA, 623 bp, Zea Mays
ctggtagattgcttgaaccttttattgttttgttatttgactacatgtcaacatcaatcatagaaatgcatactatgcattgttgggaaggatcagaattaacagagagtgaatgtaagcataaactgaaaagtaaatataaatgcttcaagtgcagatcataatacatgagagtgctatattctggagttaatgggatcagcatactagaaaaactgtttatgtttttgtgattctgtatatgttaattccagtatgattttacatctgcacatatatgaatttttagatgattcatgtgcttatatgcactgctcgctcatgaacttgggacaatgagaagcaattgcttgttagcgttggaaagttttgtatgtggggctcttgcctaaaaacagagaggggacacaataagagggctatattaggtcatgcttgacatataagtagtaaaattgactgatgtttagaaaaagaaaaaaagaatagagaataagagcctatcgcccactttgacctagagaacgcccaacatgtttttcctttaccacattcaggctccatttgcaactcatcaatggtttctgattaccatggaaattggtctgttttggtgaaattcc

SEQ ID NO: 192530 - DNA, 352 bp, Zea Mays
tatttctatactcaaaatcaatttctaaatctctttttcctattttctttaattactggactgggcgcactattatcagaaactgcaggggctaacacgcaaaattgcccaagactcaggattcccacagacaggactgcgggttgaatagtttgaagtggagggtctctttaagaaaatacccggccgaagggggtacgggtgaacgcggaccgcccagattagatccgatggtgtagattagatctgggcgctttataaaccggtatgcaacgtcaaccgtacgattagagatccacggcccacgaatgcccacgatccaatctaccgcgagccacacgattaaaatctg

SEQ ID NO: 192531 - DNA, 298 bp, Zea Mays
ggaccactacgtggggttatggcctgttactgaacattatacttcaatgttcgagacatggcacttccctaacctgttgtaggatgttctgcatgcgttgcgaacctacgtcaaacccctgtatgagacaaggcgagtgtacgagcctccttgggcttggtactacatcactcacattcatgtcagggtgatggatgcaggtgatagagggttcaggactctgtcggctcatgagtctctaaagccgctatccacctatgctgcatcagtcaacgatgctgttaggcgaactctgtgg

SEQ ID NO: 192532 - DNA, 1259 bp, Zea Mays
tgctgaaatgcctcgtcgcggcaggacaggagcacgtgctcggccatgagctcgattggtacggcggcgacggcggccatcacgagcaccaccaccgcaacggggtcagtggtgggagtgccctgcgggatgcgctgtatagcctggccggtttggtcgggaagtggacctcggagggagtggtggctgccaaggagagaagggaggaaatggaggtgctacctagactgctcaagttcctcgacaacgtcgaggagttctacgactgcattggtggcatcatcgggtgagcattcctttgcttgtatgtgggagacttagtaaacgacgaagcacacatgttgccaaattctgatacctgccggaatcataagttagcaactgaaaaggtgcaaagtagtaaaaacatttacgagctacggcatcatatttaaaatgcagtcatacaagaaggtaagttgcatcatgttttgaaactacaaaccttccaagttccaacacatttggttaacattaactagatggacctaacaaaggatgcaattggtaacaccaattagtagtagtgggtcgtttaactagttcaatattatctcagacacattgctttgaaatctgaatgagttgaatcagatgagtttcgggtcgactcattgacccaaaaaaaaacaagacgtgcatccttagtcttaacttatccccttaagccattttttcggtttgtaatctgttatatctacaacagtattaaaagtattgatgttctttacttcctgtatctacttcagctatcaaattatggtattggagctcctttcagcctctaaggatcgcatgcaccgacctagcaaagacaagtttgttgatttccatgttcccagtggacttaatttattgaaggataaagaatatgcatctcaagcagctctgtggggaattgaggttatttcatatacgataattatctgaaatttatggcaaggatatcaacactggttattgttcttatttcaagtgcaaattacgttcttggttaaaaagaagtgcaaattacattgaataatgttgcacattaaataatgcatctgtattctgttgtaaggtacaaactgaaatacgatcttttctagggtctgccagaattaggtgaaatttacccaattggtggtgcgggtgatcgtcttggtttagtggactcagatactggtgagtcccttcctgctgcgttgctcccttactgtgggagatccctgttggaa

SEQ ID NO: 192533 - DNA, 1244 bp, Zea Mays
cgacgagttcccgtactacctcaggtctagtttcctcctccgctccgccctttcttcagacgtcgtcctcccatgcattctgctttctgcaccaacgcacggaaagaagctgctggctgcagcagcgacgcgcacgtcggttcagagttcccgtcatgcgacgagactctgccagagctgcagctgctgctccctcgtcgcctgcttgctctactttgaatctgtctgttgatgcgtctcccgtcccgtcaccttttcttaccctgtgatgtgatgtgcatgctacatgagatgactagaccagctgcgtgttctctgaaccagatagaaaaattagaagaactcgggctaaataaaaagtagtaggaaagaggtgtgtgtgatttccaggctcatggatcagcaacggaactctgctctggtcgctaccgatgaacaaacgatccttgtttccgatttctgcggtcgtaggataaagtgtcatgctccatttgcatgtcggtattggaggacaccaaatcagccatagtattgaaataaaatgcaaattcaattatgttgtttggaggtcactatattggagtttgaaattagatggtataattccacataatacagatgagtgaccctttgaattaggagagagagaatctagttatattccaattccacggaattgattttctgattccaaatctcaatttcatgtgcaagcaaacgacagaatttcatctatatccaaacggggcattagatttttagaggaaaaaacaagcagatctcgcaggtgcctgcctcgtgcaatcaaatggctgcaacgaaaggtggtgacagaaatcgtcctggtcggttctggatgagaatgcatgttctatggtatcagttcacagatgcttaaaaaactaaattggttgtgtctgatctgaccatgtatcaatgacgggatgcactgcatacagtgagttctgtttgtacgctcatcttcttgtccaattccggttcgcagtgagcaaacgcgtgttgtgctgaccagcgctgcgtacgttcacttgaaacaagcagagatttccaagtacaccaggaatcttgctcccgccagtcgtgcaatcctgctgtcaggtcccgcaggtacattgtcatcttccgcttgtattggcactcctctcagccaatttgtttctgcttcactgaactaagactcaatgtcctgtcttgaagagctctaccaacagatgctagccaga

SEQ ID NO: 192534 - DNA, 1207 bp, Zea Mays
aaaaagctctgtcagtttctagggaagaagacattcttgctgaggatgaaataagcaaatctgaaagaagagcaaaggaacgttatactcaaaatctggctgaggaaaacttgaaagcgatacgtgctttctcttctaagcttttggaagtactttgttctatattcttgatgtcttcgaatgatgctattggattattgcaggtatatcaagtaatttcctttgaaaagacttcttgaccatgttgctgtggttgagtcatcgagactcgagagatccattttcctatagctaaggacacgttaagcttttatatttttggtgacttatttgttttggcttctcgagttagtattcgaagagcatatttctctttgctagggttgttgattatagcttcatatcacactcccatcatatcctcaatgatgtcacttgaaattcgacagtgaaactcaatgatttctgtgtgctgattgatgaaactattcctgttggaaacaacttgtcatcaatacaattgttatgaccggcaaggtgtacaatagaaggcccaaggcccagtcggctataggagaaagccatggcgctgagccatagccgccgggttggtagggcgattagggttatctgagagtgaaaataggagaagatttagatagattaagtctaaggtggttgagtcagattagatgatgtattagggtgcctgtgctatataatgcacaggagatgattaataaagatcagaggagaattaatctaagaaaaggattatttccccctctcacctacaccagccagccgccgtgcccagcacggtgccaccagttcgccgccaccgatccaactggccgcgccccctctctcctcacccctagcacctcaggccaaggcgtggtcatcccaacaataaaggaagtttaacattttgtggattgaaattacagttctctttgtgtgggtctattaattgaattgatgattgcaattcagttatgtacttaattagttaattttcatattttccctctttattgtagcctgcgataagtgagatagcttccatatcagacaaaaacgttgttgggaaattcttccttgatgcaataagaaagttgttggatgctacaaaggctgttaatgcagagcctgtggatgatagttcaatggaaattgaagccgattccaacaaaaatagcatgaa

SEQ ID NO: 192535 - DNA, 675 bp, Zea Mays
cctcgtaaccgacggggtaggcttggtcattggctagctagaacaaggagggtagtaggcgacaattgtgtaggcagccgttggtgatggttcctgccttgctcttatgtccttgtccataccccatgtgcccctattatgtgctggccatcatggatgagccgaagctcaaggtgttgtctcgtatggcaccttgtctctcccaagagtgtcacttgtcttctcgactctccgactagcccttgcttatgctcattgtgcctcctttagttggaaccctttctttccacgctacccattggtccgtccttgccagccatgcactctatggcttgtgctcgctagcttcatgccctagctgcacttgcacgctggctctacgctcgtgcctatttaccggctccatgttgcatgtcgctccatttgaccatgctgctgtggagcaggagggccttttcggctcaagctgaagtctaccgcccaacaggaagcctgttgcagtcggagcagccgtgcagccgcttgtctgttggatgcgtgtagtttgccgtcagtccgccactagagcaataggcttgccatggagtcgccgccatttcggccgtgctgctacacagctccgccgctaggcagcatgattcacgctggattcgctcttttggtggtcccacacgc

SEQ ID NO: 192536 - DNA, 1200 bp, Zea Mays
ctgtaactacaaagtgtcatgtggggccggcagtacagccggcgccaaagacaccaagaagaggccagcacaggtggccagggcgccaagggacaggaggtgaccgaagggccataagtgtgaaagtctagatcattatggggtgtgaacatgagtttagcaggaagtttgaaagcctagaccattatgtggtctgaacatgagtcttggagactaacagccagcaggctctatctcctatatatatatgtaagcagtatgcaaggagggatcaagaaagaagtattatctaaacctctcacctgttctagccttcaatctcatcccccttgcttcggtgaccaggaaacagccctggcaccacatctacccaactacgaactacgtagtcagggacctcccagcttagggaccgaggcccttgacaacttggtatcaagatcccggcgatcctcttccacctccgaccaccactccactgctaacactccttcctctccaagttcatcatcagcgacacccatggctaatcccaccaacgccgacctggccaatctcatcgcacagctgaccaccagcctgaccaccctccaggccgaagtgggggagctgcgccgtgagcgcggtaccattccgtcgggctcgaggttcactgaccatcagggtgaacgacctccgcgttttcagaagttggattttccaaaatttgatggcaagtctgatccgctggccttcctcaaccgatgcgaatcctattttcatcaacagcggattgccgcagaggaacaagtctggatggcttcatataatctagaaggcggcgcccagatgtggtacatccagatccagaacgagggaggaacaccgtcctggcgccagttttcagaactcctcaacctccgttttgggccgcccatccgctccaaccctctcggcgagctcatggcctgcaaacggaccgggactgtcgctgagtaccaggatcgttttgaggccttactgccccgtgtcggcgcgctcacggaggaccagaaggtgcaggcgttcaccgcagggcttcagccgccgctcagcctcgacgttgagatgcataatcctcagtctctcgtcatcgccatgagcatggcccgcaaactagagttgcgtgaacagtacatcgcgcatgctgcgcagccgccggcgaaccccccgcttgggcgg

SEQ ID NO: 192537 - DNA, 441 bp, Zea Mays
agagaaaagagttagtgtgcttatgcataagaaaagaacaaatgcacaaagtcctattgcacagtttccaagaaatattggttcatgaataattgtaccgaatgattgtgtgaaggaattaacagtagtcttacagaacttccaactgagtcaggttcccaatgaaatcaggtatttttcctgtgaagtcgttgtccgatgcccagctgcatgcacaagaaaatacattacgctaagtgtgtgatgttacattggaaataacttgttgctgctgtattgagcctacaggatcttcaagttcttaagcttcgagaatgttgaagggaatggaccactgaagccagagctgtcaaaatatctgcaaaagtaattgacttaaattttaaatcttacagaagtgaagtttggcaattcgctgcggcaatggcgaaacggtggcgg

SEQ ID NO: 192538 - DNA, 541 bp, Zea Mays
atttcctaccgacctattattcaccatacaaacgcagttacacgccgcctactagtttctaacataatcctcatatagctcgtaattcaaactactcactaacaataaatcacacacgacaactaccacatcgaccggttaatttatttggatcccacccgtctagcgtaccactagtatcccgcattttgactcgacttataattatagaggaagcaacggctaccttggcatgccatcacccctctacttaagccaaaacaatttctacctattctaaccgaacttgcgtggcgagcacatcttatattgccctgtctcgcatacaaccatgtgggggcgtgcactcgagacacatcgatcaatgtggcgcgactactaatatatgaactccgatattcatgttttaataattcatcctctacgcaactagcattttctaactactcgtcacaacaataaatatgctccctatataatcatgaatcccatcacattgcataaaacaatcacactttacgcataaccacatatcgatgca

SEQ ID NO: 192539 - DNA, 511 bp, Zea Mays
tgcaggttggacaaggaacttatagcagtgtctacaaagcccgagatcttaaaactgacaagtttgtcgcactaaaaaaggtgcgttttgtcaatgtggatcctgagagcgtgcgctttatggctagagagattcttattctacggaaactcaatcatccaaacatcatcaagttggaagggatcgtaacatcttcggtttcacgaagcctgtatcttgtatttgagtacatggaacatgatcttgttggtcttgctgcgactcctggccttaagtttactgagccacaggtgatttttatattatcctatttcatctgaaaaggtgacatggacttaaatgttttcacatgaatccaggtcaaatgtttatttcagcagttacttagtggcctcgatcattgccatagcaatggagtgctgcatcgggacctaaagtgttccaacctcttgattgataacaatggtgttctgaagattgcggactttggtctagcaacctcatttgatcc

SEQ ID NO: 192540 - DNA, 440 bp, Zea Mays
atggatcatctagtgctgcaccatcaaggactgattctcaatccccgcgcccatccaatagcatacatgtaaatccaaaatatttggaagcgagacaacaactcaatcaaccaactaaggcaagaaaatttttctcaagttatcttgatacacctgttcactcttttgactcctgggacaaatatgtaccatgtgtagcattgtagctgccactttgttcttttgcaccccatttgattgtttctgatgctgttttcccttacttcggacaggggatacttggaagtggtgctaagacaactgtaattgctgatacaggcggtgatattgagaggcctaataggctaggtactgatagaaatgcggggagacgattagatgcttctaatgctagacctgtaagttctctgctatatcttggctcttttgacatctctttt
